United States Patent Application Publication US 2004/0123343 A1 - sequence listing, part 4

SEQ ID NO: 8785 - DNA, 1791 bp, Oryza sativa
  Clone ID: PAT_MRT4530_15262C.1
tcgctcgtcgccgctggaatgatcggcggcgtgggccgcagcaggcggcgtggccgtgcgccgccagttctgccctcgagcgccgccgcccgccgcgccgagcactccgtctcttgctggtactgtgactgcaaaatatattccttcaatgacatcatatttaatttgggatgggatacatgagagcatggttttctgcaggggtttatttctctgttgttgctttagttggaatatcagtgatgctattgtgggactcaattggtgcagtttatttcagtggtcggtcatttagtacctggctacaaaatctactggcttccagctttggcatatcaataatggacatcgcagcaatcatagcatcaacagttttttctattgcttttcacgaatttggacatgctgttgcagctgcaagcgagggcatacagattgagtatgttgcggtattcgtagctgcactttttcctggggcattaattgctctgaactgtgaccagctgcaaaatttacctcttttttctatgcttcggatttattgtgcagggatttggcataatgttatgttatgtggagtatgtgtcatcatggcattattactacctgtggtgctgtatcctctctttgtgactggtggtcttatgattacaggagtcccagaagcatctcctctgtcaggatacttgtctgctcacaattttatcctttctgtggatggattgaacataacaagagctgatgaatggatgaaaatgcttactcaggacaatgtagtacaaataagcagccgtgatctccttgaaggctctgaaggctatcgtgccactggttctagaaagggttactgtgttcccaactcatggatggatgcaagcaagaatctttggcagataaatgacaagctatcttgcccagatgatctggtagcctttcaaagaatgagtgagaaaggtattggcaagaaggaagttgaagacaaatattgtttgattgcaaaagatgttgtcaagcttaaaaaatgtggaaatggatggcggggggccgaagatggcagaagcaactttgcatgtttggagggaacttttgtttatgcgggtgatctgttatcagcagcacattctattaagttatcctcttaccgacctcgatggcctctcttgcttttcattgcagatgttcctcgtatcttgcaagatggtttaagttgtttatttcgtgtgtctgcagcattggctgtagtcaattgcttaccagtgtactttcttgacggggaagcgattttggagactatgttaagctacttttcttggtttactcggagacagcagcgcaatattcttaagagaacaaatcgtcattgcaggcatatctttctgatcaactagtccattgttttgttctcaagaaccctgtattccatgacactatattatggctttgtataactcctttatatggaaatgtctcttttttttttttgagtttatcttatcataataccatagatctgatcaactgtatgagatcatacacaatactggtaatatgtaagacggatgctctcctggtctcctgacaaaattgcaggccagcattgttacagaacaaagtggccttaactttagtgagtttatgattaaaatttagacaattcccgagccctcatgcttgtagaatattttgacccaagatatgagtgggtttgtgggtatgcacctcactgttgtaagttaaaacgggaatatcaaatttcaattgatctcaaaaaaaaaaaaaaaaaaaaacaaa

SEQ ID NO: 8786 - DNA, 1961 bp, Oryza sativa
  unsure (1)..(1961): unsure at all n locations
  Clone ID: PAT_MRT4530_15263C.1
tcggttagcttctccatcgatcgatctctcctgtctgggccgcgggggctctccggcgcacggtgccctctcgtgcctcggagaccccgatccgccgccgncgacgncgccgacgtgcctgagtagtacagtcttgttgtcgaggtgaggtgagtggtgggaggagaaatggacaccgggatgagggtggcgctgcaccggcaggtgtcgtcggggtcgctgaaggagagcggggagctccggcggcagtcgtcgctggagtctccccggacggggagggcggcgacgaggttcctgttcgggaggcagtcgtcgatggacccgaaccggcggcgcgggcggagccagagccccgtcggcctcgccgaggacctgaccgtgccggacaacctcgacgccaccatgcagctgctcttcctggcctgccacggcgacgcgtacatgggaagtcatcagaggaatctggccacacaattcgatatgatgggatgcgtccatcgctgaagaacaagctccggcgatatcagggccaccccgacgtcgtccgcgtgctgctcacctggaaggccaacatcgacgcccgcgaccggtggggcagcacggctgtagctgatgccaagtgttatggccacacggaggtgtacaatcttctcaaggctcgtggtgcaaagatcccgagaaacaggaggacaccgatgatggtgtcgaatcctggggacgtaccagagtacgaattgaaccctagtgagctccaattcaagaaaggggatgaggtggtcaagggcgtgtaccaagttgccaaatggaatggaaccaaggttcatgttaagatacttgatagagaatgctactgcgatcaggaagtcataaactctttcaggcatgagctgaccgtattggagaaggtccggcacccgaatgttgttcagttcgtcggagccgtcactcagaacatacctatgatgattatttctgaatacctcccaaatggtgatttatcaagctgtattccgaggaaaggaaagctacatggtcagaaggttctaaaatatggccttgagatcgccaggggcatgacttatcttcaccagtgcaagccagaccccatcatccactgcgacctaaagccaaaaaatatcttcctggatagtggaggccaactgaaaatcgcaggattcggtctgacgaggctgtcgaaaatctctcctggcagagtgaaactggccgatcatgagtccatggttgacagcttcagtcactacactgcacctgagctgtacagaaacgaaatattcgacgcaagcgtcgacgccttctcatttggtttcatcctctatgagatggttgaaggaacacacactgtacatgggaagtcatcagaggaatctggccacacaattcgatatgatgggatgcgtccatcgctgaagaacaagctcaggggatatcctccagatttcaaagcgctgatcgaagaatgctgggatactcagggaaatgacacgtgtgggctaagctgcatgaacgccttcttgtgtacatatcactgcgaagcaaatgcgtcactctctgtgaagaagaagcctgagctagcactcactcgtctggaggaggatgacacgacgtaccgacaaatttgtgcgggcgccgccgcggtccgcgcgatggaagaaggccgcggcggcgatccgccgtcgtcgtcgtcgtcggcggcggcggcggccggggtggcgattgggtacccattcctcgagcctcagcagggcgcccgcttacgccgacgcaggacgattagcccgttcaagaagtacttttcaaggggttttgcaatcggtatggaaatcgcgtttatagttttcggcaccatagtacatttccccgtctgggccaggatatttcttataatttccttatccatcttgccgttttctgccttttcgatcacgttccaggagtattga

SEQ ID NO: 8787 - DNA, 1051 bp, Oryza sativa
  unsure (1)..(1051): unsure at all n locations
  Clone ID: PAT_MRT4530_15264C.1
cccgcgtccggcggaaagcttctccatcgatcgatctctcctctctctcccgcgggggctctccggcgcacggtgccctctcgtgcctcggagaccccgatccgccgccgccgccgccgccgccgtgcctgagtagtacagtcttgttgtcgaggtgaggtgagtggtgggaggagaaatggacaccgggatgagggtggcgctgcaccggcaggtgtcgtcggggtcgctgaaggagagcggggagctccggcggcagtcgtcgctggagtctccccggacggggagggcggcgacgaggttcctgttcgggaggcagtcgtcgatggacccgaaccggcggcgcgggcggagccagagccccgtcggcctcgccgaggacctgaccgtgccggacaacctcgacgccaccatgcagctgctcttcctggcctgccacgggcgacgccgccggcgtcgaggccctgctccgcggcggcgtcgacgtcaacagcatcaacctcgacggccgcaccgcgctgcacatcgcctcctgcgagggccaccccgacgtcgtccgcgtgctgctcacctggaaggccaacatcgacgcccgcgaccggtggggcagcacggctgtagctgatgccaagtgttatggccacacggaggtgtacaatcttctcaaggctcgtggtgcaaagatcccgagaaacaggaggacaccgatgatggtgtcgaatcctggggacgtaccagagtacgaattgaaccctagtgagctccaattcaagaaaggggatganggtggtcaaggggcgtgtaccaagttgccaaatggaatggaaccaaggttcatgttaagatacttgatagagaatgctactgcgatcaggaagtcataaactctttcaggcatgagctgnaccgtattggagaaggtccggcacccgaatgtggttcagttcgtcggagccgtcactcagaacatacctatgatgattatttctgaatacctcccaaatggtgaattatcaagctgtatttcgaggaaaggaaagctacatggtca

SEQ ID NO: 8788 - DNA, 437 bp, Oryza sativa
  Clone ID: PAT_MRT4530_15265C.1
cccacgcgtgcggaacgcgtgacggatcatacactccgctctgatggcatgggctgctgctgctactgcctcggcaccgccgatgactcctgcttcgccaagccctgtaggcgtcatccgcacgggcctggcctgactgggctatgtcctgccttgtactggccacccaaaggggaggccgacttggctgctgctattcaacacgccgtcggcgcaggagttacccacctcgacacctgcgacatgtacgatccgcacaccaacgagctcatggtgcgcaaggctctacaggacgcagtgagggacaaggaggaggtgaccacgaagctgcccgactacatcgccaacaggaaggtggagatccgctgctacccggggtacttaccttcggctggcgagagcagactacggctgctagggacagatagcataaacct

SEQ ID NO: 8789 - DNA, 663 bp, Oryza sativa
  Clone ID: PAT_MRT4530_15266C.1
agattcggtctgacgaggctgtcgaaaatctctcctggcagagtgaaactggccgatcatgagtccatggttgacagcttcagtcactacactgcacttgagctgtacagaaacgaaatattcgacgcaagcgtcgacgccttctcatttggtttcatcctctatgagatggttgaaggaacacaccactgtacatgggaagtcatcagaggaatctggccacacaattcgatatgatgggatgcgtccatcgctgaagaacaagctcaggggatatcctccagatttcaaagcgctgatcgaagaatgctgggatactcagggtatagcaaggccaacattttcagagataatcatcaggctcgacaagatatacgcccagtgcatgaagcaagggacctggaaggactcgctaaagatttggaaatgacacgtgtgggctaagctgcatgaacgccttcttgtgtacatatcactgcgaagcaaatgcgtcactctctgtgaagaagaagcctgagctagcactcactcgtctggaggaggatgacacgacgtaccgacaaatttgtgtacgtgttgtaaaaggcccggcgaaaaaaaaagtacttgtaaaagatcaatttgagttaaattggaagtaacaaagcttaattattactacct

SEQ ID NO: 8790 - DNA, 2067 bp, Oryza sativa
  Clone ID: PAT_MRT4530_15267C.1
atggctgaattgttcgcatccatgagcgtgaaatgggcacttgacaagctctcgtccttgctgccagcaagcctgcaagtagcaacggcgccgtcgacgacaagcgagggcctggaagacctccggatgctggagaggacgatgcgcaggatccacgccacgctgcacgacgcggaggagcactggatcatcagggaggagtcggcgaaagtgcggctcacggagctcaaggaattggcctacgacgcggaggatgtggtggatgagtacgagtacgaggcgaaccgcgtcagtacggaggtgttcgagaggagccttaatacctgcaacggcaagcgtaagcaccggcgattgcctacgggcggaacgccggtctgcctgggaagaccatttttgcccgcctgcaaataccttttttctagtagtgaccatatggtaaatgacgagcactaccgcattaaacctggcgtagttccagttccaaagtactttgataccaagaacattacacaaaagatcatctcttcgctgacaaaggagagctccagtctatcagaactggctgatcttcaggaggtgctgggaaaaaaactacaggggaagagttttttacttgtcctagatgatgtatggactgaacgaagagatacatgggagttgttgtgcatgccattatttgcttcaagtgtatgtaggatcatggtaacgacccgcaatgaggcagtggcaaagttggtgcagacaatgcctttctactacctagactgcttaagttcagatgacagctggttattgttccaacaagctgcattttctgttgaccaacaagatgacaccccagcagacctggataagattggcaagaatattattgtacggaatgagttctttaggctcgaagcagatgatggatgcattgaaattccaccaaatgttaggtacctgtccattcattgtatatcgcgtgaaatgtcagttgcctcacattcactcagagccatcatagtgttgaacagagcatctgggtatatagaaaatccagaagcattgctcctcggttgtgagaagttgagagctcttgtcttttacgagaaggagttctttctaagcaaggcattggagggcttcatgggcagtgcaaaattactacgccatttacattgtgaatgcctgctagataaccggtacgatatttcttactacaggcttgagctacacggaattcacagcctaattaacctgcatactttgcctcaactatatatcggtcgtaacatttgtaacatgggagaactgaagagcttgaacaaaattaaggagttgacagtaagaggactggcagatttagatcgcaaggaggatgcaaaagaagcttggctacataataaaaagcaccttcagtccttacacttggacttcagtagagccattgatttggatgacagcccagattacagtgaaaacacgagatatgagagttccaaatatccctcttggttgggtgagccttccttctccaacttgacaacaataaagttcttgttctgtaaatctgagcgacttccaacgcttggtgagctaccgtccctccagtttctccatgtccgtgaaatgatgtttctgcaacacatccgacaggagttctgcagccatggccatggtttcaagggcttcccagcactgaagaaactgaaattcgtgcagatgcccgagtggtcagagtggtctggggtggatgatggtgcatttccgcgcttgcacaggctttccatcagatgtgcagataacatactgtctcttcctgtagcgccctttctgtccttggtttcttttcaagtgacagattgtcccaatatcactgcgattccagcatcgcccagcctacgtcaactacacatttgtagatctcttgagccacaaggcctgcctttgctcaggaaaatcaagtttagcagcgataatctgcagtactgtcatgggctttccggcttcacctcccttaaggaactgaatattacggaatgcccaaagctcttgcagcacagttgcattttctggatgatgtga

SEQ ID NO: 8791 - DNA, 303 bp, Oryza sativa
  Clone ID: PAT_MRT4530_15268C.1
accccccaggagagaaaggaggaaattatccagaaggagatgccccggcggagggccttgcctcttaaccgtggggccaccgccaccgccaccgccatgcctcccgccaacctttccatttccgccccctccgccgccgccgaaccaccgcccccgctttacctccgccgcctcccgctcatcgccgctgccgcgctcctcttcccctccactgcttcttctcccaagtcctcgtcggcggccacaacacgtacaccacacagcggcgcgagaccggaataggaggtttcaatggagggtgtg

SEQ ID NO: 8792 - DNA, 3825 bp, Oryza sativa
  Clone ID: PAT_MRT4530_15269C.1
atggcggcgccctcggcggcggcggcgtgggtggactgggccgcggagtacaccaaggcggcccaggcggagtcgcgcccgcccgcggagtgggccgcgcgggtggcctccgtcgtcgccgccgccggggacgcgccgtggtcgcccgggctcgccgagatgctcgcccgcgcgctgctgtatggcggtggcggcgcggcgtggaagtacgccgaggcagcgctcgccgcgggcctcgcgtcgccggcgctgctcctcgcgatcctctccaccagggtcattcctcaccggttcacaaggccaactgcatatagactttatctggagctcttgcggagacatggattcaattttgcttttcagatgaaagcggcgaatttcaaaaagatcatgcaattaatagatgataaccttggtctctcaaagatatttggcttttcaacatgcgaaccaggggtttttgttgttgaatttaccctttgcatgttatggcagttggttgatgctgcattagatgacgaaggcctgttagagttgataccggataagaaagctcattggccaactagatcagatgatgtgagtgcatttgatggaactttctctgaacaaagaatagacaaaattgacaagttacagaagatgaataatgtgataactatagagctcattgggcatcttcttcatgacaaagtaattactcatatcctctcattggcacgcgaaaacatagaaaataaacattggttgcgtagaaaattccaccccatagtgacttctaaccctctatcttctccaaatggacggtgccttggagctagctattctgcacaatggattcctattgatatgtatcttgaggattgtctcgatggctcaattgctgcaacgaattccattgagactttaagtggattgatcaaggccctccaagcagttaatagagccacctggcatgatgctttcttggccctttggatagcatcacttcgccttgtacaaagggaaagagaaccaatagaaggtcctgtgcctcatctagacacacgggtatgcatgcttttgtctatcacaacacttgcgattgttgacataatcgaggaatcagattcagagatgaacagtaactggaaagaaaagagaacgagtgatgatctgcgcaaggaattgatgctaagtttacagacacttggtgattatgaaagtttgcttgtccctcctccatgtatcatctcggtagctaatcaggctgcttccaaagctgcaatgtttgtttcaagaaccaacattagcagtggatacatggaaaatgtcaatgacaggacaacaaattattctggaaacatgtggcatttgattgtggagtcatgtatctcaaggaacttgttggaaacatcagtttactattggcctggttatattaatggtcatgtcaattccataactcatgcactcccaagccaacttgctgcatggtcatctttcatgaagcgtgcgccattaactcagtcattggttaatgtgttggttgcaactcctgcaccaagcttagcagaggttcagaagttgtatgaagttgcagtcgatgggtcagatgaggacaaggtttctgctgccactattctatgtggtgccactttgctgcggggctggaattttcaggagcatacagttcggttagttgtcaaactactctcaagttctgatccaatcgatttttctggaggagagagccagttagtaaagcatggcccaatgctcaatgttattgtcactggaatatcacctgttgactatgttccaatcttctcattccatggcctaattccagagctggctgctgcactcatggcaatatgtgaagtttttgggtccctgtccccaagtgtttcctggtctccgagaacaggagaggaaatatctgctcacacagtcttttcaaatgcattcattctactattgaggctctggaagtttaaccatccaccacttgaatattgtgtaatgggagatggtgctccagttggttctcagcttactcctgagtatcttctgttattgcgaaattcccaagttgtatctatcagaagttcagcaaaaaacagaaatacccagaaacagttgccagttacttcaaacccatcgtctgagcatcctattttcatggattcatttccaaagttgaagttatggtaccgacaacaccaagcttgtctggcctcaactctctcgggatttgctcatggcacaccagtacataagaatgtagacagccttctcaatttgatgttcagaaaggccaacaaagaaagcacttctattggttctttgtctgggagtagcagcataagtaattcttcgggtcctggtgttgatgattcacatctttggcctcagttacctgcttgggagatactggaagctgttccatttgtggtggatgctgctctaactgcctgttcccatggaagactgtttccacgagaactggctacaggtctcaaagatctgactgattttctccctgcatctcttgcgacaatagtaagttacttttcagccgaagtaacacgaggtgtttggaaaccggcattcatgaatggaacagattggcctagccctgctgccaatctatctatggttgaagagcatataaaaaaaattgtagctgccactggcgttgatgttccgaggcttgtcacaggaggaagtactttgggtacacttccattgccattggctgcttttgtgagcctaaccattacatacaaacttgacaaggcatcagagcgtttccttaaccttgccgggccagctttagagaaccttgctgcaagctgcccatggccaagcatgccaatcgtcgcggcactgtggactcagaaggtgaagcggtggagtgatttcctagtgttctcggcttcacgcacggtgttccaccataacaacgacgcagttttccagctcctccgaagctgcttcaccgccacccttggaatgtcgtctaccacatcagtatgcagctgcggtggcattgccagccttcttggtcacggcttcggctctcattgctccggtggcctctccccagtcgcgccgggaatcctctatctccggatattccggtgcatcaaggactgctccatactcgcggaagatatactgcgcctcctcatgctctcggtgaaagacatagccgaaacaacggtgtcgaggcaccgatccgacaaggtcaggaagaccaagtacgtgatgagacatggccaggtatccctctcttccgccatgacgcaggtgaaggtggcggcgtcgctcggcgcgacgctggtgtggctctccggcggcacggcgctcgtccagtccctgttccaggagatgctgccgtcgtggttcctgtccgtgcaggacctggggcgaggcggcgcggcgagcgggggcacggtgtacaagctgggcggccacgcgctggcctacctcgccgtctacgccggcatgttcgcctggaggatcgacccgacgccggtgtcgcggcggcgggagcgggtgatgtggtcgcacttcgagttcctggcgagcgcgctggacggcaagatctccctcggctgcgacctctcgctgtggcgcgcctacgtctccgggttcctgggcctggtggtggagtgcacgccgtgctgggcgcacgaggtggacctgagggtgctcaggaggctcagcgccggcctccggcagtggaaggaggacgagctcgccgtcgcgctcctccgccgtgccggcccggaggccatggccgccgccgccgagctcatcatcggcggcgactggtga

SEQ ID NO: 8793 - DNA, 393 bp, Oryza sativa
  Clone ID: PAT_MRT4530_1526C.1
atggaggaggtcagaagggcgtcctccctctgtttggggcgcagcccccccttgggccccacttgggccgaggtcccagacgaagttacaggctttgctatcaccggcacgcccttgactgagattgatcaccgcaacctccaactcaatgcccaagccatgaatgctttgttcaactctttgagccaaaaggagttcgatagattggcggagatccatgaggtcacaagcgagtacaaggatgccaagcttcatttcctcaagatccaatatgagacattccccatgttgcctcataagagtgtgaatgacatgtatgggaggctcaatgtcattgtgaatgatctcaaggggcttggggcaaactacatgtcacaccctaaaaatcgttaa

SEQ ID NO: 8794 - DNA, 1737 bp, Oryza sativa
  Clone ID: PAT_MRT4530_15270C.1
atgggcaacaactgcgtcggccccagcgccgccggccagaacgggttcttcgccaacgtcgccctctggcgacccaggcccgccgacgcggctccccccgccctcccgccgccctcctccgcgccgtccgaccaggcgcccgagcccgtcacaatccccccatcggagcactcctcccaccactcctcccgctccaccgacccgtcgacccccacctccgccgcggagcagccggcgaacaaggcggcgcccaaggtcaagcgcgtccagagcgccgggctgctcgccgattccgtcctcaagcgcgacgtcaacaccgcccgcctcaaggatctatacacgatcgggaagaagctagggcaggggcagttcggcaccacctacctctgcgtcgagaaggccacaggtcgggagttcgcctgcaagtccatcgccaagaggaagctgctcacgcaggaggacgtcgaggacgtgcgccgcgagatccagatcatgcaccacctcgcgggccacgccaacgtcgtctccatcgtcggggcctacgaggacgccgtcgcggtgcagctcgtcatggagctctgcgccggcggggagctgttcgacaggatcatccagagggggcattactccgagaaggccgcggcgcagctcgcgcgggtgatcgtcggcgtcatcgaggcgtgccactccctcggcgtgatgcacagggatctcaagccggagaatttcctcttcatccaccagaaggaggattcgcctctcaaggccatcgatttcggcctctccatcttcttcaagccaggtgagacatttacggatgttgttggaagcccgtactatgttgcacctgaggttcttatgaaacattatggtcgtgaggttgacgtctggagtgctggtgtgataatctacattttgttgagtggggttcctccattttgggatgaaagtgagcaagggatatttgaacaagttttgaaaggtgatctggacttctcatctgagccttggcctaatatctcagagagcgcaaaggatttggtcagaaaaatgcttattcgtgatccaaaaaagagattgactgcccatgaagccctatgtcatccttgggtctgtgttgatggagttgctcctgacaagcctcttgattccgctgtcttgagtcggttaaaacaattttctgcaatgaacaaactaaagaaaatggcgcttagggttattgctgagagtttatcagaagaagaaattgcaggattaaaagagatgttcaaaatgctagacactgacaacagcggtcatattacactggaagaactaaaaacaggcttgcagagagttggtgctaatttgatggactcggaaattgatgctctaatggaggcagcagatattgacaacagcggaacaattgattatggagaattcattgctgcaactttgcatataaacaaagtagagaaggaggataagctgtttgcagctttctcatactttgataaagatggcagcggttacattactcaagatgagcttcaaaaggcatgtgaggaattcggtataggtgatacccgtattgaggatattattggagacattgatcaggacaatgatggacggatcgactacaatgagtttgtcgaaatgatgcagaagggaaataatgcaatgggtaaaatgggtcagcatagtaccggaaactttggcctcggggaagcgctaaaacttcggtgctgctaa

SEQ ID NO: 8795 - DNA, 370 bp, Oryza sativa
  Clone ID: PAT_MRT4530_15271C.1
ataaaaaaatttaatttaatatattatttatattcaaataaaaaaaaaatatttaccggatatcaatatgatatataaaacataatggttatatataaacggtaaaaaaaatttgctgttattaaccggcgggatataattatttactcgattaaacgaaagcactataattaacacccacatttaaattaaacaattttaatgcatcttgtatagccttctcaggatttctctcagcttgtatgaattgctttcagtattcctctttgaaatttgcttaccataaacgtagacaaaataaaaacgccaaaaaatttttttaaaaaaaattctttctcctaaaaaaaaaaattttttctaacatggaaaa

SEQ ID NO: 8796 - DNA, 1478 bp, Oryza sativa
  unsure (1)..(1478): unsure at all n locations
  Clone ID: PAT_MRT4530_15272C.1
gcacgaggctcctccacctcgccaccaccaccctccactccctcgtcgtgacaggccggacccaggcgncgatgatggacgccaccggaccaccgccgccgccgaccgcagtaggctccgacgtcgacggcggcaccggctccggcggcgcgaggacgacgaccttcttcggactgtccacgtccgccttggtggcggcgggggcggcagcgctggtcctcgtcgtcgtcctcgtggcggccggcaccgccaggctctgcgcgcggcggcggcggggcgcgaagcacctgtcgatgtcgcgcgtcgagcacgcgccctcctccggctcgctccgccaggcgtcgtcgtcgtccgctcccaaggagaaggaccacgcggaggccggggcgggcaccggcaccggcacgagctcctccgacgtggccagctcgtcggccgcggccagctacctggagtcgccggtgaggcggaagccggagaggatcagctgcgccgcggcgatggacatgggctgggggcggtggtacgacctggaggagctggaggcggcgaccggcggcttcagcgaggagaacgtggtcggcgagggaggctacggcacagtctaccgcggcgtgctcgccggcggcgaggtggtcgctgtcaagaacttgctcgatcacaagggtcaagcagagaaggaattcaaggtggaggtagaggcgatcggcaaggtgaggcacaagcatctggttggtctcgttggttactgcgcggaagggcccaaacggatgctcgtgtacgagttcgtcgagaacggcaacctggagcagtggctgcacggcgacgttggcccggtcagcccgctgacatgggacattcggatgaagatcgccgtcggaacggccaaaggaatagcgtacctgcacgaaggcctggagcccaaagttgtgcaccgagacatcaagtcgagcaacatcctcctggacaagaagtggaaccccaaggtatccgacttcgggatggccaaggtgctcggctccggatccagctacgtgaccacccgtgtcatgggcacgttcggctatgtcgcgcctgagtacgcttcgacgggcatgctgaacgagagcagcgacatctacagcttcggcgtgctgctgatggagctcatctccgggaagagacccgtggactacagcaagtctgtcggcgaggtgaacttggtggagtggttcaaggggatggtggggagcaggcgggtggagcagctggtcgacccgcggatcgaggatccgccgggggcgagggcgctgaacagggtgctgctggtgtgcctccgttgcatcgactccgacgcgcacaagcggcccaagatggggcagatcgtgcacatgctcgaaggcgacgagttccccttccgcacgctgcggtggcttctcgcagaatcaaaagttttctcagacagtccagcttttgatccagattatgagaagctgtag

SEQ ID NO: 8797 - DNA, 423 bp, Oryza sativa
  Clone ID: PAT_MRT4530_15273C.1
atggcggaggaagggcagcgcggcggctacagccggctcgccggcgatgaggaggtggctacggcgagcggcggcggcggcggcgactacgacgagcggaagctgaggctgctcggctacgagccgcagctcaagcgcaacctctcgctgctgtccaacttcgcggtgtcgttctcgatcgtgtcggtgctgacggggatcacgacgctgttcgggacggggctgcagttcggcgggccggcgacgatggtgtacggctggcccatcgccggcgccatgacgctcgtcgtcggcctcgccatggccgagatctgctccgcctacccgacctccggtggcctctacttctggagcgcgaggctctgcagccaccgccgctggggccccttcgcttcatggctcaccggctgtagtacttcgtag

SEQ ID NO: 8798 - DNA, 5214 bp, Oryza sativa
  Clone ID: PAT_MRT4530_15274C.1
atggctccgtccccttccctcagccccgacacccacccccgccataggcgatttcgctcctcgccggagcatctcgtcggcgtcttccaagcctcgctagcatccccaaccctcgaaaccttccccatcccggttccccgccacaaccctcctctctcagcccaaaccccctcgccaaaatcccctttctccacccacccagatccaccagaaaccattcaaatctccggcattgattcctctactgcagcttcgatttgtctttcccctcgattggactcaaggttcgtcacactgcgtcctcaagatcccagcaaatcctccacgctccaagatctgccagccacagcgccgcttggagcactccgcctttactctgaggtcctggccgctcctgctcccatacccctagctgctagttccaagtcccaacaggagctgtctccgcccaaaatccggtccctcgccggccgccttaacttccctgcagcgcaaccctgctcttccgtcactgagcgccttaacccagtcaacctgacggatccagatgtgggttcccaaggagcagctcccaaagatcttcgtatcctcaagagtggacgcaaggttcagatgccagctcaaatcctttctgcagtgcagcatccgagaggtagccttgatgtctctggttcagagtggcaagaagtcaaagcaaatcgatggaggaggagccctgctcactctcccgatagcaccaaccaatttcaattgcagttaagccgagcgaggttcctcaagcatatggaaggtaaatgctttcgttgtcttcggtcagatcatcgagttattgaatgcagagagccccttcgctgctggttctgtatgggcattggtcattgtgcttcctcgtgcctaaagagaaaatcctttaaatccacagctacctcgcagccgctcccccaaacctccgttgaatctttccctcctctcgccccaattcgtttcccccctaagttgctcccgcgatctgctctttcctccccttcctccatggatgacctctctgctcgtccctctcaagagcctgtggttatttcggccacgggggagattgagcgactgaggcagaaattctctgctcgctctattgttgcctggcaggttggccatcagggctccaatgtggatcccaatgtgtttgcagatgatgttcattcggccttccgcatcagacgctcagacattcaaattacgaagttccaccccgaagacttcttcatcacctgttccagccagaatgatagagatgccatcctgaggcagccccggcttgccaccaagtcggggagggtttatctcttctgcccgtgggaggaaggccttcacggcgttccggcgcgcttcagatacagagcaagagtgtgcattgaggggatcccaatgcatgctcgaacagaagaaacggcagccaagatcattggaagaaagtgctccatcaactatgtcgaagagtactctcgccgccagaactacaaccgcaccttcgacatttggatttggactgacgcaccaaagttcatcccgcgttcctccactttctctatcactaatgctgatgaagaagggctccccacagacatttctcttctagaccttgaacctcaccacaaccctccgcctgacgagccaaaggaagggtggacctacgacatcctcgttcacatcgacaccctagaagaccttcacagcaaggtggcccgcgcgtacgactggcagtacggcgcagagactgatgaagggagcctgatcccaaaagaggtccagatgatgaagacgaagacagagagcagcgctcccaggggtagcgtaggagccgttccctttggagccgtgtctgtggacggtcgtaaagtcgtagccgtgtctgtggaagagatcaacaagtttacaaccaagacacgtgcggacgccagcatgttcgagcgccctccgctggcagcagctgctcctaccgttctcgctcgccaaggacaggtcgctgtgctggagttgctggagaagcatcttgaccccatgctccatgaggccacaatccagcattctctgtactcaccagacacctcatcgccaaggatcgcctcccccgtcttcatcccttccagtacccagctgggttctggcgctgctgacggggtcctaggcgctgccaagaacctccaggagttcgcggcaagcctctcaactcccatccagccggcgatccttcctactcctgatgtgagctcccgtcgcccttgccgcaataaggtgacccttcactcccctcaaaggcatagtgaacgcctagcacgcaagcgcagattcgggaccaagattgaacatttcgcacaagaaattcttgcaaaaaactttggctttttaaacgatcaaactcgttttgatgaaaacatcgaaaaactttatgtgcagcatttcaagaagcctatatcccctgcctcgatgaagattatcacaaccttggtcgagaagggtggatgcgaaggcattcacctgaagactgccaagaagaaggcggcggtggtgccaatttgtcttcttgttttcattatgtctcaacacaatgtacacctgttcaactggaatgtgagagggctaaatgcccaggccaaacaagatgtagttaaagcctttgttcataaagttggtgcttctattgtgtgtttgcaagaaaccaaattagcaacagttactgacagaaacatcttaagtatcctaggtcaaaactttgtccaatcttatgctttcctgccggccagtggaactagaggtgggattattcttgcctgcaatgcaaaccttttttctttgtcagaagctgtacagggacaattttctctgtcagcaacaatcacaatgtttgaggagggcctccaatggtcaataacggtggtatacagccctcaattggaagctgacaaaatagccttcctagcagaaattgaagccatgtcctcgtttatgaagccggcttggcttctaattggagacttcaatctaatttataaagtttctgacaaaaataatgatcgcctaaataggagaatgatgcagcgtttcaaagggctaattgacaagattgaggtaaaagaacttcatctcccaggccggcgcttcacctgggcaggagcgggccaaaacccaactcaaacaaaaattgaccgtgcctttgtcatacctgactgggatatcatgttttcaaacgcctctttgcaacctctctcttcgtcgacctcggatcatgcggcactctttttaataggaaatgaaatgaggggtaaacccccaaattccagatttgaagctttctggttaaaaattccagggtttttagaagttgttgaagattcttggaaccgccctctcctagctgcaaatccgcttgccatcctgtacatcaaactaaaacggctagctcgagacctcaagagatggaatcggcaaaatgttggagacatcaagcttcagttagcagtggcaaatgaggttgtttttcaactggatgttgcacaggaaacaaggcccttatcggatgatgaatgtgttcttcgcagcaacctaaaagctagaatcctaggtttggctgtcctaaacaagattcaaattcgtcaacgatcaagactaacatggctaaaggaaggcgatgttaattcaaaatttttccatatcaaagaaaactcccgaaggcgaaagaatttcattcaaactctccagactcaaaatggcatagcagtttcggctcaggaaaaggctgacactctttttcgtttcttctcagacagacttggcactccatcacaaaggcaatcctgtctcaattgggctaccctaaatttcccttctttcgacctagatgatcaagaggatgatattacagaagaggaactcaaacatcctgtgttctccgtgccgtcagaaaaggccccaggaccggatggttacattggagcttttttcaaacatgcttgggaaataatcaaagaagatctgctgctagctgcaaaatcgttcatggccctaaatacaaatcaacttaaaaagttgaacacagcttacatctgcctcctcccaaaaaaaagaaggagcggctggactaaattgcttgcaaataggcttgctccccgactaaatgaattagtctctcaaaaccaaagtgctttcgtcaggaaaagggcaattcacgacaatttcctcttcgtgcagaatttagtgcatattctgcatagaaatcacaaagaagcgcttttcctaaaggtgcacatcacaaaagcgttcgatacagtgggttggccttacctgttagaagtcctccagaggaaagtggacttcttaccgctcattgaaaagattggatcgcgtctcccaggttggaaaggtcgatacttcacatctgaaggtaggagaatcctggtgcaatcagttttaagtgcaatgccgacctttcatctatctgcccttcaagcccccaaatgggtaatcaagagaatagatcgtttccataggtcatttttatggaaaggtgaggatcctagcaaaacaaacccagggagtagcttagtaaattggagtacagtttgcaaaccgaaatttttaggcggccttgggatactggagttggagaaattccctcgcgctctgcgacttcgatggttatggttcaaatggaaagaggaaaataagccatggattggaatggacataccctgtgataactgtgacatgagactttttcaagctgccacaacaatctctcttggcaacggtgaaaaaacagctttttggcaggacaagtggctgcaaagttcatgtccaaaagatattgcacccatgtgtttcaacctagctaagcgcaagcagagatcggtcaaaacggagcttacaaataattcttggcttctctctttccggaatataacgtcgatagaggaaatcaatgaagtcgttcagcttggagaaaactctcacggctcaaaacctcctgcgccgcaacctcctgcgccgccattggccttgcaattggatttgcagtttgtgtggagatcgcctttgaagacaccaaccatcttttcaatgggtgttctttcttcaggaaagtttggagctcgatatgtcaatggcaaaatatccaaggaacccaacctccagatgacattgcagcttggtggatcgacctag

SEQ ID NO: 8799 - DNA, 5415 bp, Oryza sativa
  Clone ID: PAT_MRT4530_15275C.1
atggctccgtccccttccctcagccccgacacccacccccgccataggcgatttcgctcctcgccggagcatctcgtcggcgtcttccaagcctcgctagcatccccaaccctcgaaaccttccccatcccggttccccgccacaaccctcctctctcagcccaaaccccctcgccaaaatcccctttctccacccacccagatccaccagaaaccattcaaatctccggcattgattcctctactgcagcttcgatttgtctttcccctcgattggactcaaggttcgtcacactgcgtcctcaagatcccagcaaatcctccacgctccaagatctgccagccacagcgccgcttggagcactccgcctttactctgaggtcctggccgctcctgctcccatacccctagctgctagttccaagtcccaacaggagctgtctccgcccaaaatccggtccctcgccggccgccttaacttccctgcagcgcaaccctgctcttccgtcactgagcgccttaacccagtcaacctgacggatccagatgtgggttcccaaggagcagctcccaaagatcttcgtatcctcaagagtggacgcaaggttcagatgccagctcaaatcctttctgcagtgcagcatccgagaggtagccttgatgtctctggttcagagtggcaagaagtcaaagcaaatcgatggaggaggagccctgctcactctcccgatagcaccaaccaatttcaattgcagttaagccgagcgaggttcctcaagcatatggaaggtaaatgctttcgttgtcttcggtcagatcatcgagttattgaatgcagagagccccttcgctgctggttctgtatgggcattggtcattgtgcttcctcgtgcctaaagagaaaatcctttaaatccacagctacctcgcagccgctcccccaaacctccgttgaatctttccctcctctcgccccaattcgtttcccccctaagttgctcccgcgatctgctctttcctccccttcctccatggatgacctctctgctcgtccctctcaagagcctgtggttatttcggccacgggggagattgagcgactgaggcagaaattctctgctcgctctattgttgcctggcaggttggccatcagggctccaatgtggatcccaatgtgtttgcagatgatgttcattcggccttccgcatcagacgctcagacattcaaattacgaagttccaccccgaagacttcttcatcacctgttccagccagaatgatagagatgccatcctgaggcagccccggcttgccaccaagtcggggagggtttatctcttctgcccgtgggaggaaggccttcacggcgttccggcgcgcttcagatacagagcaagagtgtgcattgaggggatcccaatgcatgctcgaacagaagaaacggcagccaagatcattggaagaaagtgctccatcaactatgtcgaagagtactctcgccgccagaactacaaccgcaccttcgacatttggatttggactgacgcaccaaagttcatcccgcgttcctccactttctctatcactaatgctgatgaagaagggctccccacagacatttctcttctagaccttgaacctcaccacaaccctccgcctgacgagccaaaggaagggtggacctacgacatcctcgttcacatcgacaccctagaagaccttcacagcaaggtggcccgcgcgtacgactggcagtacggcgcagagactgatgaagggagcctgatcccaaaagaggtccagatgatgaagacgaagacagagagcagcgctcccaggggtagcgtaggagccgttccctttggagccgtgtctgtggacggtcgtaaagtcgtagccgtgtctgtggaagagatcaacaagtttacaaccaagacacgtgcggacgccagcatgttcgagcgccctccgctggcagcagctgctcctaccgttctcgctcgccaagtgcagtacgaccgcccccggctgtctagaagaggtacaagatccccccgcattcagtcgtctccacaagtcccttcgccttgcaagagcgcaattccacgccgcagcggcagccctgatgagggggcaaatgccttggccactcttttttctccatcctcatccttggttgtacagcctgaaccggtgattttttcgcagggacaggtcgctgtgctggagttgctggagaagcatcttgaccccatgctccatgaggccacaatccagcattctctgtactcaccagacacctcatcgccaaggatcgcctcccccgtcttcatcccttccagtacccagctgggttctggcgctgctgacggggtcctaggcgctgccaagaacctccaggagttcgcggcaagcctctcaactcccatccagccggcgatccttcctactcctgatgtgagctcccgtcgcccttgccgcaataaggtgacccttcactcccctcaaaggcatagtgaacgcctagcacgcaagcgcagattcgggaccaagattgaacatttcgcacaagaaattcttgcaaaaaactttggctttttaaacgatcaaactcgttttgatgaaaacatcgaaaaactttatgtgcagcatttcaagaagcctatatcccctgcctcgatgaagattatcacaaccttggtcgagaagggtggatgcgaaggcattcacctgaagactgccaagaagaaggcggcggtggtgccaatttgtcttcttgttttcattatgtctcaacacaatgtacacctgttcaactggaatgtgagagggctaaatgcccaggccaaacaagatgtagttaaagcctttgttcataaagttggtgcttctattgtgtgtttgcaagaaaccaaattagcaacagttactgacagaaacatcttaagtatcctaggtcaaaactttgtccaatcttatgctttcctgccggccagtggaactagaggtgggattattcttgcctgcaatgcaaaccttttttctttgtcagaagctgtacagggacaattttctctgtcagcaacaatcacaatgtttgaggagggcctccaatggtcaataacggtggtatacagccctcaattggaagctgacaaaatagccttcctagcagaaattgaagccatgtcctcgtttatgaagccggcttggcttctaattggagacttcaatctaatttataaagtttctgacaaaaataatgatcgcctaaataggagaatgatgcagcgtttcaaagggctaattgacaagattgaggtaaaagaacttcatctcccaggccggcgcttcacctgggcaggagcgggccaaaacccaactcaaacaaaaattgaccgtgcctttgtcatacctgactgggatatcatgttttcaaacgcctctttgcaacctctctcttcgtcgacctcggatcatgcggcactctttttaataggaaatgaaatgaggggtaaacccccaaattccagatttgaagctttctggttaaaaattccagggtttttagaagttgttgaagattcttggaaccgccctctcctagctgcaaatccgcttgccatcctgtacatcaaactaaaacggctagctcgagacctcaagagatggaatcggcaaaatgttggagacatcaagcttcagttagcagtggcaaatgaggttgtttttcaactggatgttgcacaggaaacaaggcccttatcggatgatgaatgtgttcttcgcagcaacctaaaagctagaatcctaggtttggctgtcctaaacaagattcaaattcgtcaacgatcaagactaacatggctaaaggaaggcgatgttaattcaaaatttttccatatcaaagaaaactcccgaaggcgaaagaatttcattcaaactctccagactcaaaatggcatagcagtttcggctcaggaaaaggctgacactctttttcgtttcttctcagacagacttggcactccatcacaaaggcaatcctgtctcaattgggctaccctaaatttcccttctttcgacctagatgatcaagaggatgatattacagaagaggaactcaaacatcctgtgttctccgtgccgtcagaaaaggccccaggaccggatggttacattggagcttttttcaaacatgcttgggaaataatcaaagaagatctgctgctagctgcaaaatcgttcatggccctaaatacaaatcaacttaaaaagttgaacacagcttacatctgcctcctcccaaaaaaaagaaggagcggctggactaaattgcttgcaaataggcttgctccccgactaaatgaattagtctctcaaaaccaaagtgctttcgtcaggaaaagggcaattcacgacaatttcctcttcgtgcagaatttagtgcatattctgcatagaaatcacaaagaagcgcttttcctaaaggtgcacatcacaaaagcgttcgatacagtgggttggccttacctgttagaagtcctccagaggaaagtggacttcttaccgctcattgaaaagattggatcgcgtctcccaggttggaaaggtcgatacttcacatctgaaggtaggagaatcctggtgcaatcagttttaagtgcaatgccgacctttcatctatctgcccttcaagcccccaaatgggtaatcaagagaatagatcgtttccataggtcatttttatggaaaggtgaggatcctagcaaaacaaacccagggagtagcttagtaaattggagtacagtttgcaaaccgaaatttttaggcggccttgggatactggagttggagaaattccctcgcgctctgcgacttcgatggttatggttcaaatggaaagaggaaaataagccatggattggaatggacataccctgtgataactgtgacatgagactttttcaagctgccacaacaatctctcttggcaacggtgaaaaaacagctttttggcaggacaagtggctgcaaagttcatgtccaaaagatattgcacccatgtgtttcaacctagctaagcgcaagcagagatcggtcaaaacggagcttacaaataattcttggcttctctctttccggaatataacgtcgatagaggaaatcaatgaagtcgttcagcttggagaaaactctcacggctcaaaacctcctgcgccgcaacctcctgcgccgccattggccttgcaattggatttgcagtttgtgtggagatcgcctttgaagacaccaaccatcttttcaatgggtgttctttcttcaggaaagtttggagctcgatatgtcaatggcaaaatatccaaggaacccaacctccagatgacattgcagcttggtggatcgacctag

SEQ ID NO: 8800 - DNA, 1206 bp, Oryza sativa
  Clone ID: PAT_MRT4530_15276C.1
atggcgttcttgctccggccgagagacatgaactccacggtgcctccattgtgctcgtcgtcgtcgtccgccgccaccgcccgcctcctcgcgccgtgctcccacttcgaccgcgcgcgcgccgcggcgcaatccgcggtcggacacgtcgccgaggtcgccgcgtaccgcctcatcttcctcgactcgcaccactcgttctacgatgggctctatgtcggcggtgtcgctgacgcccgcatccgcccggcgctccgcacgctgaagcagaacctgtcactgctcctctccatgctcgtcgaccgcgcgcagccggtggcggtgcgggaggtgatgaaggcctcgttccagccggcaaagctaaatgattatctgaaaccttatgcatggaagttccaaggtgaagaaaacttggatgatatctacagtgatgcactcaagaaaatcccagatctggctttacacagtagtggtgctcaagggctcatcttggctaatactttagattgcttgttgccaactaatgcaaatgtcatccaaggtgaagaatgcatgtatagccaacagaacaccgataactatggaataaagtatggaaatcaattgcctttcttgcttaatcaggtggctgaaacacatttagtggatcagattattgagcgacacacatactctctacagtatacaaaactgatagctacagttgcatggcaagtgctcaccgaattgtctatcaatcctcagtttctttctagtgggctaagattagtacatgcatcagaggagatacatgaggttatactggtggtggagtggaatacatttagtgcagtactatccagattctccatggccggtttacttgaattcaatccaagaagggacaatcatatggtggtaatgactgggatatatgcatggttgatcatgctatgcaacgcctggttatctgatgctcctacacagattggtatggttgctgtacttgagcatcaagttttacaagaggaacttcaaacatcattcgatccaggaggttttcttcatcgacttggggacaagccgaatttcaagaagaagggattgtcagggtctcggctgggctacacatgggccgctaggcaacccgttgccaagaagcccaagcaagcccaagctgaaacaatacaagggcaacagcagcttacaggagaggaggggaaatag

SEQ ID NO: 8801 - DNA, 384 bp, Oryza sativa
  Clone ID: PAT_MRT4530_15277C.1
atgaaaagggaagatttatttgtgaagctggacgtgacgaacaccattgagcacggacttgacgatattgtggatcgtctaccacctgttcgagacaatgaccgcgatggagacattgtgtacgatgagaacggactagcaggcaacacgagaggaatgactacatcaacgcgttcaccgcaattgtcatggaatactacgcaaagcttcaaaagggccacactttcgccattcaatgccaccgctgccatgggattgggcacgtgtagagaaattgccccagtcaatgggcatacattgctaaagaagatgaagactacattagcaccttctgatgtggaagaggatgaccttgatagtgctcaagatgaaaacgaaggataa

SEQ ID NO: 8802 - DNA, 732 bp, Oryza sativa
  Clone ID: PAT_MRT4530_15278C.1
atgggcggcaaactcgtcacgatagcctgccgcctccaatgtcctcggtgccgcccgcctcgccctgcccaccacgcgcgccatgcgttccccgaggaggatttgtcgctcaccgcctgcctgagtggagaaggaggagggagagagagagagagggggggaggcctcaccgccgtctccagggaagggagaattagcagcgccaccgcttccgcctcagcgccgaacagtgacctcaatggcgacggtgaaccactcgtctcctcttctctttgctgctcacccgtgacctcgagctgcctcacccgccgacggcgctcacccgcgaccccgagctgcctcggccttgccgccgaccgcgcctcccttgcctccgtggtcaccggcctccgcagccgccccaccgcgtttcccctcttccccgccatggctgccttcttgcgtaagtccggtgtcggccgctactcccctaaccacaggaggacgaggcctggtgagcctgatgggccagccaccgccggcacgcctcatcctcggcctccgcctcgaggagactcgcaaccgctagtcctcgaccgcgctgccttcgcctccacggtcgccggcttctgtagccgtcccatcgcgtcgggccaaccaccgccggcgcgtgctccactcattctcagcggtgagcgagcgatagacgagagagatagagaggtgagaggggatagagaggagagactatga

SEQ ID NO: 8803 - DNA, 318 bp, Oryza sativa
  Clone ID: PAT_MRT4530_15279C.1
atgaagtggatcgtgcaaggggttaactggtcagtgtcagaaagaacgcagaccgggtgcacgaacacttggatgatgtgggtcccacatgacaaaggctgggtgccggcgtcaggcgggcttccagcagcggagaggaggcacatgtggggttgcttgtcccggcgcgacggtgtcctgacgcggaggctgatcgggccgatcgagcgccacagcggcgccgaggggaaggagaggccagacgccatgggggtggcgccccgtgctttgagtgagctcaagggagacagaagcagagatgatgggatgggcgactga

SEQ ID NO: 8804 - DNA, 1440 bp, Oryza sativa
  Clone ID: PAT_MRT4530_1527C.1
atgttgcctcatgagagtgtgaatgacatgtatgggaggctcaatgtcattgtgaatggtctcaaggggtttggggcaaactacaccgatcttgaggttgcccaaaagatgcttagggctctaccggagaaatatgagacccttgtcaccatgctcatcaactccgatatgtcaaggatgacacccgcaagcctcttggggaagatcaacaccaatgacatgtacaagttgaagaagaaggagatggaggaagcctcaccttccaagaagtgcattgctctccaagccgaagttgaagataagggcaagggcaaggtgaatgaagtcaatgaggacttggaggaagagatttcccttcttgctagaaggttcaatgatctcttgggaaggagaaaggagagagaaagtggctccaactcaaataggagaagaaatagaagacccaacaagactctctccaacttgaggtgctttgagtgtggtgagaagggacactttgcttccaagtgcccttccaaggatgatgatggagacaagtcatccaagaagaagagtggaggctacaagctcatgaagaagcttaagaaagaaggcaagaagattgaggcattcatcggggaatgggactcaaatgaggagagctccgcctcatccgggtctgaggaagaaggtggtgatgatgcaagctccaagaagaagaagatggccgttgttgccatcaaggaggctccatcactcttctctccactttgtctcatggcaaagggctcctctaaggtaacatctcttagtgatagtgagagtgatgatgattgtgatgatgtttcctatgatgagcttgtgagtatgtttgaggagctctatgcttatagtgagaaggagattgtcaagttcaaggccctaaagaaggatcatgcttcttttgaggctttggaatttgagatgtctgagttgagcttcttccttggacttcaaataaagcaactcaaggacgggacgttcgtgagccaaaccaagtatatcaaggatgtactcaataggtttggcttagaggatgcgaagcccatcaagacacctatggcaaccaacgggcatctcgaccttgatgagggagtgatgcctccccgcactcgccatggtcgtcgtgcacccactccggatcccgtgagtgagcctgaggaatcgagcggagatgagtacgctcaaagtgatgaagaggttgaggccaatgttgaaggggctagtgaggaggctagtggagatgatgacagtggaagtggagaggatgaggatgaaggaagtgatgatatgcacattgatctctccatccagtttgttgtgaacatgaggaatctatcgcagtacaccatcttgaggcaccatgatcagttttttagtcctcgggacaccccggatccccgttttcacaccgctttctag

SEQ ID NO: 8805 - DNA, 987 bp, Oryza sativa
  Clone ID: PAT_MRT4530_15280C.1
cgggctgcgggtcaataaagccattcaccttggaagtgactccctattctgatcagcagtcatacacaaattcatgcagtgtatgatcttggtctccatgcatgaactctgctaccccacattctgaagattaactgatgcttagatatgtgcatggcaaagtaatacactagttcgtgagtatttccttcaggacacttatgttctttctttgtttggagtactgaggcacctcaccaatggagataaagatgaaggggatattcaaaggtttgaagataatctctcaaatattcgcactgcagaagcaacaagagatggaaatcgggtgccctacagacgtcaggcatgtgtctcacataggcgtgggcactagtgattcatgcccaagctggatgagtgaattcagaggattggaagagttgtcagcaggctccatgggctcctttgcacagtcaaggaagacatcctgggcatctcaaggcaagggaccaaacgtcgattttgacaaaccaccaagagccacgctcccaacagaagtctgcacagacaaatccggccaggaggccgcctcctgctgccatgacatcccgagaggccccaagaacccgaggaggaagaaggcagcaagagcatcatccgcgagctccttcttgtcgaggtcaaggtcctcctcgtttgtgacagcgtgcggtgatttcagcgagttgcgtggcggcctccgagtcgcctagtttgaatgacagttcatatagttttctggtgtgtgttttcttcgtgctgttcgatcaggaggagaataaaatcgcctgaaataatcgtatgagcgttgtgatggatgctaagcgtctagattagggacatgtgtaatgtgtccatgactgaacaaactatgcattgtactgctttttttgagttttggctatttctgaagtttgaaaagttgaccggacctgaaaatggtgaataaacaaaaatgttccacct

SEQ ID NO: 8806 - DNA, 180 bp, Oryza sativa
  Clone ID: PAT_MRT4530_15281C.1
atgtggtgcaaaaatttgaacttcccgcaagaagcccaagaaggccaggtcctgcgtgctgagcccaaatctatgggcctgaacgcggctgcgccgtctggaatgatggcccatgatgagttcctacccaagcccaacactatcgccagaacccagaatggactttcgagctcccagctt

SEQ ID NO: 8807 - DNA, 843 bp, Oryza sativa
  Clone ID: PAT_MRT4530_15282C.1
cttctcgccttagtgtcgggtcgaggcgtctcctaactctccctccccacccgcttttacctcgcgccccccaccccttcgccgtccgtctcccgcccactcccccccccacctgtccgacgttcccccccccctcccatcatggcgcactttcggcatccaactgtgcgttcgcgtttaccctatcccctcttctcaagttccgcgatctccacccttcctacccccactaaagtctttctctcataaaccagtcccacggctccctcccttcggtcccctaggacactccctcctcctcctcctcttgtttcttctcgcgtcgccttccccctcggccactcttaagcctttcgacccgcctccctagccggctgctccggcggtcccgctataccgtccccgcctctgttccttttcctcttatcacggccggcttcccgcaaacaaaccctccccctccgcctgcccccccccctctccccggcttcctttttcctctccctggcgctcccctcgctcgccctccttcgccccgcctcctaggccgtcccgaggaacccgtcagccgccgctatgccttctcctccaccagtgccgctgctactactcctcctccaccgacgtcgccgttccgccttctccgtttccgcgaggagcccgtccaccgccgctacacctcctcttccgccgccgccgccgccgcttgcctccgcgaggagcctgtccgccgccgctctgcttcgtcctccgccggcgccgccgctctgcctcgtccgctgccacatcgggccgaagggagagaggaaggagagagaggataggctgactagtgggtcccac

SEQ ID NO: 8808 - DNA, 297 bp, Oryza sativa
  Clone ID: PAT_MRT4530_15283C.1
atggggaggagagagggcagcccaaccaaaaagcgacagcacacggagccagatctgccgagtgaacacgcagttgagggtcaggatgtgattcgccgtctcaagctcctgagcgcaaaaaggccagaccgagtggctatcgttgccattcttctgaaggagatcggccatccaacagcgttgctgaaatgcaaaccagaggaagaatttgtatttagcatgacccttcgcgtattgacaaaagaaatgttggccattgtgatccctacctgtgttgggaaatggagggacggatga

SEQ ID NO: 8809 - DNA, 180 bp, Oryza sativa
  Clone ID: PAT_MRT4530_15284C.1
agagtggcaatagttatggggcaggaaagacttttctagacgcaggggggaaaaaaccggaggtcaagaacggtagaaccacgcactaaaacataggtaatccagaacacgggggagggattcagaaaaaagcgggagtgataacgaaggggagaacatagggacaatacaggtaaggga

SEQ ID NO: 8810 - DNA, 1710 bp, Oryza sativa
  Clone ID: PAT_MRT4530_15285C.1
atgggcaaaaccaatgcccttcgtgggaggatttccagtttccagcagacaagggacgaatctattccggaagcatgggaacgactgcaggagtacatggccgcctgtcctcatcatgggatggatgactggctgatcctgcagaacttttataatggactcaccccgatgtcccacgatcacctggacgcggcagctagaggggccttcttctctaaaacggttcaaggagccgttgatctaatagagaagatgctggacctcctcatgaagcgattggacgaccacgacaaaaagccacaagggactgtcaaggtcttggactcacacgtcacgtgtgaggtctgcggcaacacgggtcattctggaaatgattgcctggatacccgtgaggcgatgtacatgggcaacaacaacgggtactgtccacaacgagagtatcatgaagatggaagcactaatctcgagaacacaaatcgtcataacaagctttacctcttgttgaagatcgacaccgatgcagcccaacccgaaagaggcaacaacaatggtaacttctctaaccagccctccttgaaggatcttgtttttgcgcaagccaaaactattgatgctttaagcaaaaacctcgctacaaatgacaagatcctagagaacataaatgttaagctagatggcttcgcttctgctttccaaaatcagctgagatttaataaaatgttagaaacccagctagctcagtttgcatccttagtccctgcaaatgaaactggaactaacggaattgcaaaagaagtgccatctagtgactcggctgacaaagaggttcagctagaaaagatagtgccgcaggagtactgcgacacatggttgctgtcgtttcatcaacggagtaggaaaccatcagtggacgagcaattcgctcgttttgctgaagtaatccagaagatccacatcaacgtaccgttgttggacgctatgcaagtgccaacatatgctcgttatctcaaggacatgctcaacaacaagagactgctcccaacaatggaggtggttaagctgacagaacaatgtagcagcgtgatactccacaagctcccggagaagaagaaagatccggggtgtcctacgatcacctgctcgatcggggcacaacagttcgaccaggccttttgcgacctcggagccagtatcagcgtcatgccaaaagacgtccccgacaagctcaacttcacggtgctgacaccaacactgatgtgcctccaactggctgatttgtcagtccattacccgacagggatagcggaagatgtgccagtcaagatacgggatttcttcatcccggttgatttcgtggtgctggatatggacatggggaaggagacgccgctcatcttggggcgtccgttccttagcaccgcgggagccaacattgacgtgggaatggggagtatccgtttcgacatcaacgggaaggaaaaaagtttgagtttcatccgaggacgggccgaacccacagaatattcaaatggtcgaagtggagccacccaagatggacagcctggtgagattcatgcagaattttctggagaaggaaacaacgatgcccaggaaccgttattggaggacgccggtaaaaccacccataccggccaagaagctagagcagtcggctccgaggaagccgccgtccgcacgaaagcgaaataa

SEQ ID NO: 8811 - DNA, 262 bp, Oryza sativa
  Clone ID: PAT_MRT4530_15286C.1
gggacccgaaactttgggggcccttggaccctttaagcagtttgattgatttgggaggaataacatggaccaaaccccagctgttaaacagggttaagcatccaaaaaaaacagagcccataagggggttgggaggctaagttggtttgatgcaggggctggggtaagaaagcatgggctgaaagggccctcctgctccggttggtttgctaaaaaggggctgaaaccccttcaccacgagggtcatgttcggccggaaatt

SEQ ID NO: 8812 - DNA, 164 bp, Oryza sativa
  Clone ID: PAT_MRT4530_15287C.1
aagcttctcaacggtaaggagagatatatgggacttattgatgaggagtgcctgtaaagagctcataatttaatgttagagcaacatcataaatatatctgatgaattggattgaattgaatttaaaagatcttttgaataaactttttttgacattcatttca

SEQ ID NO: 8813 - DNA, 309 bp, Oryza sativa
  Clone ID: PAT_MRT4530_15288C.1
atgccctgttcctcgccgccgctgctccagcacctgtcgtcccacccgctgccgccacagccgagaaaagaaaaggcaaaatttgctacagaacactcaaagattgtggtctttgctgcgtggcacggcgtgacgaccgggatacggcggtcgtggccaggcgtggcgcaggtgcaggctggcacggtaacgcggatatggaagcgacccgacgaggatgcgggcagtgtggtgcggcatggcgcggtggccagatgcggcacggcgaccgggatgcagtggtcgcggcttaccgtgcgacgacgatga

SEQ ID NO: 8814 - DNA, 2101 bp, Oryza sativa
  Clone ID: PAT_MRT4530_15289C.1
atggtggggggtttagtgctttgcgagttttttttcttttttatgagatcgaattatacgcttcttttataacagtacgatttctctttaatcccatgtctcatctcatcaccaaaaaaaaagaaatggcacaaaactatctgcacatagctagcttagcttccctgtctcacctgtttgtctagtactagcaagtagcaacaagcaagcgcagcaaccatatacacacaaaaccaaacgcatcatcaccgtcaccgagctgagccagagaaccagccaaatgataggggaggagtgcaagcgtgcgacacccaaccaccgccacgtccgggtcccgatcagtgaccaccggtgagtaggttgatcagctagacgaactgcaaaatgtacaagctaacgacgccatgatcagcagatgacgcacgagttggggtcctcctcggcgctgtggacgacgtactgcggcggcgggtagctgtacgacggcggcgcggcgtgggcgtgccacgccggcggcggcgggtagaagacgagcttgggttgctctggcttcttgtcgtccttcttctcttccggcttcttctcctccttcttctcctccttcgccggccccacggagaggaggctcgccgacggccagcccttccggagcttgccgacgacgtccaccgggtcgacgtcgccgaccaccgtcagcttttggcccttcatgtccatggagatcatgtcgatcccgtggagggtggagacggctttgatcgccttctgcttatccttgtcatcgtgcaggtccagcttcagcacaagcttcttcatggccatggaagtatcggctcctctccgctgtggcgactagaaattcagaaccaggcagccgctcttatggaccggtctttctttgtgcagctggcgcacacgaaagctcatcagcggtgacaaatggacgtgtggaggtgacaacaagagaggcttattttttgtcgcggtgatgtgttctatgagcaacgaataagccgaaaaatcgcctgcagccgcgccggcctcctcgaggaagggctccgctgcttcgaccggatgcggctggagcacaagctgacacccaacgcgcagcactacggctgcatggtggacctcatggcgcgagcggggaggctggacgacgcgcgcgcgctcatcgggagcatgcccacggggccgacggacacggcgtggcggagcctgctcaacgcgtgccgcatccacggcaacctggagctcgccgagcgcgcgctgcaggagctggagcgcctcggcgccaccaacgccggcgactacataatcctctccgacatgcacgccagggcccacaaccgggacgccgccgcggcgcgccggacggaggcggtggacaggggcctcgcgcaggcccccgggtacagcgccgtcgaggtgcacggcgcgacgcaccggttcgtgtcgcaggacaggtcgcacccgcgggcggacgacatctacgagatgctgcaccagatggagtggcagctccggttcgaggggtacacgcccgacacgtcggagctggcgctggacgcaggcgaggaggagaagcggcgcgtggtcgcggcgcacagccagaagctggccatggcgttcggcctgctcagcacgccggagggggcgccggtgagggtcgtcaccaacctccggatgagcaaggagtgccacgcgtacagcgcgctcatctcggagatcttcgggagggagatcgtcgtcagggaccggaaccggttccaccgcttcaagcgcggcgcatgcagctgcagaaactactggtgagacggctgggctgccatagtggcatggcatctctctgtgcgccgcgtccacgcgccccttctcctcctcgcccgcgcccggcgccggctccgtcctgtcgggcgtgtgcccctcgatccggggccgcctctccttctggtgcagcatctcgtagatgtcgtccgcccgcgggtgcgacctgtcctgcgacacgaaccggtgcgtcgcgccgtgcacctcgccgccgctgtacccgggggcactgcgcgaggcacctgtccaccgcactccgtccggcgcctcgtgc

SEQ ID NO: 8815 - DNA, 3447 bp, Oryza sativa
  Clone ID: PAT_MRT4530_1528C.1
atgaagaagctcaagaaggaaggcaagaagattgaggcattcatcggggaatgggactcaaatgaggagagctccgcctcatccgggtctgaggaagaaggtggtgaagatgcaagctccaagaagaagaagatggccgttgttgccatgaaggatgctccatcactcttcgctccactttgtctcatggcaaagggctcctctaaggtaacatctcttagtgatagtgacagtgatgatgattgtgatgatgtttcctatgatgagcttgtgagtatgtttgaggagctccatgcttataataagaaggagattgtcaagtttaaggccctaaagaaggatcatccttctttggaggtcttgtatgaggagctaaagacctctcatgagagacttaccatttctcatgagaagcttaaggaagctcatgacaacctcctttccactactcaacatggagctctcattgatgttggcatatcttgtgatttgcttgataatagtgctacttgccatattgctcatgttgcatcatctagcatttctacctcttgtgatgattttgtggatatgcttagctctagctctagctcttgtatttccatttgtgatgcctcacttgttgttgagaacaatgagcttaaggagcaagtggccaagctcaacaagagtttggagaggtgcttcaagggtaagaacactcttgacaagattttgagtgagcaacggtgcatccttaacaaggagggacttggattcattccaaagaagggaaggctcatgatggtagcattgttgctagatatgtgggttcccctatactcggtggtgaactaccgcaccggtgtgagccattgggtgcttgatagtggatgcactcaacacatgaccggtgatagggctatgttcaccacatttgaagtaggagggaaagaacaagagaaagtgacatttggagacaatagcaaaggaaaggtaattgggttaggtaaaattgctgtctccaatgatttgtcaattgataatgtctctcttgttaaatctctaaatttcaatttgctttcggttgctcaaatttgtgatcttcgcttgtcatgtgctttcttcccgcaagaagttattgtttctagccttcttgacaagtcttgtgtgttcaaaggttatgcctcaaatagcaaggcataccgggtctacaacaagaacaaaggtattgtggaagaaaccgccgatgttcaatttgatgagactaatggctcccaagaggggcgcgagaatttggatgatgtaggtgatgaaggcttgatgagatctatgaagaacatgtcaattggagatgtcaagcctattgaagtggaagacatgtcatccacctccactcaagatgagccatctacttccgctatgccaagtcaagctcaagttgaagtggaggaggagaaggcacaagatccacctatgccaccaaggatacacaccgctgtttccaaggatcacccaattgaccaagtgttgggtgacattaatgaagctctttgtgatctggattggataaatgctatgcatgaagagctcaacaactttgcaagaaacaaggatttcaaaattggaaaagttgacaccacccttttcacaaaaatcattggtgatgatttctttgtgtgtcaaatttatgttgatgacatcatattcggttctactagtgaggtattttgcaaggaatttggtgatatgatgtatagggaatttgagatgcccatgattggagagttgagcttcttccctagacttcaaatcaagcaactcaaggatgggacgttcatgagccaaaccaagtacatcaacgatctactcaagaggtttggcttggaggatgcgaagcccatcaagacacctatggcaaccaacgggcatctcgaccttgatgagggagtgatgcctccccgcactcgccatggtcgtcgtgcacccactccggatcccgtgagtgagcctgaggaattgagcggagatgagtacactcaaagtgatgaagaggttgaggccaatgttgaaggggctagtgaggaggcaagtggagatgatgttagtggaagtggagaggatgaggacgaaggaagtgatgatatgcacattgatccctccatccagtttgttgtgaacatgaggaatccatcgcagtataccatcttgaggcaccatggtcagtttttgaggcctcgggacaccccggatccccgctttcacaccgctttccagaagtatgtgtatgagcaagtttatgcagggaaagcttttgcaaagcataagtggattttttggagagacatcaatgagactctagagtttgagggcctgcaggatctcttcaagactgttggcgttgaccggattctaactctcaagcaagactacaatgaatatttgatccggcggttttatgctactgtgtgggtggctggagactatagtgagatgaagtggatgtccgagactcttcagtgttctatctctaggaggcaattccggcggctcctcaatattcgcttggactttggagatgacttgcatgaggagcacactcacaatccgctctccatagactacctctctcagttttatgaagatggagtgcggtacacacatgggaaggttgccggcttgaggaccatccctagtgtggttaataggattgtgagagctaccatcctccctcgccttggcaacaatgatgacattagcggggtggcttggcacgtcatcgatgaaatcattcagggccgtcagttcgacattgtgtctcttatgatgcaagagactgccatctccaaggggaccttcactcagggaatctattatgccccttacgtcatgaggttgattcaagacaagcttggggctgctgggcaaaatttgaagaagctcaagcagtacaagccccgccttcagcttggagctccccgtgctcctagggcggcaccctcctctcatcctggagctagctcaagctcagcacctcctcctcctcctgggtatgatccaaatgctttcttccatccacagttgctgccttctagacggcttgtggaggagttgcccggtgacctctccaagaagattgtggaggaggcccggcgccggtttgtgagtggtttggagttcaccaccttcggagtgaaggaagaactaccctactcgccggagccgtcgtcggggtacttcgtcgcggtcgtggtcgacggtgagatggtgctcaatgcgaacaacatggcggaggaggcgtacaggaagacgaagcgcgcggcgcggccccagcctcgatactgtccttatctcctggccccgatgtcggtcaccgtcgacggcaagcgcgtgctccacatccgtcgcctgcgttggaagttccgcggtactgagaagatcgacctcggcggtggcgacggcgtctag

SEQ ID NO: 8816 - DNA, 1188 bp, Oryza sativa
  Clone ID: PAT_MRT4530_15290C.1
atggccaaccaccgaggacgccgaaattttgcaggcggcccctttgacgctagggctgtcaacgagccgagctcaagcgagcttgcctgcctaggcggtaaggggactgcctgcaaaaatgctaggctgccctcgccgcccttttgcacgtggcccccgcatagtgaaaaaacgccctcccagagggcggcaaaggggccacctgcaaaatgcccctccctcggtggccggccatcaggtgtccacggtgtttgctatggcatgaacggcgacaacctcccgtcgcaaagcgaggtcgtgcagctgtacaagtccaatggcatcggtgctatgcgcatctacagcccggatcagaaggccctcgacgcgctccgcggcagcggcatcgccgtcatcatcgacgtcggcggcatcggcgcggtggccaacctcgccaacaacccctccgccgccgccgactgggtgcgtgacaacgtccaggcctactggccgaacgtcatcatccggtacatcgccgtcggcaacgagctcggccccggcgacatggggaccatcctcccggccatgcagaacgtgtacgacgcgctcgtgtccgccggcctctcgaacagcatcaaggtgtcgacggcggtgaggatggacgcgatcaccgactcgttccctccgtcgcacggcgtgttccgcccggacctgcagcagttcatggtgcccatcgcgcagttcctcgccaacaccatgtcgccgctgctcgccaacgtgtacccctactttgcctacagggacaacccgcgcgacatcccgctcaactacgccacgttccagccgggcaccacggtgagggacaacgacagcggcctcacctacaccaaccttttcagcgccatggtggacgccgtgtacgccgcgctggagaaggccggcgagcccggcgtccgcgtcgtcgtgtcggagagcgggtggccgtcggcgggagggttcgcggcgaacgtggagaacgcgaggaatcacaaccagggcgtgatcgacaacgtcaagaacgggacgccgaagcggcccgggcagctggagacgtacgtgttcgccatgttcaacgagaaccagaagcccggggatgagaccgagaggcattttgggctcttctaccctgacaagacgccggtctacccgattacgtttcctccgaactag

SEQ ID NO: 8817 - DNA, 558 bp, Oryza sativa
  unsure (1)..(558): unsure at all n locations
  Clone ID: PAT_MRT4530_15291C.1
tgtttccttttgcttggnaaactatggggggggggggataaatgatgaaaaaaaaaaaaaaaaaaaaaaaaaaaaaaaaaaaaaaaaaaaaaaaaaaaaaaaaaaaaaaaaaaaaaaaaaaaaaaaaaaaaaaaaaaaaaaaaaaaaaaaaaaaaaaaaaaaaaaaaaaaaaaaaaaaaggtgtgggggggggggggggccaaattttactcccccttctttcaaccttaaaactttttttatagtgcccctaaaataaaataaattgcccgattttttaaaactttggactgggaaaaactttggtttacccaaattaaagggctttaaaaaaaatccctttttccccagttggctaaaaacaaaaaagccccgaaccattcccttttccaaaaatttgccaaccttaaatgggaaatgggacccccccttttaccggcccttaaaccccggggggttgggggttatccccaagtgtacccgttaaattggcagggcccttagccccctttctttaggtttttttccttttttttttggaaattttgggtgtttttc

SEQ ID NO: 8818 - DNA, 1174 bp, Oryza sativa
  Clone ID: PAT_MRT4530_15292C.1
agcatacatattcagatttgagcatctccgacaactgagtaatttgagcaaatgggaggtgcccacggtgtctgctatggcgttgtcggcaacaacctcccgtcgcggagcgaggtcgtgcagctgtacaagtcgaaaggcatcagcgcgatgcgcatctactacccggaccaggaagccctcgccgcgctccgcggcagcggcatcgccgtcatcgtcgacgtcggcgacaagggcgcggtggccaacctcgccaacaacccctccgccgccgccgactgggtccggaacaacgtccaggcctactggccgagcgtcttcatccggtacatcgccgtcggcaacgagctcggccccggcgacatggggaccatcctcccggccatgcagaacttgtacaacgcgctcgtgtccgccggcctctcgaacagcatcaaggtgtcgacggcggtgaagatggacgtgatcaccaactcgttccctccgtcgcacggcgtgttccgccccgaccttcagcggttcattgtgcccatcgcgcagttcctcgccaacaccatgtcgccgctgctcgtcaacgtgtacccctacttcgcctacagggacaacccgcgcgacatcccgctcaactacgccacgttccagccgggcaccacggtgagggacaacgacagcggcctcacctacaccaacctcttcagcgccatggtggacgccgtgtacgccgcgctggagaaggccggcgcgcccggcgtccgggtcgtcgtgtcggagagcgggtggccgtcggcgggagggttcgcggcgaacgtggagaacgcgaggaatcacaaccagggcgtgatcgacaacgtcaagaacgggacgccgaagcggcccgggcagctggagacgtacgtgttcgccatgttcaacgagaaccagaagcccggggatgagaccgagaggcattttgggctcttcaatcctgacaagacgccggtctacccgattacgtttcctccgaactagcggctgaccatgtcaatgcgaataaggatttccatagacgaataatccatgcttaaataattaatgttggttgaatgttaatgtactctgtatggcacattgtgctttgaaaatgctacatgaataaaagttccaaatttatttctttaaaaaaaaaaaaaaaaaa

SEQ ID NO: 8819 - DNA, 1296 bp, Oryza sativa
  Clone ID: PAT_MRT4530_15293C.1
atggccaaccaccgaggacgccgaaattttgcaggcggcccctttgacgctagggctgtcaacgagccgagctcaagcgagcttgcctgcctagagagggagaaggagttttatatcccgcaggggcataaaatcgccctcacagaggactgcaagggagccgcctacagaatgacaggccgtcctcgctgcccttttgcaggcggtaaggggactgcctgcaaaaatgctaggctgccctcgccgcccttttgcacgtggcccccgcatagtgaaaaaacgccctcccagagggcggcaaaggggccacctgcaaaatgcccctccctcggtggccggccggcaggtgtccacggtgtttgctatggcatgaacggcgacaacctcccgtcgcagagcgaggtcgtgcagctgtacaagtccaatggcatcggtgctatgcgcatctacagcccggatcagaaggccctcgacgcgctccgcggcagcggcatcgccgtcatcatcgacgtcggcggcatcggcgcggtggccaacctcgccaacaacccctccgccgccgccgactgggtgcgtgacaacgtccaggcctactggccgaacgtcatcatccggtacatcgccgtcggcaacgagctcggccccggcgacatggggaccatcctcccggccatgcagaacgtgtacgacgcgctcgtgtccgccggcctctcgaacagcatcaaggtgtcgacggcggtgaggatggacgcgatcaccgactcgttccctccgtcgcacggcgtgttccgcccggacctgcagcagttcatggtgcccatcgcgcagttcctcgccaacaccatgtcgccgctgctcgccaacgtgtacccctactttgcctacagggacaacccgcgcgacatcccgctcaactacgccacgttccagccgggcaccacggtgagggacaacgacagcggcctcacctacaccaacctcttcagcgccatggtggacgccgtgtacgccgcgctggagaaggccggcgagcccggcgtccgcgtcgtcgtgtcggagagcgggtggccgtcggcgggagggttcgcggcgaacgtggagaacgcgaggaatcacaaccagggcgtgatcgacaacgtcaagaacgggacgccgaagcggcccgggcagctggagacgtacgtgttcgccatgttcaacgagaaccagaagcccggggatgagaccgagaggcattttgggctcttctaccctgacaagacgccggtctacccgattacgtttcctccgaactag

SEQ ID NO: 8820 - DNA, 711 bp, Oryza sativa
  Clone ID: PAT_MRT4530_15294C.1
ggctgctcccgcattttttttaacttttggcatactatcttagattctgaatagaatttgtggcacaaggtctaaacacaggagttcaaaacttaaatttttcatgagatcccaataacagtggctggcacaatgtttcatatttagggacatcaaacatcattgatcaaaatctcaactgatcaccaccaaaatgatctacgcagcagcctccttcttaagcttagcaagctcctgtctgatagcgccgccacgcttgatcttcgccaacataaccttgaacctgtcaaagtcgttgagggatgctctcctcttctggacaatcagtttcttaccccatgagctgttctcccacttgttcttcacatcagcttcctccattgccttaatcaaggtggtcttcttagggacacgcttgatgtcaatcttaatgtcagtcagagaaagccgcttgaagtttatctggcagcggaccatatcaggggcatccacaagtgccctgttctggtcgacgacatcgacaatgacgacgaggcggccgtagtccttgccgtagttcaccagggccacccgcccgatctccacgaacctcttgaacggcatttccgcggggaggaggcggctgatgctgcggcggcggcgacgaagcggcggcgagacgaggggaggggaggcgcgcagtgcggctagcggccccggttttccggccgg

SEQ ID NO: 8821 - DNA, 1799 bp, Oryza sativa
  Clone ID: PAT_MRT4530_15295C.1
ttctctccgccgcgaatccgacgagctcgaacgcgaaggcggggactctctctctctctctcttcgacccggatcgattgtatcgatctcgccccgtcggtcgatcgatcgatacctcgacacggagcgaccgatgacgaagcagagcgtggtggtgccggaggtggcggtgccgatgccgcccaactccgcgccgctgctcccgtacccgccgccgcgggccgcgccgggcgtcgccgtgcgcaagaagtacctccaggcgcagctcgacctcggcgcgggcctcccgctcatcaacggatgggtggagtccatgcgggcctcctcccccacccacgccaaggccgccgccgcgctcgccgccgccggcgccgtcgacgacgagcgcgccgcctggatggtgaggcacccgtcggcgctgagcaagttcgagcagatcgtggcggcgtccaaggggaagaagatcgtcatgttcctcgactacgacggcacgctgtcccccatcgtcgacgacccggactccgccttcatgtccgacacgatgcggcgggcggtgcgcagcgtcgccaagcacttcccgacggcgatcgtcagcggccggtgccgcgacaaggtgttcgagttcgtgaagctggcggaactctactacgccggtagccatggcatggacatcaagggccccgcgaaggcctcccgccacaacaaggccaaggcgaaaggcgttctctttcagccggctagcgagttcctccccatgatagaacaggtgcacgattctctgatagaaaggaccaagtgcatacctggagccaaggtggagaacaacaagttctgtgtgtctgtccacttcagatgtgtcgatgaaaagagctggagcacattggctgacatagtgaaggcagagctcaaggactaccccaaactgaagctcacgcaggggaggatggtgttcgagatccggcccaccatcaagtgggacaagggcaaggccctcgagttcctcctcgagtcgctagggttcgccgactgcaccaacgtgctgccggtgtacatcggcgacgaccggaccgacgaggacgcgttcaaggtgctccgcaagagaggccagggcatcggcatcctcgtgtccaagtaccccaaggacaccaacgcctcctactccctgcaggagccagccgaggtgatggagttcttgctgcggctggtggagtgggagcgcctctcccgtgctcgccccaagtggtgatttcgccgacggcttcaacccacatttcccgacagctatctctctctctctctctgctactgctctgctctgctcctaggggttttgggttaggatcggagaaagattattattattattattatcatcatcaagggtattagtagtatataaatatatgtaattaaggggaggggtgattaattagagagggagcattatcttttagttattatcgtagctctcctgtacactgttctgtgtgcacacactgacagtgcgcgcgcgcgcgtcctctggtttttttgggaggcgctttgtgttgggtggtggtggctatgagaaggggatgaagagtgttgctgtgtttgggccttgtgctctctcgtcctttttggctatggtggttgctatgctacctgggtgggtgcacaggaaggtggatggatttgagtgctaccgtgtaattgtatatggcttctgattatctatgtacaagaatatatatgatgaaatgaagagcatcagaatattacagcacaaaaaaaaaaaaaaaaaaaaaaaaaaacacaaa

SEQ ID NO: 8822 - DNA, 1899 bp, Oryza sativa
  Clone ID: PAT_MRT4530_15296C.1
atgggagctgtcaatggtgtttgctacggtgttcttggcgacaacctcccgccgcggagcgaggtcgtgcagctgctcaagtcccaaggcatcggcgcgatgcgcatctactacccggacaaggaggccctcgacgcgctccgcggcagcggcatcgccatcatcgtcgacgtcggcgacagcggcgcggtggccaacctcgccagcaacccctccgccgccggcgactgggtccgggacaacgtcgaggcctactggccgagcgtcatcatccgctacatcaccgtcggcaacgagctccccgccggcgacatgggcctcatcctcccggccatgcagaacgtgcacaaggccctcgtgtccgccggcctctcgagcagcatcaaggtgtcgacggcgatcaagatggacgtggtcgccaacacgttccctccgtcgcacggcgtgttccgccccgacgtgcagcagttcatggctcccatcgcgcggttcctcgccaacaccgtgtcgccgctgctcgtcaacgtgtacccctacgtctcctacagggagaacccgcgcgacatcagcctcaactacgccacgttccagccgggcaccacggtgagggacagcgacagcggcctcacctacaccaacctcttcaacgccatggtggacgccgtgtacgccgcgctggagaaggccggcacgcccaacgtccgcatcgccgtgtcggagaccgggtggccgtcggcgggagggttcgcggcgacggcagagaacgcgatgaaccacaaccagggcgtgatcgacaacgtcaagaacgggacgccgaagcggcccgggccactggagacgtacgtgttcgccatgttcaacgagaaccagcagactggcgatgagaccaggaggcatttcggcctcttcaaccctgacaagacgccggcctacccgattacaccttatcctcgtccagccgtgcaatccatcggcgtgtgctacggcatggtgggcaacgatctcccgtcacgtagcgaggtggtgcagatgtacgtgtccctgggcatcaatcggatgcgcatctacaatcccgacagggaggcgctggacgccctgcgcaactccggcatcgacctcatcctcgacgctggcggcttcgacacggtgtcctatctcgccgccagctcctccaacgcggcgtcatgggtccacgacaatatcagcccctactacccggccgtcaacatcaagtacatcgccgtcggcaacgaggtggtaggcggcaccacggagagcatcctcccggccatgcgcaacgtcaactccgcccttgccgcggccggcatcggcggcatcaaggtttccaccgcggtgaaatccgacgtgatcgccaactcttaccctccctccgccggcgtgttcgcgtatccctacatgaatggcatagctcagtacctggcgagcactggcgcgccgctgctggccaacgtctacccctacttcgcctacgccggcaacccgcgcgagatcagcctcaactacgccacgttccagccgggcacgacggtgagggacgacggcaacgggctcacctacaccaacctgttcgacgccatggtggactgcatctacgccgcgctggagaaggccgacgccgggaacgtgagggtggtggtgtcggagagcgggtggccgtcggcggaagggatcggggcgagcatggacaacgcgagggcgtacaaccaggggctgatcgaccatgtcgggcgtggcacgcccaagaggcccggacagatggaggcgtacatatttgccatgttcaacgagaaccagaagacaggggctgccaccgagaggcattttggcctcttctaccctaacaagtcgccggtctatcagattgccttttcgaattag

SEQ ID NO: 8823 - DNA, 1338 bp, Oryza sativa
  Clone ID: PAT_MRT4530_15297C.1
atggccgagtacgagatcaccgatccccggtgctaccgccgcacaccgacgacggcgaggaggacgacttctgggtcctctgccctctgccaccaagatcttccagccaaagcagcacggcggcgcaagcccgccgccgcggatggccggccaggctgcgtgatccggacgacggtggaggcgaccagagttcgattcggacgcacagtggctggcgccatcgttcaacaggatggcgccagcctctttggcgccgtcccaccgccgacgtggcggggcgatgctgaggaggacagcgccagagaggctggcgccatcccgttggatgacggcgccagccactctggcgccccaaaaaagaccatttcgcgctcctgtgtttttgcgggtgtccacggtgtttgctacggcatgaacggcgacaacctcccgtcgcagagcgaggtcgtgcagctgtacaagtccaatggtatcggtgctatgcgcatctacagcccggaccagcaggccctcgacgcgcttcgcggcagcggcgtcgccgtcatcatcgacgtcggcggcagcagcgcggtggccaacctcgccaacaacccctccgccgccgccgactgggtgcgtgacaacgtccaggcctactggccgaacgtcatcatccggtacatcgccgtcggcaacgagctcggccccggcgacatggggaccatcctcccggccatgcagaacgtgtacgacgcgctcgtgtccgccggcctctcgaacagcatcaaggtgtcgacggcggtgaggatggacgtgatcaccgcctcgtcccctccgtcgcacggcgtgttccgcccggacctgcagcagttcatggtgcccatcgcgcagttcctcgccaacaccatgtcgccgctgctcgccaacgtgtacccctacttcgcctacagggacaacccgcgggacatcccgctcaactacgccacgttccagccgggcaccacggtgagggacaacgacagcggcctcacctacaccaacctcttcaacgccatggtggacgccgtgtacgccgcgctggagaaggccggcgcgcccggcgtccgcgtcgtcgtgtcggagagcgggtggccgtcggcgggagggttcgcggcgaacgtggagaacgcgaggaatcacaaccagggcgtgatcgacaacgtcaagaacgggacgccgaagcggcccgggcagctggagacgtacgtgttcgccatgttcaacgagaaccagaagcccggggatgagaccgagaggcattttgggctcttctaccctgacaagacgccggtctacccgattacgtttcctccgaactag

SEQ ID NO: 8824 - DNA, 232 bp, Oryza sativa
  Clone ID: PAT_MRT4530_15298C.1
gtccggaattcccggctcgacccacgcgtccggggccgttttggccaagatgttcgacggtgacacctacgttgagctcgcttgctcgccgagcaacccggacggtggtatccgcgaggctcgtgctcaagtccggggacggcgttgacgtacagcatgtcgcctactcttgaccgttggatacactgattgctttctcattggtggtttcggtgaggcgaggtctacactg

SEQ ID NO: 8825 - DNA, 190 bp, Oryza sativa
  Clone ID: PAT_MRT4530_15299C.1
tttttggttttttttaagctgggggggggcccacaaaagaattgaacaatagctcccaggagtagtttacatgtagcaaaccatcttacatcctatcgcctcaaaaccaccgtgcattttgcacctactggacattgcacactcgcttgtcctctttaatcactctagattaaatttaaatcctttcctg

SEQ ID NO: 8826 - DNA, 426 bp, Oryza sativa
  Clone ID: PAT_MRT4530_1529C.1
cagtattttcactgttacactgtactccattatttttgtttatctggtgattgatgatcaggattgttgttgagacgtacagaaggggaacaaaggtttgtcttttcttttctttcttgagagcagtttaattccagcaggggctggggaagtttgcagctcgatctcgtctgcagcccatcaggttctaattcatgagttttagatttgtttagtggagtataaaacttcatttcttcaggcaaaatgatcaaaatagccgcattgtcttgctggtgtacttagatagttcgatgcacttcctggaactctgtaaaagggaaacatgtcgtaccagtacatgattggttttgtttatttcacaactatttaaagaaagttggtggattttcttctgtattttttggtggaatgagaactttgacc

SEQ ID NO: 8827 - DNA, 419 bp, Oryza sativa
  Clone ID: PAT_MRT4530_152C.1
gatgatggaaaaagttacagtaggcatccatgaacatacatacacaagatcacgatctaatatacagacctccagtgtataactgcttgtgacgataatataatgcttgacccatcacaagtgaatgcttggatacatcactgaacgaacagacgtacagattgtagcagaatgcagatggcgtagttggtgcattcttactaaacctgcggaaatagttgcgaatttaggcatttttcctaaccactggagaacatctataggaggatctatccttgggagtcctaccttgctgcaacctataagatggcagatgtggtagttgcgaggatattccaacgaggaattccttttacctggccaaccttcttgccatgtccatagcttcttgagtggtcactggtgctatctcatcttat

SEQ ID NO: 8828 - DNA, 330 bp, Oryza sativa
  Clone ID: PAT_MRT4530_15300C.1
atggcattggatgcaaccggcgggtggacagcaggtgcggccagcggaaggcagcgggtgcggccggtaggaggcaacggcaacggtggctacctccggcactcggtggcgggcggcgggccaccttggaccggcgtgagaggtggcggtgggcggcgggcggatctggcgccccccgatgtcaagagcggtggctgcagcatgggagggtggatccgccgccacctgaccacgggagcggcggcggtggcaggcggatccaccggctcccgacctcgggagtggcagcggcggcaggaggatccaccgcctccgacctcggctagctag

SEQ ID NO: 8829 - DNA, 352 bp, Oryza sativa
  Clone ID: PAT_MRT4530_15301C.1
caagatttgccaacaaattactgcacaggtgtacaatgaatacagaactcgtgacataggaacttcattgttcacatggatggaacacaatttgcctgcatctgatgataagattacttcaccaacatttttcgccgggtattaatttaccaacatgattggtaatcaaattcagaactcagaacatgtcagatattgataataggtggaatgtgagattacgtgaaagcactttaatttttttcccagaacttttcattttaacctttgctcgtatcagtcagagcattgtaaagtcagaacacactgatttggaccacaccgaggtataatttcagagtctaaggccctc

SEQ ID NO: 8830 - DNA, 346 bp, Oryza sativa
  Clone ID: PAT_MRT4530_15302C.1
ccctcacaagtcacaaccagttcaactgaagtgggcgactttcataatgcatctgattctgaacactggggttgcatttagttacaagatcagattccaatagcaaatcgagaggtgatcggtcccaatagattgtctgaaactggtcaggtcatctgaaccttgacaagatctgtagttgtcatttctgttagaatgtatgccgccttggtaaatattccttggcagatagtagctcttttattatgtgaaacagaacatctgaacgtgactttggtaatattccattctgcatatgttctctcgaaaaaaaaaaaaaaaaaaaaaaaaaaaaaaaaaaaaaaaa

SEQ ID NO: 8831 - DNA, 225 bp, Oryza sativa
  Clone ID: PAT_MRT4530_15303C.1
atgaggtggaggcctactggcaagtgggtcccacctgtgactcagcgagccgactgccacgggcatgagttgagggaggctgaacagacttattccgagacgaagttgataggcgacgaagcccacagcccacctattggtgagatggtgcgagccgtaactctggcgcgctcgcgccggtccatgtcacgtcaagcaaatcaggattaccggttctattcataa

SEQ ID NO: 8832 - DNA, 465 bp, Oryza sativa
  Clone ID: PAT_MRT4530_15304C.1
atggctccaacctctaccaccacgccagaaaggaaaaagaggacagttgcagaagctctacaggacaatacctggattgataatatcagatacaacttgacaactgtccttgtcgctgaatttttcaaggtcttcgaactgctttggacatcagtgacaaggctaggcatccctcagcaatggccacagaattggcccctgacggcaatcctggaggactggtgggtccaaacagttcaggcaacggctaaggagaaaaggaagggggtcaaatcgattctaatcctactctcctgggagatttggaaggagagaaacagcagggttttcggaaacctagagactccgccgcacagaatcattgataaagtgaccgacgagatctggctatggtgcgcgggaggggcaaagggcatccagtgcctgacggcgaacaactatggaagtgcaaatgacagcgtgtag

SEQ ID NO: 8833 - DNA, 164 bp, Oryza sativa
  Clone ID: PAT_MRT4530_15305C.1
acttatgaagctgatagtggcccatcaagacagcaactcaaaaaaccagacatgaggaagatcttaatggatctactatctcaaatactggggaatggtagccccatgtgctttgatgaacagcgactcattgacaagcttcgggagttcctaaaagataagag

SEQ ID NO: 8834 - DNA, 286 bp, Oryza sativa
  Clone ID: PAT_MRT4530_15306C.1
gcacgaggggcagcgcgacgtgtgcccattgctcgaccggtcgtgcattccaaggtcgtgtcaagactcaagttaaaaaaaaaaaagcttccttcctcttttttttttaatttctcttttgtttagaactcaccccgatctgtatttttcttttacgggttgtcccccgaagaggaccaatttgggttttttttcacctttttatattttttagcatattagattagtgaagttgttgaaacggtaaatagaatctactagattaattgtcttaagacagaccagt

SEQ ID NO: 8835 - DNA, 206 bp, Oryza sativa
  unsure (1)..(206): unsure at all n locations
  Clone ID: PAT_MRT4530_15307C.1
gaccagnnaaccctaagcgaagcccggagcgaaagcaatggcatccctcaagcaagcgcggcggcgncgtcgtcgagcggggagnncatcctggcctccttctccngatcttcgncggcggcgtataggcgtgaggcgtcgaccatgnccgaagaagntgctncgnagacgnaggaaggcgnnctgttatcgngggnaccacctgt

SEQ ID NO: 8836 - DNA, 173 bp, Oryza sativa
  Clone ID: PAT_MRT4530_15308C.1
ggaaagctggtacgcatagcaagacacggtccctaatttctggggcgacatcatgcgtaccatcatatatggcaccacagctcaacaaactaaccgtagcattatactgggtctcggagctaggtccacgcgactctacaccgagcacacacatgcagggggaacaaatacag

SEQ ID NO: 8837 - DNA, 384 bp, Oryza sativa
  Clone ID: PAT_MRT4530_15309C.1
atgagctccggcgtggcatgggtgtggatgacggaggacgcggtcgccagcgatgagctccgacgcgaccgcccccgacgagcccccggcatcacggacaccggcaacgagcttcagcgtgctccagcaccgccgcccaccatccacggcgccgctgttaacactcacctccagctccatctgcgtggccggccgatgcaccctccgccagcgccccaactccgtcgcgagccctctccagtcgccgccttcgtcgccggccgtcgatcccgctgcgagtccgggccttcatcctatctatctgctgcttcaggggagcaaagagacaagacggggtgcaaagagcttgttgacctggtcatggttggctatggagtgtggtag

SEQ ID NO: 8838 - DNA, 600 bp, Oryza sativa
  Clone ID: PAT_MRT4530_1530C.1
atggaggggcggacgaggacggcgacgcgacggcgaccacgacggcggccttcccgagcgacagcgacgactggagcgacggcgacgcacggctggagcggtggcgacgacggcggcgtgaggtctcacgggctagggcgctacggacgacgagagacgaaggcaggggtggcgacgggtagcggcgggcttggggtttgccccaagccccttgagatcattcacaatgacattgagcctcccatacatgtcattcacactcttatgaggcaacatggggaatgtctcatattggatcttgaggaaatgaagcttggcatccttgtactcgcttgtgacctcatggatctccgccaacttgttccaaatctcatatgcggttctcaagtcaagggcgtgccggtgatagcaaagcctacatccacaatacttcaaatatggaagctcatagctttgagaaactcgtcggtttcctactccccgttgaggcgagcccaactccaccgctcaaccacgaagccaccgcacgcccccttcgtcaaggggtgggcaaggcgggagccggcccacggagaggactacccaagcctcgatcactaa

SEQ ID NO: 8839 - DNA, 225 bp, Oryza sativa
  Clone ID: PAT_MRT4530_15310C.1
atggcacggaaaaagtccatcttcactactcaactattggctgaatctgaatcatttagctcaaccgaaaaccaggttttcagtaaacctgtgggtaggggtgaaaacggtacggaaactttccgaattccgggcatattttcgaaaacggaatctattggttggaattgttcgaaaacagaaacgaatttggaaatattttctcgaaaacagaatcgaatatga

SEQ ID NO: 8840 - DNA, 489 bp, Oryza sativa
  Clone ID: PAT_MRT4530_15311C.1
atgagctccggcgtggcatgggtgtggatgacggaggacgcggtcgccagcgatgagctccgacgcgaccgcccccgacgagcccccggcatcacggacaccggcaacgagcttcagcgtggtgcacggacggcggaggacgtggccgcggcgacgagcccggcgtggggagcgacggcggaggatgcggccgacagtgacgtggtcgtcggattgctgcctgcagctccagcaccgccgcccaccatccacggggccgctgttaacactcacctccagctccatctgcgtggccggccgatgcacccttcgccagcgccccaactccgtcgcgagccctctccagtcgccgccttcgtcgccggccgtcgatcccgctgcgagtccgggccttcatcctatctatctgctgcttcaggggagcaaagagacaagacggggtgcaaagagcttgttgacctggtcatggttggctatggagtgtggtag

SEQ ID NO: 8841 - DNA, 192 bp, Oryza sativa
  Clone ID: PAT_MRT4530_15312C.1
atgtatcgtacaatgaccggggcgtttgtttaaatgcaaataacattatttttttatagatcattattttactagaacagattaagaaacaaaggctaaaaagccaaaccaagaaaagcttatcgattttgccttactagatacacacattaaagccttccttaaaaatttccatgtataaaaaaatcaacc

SEQ ID NO: 8842 - DNA, 174 bp, Oryza sativa
  Clone ID: PAT_MRT4530_15313C.1
atggaggcgagggagccgacgagctcgagctcgccatccctgctccagcttcatgaggcgttggaggagtcagaggagaaggccgagccgcgtgtcgtcgaggtattggaggataaaagactcacaggcggtgtggccggcatggaggaagacggggatcctcttgtggatgag

SEQ ID NO: 8843 - DNA, 395 bp, Oryza sativa
  Clone ID: PAT_MRT4530_15314C.1
aacagcccgagaatgcaaccgacgacacggacgaggaaacaccaacaacagcagcagtagcggaaccaacggactaacacccaacaccacaggcgacggctgggaaccaggacgaaaccatattcttcactccacttcatcttctctttaaggcggaggaactatatatatttatatagagcaagggcttctcaaacccatttcccaagtttttacaaacaacggtgtatgtgggatatttggtatacgcgctcagagagcacagataccgaggtaccacaaaggtggggcgacaaggaatcagggtagtacagcctacaggaataagtgcgactactgggtcttcacgaagcttcacgtatcttcgagaattcccacgattgacgaaaatccgg

SEQ ID NO: 8844 - DNA, 410 bp, Oryza sativa
  Clone ID: PAT_MRT4530_15315C.1
aggttgcagctcagacagcccgagaatacaaccgacgacacggacgaggcgaacaccaacaacaacagcagcggaaccaacggtctaacacccaacaccacaggcgacggctgggaaccagggcgaaaccccaattcttcacttcacttcaccatctcttcagggcggaggaactatatatatatatttatagagcaagggcttcacaaacccatttcccaagttttcgacaaacaacggtgtatgtgggatatttggtatacgcgctcagagagcacgaataccgaggtaccacaagggtggagcgacaaggaatcagggtagtacgacctacagaaattagtgcgactactgggtcttctcgaagcttcacgaatcttcgagaaaacccgcgatcgacgaaaatccga

SEQ ID NO: 8845 - DNA, 409 bp, Oryza sativa
  Clone ID: PAT_MRT4530_15316C.1
cggacgcgtgggcggacgcgtgggcgcccccaaaaccaaaaccattccccttcctacacctcgccacctcccgcacacctcgtcgccctcctcctccgccggcgccgccgccggcgacaaggctgcagttactcgaagggctggcaatggagggtgcggcggtggaggactcggcggcggcggcgcccgttgtggcgccggagtccgctgccgagggagaccagcgtgtcgagggcgcggctggggaggattcggtggggcccgctgtggcgcccgaagcatccgtcgattcggatcagcatatcgaggatgcagccacggaggacgggaagcatggaactagctttcaatgatttgatgtttttttctgagaaattaagatttatttatataaaataattgcttgaca

SEQ ID NO: 8846 - DNA, 422 bp, Oryza sativa
  Clone ID: PAT_MRT4530_15317C.1
ctctcatgaatgcaaaagttcagaatattaatgcaccaacagcccgagaatgcaaccgacgacatggacgaggaaacaccaacaacagcagcagcagcggaaccaacggactaacacccaacaccacaggcgatggctgggaaccaggacgaaaccctaatcttcacttcacttcaaggcgggggaactatatatatttatatagagcaagggcttctcaaacccatttcccaaattttcgacaatcaacggtgtatgtgggatatttggtatacgcactcagagagtacaaataccgaagtaccacaagggtggagcgacaaggaatcagggtagtacaacctacaggaattagtgcgactactgggtcttcacggagcttcacgaatcttcgagaaaacccgcgatcgacgaaaatccgg

SEQ ID NO: 8847 - DNA, 572 bp, Oryza sativa
  Clone ID: PAT_MRT4530_15318C.1
tcagcggcaaatagcatggcgctgaatgtacgttgggcacgctgacttatctcccatacgccgggcccgggtatttagggccggctgatgctccgccgtcgcgctgcagggcagcgcgccccgggccgggcccgcgccggacagtgcgcttccgcgtctagtcgccctgagcggatccttacgccgcgctgaaacccgcgtggccgggctggggcggcgggtggtctgcgggccgcgcactggtccatctgtcctccggcgcgtcaacgggcctcccggcagccgcgtggtgtgtgcgactctcgctccgcggcccccggttcggtgtgccccctcggggggtgggggagggacgcgtccgcacctggacgccgggatgtaggaggcgcccgcgccggccggggccgctcgcgcgagcccgccggcgtgtgggcggtgtaaggcgggacgggcccgcgggccctcggctgcggtgggctctgaacttgcttgctggcggtctgttgcctgcggtgggttgtgtgcccgctctgtcgtggcgctgcgcgcgcctcgcgccagcgatgggcgag

SEQ ID NO: 8848 - DNA, 2064 bp, Oryza sativa
  Clone ID: PAT_MRT4530_15319C.1
atggatgattctggaaacatgtctgtggcgaagaataatttcaaggatgtggcggaggagataattggagtggcaatgaaagcagtgctaaatgaggtatgtgacgaggtactgggaaaggctgatggtgagcaagtgaaggacatgggggaaatagaccgcgaagctacaaacgatgttttaggggagggaaaggagcaggaggaaatcatgatggcagcaaatgtcaaggaagtgatgcttacaccaaagcgggctagctctagactggccagcatggaggatgagcattccttggagaaggccgggaaaaggaaggcatggaagaatctggagccaaaagagagatcagggggtatcttgctagggattaatgaggaggttcttgacatttctagtgttgatgaaggtgatttttatgttaaatttcatgttaagaataaggatgatggctttcaatggatcctcgtggcaatatatggggctgcacaggaggattataaagaagctttccttgttgagttggtcaattcttgtaataaggaggtgctaccaattctgctcggtggcgatttcaacattataaggaatcccactgaaaagaataatgataattatagtgagaagtggccattcctttttaatgccgtcatagatagtttggacttaagagagttggagctcacaggacgtaagtttacgtgggctaattcgtcatcaaaaccgacatttgagaagctagatagaattttgatgagtacagaatgggaacagaaatacccgttgtctactgctcgagctttgagtagggagctttccgatcatacgccattattgttggatactggtgttaattctctcaaacaaccactattcaagtttgagcctggacggttgttaagcttggaccggttgttaagagatggattctatgatatggtagcggatgtttggaaaaaggaggatgctaagcaaattcagcagtacagacctatatgtctgttgaacgtgagtttcaaaattttcacgaagattaaaagggcaaatgaacgagggagctttcatggggtgataccgcatctggtagataatgggctatctatcttgcaatatgcatatgatacaatcatctttatggaacatgatttagaagaagccaaaaacctcaaacttgtactaagtacattcgagaggttagcgggtctaaagatcaacttccacaagattgaattgttctgttttggtagggctaaggaagtggagagagagtatgtcacgttgtttgcctgcggttccgaacataagaagtataggttggctaagtggagcattttatgcaagccaaaggaatgtgggggtcttgggatacagaacctagatctacaaaacaaatgcatgctaagcaaatggttatataaactttggaatgaagagggagtttggcaaaacttgttaagaaggaaatatctatctaagaaaactttgactcatgtagagaaaaaaccaggggattctcatttctggtcaggactcatgatggttaagaacattctcctttcttgtggatcgttaaaagtgcacaatgggactcagatcagattctgggaggataaatggaacgggaatactccctttgctgcttgttgcccggccttatacaaccttgtgataaacaaaaatgaatcagttgcagtggttatgagtaaaagacttctaaaagtgtcctttaggagggctattgtgggtcataatttaaaagcttggttggaagtggtctcaaaggttatatcaataaaattgaccgagcagaatgatacctttttgtgggagatacaaaagaatgggcatttctcagttaactcaatgtacaaagcaatcatgtacagggaagtcgttcctaaaagggacatgatttggaaactcataataccactaaaaattaaaattttcttgtggtacttaaagaatggagtaattttgacaaaggataatttagccaaaaggaagtggaagggtgattttcagggggactttttgggcaagacaatggtctttgctacttaa

SEQ ID NO: 8849 - DNA, 1476 bp, Oryza sativa
  Clone ID: PAT_MRT4530_1531C.1
tcaagccacattagagaaatcaatcacatttaactcattcctcaatttgcaaaagtgggtttcatcaagaggcttggtaaagatgtcagctagttgatcctcggttcttatgtggctaatgactatgtcactcttggcaacatgatctcttaggaagtgatggcgaatgtcaatatgcttggttctagaatattggaccggattgttggctatctttatggcactatcattgtcacataggagtggggttttggtgaaggatataccatagtccaacaaggtttgtttcatccaaagcaattgggcacaacaactacccatcgaaacatattccacatcggcagtagagagggctacggagttttgtttcttggatgaccatgacacaatggatctaccaagtatttggcaactaccggatgtgctctttctatccactttgcaaccggcataatccgaatcggaatagccaactagcttaaacttagtacctttttgcggtttacccccctcctcctcatcaaggtcgagatgcccgttggttgccataggtgtcttgatgggcttcgcatcctccaagccaaacctcttgagtagatccttgatgtacttggtttggctcatgaacgtcccgtccttgagttgtttgatttgaagttcaagaaagaagctcaactctccaatcatggacatctcaaattccctagacatcatatcaccagactccttgcaaaatacctcattagtagaaccgaatatgatatcatcaacataaatttggcaaccaaagaaatcatcaccaatgatttttgtgaaaagggtggtgtcaacttttccaattttgaaattctttgacaaaagaaaatctctcaatctttcataacaagctctaggagcttgttttaaaccataaagagcttttgagattttataaacatggttaggatttttagggtcttcaaaaccgggtgattgttcaacaaagacaagttcggcaatttcaccatttagaaaagcacttttcacatccgttctctcttgcttgttcctaaagacccactttgtccctatgacattgtggtctctaggtctttcaaccaaagtccataccttgtttcttgcaaagttgttgagcttttcatgcatagcatttacccaatccggatcaccaagagcttcatctacatgttttggcttaagacaagaaacaaacaagtaatgttcacaaatcgaagcgacacgagatcgagtttggacacccttactaatgtcacccaaaacctcgtaaattgggtgatccttggaaagagcggtgtgtatccttgttagcataggtggatcttgtgccttctcctcctccacttcaacttgagcttttcttggcatagcggaagtagataactcatcttgagtggaggtagatggcttgttttccacttcaataggcttgacatctccaatagacatgttcttcat

SEQ ID NO: 8850 - DNA, 398 bp, Oryza sativa
  Clone ID: PAT_MRT4530_15320C.1
aaacagcctgagaatgcaaccgacgacgcagacgaggaaacaccaacaacagcagcagcagtggaaccaacggtctaacacccaacaccacaggcgacggctgggaaccaggacgaaaccctaatcttcacttaacttcatcttcacttcaaggcagaggaactatatatatttatatagagcaaaggcttctcatacccatttcccaaattctcgacaatcaacggtttatgtgggatattttggtatacgcgctcagagagcacggataccgtagtaccacaagggtggagcgacaaggaatcacggtagtacagcctacaggaattagtgcaactaatgggtcttcaggaagcttcacgaatcttcgagaaaacccgcgatcgacgaaaattcgg

SEQ ID NO: 8851 - DNA, 1598 bp, Oryza sativa
  Clone ID: PAT_MRT4530_15321C.1
ctccgcgtggtttccatccccgcgcgcgccgcccctctccgctgccggcctccgctcctcctccggcgccgtcgccgtcccatcggcctccgcttgccgcccgctccgcgctattcaccccggccggcaggtgagcatcggtttccctctccccctcctccacaaccgcctcgcacttatcctctcagatctcgatctccctctcctccctctcagatcgatctccttctcctcctccccctccgcctcctccccttccttctcccatccctggccctctcctccccgtcctcccttcccatccgcttagatcgatctccctctcctcctcccctcctcttctcagatcgatctctctcctcctccccctccgcctcctccccttccccacccatccccggccctctcctccccctcctcccttcccacgcagccctctcctccccctcctcccttcccacccagcaggcggccggctaggccgcgcacgggcccactatctcctccaattcacccccccccccccccctcgccgccatggcctccaccaggccgcagcctccccctccacctccccattgaccgccacccatcccggcgccccttctccctgccggtcgctgcctgtcccggagcgccatctccccatcggctgccggcgccaccccttctcccttcccattctccctgtcggccactgcatctcgccccttctccctgccggtcgccgctcgtcgtgccatcctccttaccggcagtcacacatctcttcgctgcctgtcacaccgtccaccccaccagccgctgctcgtctcggagccctagccgcatctccttctcctccggcggccaccgccgcacgccgccccttctccccgtcggccacggcctgtctccccaccacccattggcccaccatcatcaccaccatggcagtgctcctctccatcctctcctcctctttcctgctgctcttggcggcctcctcctcctccaccgccaccgcctgcccgagctcgtcgctgctgccgctttcgctcccgtcgtcgccatcgccgtcaccagccacccaagaccaccgccgtcactgcccgagaccgccgagaccgcccgagaccgctattgtcgccgccgcccgagaccgccaccgccgccgccgcccgggaccaccgctgccaccgctgtccccagatcctccgccgagcaccgagctccaccgtagggcggtggatccggccctcccatggacgcgccgctggatccgccgcccctagatccgccgccgctgtccgttgctgcgcccgccaccgagcgccgtgctcctccatagggcggcggatccggccctcctgaggacgacgccgccggatccgccgccgtaggccatcgccatgcccgccgccctaggtccaccgtcgagcgccgagcttctccctagggcgatggatccggccctcccgaggacggcgccgccggatccgccgccccctgacgccatataaccacccctaaccagcacacccacctccggtttcacccccatccttttctccttctccgcgcctgagttgctctcgcttccccgcttctgatctctt

SEQ ID NO: 8852 - DNA, 324 bp, Oryza sativa
  Clone ID: PAT_MRT4530_15322C.1
ccggccgggcacctcctaaaccctaaagaacaacaggaaacaacatctatacacttctacagacccgtccgcctgatcatcaatggataacaaggccgtcttcttcgaagcaaacattcatggaggctatggaggccatctccggcgcgcagctgagcgagtcgaagatcgaggttcaaggacaggcagtgacagcaggacgcgcaatacagcccgctgtactctcgaagaacgtcgctcaacccgcaactcaccgccctgaagaggttccagacgatgttccaacgcacgtgcacgttcagcctgccgatgcaatgctgccaa

SEQ ID NO: 8853 - DNA, 2655 bp, Oryza sativa
  Clone ID: PAT_MRT4530_15323C.1
atggttatctataggctctctacaagagatccatttttgcttaacctaggcatagatcttgggggctcttgtagcaaaatttcagaatctgtgttgaaccttagaaaaatagaagaggaaaggttgtccgagagtttgaaaggttcttcgacttttaattgcaataagttaaataacgaggggtatggttcggaggaagaagaggagctaaacaaccttgttcttggccacttatgtggtggcttagtggaggaggttatggatggggagaatggtcacctaagctgtgattttaataatctccccattaagggcattgggaaaaagattgagagtaggagcaaaagaaagaaggtagagatttttttttggcattggacaaggccaaaagggagatcagggggtatcttgctagggattaatgaggaggttcttgacatttctagtgttgataaaggtgatttttatgttaaatttcatgttaagaataaggatgatggctttcaatggatcctcgtggcaatatatggggctgcacaggaggattataaagaagctttccttgttgagttggtcaattcttgtaataaggaggcgctaccaattttgctcggtggcgatttcaacattataaggaatcccactgaaaagaataatgataattatagtgagaattggccattcctttttaatgccgtcatagatagtttggacttaagagagttggagctcacaggacgtaagtttacgtgggctaattcgtcatcaaaaccaacatttgagaagatagatagaattttgatgagtacaaaatgggaacagaaatacccattgtctactgctcgagctttgagtagggagctttccgatcatatgccattattgttggatactggtgttaattctctcaaacaaccactattcaagtttgagcttagatggttgttaagagatggattctatgatatggtagcggatgtttggaaaaaggaggttaggggggttacaaggttggaaaagtggcaaaataggttacgaaggctgcgtcaatttttgagaggttgggcaaaagatacaagtggggcctacaagaaagaaaaggctagcttgctagcaaaggcagatgaattagataagaaggctgaggtaatggctaatagaatagctctagtagctcaaaaagtcattagaccttctcagacagcctttttaccaggaagaaacattatggaaggtgtggttattttacatgaaacaattcatgaaatgcataagaagaagaatgatggggtaatttttaaactcgactttgaaaaagcttatgataaagtagactggagatttctccaacagacgttgagaatgaaaggattctcaccactttggtgtcggtggatagataagattgtcagagggggtagtgtagcaattaaggtgaacgatgaagctggaaacttctttcaaacaaaaaaaggcttaagacaaggggatccgttatcgccgatcctctttaatttggtggctgacatgttagcaatcttgattaaaagggcaaatgaacgagggagctttcatggggtgataccgcatctggtagataatgggctatctatcttgcaatatgcagatgatacgatcatctttatggaacatgatttagaagaagccaaaaacctcaaacttgtactaagtacattcgagaggttagcgggtctaaagatcaacttccacaagagtgaattgttctgttttggtagggctaaggaagtggagagagagtatgtcacgttgtttggctgcggttccggtattctcgagaagctggactattataggtcacgtttcttttggcaatgtgaagaacataagaagaagtataggttggctaagtggagcattttatgcaagccaaagcaatgtgggggtcttgggatacagaacctagaactacaaaacaaatgcatgctaagcaaatggttatataacctttggaatgaagagggagtttggcaaaacttgttaagaaggaaatacctatctaagaaaactttgactcatgtagagaaaaaaccaggggattctcatttctggtcaggactcatgatggttaagaacatctccctttcttgtggatcattaaaagtgcacaatgggactcaggtcagattctgggaggataaatggaacgggaatactccctttgctgctcgttacccggccttatacaaccttgtgataaacaagtatgaatcagtggcagtggttatgagtaaaagacctctaaaagtgtcctttaggagggctattgtgggtcataatttaaaagcttggttggaagtggtctcaaaggttatatcaataaaattgaccgagcagaatggtacctttttgtgggagacacaaaagaatgggcgtttctcagttaactcaatgtacaaagcaatcatgtacagggaggtcgttcctaaaaaggacatgatttggaaactcagaataccactaaaaattaaaattttcttgtggtacttaaagaatggagtaattttaacaaaggataatttagccaaaaggaagtggaaaggtaatgttaagtgttgtttttgtgattctaacgaatcaattcaacaccttttcttagattgtattttagcaaga

SEQ ID NO: 8854 - DNA, 415 bp, Oryza sativa
  Clone ID: PAT_MRT4530_15324C.1
gttgcaactcagaacagcccgagaatgcaaccgacgacgtggacgagaaacaccaacaacagcagcagcagcggaaccaacggactaacacccaacaccacaggcgaaggctgggaaccaggacgaaaccctattcttcacttcacttcatcttcacttcgaggcggaggaactatatatatatatatatttatatagagcaagggcttctcaaacccatttcccaagttttcgacaaacaacggtgtatgtgggatatttggtatacgcgctcagagagcacggataccgaggtaccacaaaggtggagctacaaggaatcagggtagtacagcctacaggaattagtgcgactactaggtcttcacgaagcttcacgaatcttcgagaaatcccacgatcgacaaaaatccgg

SEQ ID NO: 8855 - DNA, 1080 bp, Oryza sativa
  Clone ID: PAT_MRT4530_15325C.1
atgcctggcatacgaaatgattcacacaatcttgccacagaaagctttggtttacaacagagtgataataataagattgtcagagggggtagtgtagcaattaaggtgaacgatgaagctggaaacttctttcaaggggatccattatcgccgatcctctttaatttggtggctgacatgttagcaatcttgattaaaagggcaaatgaacgagggagctttcatggggtgatactgcatctggtagataatgggctatctatcttgcaatatgcagatgatacaatcatcttgatggaacatgatctagaagatgccaaaaacctcaaacttgtactaaatacattcgagagcttggctatgttcatgctctctttttttgaggtacctaaaggtattctcgagaagttggactattataggtcacgtttcttttggcaatgtgaagaacataagaagaagtataggttggctaagtggagcattttatgcaagccaaaggaatgtgggggtcttgggatacagaacctagaactacaaaacaaatgcatgttaagcaaatggttatataaactttggaatgaagagagagtttggcaaaacttgttaagaaggaaatacctatctaagaaaactttgactcatgtagagaaaaaaccaggggattctcatttctggtcaggactcatgatggttaagaacatcttcctttcttgtggatcattaaaagtgcacaatgggactcaggagggctattgtgggtcatatttaaaagcttggttggaagtggtctcaaaggttatatcaataaaattgaccgagcaaaatggtacctttttgtgggagatacaaaagaatgggcgtttctcagttaactcaatgtacaaagcaatcatgtacagggaagtcgttcctaaaaaggacatgatttggaaactcagaataccactaaaaattaaaattttcttgtggtacttaaagaatggagtaattttwacaaaggataatttagccaaaaggaagtggaaaggtgattttcagggggactttttgggcaagacaatggtctttgctacttaa

SEQ ID NO: 8856 - DNA, 405 bp, Oryza sativa
  Clone ID: PAT_MRT4530_15326C.1
gttgcaactcagaacagaccgagaatgcaaccgacgacacggacgaggaaacaccaatagtagcagcagcggaaccaacggactaacacccaacaccacaggcgacggctgggaaccaggacgaaaccctaatcttcatttcacttcatcttcagctcagggcgaaggaactatatatatttatatagagcaaaggcttcacaaacccatttcccaagttttcgacaaacaacggtgtatgtgggatatttggtatacgcgcttagagagcacggataccgatgtaccacaagggtggagcgacaaggaaatcagggtatgtaggtccgtcggtttggcacgcaaaccgaggtcttcacgaagcttcatgaatcttcgagaaaaccacggtcgacgaaaattcga

SEQ ID NO: 8857 - DNA, 1616 bp, Oryza sativa
  Clone ID: PAT_MRT4530_15327C.1
gcgcataagatttatatacatatattttttatataaatatatatataaagtttgtacgtaattttgcccacgcaactccaccccactcccgcagcccatcccaacccaacaccagttcagagagtagcagtgcagcacagccaaaccaggccactcaagattgcaatctctgaaacccaaactggcatttcaggagggttttacaggtaaaagaaaaaattacaaccaggcaggtagtgcagtgaagtcgcagggctgagcagaaagcaaaggtgggttcgcacaacagagaccaactggaggaatggaagctcatgttccttcagctccaaactgggacctggcaatggagacaaatgccgactgactcagtctccgtcttggataatctcaatggccgtcgggtcatccgtttcgtagtcgtctgcgtcgatcggattgcaagctagtggcttgtcgatccatggcatgtaggccccctcgtggcacaggttctccaaccagaagaagaattttcgcaggaggcaaagttttctctcatcagagtcagcagaatctatttgtatggctagatctgggtagtgatcaagaaatgacaacccaactgcccttgtggcatagggcttggatgcatttcgcaagtgtctctgtctactcacaagcttccgatctgtagcttttctcaaaagctctttatattcatttaggtcatacggcttacttaaaacatcattaagtttttcatcaaatgtagagggaatgccacaactaagagcaagaggttctccttgttcatctccacatacattcaaatcagaaagttcagtacaaggtggaagtccatgctcatctatgcagactagatcctgaccacccatgttctctaaagcaaggccatccatttcacgttcagatgcagaattattgatcttcccaagcccatctccatcagtattcatagcattctcttcacccatgttttcaaatgcagtcatcaaagaatctcttccatttgtggaagtggctattctcaattcatcatatccaaccggtgtctcctctgcttgcccatatacaatggtaacgcctggttctggctcaataaccatgagaccattcttgatcttcagaagtctcagaaatgtagcatatgactcatcgatttctgacgtctccatcgcaaatgatgtacctagtgaaaaacaatgccccgcatttgcactgccagccttgtctgatgttacacctggtccctcgctgttttgattacaatggcttctacgcaatgaactttttgtgatatttgtgccggatttggcattagcatatccattggatgcatgatcttgtgcatatcttagaaaaacaggcgagccatggtcccctctcggcgcatcaagtacatagccgttcccatcttccctcagatgttccaagaaaagcctgtaacttggatctatttctgggatactatcaacaggtagactaccaaacactttgttcttgctgcatgatgatctgctcaccatgtcctgggccttcatctggcaactcccctccaccacatgacccctgcccctgttcttgatcccttttgctctattttgtgccgtcat

SEQ ID NO: 8858 - DNA, 1131 bp, Oryza sativa
  Clone ID: PAT_MRT4530_15328C.1
atggagtctagaaaagaggacattcctcaagtctcgagtgaggaaaatgaaatgctaacaaaggaattctcagaacaagaagtaaaacatgctattttccaaatagaacacaataaggctctgggtcctgatggatttcctgcggagttctttcaagtgttttgggaggtcattaaagatgacttaatggccatgtttaatgacttttacaaagaagagttgccgctgcatagtttgaattttagtacaataactttattacccaaacaaaaggatgctaagcaaattcagcagtacagacctacatgtcgaacggcaaatgaacgacggagctttcatggggtgataccgcatctggtagataatgggctatctatcttgcaatatgcagatgatacaatcatctttatggaacatgatctagaagaagccaaaaaccttaaacttgtactaaatacattcgagaggttagcgggtctaaagatcaacttccacaagagtgaattgttctgttttggtagggctaaggaagtggagagagagtatgtcacgttgtttggctgcggttccggtaggtatccatttagatatctatggatcccaatgcatcacaaaaaattgtcaaacaaagattggcttacaatcgaagagagaattcagaaaaaattgagtacttggaaaggaaagcatctatcggtacctaaaggtattctcgagaagctggactattataggtcatgtttcttttggcaatgtgaagaacataagaagaagtataggtgggctaagtggagcattttatacaagccaaaggaatgtgggggtcttgggatacagaacctagaactacaaaacaaatgcatgctaagcaaatggttatataaactttggaatgaagagggagtttggcaaaacttgttaagaaggaaatacctatctaagaaaactttgactcatgtagagaaaaaaccaggggattctcatttctggtcaggacttatgatggttaagaacatcttcctttcttgtggatcattaaaagtgcacaatgggactcaggtgattttagggggactttttgggcaagacaatggtctttgctacttaaggaggaagatggtcaaaaagtga

SEQ ID NO: 8859 - DNA, 588 bp, Oryza sativa
  Clone ID: PAT_MRT4530_15329C.1
tgctcttcttcacgtcgtcgaggtactccacgggcacggggctggagtacatgggcatcatgatcatggcgtgcacgctgccggtggtgctcgtccatttcccgcagtggggctccatgttcctcccgcccaacgccggcgccgaggaggagcactactacggctccgagtggagcgaacaggagctcagacagcctaagaatgcaaccgacgacacggacgaggcaaacaccaacaacagcagcagcagcggaaccaacggtctaacacccaataccacaggcgacggctgggaaccaggacaaaacccttaatcttcactttacttcatcttcaacttcaggacggaggaactatatatatttatatagagcaagggcttctcaaacccatttcccaatttttcgacaatcaacagtgtatgtgggatatttggtatacgcgctcagagagcacggataccgaagtaccacaagggtggagcgacaaggaatcagggtagtacaacctataggaattagtgcgactactgggtcttcacggagcttcatgaatcttcgagaaaacccgcgatcggcgaaaatccgg

SEQ ID NO: 8860 - DNA, 775 bp, Oryza sativa
  unsure (1)..(775): unsure at all n locations
  Clone ID: PAT_MRT4530_1532C.1
tgtttttttttttttttttnggagatggaacgaatttagattttagaccaataacttcaagtcatgtactcgatgcaactcaggattttgggcaatgagccacccataatacagtgaaagaaaaatgaaaggagaaagcgcctcaggcatcatacaacactctagcaagagccaaaaaaggggaggagttcaatagctgacacttcctcgctgtactgctactattcacaaagctgtcacatgatggaacaaccacacctgaaatcctttggcttcttggcaactattttattggactgtttgtctgaagtaggagcacgaactacgacatgcattgttgtcaatccagagaagtcacaaattgggcttttgcattctgaaagggttttgttgttctccaatatcttcccagcattaataagcttgaggtcatttacagtccttgggcccttttccttatcttctgggccatcgaaaaataagtcataagcaatattcgctaaaagcggaggcccataggtccctctagtgcccgatgtcggagtcatcactaatctcgtatgtcatttcacattgcaaaaaagaacatacaaaaatcaatgtgtttttcgtgctccttgaccagccagttctccaatctgcaaattccagccgcacacacccactgggggctttaatgcggatattaagggatggatcaactaaccagggaggtgggggggagcatggatcataggagtggaggggcatgggggaagtagtactagtagctagc

SEQ ID NO: 8861 - DNA, 2311 bp, Oryza sativa
  Clone ID: PAT_MRT4530_15330C.1
cgagggggctgcagaggtgcgcggcgggtcctctgttccttccggggctcctgcaggcgtagctcccgctgcatgttggggacctatgcggggtggagctatgtctgaccaggagagagatgatattcctatgctactaagaaatgttgagctaccaacgtttcctcctagaagtacatcaatgtgcataccagttagggatgatgaatacgaagaagacacatttgtaccccatactggtcctctgtttgttcagccaccaacacaaactgcagcagcgggcattccatttacaaatacaccagatatgcctcctcgacctccacaaggaaaacaagtcaacaagccacatgcgataatgccagaagaaattggaggaaacaggtggtcttatagtgggaatgttccaaagaatgaacatttgatgatgtctggacctttgggacaatgtgacgatcctgattgtgtcaactgccctcctgcttgtaaaaacaaaaggcattttcacagaggatcaagtacattggacagtaagttccataattttctttgtgagcatggtggtggatggaagaaggaaattgagcgtttcctttcacgcattccagttatgaacccacatgcaaaagttgttcagcaatggaatcagttctttgtgatatcatgcctggttgccatattcattgacccactatttttcttcctattatcagttcaaaaggataacaagtgcattgtgttgaactggcattttgctacagcacttgcagttgtgagaagcgtgactgatgctatttattttctacacatgcttcttcagttcagactggcttatgtagctccagaatcgcgagtagtgggagctggagatttagtagacgagccaaagaaaattgctgtccgttatcttcgtggatattttttactcgacttcttcgttgtgcttccactccctcaggtgatgatattgctggtcatccctaaatatgttgggttatcaactgcaaactatgctaagaatttactgcgtatcactgttcttcttcagtatgttccccgcatcatcagatttgtaccattgcttggtggtcagtctgactcatctgccaatggattcatattcgagtcagcgtgggctaactttgtgattaaccttctaatgtttgttttggcgggacatgttgttggttcatgttggtacctatttggattgcagagggtcaaccaatgcctacggaatgcttgttctgcatcaaaaattccatcttgtgatggttttatagattgtggacgtggcattaatattgggaagcagaatcaactaagcagacagcagtggtttaatgattcagcctcaacagcttgtttcgacactggagacaacggtttccactatgggatttatgaacaggctgttttgctaactacagaggacaatgctgttaaacgttatatatattcattattttggggtttccagcaaataagtacgctagctggtaatcttgtcccaagttattttgcatgggaagtcctgtttactatggctattattggtttggggctgttgcttttcgcattacttattgggaacatgcaaaattttctccaagctcttggaagacggagactagaaatgcaacttaggaggcgtgatgttgaacagtggatgagccatagacgcctgccagaagatttaagaaggagggttagacgcgcagaaaggttcacctgggcagctacccaaggggtgaatgaagaggagcttttaagtaatttaccagaagatattcaaagggacatacgccgtcatttctttagatttcttaacaaggtccgattattcacattgatggattggcctatcttggacgctatatgtgacaaactaagacaaaacttgtatattagcggaagtgacatcctttatcaaggtggtccagttgaaaaaatggtcttcatagtgaggggaaagctagaaagcatcagtgcagatggaagcaaagctccgttacatgaaggtgatgtatgtggagaggagctcctgacatggtacttggaacactcttcagctaacagagatggtgggagaatgagattccatggtatgcgtttggttgctattcgtactgtcatgcattcagttgtgtcagttgccgaatatctatcttctatgatatgtatgacaatgttcactaatgctggtgcgctactgttgcaactgcatccaacagggctcggccacccgtcgcgtgaaccattgctgcaacgcgtattcaagtcgcatggaggtatcggaataggcgattga

SEQ ID NO: 8862 - DNA, 1557 bp, Oryza sativa
  Clone ID: PAT_MRT4530_15331C.1
atggatgctaagcaaattcagcagtacagacctatatgtctgttgaacgtgagcttcaaaattttcacgaagacgttgagaatgaaaggcttctcaccactatggtgtcgatggatagataagattgtcagagggggtagtgtagcaattaaggtgaacgatgaagctggaaacttctttcaaacaaaaaaaggcttaagacaaggggatccattatcaccgatcctctttaatttggtggctgacatgttagcaatcttgattaaaagggcaaatgaacgagggagctatcatggggtgataccacatctggtagataatgggctatctatcttgcaatatgcagatgatacaatcatctttatggaacatgatttagaagaagccaaaaacctcaaacttgtactaagtacattcgagaggctatcgggtctaaagatcaacttccacaagagtgaattgttctgttttggtagggctaaggaagtggagagagagtatgttacgttgtttggttgtggttctggtaggtatccctttagatatctagggattccaatgcatcacaaaaaattgtcaaacaaagattggcttacaatcgaagagagaactcagaaaaaattgagtagctggaaaggaaagcatctatcggtaggtggtagattagtgttgataaactcagtgcttagtagcttggctatgttcatgctctctttttttgaggtacctaaaggtattctagagaagctggactattataggtcacgtttcttttggcaatgtgaagaacataagaagaagtataggttggcaaagtggagcattttatgcaagccaaaggaatgtgggggtcttgggatacagaacctagaactacaaaacaaatgcctgctaagcaaatggttatataaactttggaatgaagagggagtttggcaaaacttgttaagaaggaaatacctatctaagaaaactttgactcatgtagagaaaaaaccaggggattcgcatttctggtcaggactcatgatggttaagaacatcttcctttcttgtggatcattaaaagtgcacaatgggactcaggtcagattctgggaggataaatggaacgggattactccctttgctactcgttacccggccttatacaaccttgtgataaacaagaatgtatcagtggcagtggttatgagtaaaagacctctaaaagtgtcctttaggagggttattgtgggtcataatttaaaagcttggttggaagtggtctcaaaggttatatcaataaaattgactgagcaaaatgatacctttttgtgggagacacaaaagaatggacgtttcttagttaactcaatgtacaaagcaatcatgtatagggaagtcgttcctaaaaaggacatgacttggaaactcagaataccactaaaaattaaaattttcttgtggtacttaaagagtggagtaattttaacaaaggataatttagccaaaagaaagtggaagggtgattttcaaggggactttttgggcaagacaatggtctttgctacttaa

SEQ ID NO: 8863 - DNA, 532 bp, Oryza sativa
  Clone ID: PAT_MRT4530_15332C.1
caatggctcgctcgaggggagtcttcctacctaggtggcaaggcaatgaaaaccagattcacaataacagtgagacatccagctgaaatagctagctagtactcctagctggcgaagaggacgttgcagctcagacagcccgagaatacaaccgacgacacagacgaggaaacaccaacagcagcagcagcagcagcggaaccaacggtctaacacccaacaccacaggcgacggctgggaaccaggacgaaaccctaatcttcacttcactttatcttctcttcagggcggaggaactatatatatatttatagagcaagggcttcacaaacccatttcccaagttttcgacaagcaacggtgtatgtgggatatttggtatacgcgctcagagagcacgaataccgaggtaccacaagggtggagcgacaaggaatcagggtagtacgacctacggaaattagtgtgactactgggtcttcacgaagcttcacgaatcttcgagaaaacccgcgatcgacgaaagtccga

SEQ ID NO: 8864 - DNA, 300 bp, Oryza sativa
  Clone ID: PAT_MRT4530_15333C.1
atgacggttgtggtagttggaatggtcagaattgccctccaaccgtcattagggagtgatccacgccgtccagccaaaacctgaatccaacggcgctaggggaggttcggccgaacctcctggtccggccgaaccaggggccgacccatcctggcccaaaatcggcaggtggcctcctgaacttctccactccgcagacttgtgaattttggcccaattcattgtgttaattctgagttcttggcctattcataaataagtctggttttcgacatcgtccgattgatttatcgtctgagt

SEQ ID NO: 8865 - DNA, 897 bp, Oryza sativa
  Clone ID: PAT_MRT4530_15334C.1
atgatgtgcctatgtgtctatggagaaacaagagtgccagtggggattgggaattttaggtcattacaagagctagacctgggcatgggaaccattgaaagttacgaaaactttggcatggactttggcatggaggtgggcaagctgacggagctgaggatgctcaatattaaggggatcgacgagggcaagtggaaggctctaatacagtctgtgttcatgttgccgagaattcaaaagctggagattagtttcttctcactcgggaagatgatcacctgggatggttgggaccactgggaaccctcgcggcagctccagcagttatctataaatgggatctgccttcctcggctaccagtgtggatgaactccatatgcatccctcatctgtcttgcatggaccttaaagtgtcaactattgaagcatcagacctagatgtgattgcgaggttgccggctctttgcgaggttgtcctgcaatttatttggaccgatatagaaagctggacaatgatgttacgcaccaatcttaattaccggccctatgcactctttcgttcattcgtgctggtagccaggacagcgacggcggcggctgctcccgagccctcccacgcagatggcgttgaggatagcggcggcggcggctgcaagttccaagccctcctgtcgcggatggggtcgaggatagtgatggcgacggtggctcccgagccctccctcatggatggcgttgaggacggctgctgtcgagcgtcttgccacagacggctgcggcggcgatggctcccaagcctcccgccgcggatagggcctacgatagcggcgacgacaatggctcctgaggccttcgcggaggtggtcgatgatggcggcagcgacggtggtggttga

SEQ ID NO: 8866 - DNA, 345 bp, Oryza sativa
  Clone ID: PAT_MRT4530_15335C.1
atggcttcgcttgcgcgcgcgagccgagccgcgccgcgccgcgcccacgccacgccgggcccaagaagcgctggccgcatgggcgctgggatcgcgaggtcgccaccaaccatacgccgcgacggcgaggctgcgcgtgcaaatgcattgccgctactaactggcatggggaactcgggagccatgccactgtgcccgttgaagcaagcgtacaaatctcgaaaaactagtacgaatataacgcgcacggtgcttaaagaaacgttcgttctgctggggatcaatcaggatcacagtggccgtcatctccaattgaaggcgccgtaccacgtcaagctcgactag

SEQ ID NO: 8867 - DNA, 3007 bp, Oryza sativa
  Clone ID: PAT_MRT4530_15336C.1
ctagctagctagctagctactcctattgatgatatcgccggccggacatatgcgcaggatgctcggggactgccaggtcctgtcgtccatggccgccatggccggggccgcctcctccgccgacgcgctcttcgcctcgccgctcatccccaaccccgctctcgccggcttcatgtcctcctccgccgccatgcccttccaccacttctccaacgccgccgccaccttaatacctaaggaggaggggttgatgggcggcctccatgtggccaaggacgaggggatggacctcgagatggacatggagctcagtggcggctccggcagcgcccacctcgacggcctcctcagcttcgccgacgtcgacgacgaccacaagccgcagcacagcggccatgaccagccgcccgacgccgcccagcccagcggcgccgcggggggcaacgccaagaagaagcgctaccaccgccacacggcgcaccagatccagcagatggaggcgctgttcaaggagtgcccgcatccggacgacaagcagcggctgaagctgagccaggaactgggcctcaaacctcgccaggtcaagttctggttccagaatcgccggacccagatgaaggcgcagcaggacagggcggacaacgtgattctgcgcgcggagaacgagaacctcaagagcgacaacttccgcctccaggccgccatccgcaacgtcgtctgccccaactgcggccacgccgccgtcctcgccgacatgtcctacgaggagcagcagctccgcatcgagaacgccaggctcaaagacgagcttgaccgcttggcctgcatcgccacccgctacggcggcggcggcggacggcagccggtgctgtcgacgtcggccctgagctgcatctcggcgccgccgccggtcctcatgccaccgctcgacctcgacatgaacgtctactcgcggcacttcgccgagcaggcgccggtcatgggctgcggcgacctcatcccgccacccgtcgtgccgcagcacgatggcgcggcggcgtacatgggcgccatgatggcgcccgtgcaggagcaggacaagcagctggtggtcgacctcgccgccacggcggcggaccagctcgccaggatgtgccgcgccggcgagccgctgtgggtgcggcagcgtggcgcggaggtgatggccgtggaggagcacgcgcggatgttcagctggccggtggacggcgcgaagcagggagacggcggcgcggtggcgagggcggaggggacgcgtgacaacgcggtggtcatcatgaacagcatcaacttggtggacgccttcctcgatgcgaacaaatggatggagctgttcccgtcgattgtttgcaaggcaagaacaatccagatcataaaccacggagctgcgtctggtcacctcggcagtggaactctcctcttgatgcaagcagaggtgcagttcttgtcgcctctggtggcggcgcgcgaggtggtgttcttccgttactgcgtgcacaacgccgacgaggggagctgggcgatcgtggatttcccggcggaagggtttgaggaggggctcctccaagcctcggtggtcaggtgccggcggcggccgtccggctgcatcatccaggacatgcccaatggatactccagggtggtgtgggtggagcacatggagatggtcggggaggagaagccgctgcagccggtgttcagggactacgtcgccagcggcgccgccttcggggccacgcgctggctctccatcctccagcgccagtgcgagcgcctcgccagtgagctcgcccgtaacatcgccgacctcggagtgatccgcacccctgaggcaagaacaaatatgatgaagctgtcgcagcggatgatcaccactttctgtgctaacatcagtgcttctggaacccaatcttggacggccctctcggattcaacccaggacactatcagggttacaactcggaagaacactgagcccggacagcccagcggtgtcatcctcaccgctgtctccacaagctggcttccttttacccatcagcaggtgtttgagcttcttgcagatgaacaacagcgctgccagcttgagattttgtcaaacggcggctcccttcatgaggtggcacatattgcaaatggatcacatccaaggaattgcatctctcttcttcgcattaacgctgcaagcaactcgtcacagaatgtggagctcctgctgcaggagagcagcacccaccctgatggtgggagcctggtggtgttcgcgacggtggacgtggacgcaattcaggtgacgatgagcggcgaggatccttcctacatccctctcctccccctgggcttcgccatcttccctgccaccagcccatcacctgctgctgcacccaccatcagctcaagcaccaccaccaccactggcaatggcaatggcgaaaccagtagcactcctccaagaaacagcagcagcaacaacaacaatgcagatgagctgctgcctcccaatggctgcctcctcaccgtcggcatgcaggtgctggccagcgccgtaccttctgccaagctcaacctctcgagtgtcactgcgatcaacagccatgtctgcaacgccattcaccagatcacagctgcactcaaaagttcagcaggtggtgctgggggtgagccggcgtccgatcagtagcaaaggagacctggaggagaggggatcggagcaacatgggatcagacaccaaaatgcctcccaatttatttcgctaacatcgcagtttgtttttctgttagctctcggtctggctggttcatcaggtgcaagggagggtttgacaagaagccaacactaacagctactcaaatctctcctctcttcccgccatatttctgcctctcaaaatgacgaaaatacccccaaccagccaacaagcaaagccatggggggcattttgatcattttgggaagctacttctgctgagaaagaaaaaaaaaaaaaaa

SEQ ID NO: 8868 - DNA, 189 bp, Oryza sativa
  Clone ID: PAT_MRT4530_15337C.1
atggccactcccatgcaaacgtccaaatactttggcctgctagatgccgatacacatcaaagatgcaggtacgacaagacagggtgcattaatcaaacgacggtgttcgaaggaagctggatccccaagccatctgcgaaagcgacgcccatcgatcgttcgttcatcgatgaggcgatgatgcatcca

SEQ ID NO: 8869 - DNA, 333 bp, Oryza sativa
  Clone ID: PAT_MRT4530_15338C.1
aggggagcctaaaaagaaccaaaacccaccctggggcaacttagggggaaaaaaattttaccaaattttggccccccgaaaccccccaaattcccccctttttactcccctaaaaaccccgttaaaaacatgcccaaaaattgcccccccataattgccccctgggggcccccgcaaagacacctcggaaaaaatggggaacaattggggggccttaaggggggccaaaccattcccaaaaattccccattgtttccaaattctttcggaaaaccgggggttacaaaaaggttcctgccccccccttgggggaaagcgcgcaagaaaccccca

SEQ ID NO: 8870 - DNA, 1338 bp, Oryza sativa
  Clone ID: PAT_MRT4530_15339C.1
atgccgggggccgtgatcgtgcaccaccacacgcggtacaagacgtaccccggcgaggtcaccggcttcgtcttcttctgctgcctcatcgcctccgtcggcggctgcatcttcggctacgacatcggcctcaccgccgggttgacgtcgacggagtcgttcttggcgatgttcttcccggtgatcttcgagcagcagcaggagcgggtgatcacgaaccagtactgcaagttcgacagccaggtgctgacgcttgtcggctcgtcgctcttcctcttcgccatggtcgccggcatcttcgcctccccgatgtcccgcgccttcggccgcaagtggacccttttcgtcgccgccgtcgcctacctcatcggcgccatcctcggcgccatctccttcaacttcatcgttctcctcaccggccgcctcctcctcggcgtcggcgtcggcgtctgcatccacgcgtcaccgctgtacatatcggagatggcgccggcgcagcagcgggggatgctgaacatactgttccagctgatgatcacggtggggatcctgtcggcgagcctgacaacgtactggacgtcgaagatcgccggcgggtgggggtggcgcgtggggctggcgttcgggacggtgccggcggcggtgatcgcgctggggtcgctggccatcccggacacgccggtgtcgctcatcgcgcgcggcgagggcgaggcggcgcgcgcgacgctggccaagatccgcggcgtcgacgacgtgcgcgccgagttcgaggacctgacgacggcgagcgaggagagcaaggcggtggcgcacccgtggcgggagctcttcttcggcggcaggtacaagccgcagctcgcgttcgcgatcttggtgggaacattcatcggattacagttcggggtgagcgggacgggggcgatgtcggagcagtacgcgatgtgcatcgttctgttcgtgtgcgtgtacgtggccgggttcgcgtggtcgtgggggccgatggggtggctgatcccgagcgaggtgtacccgctggcggtgaggtcggcggcgcagagcgtgacggtggcggtgaacatgttcttcacggcgttcatcagccagatcttcctcaccctcctctgccacctccgcttcggcctcttctacttcttcggcgcctgggtcctcctcatgaccgtcttcatcgccaccctcctcccggagaccaagtgcgtgccgctcgaagaggtggcgcacgtctggaggaagcactggttctggcgcaagttcatcgtcgactcccccgaccgcggcggcgccgagatgaggaagaggatagccctagagatgagctag

SEQ ID NO: 8871 - DNA, 1374 bp, Oryza sativa
  Clone ID: PAT_MRT4530_1533C.1
atggatcgtctgagcgcgctgccggatggcctcctccacgccgtcatgtccttcctccccgcccggcagatggcgcagacgtgcgtgctgtccaagcggtgggtacatctgtggcgctcggtgcctagcctcaacctcgacatccgtgagtttcgtaacctctcaaaggaggaggatgatgatgatgatgagacatgggggaagatgaaggatttcatcgcaaacctgctaatgttccaccacgctccgacgttagataccttcaccgtgtgcaccggggcggtagttcaagctgcggttggcaatcgcagtcgtcgcaatcaccgtcgcaacgatgtcgactatcccgctgtggctgacaatcgcagtcgcgatgtcggtagatggatccgcggcggaatcaagtactgtccccgggtgctggacgtcgcggtcgcgccctccggttctgggtgtaggccgccgcccgacctgggctcaggttcttgcttccgtcgtctcgagaggctgcgtctttcttgctttgctctggacagcggcttcgcgaggcaggtgcgcgatagctgccccgtgctccgatgcttggagctccaccgctgtcacattgagttcagccacatcgagtccagcacgctgaacaagctggtgattgaaggctgcataggctgctctcttagtcttgctatcagcgctcctcgacttgcttccctgtgcctggacttatcgtacggcgcatacaagaatggtgtttcgttaaatactatttcccttgtggaggcatctgttactttaaatgttttccaaatctcaccagaaggtgaagccatgcttctttgcggtctattcaatgtgaccaatttggagttggaggctattcatgccaagctcggcggcgtgctaggagcgaagctgagcgcagttggtagcgccaagggtggtggcagagagcggaggaaattttacggttgttgcaatgtcaatgagaaggtaatacttcatgagaaatttgacaaattctcatcattcaacaacctgagaaccttgtcactagacgattgttttcaaggcatgggtgatttgaaggaaaaattcaaggctctcggaagattactggaaaagtgtcctaatttggagaagcttacattgcagcattgctggtttttaagtggttctactcaaagggcagagatggagaccagaacgagtggactctgtctccaaagtcaggaccaagtgaccttccattgtcagaaattgaagttgattgaaatcaaacatgacagtgaactttgctgtgatcaccaactgtttcaactgatgtggggcttctggaaggacctaaaaaaggccaccatcattcttaccaaaatttag

SEQ ID NO: 8872 - DNA, 1509 bp, Oryza sativa
  Clone ID: PAT_MRT4530_15340C.1
atgccgggggccgtgatcgtgcaccaccacacgcggtacaagacgtaccccggcgaggtcaccggcttcgtcttcttctgctgcctcatcgcctccgtcggcggctgcatcttcggctacgacatcggcctcaccgccgggttgacgtcgacggagtcgttcttggcgatgttcttcccggtgatcttcgagcagcagcaggagcgggtgatcacgaaccagtactgcaagttcgacagccaggtgctgacgctgttcggctcgtcgctcttcctctccgccatggtcgccggcatcttcgcctccccgatgtcccgcgccttcggccgcaagtggaccctcttcgtcgccgccgtcgcctacctcatcggcgccatcctcggcgccatctccttcaacttcatcgttctcctcaccggccgcctcctcctcggcgtcggcgtcggcgtctgcatccacgcgtcaccgctgtacatatcggagatggcgccggcgcagcagcgggggatgctgaacatactgttccagctgatgatcacggtggggatcctgtcggcgagcctgacaacgtactggacgtcgaagatcgccggcgggtgggggtggcgcgtggggctggcgttcgggacggtgccggcggcggtgatcgcgctggggtcgctggccatcccggacacgccggtgtcgctcatcgcgcgcggcgagggcgaggcggcgcgcgcgacgctggccaagatccgcggcgtcgacgacgtgcgcgccgagttcgaggacctgacgacggcgagcgaggagagcaaggcggtggcgcacccgtggcgggagctcttcttcggcggcaggtacaagccgcagctcgcgttcgcggtgctcatccccttcttccagcagctcaccggcatcaacgtcatcatgttctacgcccccgtcctcttcaagaccgtcggcttccgccaggacgcctccctcgtctcctccgtcatcaccggcctcgtcaacgtcttctccaccttcgtcgccgtcatgaccgccgacaagatcttggtgggaacattcatcggattacagttcggggtgagcgggacgggggcgatgtcggagcagtacgcgatgtgcatcgttctgttcgtgtgcgtgtacgtggccgggttcgcgtggtcgtgggggccgatggggtggctgatcccgagcgaggtgtacccgctggcggtgaggtcggcggcgcagagcgtgacggtggcggtgaacatgttcttcacggcgttcatcagccagatcttcctcaccctcctctgccacctccgcttcggcctcttctacttcttcggcgcctgggtcctcctcatgaccgtcttcatcgccaccctcctcccggagaccaagtgcgtgccgctcgaagaggtggcgcacgtctggaggaagcactggttctggcgcaagttcatcgtcgactcccccgaccgcggcggcgccgagatgaggaagaggatagccctagagatgagctag

SEQ ID NO: 8873 - DNA, 389 bp, Oryza sativa
  Clone ID: PAT_MRT4530_15341C.1
gttctaataggactgaattttatttgtttttcgtttgtcttgaatgttgtccaacagttttagtcaaaaaaaaaaaaaaaaaaaaaaaaaaaaaaaaaaaaaaaaaaaaaaaaaaaaaaaaaaaaaaaaaaaaaaaaaaaaaaaaaaaaaaaaaaaaaaaaaaaaaaaaaaaaaaaaaaaaaaaaaaaaaaaaaaaaaaaaaaaaaaaaaaaaaagggggggcccgcttttggggtcccaggtttctccccccgggatgccgactattttctttttttttggggcccccaatttcaaattactggcccggtttttaacaccccggggcctggaaaaaccctggggttcccccactttaaccccttggagacatatccccttttcgccgg

SEQ ID NO: 8874 - DNA, 925 bp, Oryza sativa
  Clone ID: PAT_MRT4530_15342C.1
tcattggcagcctagccggcgtgtggagaggaggccggtgggggaggcagcggcagtgacgacgcggtgacgggcgacgagcgggagccccccccccacaccgccgccaccgccgtcgccgacggcgcgggcgccagatcccaccgccatggctcctcgtcgatccccggcgctggtggcggagacgaccggcggaggcgggtcgacgccaacgaggagaggagcggcgcggcggaggctgcccaaggtgacgccgcggtgggtggaggtggtcctgtgatcaatgggaactcggcgatggctggactccagccgcgatgtcggggtggcctcgccccaggtgttgccgacaaccagcgggaggcgcaatcgggtgatgacgacgagaaaaaaaatcgggtggccgccccccgaagaaatccaccgcagccgctggcgcacgtccccgggctggttgacctcaacgtccttggaccgtcggccggtgcccggtgacagcctggccaccacgctcgctggtcccgccgagttgccgccccgccatcctccgcgtcccgacaactccgcgccgaccgccgccgactcccgccggtctatcccctctgcgccgacctcagcgtccacctccactcgcgttgctccagggagaggtccaccaccggtctccatagccacccgggggaatctgtctcgccaccgcatccggcgggctcgtggcgccaccatcgcttaagctcaccacgccgccggacgccggatctcctccgccgctgaccgggtcgtggtccactggccgtcggctctctctctctccggtgcttgagtgcttctctatgcagccggcgtgcgagccaactcctgaggggtctgtggacttggtctatggaggctatccaacaaagggaggggaagaagcctcgtgccg

SEQ ID NO: 8875 - DNA, 621 bp, Oryza sativa
  Clone ID: PAT_MRT4530_15343C.1
cagatctcgggggagaatatctccagagttggttgatcggagcaagagcgagctaaccggcgaccggaggtagggatggcgatcaggagcatgacggtggcgacgacgacgcggtctctggacggcgacatgacggtggacgagttcaaggagtggctgaggcggttcgatgtcgaccgcgacgggcgcatcagccgcgacgagctgcggcgcgcgatgcgcgccatccgggcgcggttcacggggtggaggagcaggcagggcatcagctacgccgacgcggacggcgacggctacatcgacgacggcgaggtggacggcctcatcgagtacgcgcagaagagcctcggcctcaggatcgtcgcctactagctagctaatccaagccatggctgctagctcctttgcagctcgatcggctggccgtttgcgacctaaataatctccatcttgatcgcttgtcacttcgtcttgctttcttgtacttaaattaatcaactcatgtactgtgtgtgcttgtgatctgcgctgtattattaattgatgtatcactgattgctctttgagaaatcaattgacccatgtatgttcttgatcgacgaaaaaaaaaaaaaaaaaaaa

SEQ ID NO: 8876 - DNA, 441 bp, Oryza sativa
  Clone ID: PAT_MRT4530_15344C.1
atggtagttaagaaaaaacagccacaccatacgtttacgacaacaactgctgcgagagcgaaaacaagaactagcgatcttcgaaacgacgccgagcgcgccgccgccgcctggcctggggccaagacatggttttcacctgaagaaaaaaggttcctgtcacactccgctgccaccaccattcaaaaaccttcaacacgtggccaccgctctggcgcctcaccgttggtcagccatcatgaaggtgcacgaaccccgacgcgctctagctccatccacgcaattgggttggatggggagagggtgagagagaagaatggatcccctctcccccacactagcctgctcgacgtggccatcttttatcggcaaaggcgccatcgcacactactagaaaaacgattttttatggcgtttggaaaatatttttcatggcggcta

SEQ ID NO: 8877 - DNA, 177 bp, Oryza sativa
  Clone ID: PAT_MRT4530_15345C.1
gaagggctgagatcatagcagatctcatactagagcacccaagtaaacatctcccaaaagaaatgtacatgtttatcagtgattttatttatctaattagcataccaatacaaaggaaaagaagtgcacagactaaagaaaacctcacttttctcaaaatagaaaaaataattcatg

SEQ ID NO: 8878 - DNA, 574 bp, Oryza sativa
  unsure (1)..(574): unsure at all n locations
  Clone ID: PAT_MRT4530_15346C.1
agtgtcttccttccaaaacatattattgtttcttgtacttacggacttaccctcccttgataatcatctcaatgtctagtttggtccgatgaataagcatttagctagaagcctcttctcatgtttcacaagtgtgcatccccatcttacatgtcttcctgtttgagcaatgtaattgtgcaaatttgcacttctaatgtgatgatcttcagaaatcatgaccttaagggacttcaaagagtttttgtgtgttatttcatactagtatacttgaactcatctttcaggatattgtgtgtctcaggcagaagcagacatcagctgaccttctgttcaaggatgatattaatattgaatagcacgtttgcaggtttaaagttgtgtcacgagataggtcttgaaacatataacacctatggaaatggtatactgatctagtatggnttgcctgggggatggggactngcatgctgtgtatactccatgcgacatagcattagcctctgtgaaaatccagaattattatgtacttgatataaaaaacatgggccaaaactaaataagtttctgagta

SEQ ID NO: 8879 - DNA, 519 bp, Oryza sativa
  Clone ID: PAT_MRT4530_15347C.1
atgagcttagacaaaaccaatctggtgcctagcgccatctctaatctcgacgagctcatattcgaggaggaagaccacgttgtcgacaactacgtgttgattatccatgccgccaaattctacaactactcgattactcgagaacagttggacgactactcgattactcgagaacagttgatggagttcgacaaagattacggaatgaagcaatgtgtgcatgacaatgttgacaaagaaaacgcggatgacagcgtgaattcatttgagttgaagtcggtggctactgtcatgacccaatctggtgcctacagaggccgacaagagggatctagcgccatctctgatctcgacgagttcatatttgaggaggaagactaccctgtcaacgactacgtgttggttatctataccgccaatcgtggcctcaaacgtaagaaacaagtggtgcccaggagggatgagaatccatctcatgctccaattacaacaactgtttcatctgggcacccgctataa

SEQ ID NO: 8880 - DNA, 425 bp, Oryza sativa
  Clone ID: PAT_MRT4530_15348C.1
tattcttcattccggaatccccaagatggctggcaaaaatgaaaatgatggatgattttgagagcttctctacaagttttgaaggggtttgagactgatattactgcagaagtgaatgatataaagagagcagtagcctctgcaaacaaaagaaccacagtccgttttaaagagttgaaccaaaagaaataccgcactcccttactgataggaactggccttcttgtacttcagaatctaagtggaataaataggattctgttttatgcaagcagaatcttcagagatgcagggtttacaaacagtgacttggccacatgtgcactaagagcaattcaagttcttgccactggagttacaacatggttactggacagagctggccgacagatgctccttattatctctactgctgggatgactct

SEQ ID NO: 8881 - DNA, 558 bp, Oryza sativa
  unsure (1)..(558): unsure at all n locations
  Clone ID: PAT_MRT4530_15349C.1
ccggggttcacctttataacctgtttgagaagttgaactttcggcacataatctttcccaatctcccttaaacgggaaaggtggggactgttgatagtcgttttgagacttttaaaacaggcctttaagctgcttcgggttggataaatctggtttgtgagtgaatgaagtaaaagcgccctgagaattttgccaagtttaggtaaaatttttggggcatttttcctggctgaaaattttttggcggtgtgttcgccgcaatcatggcagataatagggtttgaaggctgattaatcccgctgtttctatgtctgataatttgaccgaactctcccaacaactccatgatgcttcagaaaaaaaacagttgacggcgatctagactgacaacttaagattcaggatggggttctttaactacatttgccataaaatgtagctatcatctgttgatagcccattcataatgcgaagacgcagacctaccaggcgaagggtttcttcgcgaattgtcacancaagcattgctgaccaaattgctaatagtcagcacaggt

SEQ ID NO: 8882 - DNA, 2658 bp, Oryza sativa
  Clone ID: PAT_MRT4530_1534C.1
ttaccaccacgcgacgaggcgtgggaacgacaacgacgaacgggcgcggcggagacagacgggcacaacggagacgaacggcgaggggacggcttcggcggcgatccttggacgaaggcgagacgcggccggcacgaggcttgacgacgcggagccgaggacgaagacgacgacggggctgcagcggcccacttgacgaacgcggacgacggacgagaacggctcgacggagggacgaacgccacgacgatgaggacgacgagaggacgacgacgacgacgacgactggggccggcgaggagacgacgagggcagccggcggcagctgcacggagacggggacgacgtggaacgcgccgctgcgaatccgacgacggaggcggcaccgcgagacgacgagccggcgaggatgaacggggcggccgaggggacgtcggcgacgacgaggatggaggccggcacgggcgacggcgttccggcgaaacagaggagcagcgggaggtactggacgccgacgaggaggccactccggcgagcttcgggcgaggaggaggacgacgaccgggcggtgggacccacgcgcggcgcggtcagcgcgcggcaaacagcgcacgcgcgcgcacgtgcgcggcacgggcgggagggcgccgctcgggttgggccgagaggcggcccaggaggagaggagggcgaggaggcctttcctttgctattgtctccaaatgtcactttctcttgttctttccctccttcttcaaatgtggtgaacatagccctatcaccggtcatgtgttgagtgcatccactatcaagcacccaatggctcccaccggtgcggtaattcaccaagatggcgacctcgccggagattggatggtcggctgcgactttggaggacatgaacacgtagaggacgacgagacgaacccaacggtactcaccctcgaaccaaacgacgaacgacgacggccggcgacgaggtctattggcggcgcggcttcggtcggcggtggcgacggggctccggtgaccggcgacagcggggagagagcggccgggcttctccacacctcggcgcaccttacggcgatgacggcgaccggcggcgacgacggaggcggcggcgcgacgcggatggagctcggccggcgacgacggcggggtggagcacgtggcggcggcgcgttgctcactcaaaatcttgtcaagagtgttcttacccttgaagcatatctccaaactcttgttgagcttggccacttgctccttaagctcattgttatggcaaatagcactatcatcaagcaagtcacaagatatgccagcatcaatgtgagctccatgttgggtagtggaaaggaggttgtcatgagcttccttaagcttctcatgagaaatggtgagtctctcatgtgaagtctttagctcctcatacaagacctccaaagaagcatgatccttctttagagccttgaacttgacaatctccttctcactataagcatgaagctcctcaaacatactcacaagctcaccataagaaacatcatcacaatcatcatcactctcactatcactaagagatgttaccttagaagagccctttgccatgagacaaagtggagcgaagagtgatggagcctccttgatggcaacaacggccatattcttcttcttggagcttgcatcatcatcaccttcttcttcggacccggatgaggtggagctctcctcatttgagtcccattgcccgatgaaggcctcaatcttcttcccttccttcttgagcttcttcatgagcttgtagcctccactcttcttcttggatgacttgtctccatcattagccttggaagggcacttggaagcaaagtgtcccttctcaccacactcaaagcacctcaagttggagagagtcttgttaggtattatatttcttctcctattggagttggagccccttcctctctcctttcttcttcccaagagatcattgaaccttttagcaagaagggcaatctcttcctccaagtcatcattggcttcattcaccttgctcttccacttgtcttcaacttcggcttggagagcaatgcacttcttagatggtgaggcttcctccatctccttcttcttcaacttgtacatgtcattggtgttgatcttccccaagaggcttgcgggtgtcatccttgacatgtcggagttgatgagcatggcgattagggtctcatacttctccggtagagcactaagcatcttttgggcaacctcaagatcggtgtaggttgccccaagccccttgagatcattcacaatgacattgagcctcccatacatgtcattcacactctcatgaggcaacattgagaatgtctcatattggatcttgaggaaatgaagcttggcatccttgtactcacttgtgccctcatggatctccgccaacttgttccaaatctcatatgcgatcttaaggttgctcactctatcgaactcctcttggctcaaagagttgaacaaagcattcatgacttgagcattgagtaggaggttgctgtgatcaatctccgtcaagggcgtgccggtgagatagcaaagccgaggttcggaaactcgctggtttcctactccctgttgaggcgagcccaactccat

SEQ ID NO: 8883 - DNA, 207 bp, Oryza sativa
  unsure (1)..(207): unsure at all n locations
  Clone ID: PAT_MRT4530_15350C.1
cctngctcctcccccaccattcccacatctctccctagccttcctcctctctctctctccacatctccctctcgcttccacgcctcctccgatttggcgacttcttctctagggttcgtctcgactcgactcgtcgaagggaagctgctccaatgancgnggncgacgctgaggcgtgcgcgntggccgcggacggcgggacatcat

SEQ ID NO: 8884 - DNA, 576 bp, Oryza sativa
  Clone ID: PAT_MRT4530_15351C.1
ctgcaggaattcggcacgaggctcttagttgttgctttataaaaaaaaaaatctatgttgccatcgattctttgctgtcatggtgaaggggccagctagcaagaacaacacttacatagatgtattatactcaagatcctttcgtgattgtttgaaaattatattcatggttattatttgacttgatacttattttcatgttttaaacacatgcactaaaatcagcttggaggaatgggagtataagcaggagtttatgtatccaaaatatgtaatcagactctgggatatgctgtaaatttgagctggtctgcctctgttaatgggttaaaagtcatggatgctggtgttagccagatgaaatagcatcattgcgctctactgtatcaggattcccttgaatcctggatttgctattttgttttgcttccctcaaacaattgtatctgatgttataatctgatatatcatagtttgaacgtgatacacaggtatagtatagtataacctgcagtgccagatttggacatcttcagttatgggacttgataaagcttggagatcatctcggtgaac

SEQ ID NO: 8885 - DNA, 467 bp, Oryza sativa
  Clone ID: PAT_MRT4530_15352C.1
cccacgcgtccgcccgcgcagtgagccccaaccccacatcgctagtgcgcccccgatggcgtcctcctagatctgtagctgcgctctggacggcggcgccccaccctcacggcagctgcatgaggatccacgccatcttacaccagcgtcaccagcggacggtgaggaggccggccgtagtcgcctcgacagagaggccgctacatgccgacagcctggctgtggccacggcgccactggacgtggattcaaggatgacagcagctgtggatgccgcatacgatgtcgtgctacggcatgctgcactactggaggaggccacccaccgacgcgaagcatgggcgcctctacgagcgtaggaagacgccgtacattgcggcctccttctttgtgactcctaccaccgctagtgatcaggtctgctccgagtacgccaagaccttctacctacgtactcagcttatgac

SEQ ID NO: 8886 - DNA, 393 bp, Oryza sativa
  Clone ID: PAT_MRT4530_15353C.1
atgcgcgcccaaggagtaagtgtccaagatgcccacgggctgaacctgcataatgcgcaagggccccaacctgttgaaactggcctggaaggaacagtgactgtccctgggcaccagtatccggtctaagtacaagatcaactaccagttctaccgcgtattgaccaatggtaaggtgcaaaagctacaccccaaggacggggtgtaccccaagaatgtcaacgcctgcaggcaagccgtaggccaaaacttgcgaagtatagggaagagcgcgagtcccatatagggaaagttcaccgtgaagaacgttttctacatatagacctattaatcacctgcgtcttgtgtgagagggacctattaattactagtgtgttgggtggatgtacatgt

SEQ ID NO: 8887 - DNA, 219 bp, Oryza sativa
  Clone ID: PAT_MRT4530_15354C.1
atggagggaagcaaatgcaaagtccaccccaaaactgttgaggatgctttgggcgtttgcagcagaactgtagaaggaacagatactactactacaactactgaaaagctttgctccagaatgcaagagaatgaaaaaggtacaacgaagttagatggggagcaacaaggtgaaagatcaggggcacagggtcgcaggatgcgcatggtgtttaattag

SEQ ID NO: 8888 - DNA, 492 bp, Oryza sativa
  Clone ID: PAT_MRT4530_15355C.1
ttttgtgtttttttagactaatatcctagcaactttgtgaattaaaaactgaaaagtggaagggcaataaaagccgaaagggccgaaaagcaagaaaaatgttcatctcagcatatcaggcgatggaacagaactaattcccagtccttatctacaaacacctacaggtcaagcagaaccggattcctgcacgaattagagccaacaaaccgaccaatgaacggtcccgatgcaatgcaagcgaaatgggcacgcgcgtgcgtacgtgttcgtacggattttgattattcctcgcgccggcgccggcggcggcggcggcggcgcgggaggctccaccgatcatcgatggcggatggctcacatgatcgcgcaggcgttggggttctcctcgctgaagatggtggtgagcctgttggcgtcggtggcatgcggtagatcccctcgcgcaccgggtcgggtagctgtagcggtactcgccggagaagtactcgt

SEQ ID NO: 8889 - DNA, 4740 bp, Oryza sativa
  Clone ID: PAT_MRT4530_15356C.1
atgccacgtcatcaccctacctctttccccttctctcccttcctcctctctctctcacacacttttctcctctctaggcaagcggcaagctggccactgagtggaggacgaggtcgccggggcgaggcgggaaaggaggaggccggtctggcggcgaacgacgaggcggcggcggctgcgacgcaggagcaggccaccgctccgaggtcggagttcgggacgaagacatgcaactgctgggggagaccggaggcgtttgacggtgagggccttggtcggaggcctaggcaatggtgtgacgtcgaggagctcagggtatcgtcgggagtcggaggtcgccgcgttggcagcgagggtggcggcgggtggtggtggggcttcatcgggagtgggagagcgttgatccattttccacaaaaattgatcaatctcatggcttcatcgtcgaactcaggaagcgccgccaatcctcttcaaggccacccagtttctgagaaactcgggaaggccaaccacgccctctggaaagcgcaaattagcgcagcgatcaggggagcgcgattgctggggcatctaactggtgctacccgcaaaccagacgctgaggtgtctgtcatcgttgatggcaagacggagaaaagaaccaacccggcgtttgaagattgggaggcctcggaccagcaggtccttggcttccttctctcatctctatcaagggatgtgctcatgcaggttgcgacgtgcacaacagcagccgaagcatggaaggcaattgaggagatgtactctacccacacccgcgcaagatccatcagcgctcgcttcgccctctccaacgcgaagaagggaaccatgacaactccggaattcttcgccaagatgaaagccctcggtgatgagatggtgatggcaggcggccgtcccctggatgatgaggaactcatccagtacatcattaccgggcttggtgaagggtacagcgaggtggtctctgctgtgtgtgctcgttctgagccactcacaataggagatctatactcgcaagtgctgaactacgaggcgcgtcaagctctctatcggggagcgcaggaggctgtcgtcaaccttgccaatcgcggcaatcaaggtggtggtggcggcggacgaggcgctgctcggggccgcggccgcgacaatcaaggtggtggccgcgggcgtggacgcacaccaggaggagtcgacaagcgcccaacatgtcaagtgtgcttcaagagaggacacatggccaccgactgctggtataggtatgacgaagattatgtacctgatgctaaacatgttgcagcggcgactacaaattcctacggcgtcgataccaattggtatatcgacacaggcgccactgaccatattactggagagttggacaagctcacagtaaaggagaagtacaatggaggtgaacaaatccacactgcaagtggagcaggtatggatataagtcatgttggtcatacagttgttcataccccaagtcgtaacattcatctaaaaaatgttttatatgtgccacaaaccaagaaaagtctcatctctgtacatcgtttagttgatgataactctgctttccttgaattacatcgtgatcatttctttcttaaggatcgaatcaccaggagaactcttcttaaaggacagtcttggcgcagactgtatcctttgccgcagtcttccctgaagcaagcctatagtgtcttcaaaccttccctagatcggtggcatagtcgtttgggtcatccttcaattcctattgttaagcaagtagtcaataaattcaatctcccttatttagatttgtcaaatgagtcagtttgtaatgcttgtcagcaagccaagagtcatcagttaccttttcctgtctctacaagtatttctcagcatcccctagaacttattttttctgatgtatggggtcctgccccagaatctgttgggagaaagaaatactatgtcagttttattgatgattttagtaagtttacttgggtttatttgttacaatataaatctcaagtacttgaaacatttcaggagtttcaagccatggttgaacgcctgtttgacaggaaaatcctagccatgcaaactgactggggaggtgaatatcaatcccttcattccttcttttcaaaaattgggatagtgcatcatgtttcctgtcctcatactcatcaacagaatgggtcagccgaaaggaaacatcgtcatatagttgaagtagcactatctcttttatctcatgccaccatgcctttgaaattttgggatgaagctgttctagctgctgcttatttaatcaatagagttcctagcagagttatccataatattagccctcttgaaaaattacaccaccagaaacctgattattcctctcttagggtttttgggtgtgcttgttggccgaaccttcgaccttacaacaatcacaaacttcagtttcgatccaagcgatgtgtttttcttggctttagcgacatgcttaaaggttttaagtgtttagaagtttcctctggccgggtctatatatctagggatgttgtctttgatgaaacaattttcccattttctgaacttcatgctaacgctggtgcttgccttagggctgagatagacttgctgtctaccgatctatttggtccggctaggtcaaaggggaatgaagaattgtctaaccatatgactaatccgttgcctcatgacgttttggatgaaaatgagtcacaggaaaatgatgctactccttcgccaagcacagaagatccggatggagcagtgtcgcatgatgattcggcatcaaattccgcgccatctgatgattgcagcagtcctggtgagacagcagctgacagccaatcacatgatgccacgggtgactcgccatccagcgctgcggcgcactcccgctccatgccagacacgcggcaccctgccactggagggtcagttcctgtcattgatgctgacgtgcgtctgtcgacaggggaagaagaacagcagcaccagtctgatgatgcgacgtcggaacagcagccggaacaggagcaagacaggccacgcaccaggttgcaaagtggacttcgcaaagaaaaggtatatactgatggtactattaggtacaaaaattcctggtttacagaatctggtgaacctactactgatttagaagctctaaaggatagaaattggaaaatagctatggactcagaatatgatgctttagttaagaataaaacctggcacctagttcctcctcagagagggaaaaatgtcataggatgcaaatgggtttataaaattaagagaaaggctgatggcacactggatagatataaagcgagattggtagcaaaggggtttaagcagagatatggtattgattatgaggatacatttagtcctgtagttaaagctgctacaatcagaataattttgtccttggctgtgtctagaggttggagtcttagacagttagatgtgcaaaatgcctttctccatgggtatttagaagaagaagtgtatatgcagcaaccaccaggctttgaggatccaactaaaccacactttgtttgcaagcttgataaagcactatatggactcaaacaggcaccacgagcatggttctcgaggttgagtaagaaacttgttaatcttggttttagtggatccaaagctgatacttccttgttctttctcaataaaggaggcattactatgtttgttttggtatatgttgatgatattattgtagccagttcttcagagagggcaactacagcacttcttcatgatttgaaggaagagtttgctctcaaagatctaggtgagctgcattactttcttggtatagaggtaagcaaggttcacaatggaattgtcttgacacaagaaaaatacgccgctgatttgttaaagaaagtgggaatgttggattgtaaaccatcaaatactcctatgtcagtaagtgaaaaactttctttacatgaaggaacacctttgggagatgttgatgctactcagtataggagtattgttggtgctttacaatatttaactctcactagaccagatatagccttttctgtcaacaaagtttgtcaatatttgcatgctccaactacagatcattggatagctgtcaagagaatattaagatatcttaagcaatgcacttgtttggggctaaatattcataagtctggatccactttggttagtggattctctgatgcagactgggctggtagcttagatgatagaagatcaactggtgggtttgcagtttttctgggatcaaatctagtttcttggagtgctagaaaacaggctacagtatccaggtccagcacagaatctgaatataaagcaattgcaaatgcaacagcagaaattatgtgggtgcaaacactcctgacagaactaggaattaaaagtcctcagacagcaaagatatggtgtgacaatcttggagccaagtatctttctgcaaacccagtgtttcatgctagaacaaagcatattgaagttgactattattttgttagagaacgggtaagtcaaaagcttttagaaattgattttgtttcctctaatgatcaagttgcagatggtttcacaaagcctctgtcagtaagacttctggagaattttaaaggcaacctgaacctaagccggtcaaggttgagagagggtgtcagctaa

SEQ ID NO: 8890 - DNA, 243 bp, Oryza sativa
  Clone ID: PAT_MRT4530_15357C.1
atggagatgggtagggacgtggatgcagggcagcagcagaggcggctggtggtggtgcacagccaggtgaggcggatcaagcaggaggagggggagaaggtgaaggtggacgagacgtaccagcaccaggtgtcggagatgcggcggatggtggtgctccgggacatggaggcgaggcagcgctcccgctcgccgctcgggagggccgcccgcccggcgatctccatcggcggcgactcgtga

SEQ ID NO: 8891 - DNA, 378 bp, Oryza sativa
  Clone ID: PAT_MRT4530_15358C.1
atggcgcgaggcggcggcggcggcgacgacgacgacgacggcgcggggcggcggcgacaacgatgcccggcgcggctcccctcccctcccctcttgcctggcgtggcgacgccggaggaggatggcggcggcgaccgccgccctgcgcgccctcccctccgccagatccagctggaggggaggcggtgggcgacgagtggcagcggtgccctctccttcgccggatccggcaggaggggtggcgggagtgataaatattataaccgtggatttttgaagcccaacaacgtatttgggtctccattcaataccctgcactcgaggatctccgtcgaccaaacgcagtgcggtcgccttggcagccttcgtttctcctag

SEQ ID NO: 8892 - DNA, 486 bp, Oryza sativa
  Clone ID: PAT_MRT4530_15359C.1
ctacagtgtacgatacactcgcaggaaccaaccaagctaagtaattaattatcaatggcttcctgccgtggcgaacatggccgtgaactgcctgctcctcctgctcgtcgttcatttgatggcctatgccatcgcctcgcgcgcggacacgcgcgacgacacggtggacctgctgcgcctgatggtccgcctcaagctccacgtggagcaggccctggacctcgccgtggagctcgccctggtgcacgaccgcgccgacgacggcgccggagacgcctgctgctgcagctgctcctgcagcacgacgtgcatcgacacctgcatgatcaagtgctggctcaagggattcaaaagctgactcacctgcttcttcacctgcgtcttcacctgcatctagagcttcaccttgggctcctactcgatcacttaatcactcaatcgattaggctcgcgatcaatctcgatcgatcgggcgatcgaacctaa

SEQ ID NO: 8893 - DNA, 1354 bp, Oryza sativa
  Clone ID: PAT_MRT4530_1535C.1
attggccgcagaaaaacgcaagaatcgaatgagagatataaacttaaaagaaataacaaggatgcctttgcgatagcggaaaacatgcctgagctacgacttcttcagatttcaggtaacaacctgaccaacaaaggggttcatgccatcctcgatggctgcccccacctcgagtgtttcgacctctccgagtgctacaatgtcagagtcgatgatcagctccgagctcgctgcgcaaagcactgccctgatctccgtgtcatcgaggaggacgaaggtgaagactatggcatcactatgcaagatctatgggaagctgaggttgagactctggaggccgaggccaagatggaggagggtagctatggcgactattatgaagactactctgccctctcatcccctgagtctaactcacaaccatttttagtttcccttccaagttctgattttgtcactgatgataccctcatttgtaggctcttgtttgcacgatggaggcggtgccaagccccttacctgatactgatagcgatagggattggtctgagctcccagtggatgcactttctgcaatcttcacgaaacttgggactgttgagatcctaatgggtgcaagctttgtgtgccactcttggttggcagcttcaaagtcacctgaactgtggcggttcgtggacatgacacgccacaaggtgattttctcaaagagaactggcatactgtgcgcgatggcaaaagcagcgatagatcgctccgatggacagattgagtcattctgggcccagaagtttgtcactggtgaactcttggattatattgtgagaagggccagtacattgaagagcattcgactcgttgcatgcacatttattcagtggcaatcattggctatgcttgctgctaagtgtccacttctagaggagatagagtgctcatatcataaaatgccagcagattttttcaaatgtgttggcagagttcgcccaaatctgaagcgcctaagaatgacgaatatgaagaacctttcgagcagtgggaggcaaggcgaaatgtggatgcctttgccatagcagaaaacatgcacgagctacggcttcttcagatttcaggtaacaacctgaccaacaaaggggtgtacgccatccttgatggctgcccccaccttgagtgcctcgacctttccgactgctacaaaatccacgttgatgatcagctccgagctcgctgctacgaagactactctgccctctcgtcccctgaatcttgcgtcgactcaaaggatgtatattgtgatgaccccaaggtttacactatgtaccatgattactattctctgtgatcttcttatagc

SEQ ID NO: 8894 - DNA, 1713 bp, Oryza sativa
  Clone ID: PAT_MRT4530_15360C.1
atggactccgaggacgacatgctcgacgcgaacgactccgccgacgacgacttctacagcggcggggaggccgggctcggcgggagcgacgacggggacgccgactacgacttcgccgaccacgactccgacgattccgcggagctcctctcgcaccggcagcagaaaaacaatgggaattctatgggtgtattgtttgggagggtggggagcggggatataaattcatgggataaagatagtctacaggaaataggctatggcataactgtaaatgaattgtggatatatccatatccttaccatactgaaacaaccgccattattcgcaaagggtcgcgatctcatgaggatgagcaaaattacagtatattaagtgaagccgatatacaacagcgccaagaggatgatataaatagggtttcaactgttctttcaatttcaaagtcagaagcatgtgttcttcttcgtaattataactggagtgtcagtaaggtgcatgatgaatggtttgctgatgaagaacatgttcgtaaggttgttggttttccggaaaagctcatcgaaatgccaaatgacagagaatgcatgttggagaggtttgacaatctaaccttgagatatttctctttatcaaccccggattctgttttgtgtgggatcaccacttacatagtgcacattgacagatgtcctgatccgtcctgcacagctgctgttggtcaagatatgatcaattcactggctgatgacgaggatagggaaaagtatgggcgatatcttcgcagatcttacattgaagataataggaagacaaaatggtgtcctgctcctggatgtgaatatgctgtagaatttgtcatgggcagtggtagctatgatgtgaactgcaactgttcatacggcttttgttggaactgcactgaggaagctcatcgtccggtagactgtgccactgtttcaaagtggatcctcaagaacagtgcggagtctgaaaatatgaactggctgtgtcttggtccatggtcggagcatggagaacggactggtggattttatgcctgtaaccgttatgaggcagcaaggcaggaaggagcgtatgatgaatctgaaaggagaagagaaatggcaaagaactcgcttgagagatatacacactattatgaacggtgggcagccaatcagtcgtcgaggcaaaaggcattaggagatctgctgagtttgcaaaacgacaagcttgaaaagttaagtgatatacaaagccaaccagagtcacagctcaagttcatcatagaggcttggttacagattgtcgaatgtaggagggtattgaagtggacttatgcttatggtttttacctcccagagcatgaacatgccaaaagacagttctttgaatatctgcaaggtgaggcggaatcaggtttggagcggctgcatcaatgtgcagagaaagaacttcaagtataccttgaagcagaatctccctcaaaagatttcaatgacttccgtacaaagttggctggattaactagtgtgactcgcaattatttcgagaaccttgtccgggctttggagactggattaaatgatgtaggtccttccactagccatggtacatgcagcaagagcgcaacttcgaagagtcttggcagtaaaaatctgccagaaactgccaggcttgtaacaaccagcatcgatagcattacatag

SEQ ID NO: 8895 - DNA, 2248 bp, Oryza sativa
  Clone ID: PAT_MRT4530_15361C.1
ttttttttttttttgtggatgtaaatttccttgagaattggccaattcattattacaaggttacaacatcattacaacaactcagttcattggtggcgcacatctgctagtacgcgctacttccatagaacaacacaagagttacagatatcgatatagagttatatacaggatgaactagatgatgatgagcgaggcttcaaggataccgtcagttgattaaaaaaattgggaatgacctgaggttttttagccatagcacatgatgagttgagaaaatctaatttgcataggcaacagttctctgctaatacctcctcacgccagctccactgttcattgaaaacttcaactttgcatatgttctttaccaccaggtttgaaccagaggtttctcaaccaatggagtcgagatctaaaaccatagctatgtaatgctatcgatgctggttgttacaagcctggcagtttctggcagatttttactgccaagactcttcgaagttgcgctcttgctgcatgtaccatggctagtggaaggacctacatcatttaatccagtctccaaagcccggacaaggttctcgaaataattgcgagtcacactagttaatccagccaactttgtacggaagtcattgaaatcttttgagggagattctgcttcaaggtatacttgaagttctttctctgcacattgatgcagccgctccaaacctgattccgcctcaccttgcagatattcaaagaactgtcttttggcatgttcatgctctgggaggtaaaaaccataagcataagtccacttcaataccctcctacattcgacaatctgtaaccaagcctctatgatgaacttgagctgtgactctggttggctttgtatatcacttaacttttcaagcttgtcgttttgcaaactcagcagatctcctaatgccttttgcctcgacgactgattggctgcccaccgttcataatagtgtgtatatctctcaagcgagttctttgccatttctcttctcctttcagattcatcatacgctccttcctgccttgctgcctcataacggttacaggcataaaatccaccagtccgttctccatgctccgaccatggaccaagacacagccagcaaaactcaaatttgcatggaggtgtgcatgtaatgtgcatgcatccctggtttttttcaatgggccgcttgcacttaggacaaggctttgaattagctagaatccagttcatattttcagactccgcactgttcttgaggatccactttgaaacagtggcacagtctaccggacgatgagcttcctcagtgcagttccaacaaaagccgtatgaacagttgcagttcacatcatagctaccactgcccatgacaaattctacagcatattcacatccaggagcaggacaccattttgtcttcctattatcttcaatgtaagatctgcgaagatatcgcccatacttttccctatcctcgtcatcagccagtgaattgatcatatcttgaccaacagcagctgtgcaggacggatcaggacatctgtcaatgtgcactatgtaagtggtgatcccacacaaaacagaatccggggttgataaagagaaatatctcaaggttagattgtcaaacctctccaacatgcattctctgtcatttggcatttcgatgagcttttccggaaaaccaacaaccttacgaacatgttcttcatcagcaaaccattcatcatgcaccttactgacactccagttataattacgaagaagaacacatgcttctgactttgaaattgaaagaacagttgaaaccctatttatatcatcctcttggcgctgttgtatatcggcttcacttaatatactgtaattttgctcatcctcatgagatcgcgaccctttgcgaataatggcggttgtttcagtatggtaaggatatggatatatccacaattcatttacagttatgccatagcctatttcctgtagactatctttatcccatgaatttatatccccgctccccaccctcccaaacaatacacccatagaattcccattgtttttctgctgccggtgcgagaggagctccgcggaatcgtcggagtcgtggtcggcgaagtcgtagtcggcgtccccgtcgtcgctcccgccgagcccggcctccccgccgctgtagaagtcgtcgtcggcggagtcgttcgcgtcgagcatgtcgtcctcggagtccat

SEQ ID NO: 8896 - DNA, 435 bp, Oryza sativa
  Clone ID: PAT_MRT4530_15362C.1
ggggggggaaggggactcacacctccaaatgggaagcccctagtgttttaacttgaaaattgtcataatgttttttcaattaagtttaaacaaagaggacaattttttttttttgtttggaacttttaggaaaaaatttggtcacccttcaaagtatgcacatatttttttttaataccgatttcagggttttaacccggaccaaagattgggccacgtagcgttatataaatcaagcttcgccttttgtgaaaatttgccacgtgtcaccttgtttttttccgcaccattttctacacggaaacgccgatgagcacccaactgcagttgcacctgtttttcttattatttaaagattgagtccaccgtgtattgttttttttaaaaaaaattttatttaaagcaagaaatgtgtaaagaggcaccaggggggtg

SEQ ID NO: 8897 - DNA, 545 bp, Oryza sativa
  Clone ID: PAT_MRT4530_15364C.1
cgcaaaaaacatgggtaaaccagctggtattcgagcaggacgaaaactcaagactgatagaagagagaaccgatgggcagataaagaatacaaaaagaaacacttaggaactgccttcaaatctaacccctttggaggagcttcccacgccaaaggaattgttttagaaaaattaggtattgaatccaaacaacctaactctgctattcgaaaatgtgtcagagttcaactcattaaaaacggtaaaaaaatcaccgccttcgttccacgagatggttgccttaactttgttgatgaaaacgacgaagttcttgttgcgggattcggtcgatctggtcacgccgtcggagatattccaggagtacgattcaagattgttaaagttgctggagtatccctccttgctttgtttaaagaaaagaaagaaaaacccaaacattaattttcttgcgaatttattctatttgtgaaaaacaataaattatccccttaaaaaaaaaaaaaaaaaacagagcggccggtccaacatcagaatgcctcgtgcc

SEQ ID NO: 8898 - DNA, 424 bp, Oryza sativa
  Clone ID: PAT_MRT4530_15365C.1
aagcgaacccgcggaccgcccgaatcccggtcaccaccccgattttaccagagaagagcaaggcggggcttcaagaaggagggatccaaagcgaacaccagaaaggcctaagtctaccccgcaaaaaatacagctcaggcgaaagggaaggcgaagcatgcggcgctaaccgacacgaccccgcaggaccacgggccaagacaacccggaagcacaacaaacacgaacccgtcctcggcgggaaaatcgagaacggcaccagctttctcaagagacacacctaactgagaccgcgggtcccaacggatatagaacaagacaaactgcaacaccaacatgcacaccactagaaatggcgccgaacaatccatatacactgcctgctgggaccatccactccgcagaagggaaaaaccagaaaacc

SEQ ID NO: 8899 - DNA, 537 bp, Oryza sativa
  Clone ID: PAT_MRT4530_15366C.1
atggagcgggggcggcgggagaaggagagagagccggccggcgcgacggcggtggcaggagaggtggagagagcccgccgacgcgacggcggcagtggaagaaaaggagaggaggcggccggcgctgtcgaacgcgcacgggaagcagcggacgatgccgagcaggacaatgtcctcctcgtcaccaccttcctcatcgtcgtcgcggtcggtgggtgccgggcggagcggtttttgagggaggggtcggcggccggcgagcccatccgagctcgcctggcttgcgcgagcccgccctcgctgcagcttggtgtgctggggacgacgacgaggaaagggggagagaggaatcaactaccgacgacagcggaggcgggcgagcgcggtgccgggctgctcacgctcgccgaccaggccctcgctccgtcacactcgcctgcctccgttccacccgcagcccgcgccgctccgttcgcagcgctcgcccgtcgccgctccgctgctgtgcagtcccgccgccgcgctcgccctgactga

SEQ ID NO: 8900 - DNA, 453 bp, Oryza sativa
  Clone ID: PAT_MRT4530_15367C.1
tcggtctgaccaacttccacggcctggacctcaccaccgacaagctgcgctcgctcatccgcaagtggcacaccttgatcgaggcccacctggacgtcaagaccacggacggctacctggtccgcctcttcgccattggcctgaccaagcgccggcccaaccaaacctccaagactgcctacgcccagtcctcccagatccgcctcatccgcaagaagatgaccgaggtgatggagaaggaggtgtccaccgtcagcctgaacgagttcgtgggcaagctgaccaccgagaccattggcgccgagatcgagaaggccacccaaggcatcttccccctggagaacgtcctcatccgcaaggtcaaggtcatccgctcgcccaagaccgacctgggcaagctgctggaggtgcacgcggacgcgggcaagaaggtggagcggaagtaagtggagg

SEQ ID NO: 8901 - DNA, 381 bp, Oryza sativa
  Clone ID: PAT_MRT4530_15368C.1
atggctgacataggcggcggcgctacggcgcccatgcccgcaccgtcaacgcactaccccgcgcgcgaccgcgagctccttgccggcagcactggcgccgtcgcaggggaggaggagcccagcgcggacgcaacggtagatgtggaagtagagcgcgaaggtgctgccctcgccgcgtcgttggcgtggagcacgacgagcacgtacttggctagcttgtcgaggcggcggaggaagcggccgcccgcgacaagctccgacgtggcgtggacggtggaggatgtgactgtcggtgacgagttccggcctgggacgtggatgacgaaggacacgcccgtcgacgactgtcacgcccagaaattcacgaaccagaatttctaa

SEQ ID NO: 8902 - DNA, 735 bp, Oryza sativa
  unsure (1)..(735): unsure at all n locations
  Clone ID: PAT_MRT4530_15369C.1
nncgagccgccgggagcattcgtcaggccgggacaaacctctcaacgaccgaccttgaagagacgagccgcagccatgtcgtcgaccaagaagccctccggcaagactcagcgctccgccattgcggatgtcgtcgcccgcgagtacaccatccacatgcacaagcgactccatggtgtcaccttcaagaagagggctcccaaggccatcaaggagatcaaggcctttgccaccaagtctatgggtacctccgatgttcgcatcgaccctcagctcaacaagaaggtctgggagcagggtatcaagggtgtcgactaccgaatccgcgtgcgaatttcccgacgacgaaacgacgaggagggtgccaaggagaagctgtacagctacgtccaggccgtgaacgtcaaggaccccaagggcctccccacggttgttgttgaggaataaatataaaaatttctcttgggacaaggttctagggtggcatggcatttggagttgtactcggcattctggctttcgacgctgaaaaatacacagagggaaaatgtgattaaagcttgaagtcaacccaaacgacaatcggtgcctcggcgtgaagtgactggtctctggtcaaaggcttttttatgagggcgaanaaaaatttacgttctgacgtggtgaacactggatgttatgaactgtcgattagagggtctgctatcgacaacggtctaatttattctgaccacg

SEQ ID NO: 8903 - DNA, 1279 bp, Oryza sativa
  Clone ID: PAT_MRT4530_1536C.1
ttcgtccatcagcttccgcatcctcacggctcactgttcgacagagcgaaccgtgcgagcccgccttgacgggttcaaaagccgtcttcgggccaaggatgatgaattaggccgcaaaaatttggagatggaggcccttgcgaacacccttaaggaggcgaaggccgaaaacaagcggctccaatcggaacgggagaaagggaaggaagctagggccgaagtcgatctcttaaaggccgaactggagaaagagaaggcccactccgccgtgctcatagattattacaacctcaccgagccgaagatggaggctcttcggcaggaggttcgcaaggccgaagcaagcgctacggaggagtcgcggcggttttcgcgggagatggtgaaaaccacctagtccgcgcggacagcgtgccaaacgctccgcctcgccattactgatatgggcgcaaaagtgcagggtgtcccctccgaagatgcctcagccttcgacttctccgaatggacccaacaggctggtggttcggtttcggactgcgccaccgcatacggcgactgctgtgcgcgcgtgtcagcggcctttaccatgggcctcctgcagcagttcggctgcgagcacatcgccgagttccccaagtacgcgaagggggattgggaaatcagcgcgcaagacatttcgcccgcacttcgtgcgtagcgaaaacaattctggcagaaggatggccgctccgccgctaaggcgcgccttttggagcagctggtgaaagcagaggcggcggacctttgtgaagaggaaggcgcggcggccggagggggtggaagcgatgcccaggaccacccagagggggttcgccgaaagtcgtgcattcggcctcctttcgggagctggcgaagtcaaaccgagaaatttgtggcgttgaagggtctgccgaaggtgcgatgtccatttcgtcctacttatcgcgaaatggagataaacggtcgcagctataaggttttcaaggttgccgattggctgcgggcgcaccccgggcgaaccttagaagattacgatcttgttcattcaagacgtttggaggatatggctcgcttttggcgaaaccatcagaagactaaacgtcaggaaacgatctttcagcgtcgttatagtttagtctgtgtttcgccccctactcctcttaaggttgtgtatgatattagtagtgatgacgaacctagttcgcctgacccttccttagggagggatagtgattatgggggcgaagatgtatttttactt

SEQ ID NO: 8904 - DNA, 235 bp, Oryza sativa
  Clone ID: PAT_MRT4530_15370C.1
atgcagtccatctacagcgccttgcgaatcgccgtcaagcatgccggctccgtggactaccacctctagcttaccgagcagacctttggccttgtaccatgagcgaccttatcacttggtctgtcgaacgtccaacctacgttttcggttagtgtccaacatttaggagtgaaatagtcgggggtgtctccggttctgttgaagccaactcagaccagattaccatgatccatgt

SEQ ID NO: 8905 - DNA, 420 bp, Oryza sativa
  Clone ID: PAT_MRT4530_15371C.1
tcttttatcgctatgtatgtcatgggtcacattttactggatcaatgggaaccgccacaaggtggcactcactccagaatgatggcctgggcacgcccgtgtacctcctccgcgatgtgttgcccggcagggagcaccatgcgcacgaccggcagacaggcatagccgacctcgtgccggagcagctggtcgtgcaccacctgccgtggcctgtaactcacgactctgtgacgaacgagatcgagctacctgaccggacaggcccctggcgactacggcaggcactgcggggggacgagcagctagccggagacgctcgccataaacacgtagccgtacaggatgaactccccgtgtgccatgctgtgctcgcaagctagtgctgttacggagtgcttgacgacgaagggaggttacttc

SEQ ID NO: 8906 - DNA, 279 bp, Oryza sativa
  Clone ID: PAT_MRT4530_15372C.1
cccacgcgtccgcccacgcgtccgcccacgcgttcgcccacgcgtccgcccacgcgtccgcccacgcgtccgcccacgcgtccgacctgctgtccgtggcgtacaagaacgtcatcggcgcgcgcagggcgtcgtggcgcatcgtgtcctccatcgagcagaaggaggaaggccgcggcgccgctggccacgccgtcgtcgcgcgctcctaccgcgcccgcgtcgaggccgatctctccaacttctgcgcggggatactccgcctccttgacgagcgcc

SEQ ID NO: 8907 - DNA, 417 bp, Oryza sativa
  Clone ID: PAT_MRT4530_15373C.1
atggcgtcgcgagtggagtggagtggagtgcagtgggttcggccgtgccgcatgggtggcggcgcacgacgactgcacggcgcgcgtgggcgtgggacactccgcatcgtcgtcgccgcgggcctccgcgtcgtcctccgcgccatcgtcgccgggggactccgcgtcgttgtcgccccgaccccaccctaccgccatcgcctcgaggtcggcggcgcggagtgcgtcgatggagacggcgttgtgcaggcggagggccggctcgtcgttgtcgttgccgccccgctccagatcccagagggtcgggggaagacgatgggctgcgccatctcgctgcggacgacggtgacggcggagccggaaggactccgcgtcgtcgtcgccgggaggacgacggcgacggcactgggcggatga

SEQ ID NO: 8908 - DNA, 249 bp, Oryza sativa
  Clone ID: PAT_MRT4530_15374C.1
acgtgacaatatctgtttttatttctgtaatgacgtcagagggcacgtcttaaccgaatgctacaagatttattcgtcggaggtttgaggagcttcttggcgatcaccaccacggaagccaccacgaccacggtaaccaccacggccacgaccaccacggaatcctccacggccaccctcagggcgttcaccgcgttgttcgcgatcacgttcctcacggtggtacttctcgaccttaggggcggacaa

SEQ ID NO: 8909 - DNA, 395 bp, Oryza sativa
  Clone ID: PAT_MRT4530_15375C.1
ttctggtcgatcgcccataaccgcgggcacggctattcgaatagtttctctggccagaggtgcacaactgtacctacaagacacaatccatcagcatgtcaccgtgcccggccggaggcgtcaccatgtcaagtgattgtgacaagacccttcatattaccctctctgaccaagcacaccataccttaggtttcaccccgcccccagcaggcagcgagcagtcccctctcgtgcctaggtgaatctggaagcgacaaaggccgtcgcagggcccatcccgctccatcacgcccaccattgcttagatgcgtcagccagagaagagctatacttcaagtcaggcagttacccattcccgcttgtggcaagcattgtatgtcttccagtgcatcccg

SEQ ID NO: 8910 - DNA, 300 bp, Oryza sativa
  unsure (1)..(300): unsure at all n locations
  Clone ID: PAT_MRT4530_15376C.1
aaagtcagaaanaaatgcgcgcgaaaaagcgatcccagttttccatntcgatcgatntggtgcggacaaagttattggccgtctgtaacagtctctntggatgatgttgaccaacatactcaaaaataactttaaacccattttcattctttcattttttttttgttcttcttttaccgtttcaatagctttttttttttttgcgacgtggctgtccaatgtacaggccattntggattntggatttcataccagcagctcagagatgttagtctcaaaaaaaaaaaaaaaaaaaaaaaa

SEQ ID NO: 8911 - DNA, 1698 bp, Oryza sativa
  Clone ID: PAT_MRT4530_15377C.1
ccggtccccctccccgccgcccccgccccgcccctcgccgccgaacaggggggaaaataaaaataaaatttcacggcttcatctcctcgtcgtcctcctcctcactgatctccccccccccccggattcggtgctcgcctggcgattccttgcgagatgttgatcccatggggcggagtcgggtgctgcctcagcgccgcggcgctgtatctcctcgggaggagcagcggcagggatgcggaggtgctgcgatcggtggcgagggccggaagcacgaaggatttggctgctatattggacactgcaagtaaggtcctgccacttgtagtggcagtctctggacgggttggttcagatacaccacttatctgccaacaaagtggcatgagaggtgtaatagtagaggaaacggcagaacaacacttcctaaagcacaacgatgctggatcatggattcaagattccgctgtgatgctttctgttagcaaagaagttccatggtacctggatgatggtaccggccgtgtttttgttgttggagctcgtggtgcagctgggttagttttaactgttgctagcgaagtttttgaggagtcagggcggacacttgtgcgtggaactctagactatttacaagggctgaagatgcttggagtcaagagaactgaaagggttcttccaactggaacttcattgactgttgttggtgaggccattaaagatgatgttggaactattcgaattcagcgaccacacaaaggaccattttatgtatccccgaaaagcatcgatcaacttatcatgaatcttgggaaatgggccaagttataccagcttgcttccatgggatttgcagcatttggtgtctttcttcttgcaaagcgtgcactacagcattttctcgaaagaaaacgacgacatgaattacagaagagggttcatgctgctgctgcacaaagacaagctagagaagctgaagggggcaatggtacatcagatgtagattctaacaataaaaaggatcaattggtcttggacatatgtgtcatatgccttgaacaggaatataatgctgtttttgtgccgtaaggccacatgtgctgctgtatgaactgctcgtctcatttgacgaattgtccactttgccggagaagaattgaccaagctgtgagaactttccgccattgacagcacttcgatgcaaaatctggtaccgcatctttcagatccacttgattcttggaatgtggactgctgtcacctgattcttggaatgtgtgtcacctgcgtactccctctgtccagaaaaactcaaccgaggggatgacccctcctagtacaacgaatctggacagaatccaagaggggatgtgacccctcctaggttgagttctttcgggatggaaggagtatgacatttgatctgcagtattgcgccgaagcaacgcaggtaaaaactcataataggatatactttctggccatcatgtcgattgctgttcttgcctgtagtgtacaatcgcgtccagaatgtcttgtgtaaatgtgcattggttttcacagcacgcttacttgttagtaacatggatgttaatatttctttgtgcccagtgtatcctgcctattaggggtatgaacttgttttttcttttttcttatgaatggaatggttcttgtgtactcaaaaaaaaaaaaaaa

SEQ ID NO: 8912 - DNA, 155 bp, Oryza sativa
  unsure (1)..(155): unsure at all n locations
  Clone ID: PAT_MRT4530_15378C.1
gggggggggggggttgcnnctgagccaccacaggggggggaaacacacgcgacctcagacagaggagagggctggaggggccggccacaaagcgcgggcagcagcgcgctggggcccagcggagctgacccgtgtgcaacaggacggccctccgg

SEQ ID NO: 8913 - DNA, 974 bp, Oryza sativa
  Clone ID: PAT_MRT4530_15379C.1
gtagagcaaccattagaggagccaattactaaggtttctttgtgacaagttgatttatttgttattccttgtggtaaagaagagttgtgttataatacttcacttatatgcatgccacaactaatgaatgaacatactattcctagtgttcttttatgtgctgattttaagcatgttgttcataattgcgaatgaagttgaggaatgtgaattgctatcttctttaaagactttgggctatattatgtttgatgacttttgtgtactcgataatttgaagtagaatttattagctaagtctaatttggcatgtcgaatgaatactatttatcatatctttggtgaaaataatactatttatcatatctttgatgcataaagtttacatatgttcagttttgtaacatcgtatattcatagaagaaaatagtaagtagggagatacattatttgtaatcatgttatctcaagtttatctcatttcaatttaaagaataagttggttctaaatgcactacatgaacaacaacatatggaaaaattgagaacggtttcctttgaagaaggggaggacgatgtgttcatgcctactatagaaacatgaaggcatggagaacaagcaaaaacaattcaattcggccacgttgaacaacagtgacttcaaacggtcaccaattgtgcataagagctttgttttgggcccatgatggaaagctcttggagtcctctttccaatggatccagtcgcatctccaaattccatctaagttggccacaattgcaaaatcaatgtactgtatcacctgggaccccggcctggggtgcgccccaaacttgtggagcatgaccctaggttgatttacttacaggaatatggctgatctgcaccggtaagatcaacaacccatggtaaggcacaacacaacaacgcctcaaacaattgtaattgcgccgacaacttctctcccaaatcg

SEQ ID NO: 8914 - DNA, 677 bp, Oryza sativa
  unsure (1)..(677): unsure at all n locations
  Clone ID: PAT_MRT4530_1537C.1
atccagctatcatatagtaataataagttaataaaggcgacaaattcacaaggtcatacaagcaacacaagcttgccagcaaaagcaaaagacttactccaggatatacacacacacaaacatagccctactgtaacgattctaattaacctccaaatactaacatcctgtattggttaaacaaggctataagaagatcacagagaatagtaatcatggtacatagtgtaaaccttggggtcatcacaatatacatcctttgagtcgacgcaagattcaggggacgagagggcagagtagtcttcgtaatagtcgccatagctaccatcctccatcttggcctcggcccgcagagtctcaaacctcggcttcccaaagatcatgtagagtgatcccatcatcttcgccttcgttttccccaatgacacggagatctggacagttaacatgaggccattgtccaggcaaccagacatgntttgatctttgcgcagcgagctcggagctgatcatcaacgtggattttgtagcagtcggaaaggtcgaggcactcaaggtggnggcagccatcaaggatggcgtacacccctttgttggtaaggntgttacctgaaatctgaagaaaccgtagctcgtgcatgttttctgctatggcaaaggcatccacatttcgcctt

SEQ ID NO: 8915 - DNA, 1728 bp, Oryza sativa
  Clone ID: PAT_MRT4530_15380C.1
atggcggccacgtcggcggtgaccaccaccaccggcgcgcggtggcggagctgggcgttcgccaacatgggcacgctgctcgcccacttcggctcgctctccttcttcctcggcccgctcctcgccgcgtacgcgccgcggcggctgctgctcacctacttcaacctcttcctccgccgccgcgcgcggcggctgctcaacgccgtcgacccatacatcaccgtcgacatctccgagtgccccgccgccgcgcgctactactcgaggtacgaccccgtggacgcccgcgacaccacctacgacgaggcgaaggcgtacctgagcgccacgtgctcgtccgaggcccgcgagctccacgccgagggcgccgaggagggcgacgggctggtcatcagcatgcgcgacggccaggacgtcgccgacgagttcggcggcgcgacgatgtggtggtcgtcggtggcggcggagcagcaggcggcgccgccgccgccgcagggggcggcggagcggcggtgcctccgcctcacgttccacatgcgccaccgccgcctcgtcgtcgacgagtacctcccccacgtccgccgcgagggccgcgaggtgctcttcagcagccggcggcggcggctctacaccaacaacaagatgtcggagtacgcgtcgtactccgacgagaaggcgtggagctacgtcgacttcgaccacccgacgaccttcgagacgctggccatggagccggccaagaagaaggcgatcatggacgacctcgacgcgttccggcggagcagggagttctaccgccgcaccggcaagccgtggaagcgcggctacctcctgcacggcccgcccggcaccggcaagtccaccatggtcgccgccatggccaactacctcgactacgacatctacgacgtcgagctcaccgtcgtcggcaacaacaacaacctccgcaagctcctcatcgagacgacgagcaagtccatcatcgtcatcgaggacatcgactgctccctcgacatcaccggcgaccgcgccgcgcggcggtcgcggccgccgccgtcgtacagggacggccacgaccgccgctccagcgacgtcaccctctccggcctcctcaacttcatcgacgggctctggtcggcgtgcggcggcgagcgcatcgtcgtgttcaccaccaaccacctcgacaagctcgatccggcgctcatccgccgcggccgcatggacatgcacatcgagatgtcctactgcggcttcgaggcgttcaagacgctcgccaagaactacctcgacgtcgacgcccaccacctgttcgacgccgtcgaggagctcctccgggatgtcaacctcacgccggccgacgtcgccgagtgcctcatgacggccaggcgctccggctccgacgacacctcctgcctcgagatctgcgtcgacgagctcaagaagagggcggaggagagggcaaaggaggaggccgaggcgaaggcgagagaggaggccgaggcgaaggccatggcggagttcgaggagaaggcgaaggagaaggctttggccaaagccaaggcagtggtggacgcagccgcagccgcggcggcggcagcggcgacgacggcgacggcgaagccaaacgcaaccaaggaggaggaagaagaagaagaagaagaagaagaagaagaagaagaagatagccaagaagaatcttctgctgatacaggacaattcaccgaataa

SEQ ID NO: 8916 - DNA, 667 bp, Oryza sativa
  unsure (1)..(667): unsure at all n locations
  Clone ID: PAT_MRT4530_15381C.1
ggggggggtttttttttttttttgacatgcataatcacacattagttcttgccatgattatatacaaaaatgttactatcttttacaagagcaagcatagatgttcttttacaagagcaagcatagatgtgggaagcattgcgtatcaaaatgggagtgcccagagacacataagggcaatagattgtgaagaacaagagaaggaattatggagacacttcacaagtcatcacagcattagtagtacatcattagttagtaagcattagtaactctagattagtgggttacaggacgaggttatgggaggcggcggcggcggcggcggcgaggccgacgccggcgggagggttgcggtggcgggagagggtgcgcagctgcgcgcgctggcactcgaggttggagacgagatccaccctctcctcccgcggcagccgcacgcgcaccgccctcgggaactccacgaaccccttgatccccctcgcgatgtgcgggttctcgccgccgccggcgacctctcgccggtgctgcagctgaggctggccgccgctcgtcgcctggctgatctgctggctcgtggggcttgacttgctggtggtcgtcggactgccgccgcnacngccgccgccgccgccgccgccgctgctgttgtcgtcgtccggacgcg

SEQ ID NO: 8917 - DNA, 1452 bp, Oryza sativa
  Clone ID: PAT_MRT4530_15382C.1
ccggccgggccttggttagttccacttccacgccgggcgccgcttcttctcccgtcgtcgccggcgccgagacgatccgccggcgatggctctggctcgcctcgggcacgctgtcaccggacgcctccgccgccctctccacctcctccatcctcctccgccgccgcttacggatcaccatgcctcggttgcccactcgttcgcgctgatccacgcgaatacacgcgcaagaggttttgcaagctcgccgtacaatgccggtggcgtgattggttacagggggcggtcgcctgtctatactgtgaaggttctggagctactattccaaataaatcatacaagatcaatgtcgacagcagcacaggcagagccgccatcattatcgaaggcaccgacaccgtcgcaaacatcatcgaaggtgccacttggtgcccgcaaggtcggtatgaaggttgtcatgatgagccctggttttgtatatgagccatacagcattcgggaaccaatccccttctggaaaagattgcatacaccaagtggctggagaagaacaaaggaggacgttattctggagatgaagaatgcatatgctgtgtcaagattgagaaagaaaacagctataccaaaaaggaattctatgatcaagcattcaagatatacaaggaggttaacacactgatggcacatggagacacatcatctctccgtaaaatattgacagagagaatgcattcgactataaaaaatgaactgaagaaaagacaatccatgtggagttctgttcactgggaattggtggagcctgctgtgtgcataagaactttgagggctcgcatgattggactcgataataatgaccttgaccaagctttcatacagcttacgcttgaattcgtcactaaacagaaatttgaagcctataataccaaaggtgaggtcgtgtctggagataagtccaaagaggtgcttgtgaaagatatatgggtgtttgaaagatccctttttcaccctggagcatactggcgtgtatgtggaagaattaccttgtaaaaatctcttggcaagcacataccaagctgaacagtggcttttgttatgcacagtggtctcaataattcttttgccctaccatcctgtattcctcctgtctaacaatgtctaacaagatctccaggcacctatatacatgatggtagtttatttatcagcagaggaaataggcactcttttctctacacttttgttagggaggtagctgggcatgttccccttcagaatggctctttttttttttttcactgtcatcagattgctgtcctacaacaatactcatacctgatacgaagtgatcatgtgacgccttcgcaaaaaaaaaaaaaaaaaaaaaaaaaaaaaaaaaaactcgagactagttctctctctctctctctccctcgtgccgaattcctgcag

SEQ ID NO: 8918 - DNA, 429 bp, Oryza sativa
  Clone ID: PAT_MRT4530_15383C.1
atggctgacgaggtgggtaaggcaagtgtgcgagtgagcacgagtaaaagagcgcgccacaggctacaagaggtgagcacgaggcgactagcgcgagatggctcctccctggccgccaccgctctttctttccgccttatcggctcaagtggccgtggtgctcctgagacgaggaggcgtctagccgactgcctgtcgggcgagttactccttgagaggtggctctcccggatccccgccgacggttggggcatgcatctcgtcagcctctaacggcgatgacctcaacgagatccccatcccttctcttcctcctcctccaccattgcccatctccacgccaggagcggcccataacggcagagagcccaagccgaaggcctcctcctcctcctcctcccccgtcgccgacggtatcggcgtcaccat

SEQ ID NO: 8919 - DNA, 452 bp, Oryza sativa
  Clone ID: PAT_MRT4530_15384C.1
taatgctacacatgatttgagaataaaatcttctctcgctcttggagttgacatgcacacacactttggatgagttgtttttaactaaaattttattgaaaaaaatatcaaactgttttttatgctagttcaatgtttgacatgatttgtgccaaaaagtgaaatgaacaatatgatgttttgaattgctcaacatgcttactaaacaagatgaagctaaaagatgccttaggtcatattgagtacatggaaaaaatattgtgaaatttgatgaagtgttttcttgctccagatgtcgcaaaaataagggtgttgatcaattgtgaaaattgtgctaatttgacaaatgaagtttattatttgaacagtttttttggaaagattttctgatggaaaaaataaagttgacatgattttgaatcaatctaaaatattagtccttttaggacaag

SEQ ID NO: 8920 - DNA, 300 bp, Oryza sativa
  Clone ID: PAT_MRT4530_15385C.1
atggggatccatagtccttggagcgggtgccgaaatgccccggtgattgaaaaaccgggccgcggcaagtctcgtgggttgggactaggctcatgtgttgggcaagccgcggagtgcgggattaaaagcatacatccactgcagtttcaggaaagtggtgtgaccttgcccgatgggcgggaaggtcatgatgatgttgggaatgtggaaaactggatgcgaggaccctaccgccctccactagggcggcaagctgatgtggcagacagtggctcgacggcgccgtctgcgaatttttca

SEQ ID NO: 8921 - DNA, 636 bp, Oryza sativa
  Clone ID: PAT_MRT4530_15386C.1
atggattatatgtcgaggacgacaagggttatgccaagcagggaatcagcccatacaccaccagttgctgtctacgccaagaagatgagagtttacgctgcaaaaggcaggcgtgaaccatatgtaggcaactcgcgatatgatcctccgcgtacaccatttatgctcaattacgccatttacggtcgaaaggatcctctgctcgcatcatatgatgatgacaatgacgacgacgaagacgaggacgaggacgacggttcatctggagacctgccaccgaggaagaagcagaaaaaatgcaagtatattatagcccagcgtgcaagccaggcccaggaagcaggaaatgaggccgcgaggagggtgcagtcgcactcatacgtgaatgggttacgcaccaccaattacgcctacatggggaaaccatatccatcctacgctcacggtgtcgttgctctgttggtaatgagcggcccgaagggcctcgtgtcttcttcgctcttcaagatagttgaggtcgtcacggcaaagctgatcttgtgccagatggttcaccccgaggggtcgtgcccatggacaagtggaggccacccatacctaacacagggggtcgggtcgccccgacccctcggggtg

SEQ ID NO: 8922 - DNA, 144 bp, Oryza sativa
  Clone ID: PAT_MRT4530_15387C.1
atggcaagcggccgcgttcaacaacgaaacgaaggaaaccccaaccgcgaccatcccgcctggcactgcgaatcacagagagactactcaaaaaatagacaaagcaagccaatgaactacagaaggagcgtgtgtgaagtgtag

SEQ ID NO: 8923 - DNA, 119 bp, Oryza sativa
  Clone ID: PAT_MRT4530_15388C.1
cattctggtttgatattcttagctgtgagtaagagttttgtcttctgtggaacagggctgttggatctttcatagagtatgttaatgatgggggtgatgttgtaagtttttctagtttc

SEQ ID NO: 8924 - DNA, 771 bp, Oryza sativa
  Clone ID: PAT_MRT4530_15389C.1
atggaaggagaggatctaggttcatggcttggtctcgggatcggcggcggcggttacgcatacggcggcgacgattgccggaggtcaccgtcgtctccgtcgccggtgcagatgttgttctcccagcatgtcaaggaagagatcacgaggggatatgatcatggccgtgatgaagaacaagcttcagggagcaagatcatgaagggagagagaggtgcaaggctaagggtgatgaggtccatcaggaacagcggcggcgacggtagccgctcgcgtgtactgagcctcggcgacgacggcggcgatggcggcagcggcggcggcggcggtggcggcacgaggaagaagctccagctcaccaaggagcagtcgaccttgctcgaggacagcttccgcgtccacaacattctttctcatgctcagaagcacgagctcgctcgtcagctgaaactgaagccgagacaggtcgaagtgtggttccaaaatagaagagccaggacgaagctgaagcagactgaggtggactgcgagttcttgaagcgatgctgcgagagcctgaccgaggagaacaagcagctcaagcatgagctcatggagctgcgtcggctggcttcgccggcggcggcggcggccggctcgcagctctacgtccagttcccgagggcggcggcggcggcgatggtgaacgtctgcccgtcctgcgagaaggtcaccgtgatgggcggcggcggcggcgagacgggaaagagctcctccagctatagctcttaa

SEQ ID NO: 8925 - DNA, 748 bp, Oryza sativa
  Clone ID: PAT_MRT4530_1538C.1
ctggcggcttcccccgccaccggcgccgcttcccttcccatctccctcctttctcgccggctcggcgcggcaacggcagggttcggcggagacggcgccgtcccaacggcggcgacgacggcgtccgcggcggccgcgctccctctcccccctccttcccgtctcgtcggcttggcgcagcgacggcggggtgcggcggagacggcggctacggccgtccctccccctctctctctccccgtcggcctcgacggcgacggcgccctcccaacggctgcgatggcgtcggcttcatccgcgtgcggatccggcagcggcggctccctccggcggcagtgccgcctcgcgccgtcgttttggccatcgccgctgcctcctctcgccgccgtcgggtgtgcgtggaagaggggaagttcagccgccccctccctgccgtcgccggtcaccggagagtcgccgccgccgatgaccgagtcgccaccgccgcacaagctcgccaccggccgtcatccgtcgtcgttcgtcgcgttgccggggggagatggccgccgaagagggagcagagccttcggcacccgttgtcgaagaaggaagagagccgtctgcctccgcacctgcaccatcactaccatctttggctccggccgcttcggagcaagtgccgaacacggtcgatgcggcgaaggcggctgcggcggcaagggtgctccagaccagggcggagatcctttcggcaagccatctgctg

SEQ ID NO: 8926 - DNA, 393 bp, Oryza sativa
  Clone ID: PAT_MRT4530_15390C.1
atggtgcaaagggaaattgttgaggatgtggagaaggtggagagagcgaagactgaagatagagattgtatcaaccggctgttgacttcttgtgggatgcccaaaggggaatttcgagataagctaatgtggggctgtaatgttgctgccatatttgttgcatccggtgcagttgggtcattgattgctaaaattaaaatagatgggagtgtatatgaaccttttggcccagctagccggactgggttgacaaaacaacattatcacgctagccagaccggcgtgatagcgttatttggtcaagccggtctagctggcgtgacagcgttatttggccacgccaggataaaactcagtattgttttggccaaaaggtttagattcgagaaataa

SEQ ID NO: 8927 - DNA, 342 bp, Oryza sativa
  Clone ID: PAT_MRT4530_15391C.1
atggcggtggtgcttgacggcggcctcctgagtccactccaccgccggtcactgcccacatgcaccgccagatccacattgtccgctccacgccggcgagcttcgcgcaaccccggcgaggcccagggcgaagcggcgacggagcaccggcctcggcttgctcctcactgccgccacctcgaggcctccgtcaccgaggccaccgtgcccgccatgggagagggagagagaaaggggaaagaaggagcgccaccactgaggccaccgtgcgccgccgccgccaccgtgtcttcttgcaaaccgcgccaccggtggaaggagaggaaggggcgggggagttga

SEQ ID NO: 8928 - DNA, 5200 bp, Oryza sativa
  Clone ID: PAT_MRT4530_15392C.1
atgggggtgaaggatgtgagaaagcgaagttcgattgtcttagttgattcattttttgcagatgaaagccggattgagaaggtggactactatatggattcgtgttcaaggaaaagtggtaaggatgagtaggaatccttctattttattatcttttacttatctcgtcttcgtttaatattaatttatggggtcagtttttttatttgctgtattacctcatattgacacagcgaaagaagtgtattagcacccagatgtcaaacttcgtcacggcacaatttgtgtgcacattggtaagcttgtatctggtcacttaattaagagcccatgcagcttccagcactcagaaaggcacagcagaaatcacttgcttctttacctcattgtgtccctcttactggcccaagcagaaggcagccttggctcctaagcacaagtgggataaaaattctacgtctagagtggttctaaaggcccccagagttgagacctgcttgagctctatttcaagatgcacacgtcacggcaaaggactgatctggcaaatctgccactcagggccagcaaatggatgaaaagccaagcatttctgagtgatgacggaaggcaaatagctcctctacccttatcgatatagggtcgggacgtggatgctgcaactttgtgtaagactaagctcgaagatatatgaaggagagagctgtagagtaacaaaccagaattaagatacttaagtgagtcaacagtcaacatatgtaaggacgagtcggaatctctaaacattcataatatgtgggtacaaattaatatgcgcgcacacctaaaacatatgaacgaggaagccgatagtttacagccactaaagcgtctcaagcaactccggctgagtatgattcctaggccaacatcgtatgaagttttgagtgaagacaacacgaatattgctgtaggacgtgctaagggagggaaatcagacaagtttataagggttgatggtggcctgtcttccctgaaaaaggttctacacatgtatcccgactgcagtttaataagaaaccaacttggatctctgctactgtcaagtgaagattggatggcttctcataaagcagtaagggttacttcattgtcccggggatatacatccaatccccgccactcacttggcaagtgcgcatccagatcatcacggagatttgctctgcacttatcttccttcacaagcaccggcctcacccagtggtgcatggggacctcaagccaggcaacatccttcttgatgcgaatttgcagagcaaactcagtgattttgggatttcacgcctccttctggagtccagtgtcactggaagcgacgcacactacacctccaggcctatgggaacaccggcatacatggacccagagttcttcgccacaggggagctgacgccacagtctgatacttactcttttggtgttaccatcatgcgtctcttgaccggacgggcacctctacgcctgattaggacagtgcgggaggcgctgaacgactatgacctgcagtcagtgttggaccattctgcaggtgactggccattggtgcatgtggagcagctcgcacacattgcgctgcagtgcacagagctcagcaagcagaggcgccctgatcttgagcatgatgtgtgggaggtgattgaacctatgaagaaggaagctcattcgccattgtcccagtcttttcgatctatctgtagtgccattgaaactgccaccccgtcctacttcctttgcccaatctctcaggtactacaagttagaaaggtgaccatgagagatcctcagatggcagcggatggcttcacctatgaagctgatgctataagagattggctggataagggacatgacaggtctccagcggcggaggccaacctccgcaagcagctggagcaaaccctcgccggcgagccatccagcccgctccaccactacaacctcggcgtcttcctatgggaccgcgcggaggcggcggcgagggaggagggcgaggaggaggaggaggtgaggcggctccgtgcggcggcggccgagcgcttcctcgcggcggccaagctggaccccaacgacggcgtccccttccgcttcctcggccaccattatgcgcttgccggcgacgcgcagcgagcggccaagtgctatcagcgggcggcgacgctcaaccctgatgatgccgaggctggggaggcggtctgtgatttgctagatttggagggcaaggaaagcttggagatcgctttgtgcaaggaggcagctggcaagtcaccccgggcattttgggcgttccggaggttggggtacttacaggcactcggtctggcataccaccgtttgggcatgtttactgcagcagtaaagtcgtatgggcgagctgttgaactggatggttccaaggtctttgcgttgatagaaagtggaaacatccagctaatgcttggttattttagaaagggtgttgaacagttccgctctgccttggagatggctcctcaaaatcattccgcgtactttggtcttgcttctgcattgcttgcttgggcaaggcagtgtgtaatgactggggcctttggctgggcagctagtctgttgaagctcgcacttgcaagatgctttccatggggtgatggtaatatcaaggggggtatggatgatggtactttcaggactactgtacttgagtggagaaatacatgtttgttggctgcaaatggtgcaaaattctcataccaacgagctttgcatctcactccctgggaagctaatattcacaatgacactgctatatgtcttgatctcatttataccattgaggagaataatagtctagatcccataacttgggaactgccagagaaaatgtcgttgggtgggttgatactggaaccagtcaataaggatttttgggttacattgggctcggtgtcaagtaatcaagctttaaaacagcattcttttatcagagcactgcatcttgatatgtctctctctgaagcttgggcataccttggaaagcttccagagttccagattggtcttggaacaattgctgctcgttctggtgaacttctatcacctcaggtattgatggctgtaaggcaagctgttcaacgggcacctcattaccctgagtcgcacaacataaatggcttggtttctgaagtgcgatcagacttccaatctgcaattgcatcgtaccgacaagcaaaatttgctttagatatgatgcgcaactccaaaacagactgcagatgtcatattgctgatatttccgtgaatcttgcccggtcactatgtaagatatatgctctttcattatggaaacttggtcggcatgatgaagctctttcagtatcaagaaacttggctgaaaacttatcgagtatgaagcaggagagtgcaactgcagctttaggattcatatgcacgttgacatacaacatctctgggaaggactctgcagctgcggtcattcataaactgcctggtcaactcaattacagcacacagctgaaatttattatctctgcattagatgctttacagccaaacaagcgttttcagttaccccagctgagtatgcctcctaggcttacatcgtatgaagtcatgagtgaagtccactcaaatattgctcttggaaatgctattggtggggaatcagacaagtttttaagggttgatggtggcctgtcttacctgaaaaaggttctacacatgtatcccgactgcagtttagtaagaaaccaacttggatctctgctactgtcaagtgaagattggatggcttctcataaagcagtaagggttacttcattgtcccggggatatacatccaataggggcttaagatctccacaccaaattcaagcatgtgcagcagtttcttgctatgctacctgcacttcttacccaaagttctcttttccaacatgtgaagatcaatacctaagcggatacaatgcaatatgccgcctgcaaaggtgggttcatctagaaccgtggaaccaagatgcacgtcgcctccttgtacttacccttttccaaaaagcacgtgaagaaaagtatccgaaacatatctgcaccattttgaagaggctgattttgcaagttctctccagtggtagcaattcacaagacaataaggtggttcagtatgggaactacttgttacttcttgtggcttcagaggttagtttgcaatctggtgaccatggcaactgtattgctcaagctactgaagctcttggagtaacttcttcgagcgtggattctttctttgcacacttgcaactgtgtcgggcctatgtgatgcaaggcaatcttttgaactctaggagtgagtacatgaaatgcctgcaaaaccgtacagatactgaaattggctgggtaatacttaagcaacttgcatctatatgttcactggagggtacccctgatgaaatagagatacatctcggaggatgcgttgaaaggaaaggtagcaatgcatccaaatggatgtctcttttttatctagcatgcgctcagtgttcagtatggaatgaggactttgcaagtgctgaaaaagctattgctcaggcatgtgctgaaggggatcctgacagctgtgtcttatttctcaacggcgcaatttgtatggacattgcttggaggttcgcggcccctcaatttatagcccgtgcagcttccagcctcagaaaggcacagcagaaatcacttgcttctttacctattgtgtccctcttactggcccaagcagaaggcagccttggctccaaagccaagtgggagaaaaaccttcgtctagagtggttctcatggcccccagaattgaggcctgctgagctctatttccagatgcatcttctggcaacgcagtcaagtgcagcaacttcccagcagaaccagctagtggaaaccatgcaaaccccagagaagtggcttctcagggcgatacacctgaacccgtcgtgctctaggtactggacggctctgatgcaactcgtgtacgtgtaacccttcgaaattggaagcactgatctttggtgaaaccaaccacaatgtagcgcatttcttgactcagcttgaagcatatggattggctggatgaactgacgacctgtctgtgataagtgaaaaaacctgcatatgcctgctt

SEQ ID NO: 8929 - DNA, 615 bp, Oryza sativa
  Clone ID: PAT_MRT4530_15393C.1
ccaactcgaatcgaaagagaggaaaccaccgaaccctagcgatgtcggcggcgtggatgctcagccgcgccgtgtcccagaggcttctccgccaccgctcccgatccttctgcagcagcttgtcttcctcctcctcgggaaaggtcaaaaggatcgaacgatttgatgaatttgaggagatggtgcaaagggaaattgttgaggatgtggagaaggtggagagagcgaagactgaagatagagattgtatcaaccggctgttgacttcttgtgggatgcccaaaggggaatttcgagataagctaatgtggggctgtaatgttgctgccatatttgttgcatccggtgcagttgggtcattgattgctaaaattaaaatagatgggagtgtgtaagcatgccgagtttggtggaagacggttttttttaaacgttttcaatttttaattttaaaaataaatcctttcaaaacttaatttcaagatatgaaccttttggcccagctagccggactgggttgacaaaacaacattatcacgctagccagaccggcgtgatagcgttatttggtcaagccggtctagctggcgtgacagcgttatttggccacgccag

SEQ ID NO: 8930 - DNA, 716 bp, Oryza sativa
  unsure (1)..(716): unsure at all n locations
  Clone ID: PAT_MRT4530_15394C.1
ngtcccccctcgaggccggcccgggaaaaaaccggccggaaaacacacggcgaaagcaaatcaaatccaatccacctctcgcctccaaatcccaaatcctctactcgtcgtcgtcgcggttcatctccagcgaattcccgatggcgcccaaggcggagaagaagcccgcggagaagaagccggtggaggagaaggcggagaagaagcccaaggccgagaagcgggtgccgggcgccaaggagggcggcggcgagaagaaggggaagaagaaggccaagaagagcgtcgaaacttataagatctacattttcaaggtcctcaagcaggtgcatcccgatatcgggatatcgtccaaggccatgtcgatcatgaactcgttcatcaacgatatcttcgagaagctcgcccaggaggccgcccgtctcgcccgctacaacaagaagccgaccatcacctcccgcgagatccagacctcggtgcgcctcgtcctccccggcgagctcgccaagcacgccgtctctgagggcaccaaggccgtcaccaagttcacgtcgtcttaagacgcgtgatctgttcatgttcgttggatgtttatctgttctgatgtttatttagagcgctcttagatttcccacatggaacaatgtagtatcggtgaaattcgctataaatgaatcgctgatcttatcacaacttaaaaaaaaaaaaaaaaaaaa

SEQ ID NO: 8931 - DNA, 1846 bp, Oryza sativa
  Clone ID: PAT_MRT4530_15395C.1
gccgtaaaacacctcccaccgcctcctccaccccctcctcctccccccgcagagccgaaaccctaactccgccgatctctccaggtgcccaaggggagggaggggatggcggcggcaccgggggcgggagggcagggcggcggcgggatggacgccgtcctcctcgacgatatcatccgccgcctgctcgaggtgcggacggcgcgcccggggaagcaggtgcagctctccgagtcggagatccgccagctctgcactgtatcccgagaaatcttcctcagccagcccaatctcctcgagctcgaggcgcccatcaagatctgcggtgacatccatggtcagtacagtgaccttctaaggctttttgagtatggtggttttcccccagaagccaattatctattcttaggtgattatgttgatcgaggcaaacaaagtttggaaacaatatgcctcctccttgcatacaaaatcaagtacccggagaatttttttcttctcagaggcaatcatgagtgtgcatcaataaacaggatatatggattttatgatgaatgcaaacgccgatttaatgtgcgtctatggaaggtcttcactgattgttttaactgtctccctgtggctgcgctaattgatgataaaatattatgcatgcatggtggcctctctcctgatctgacacatttagatgagataaagagcttgccccgtcctactgatgtaccggatacaggtctgctatgcgacctactttggtcagatccaggaaaagacgttcaaggttggggcatgaatgataggggggtctcatacacttttggtgctgacaaagtttcagaattcctggaaaaacatgaccttgatcttatttgccgggcacatcaggttgttgaggatggatatgagttctttgccgacagacaacttgtcaccatattctcagctccaaactattgtggtgaatttgataatgcaggtgcaatgatgagtgttgatgaaactttgatgtgttcttttcaaattcttaaacctgctgagagaaaaggcaaatttatggcatcaaacaaaatgtgaaatggtgaagcccatttcgctcatagcgactctgaggctgtcctgtggatgcatctagacatcaacgtgcaggcgttaggcttgaagcaacattgggctaattctaccggagaagccaaataatatcatatctaacagttggtctggaaggttactcttcatggcaagtgccaattttttttccattttctgttatgatgcgtgaaactatcttgtagatgtagatatattgattatggaaggatgaagttgccaattgacctgaggcggtttccttctgcagccaggaaaaatctgaatatggagtttctgtttggtagtttcactatttaaaagcacatgtatcacttgtatggaggtaacaactttacttatgcaagcccgtgttttctgttgcttgtaagcaaaattggatgagtttttatcttgttttctatagcgtgctaatattgccaatggcaacaatttgcgaactgcaattctagaatgtactggatgattgaacctttaagcatttgcgaactgcaattctagagtctaaaagtcctctggaaaggctaatgaatggtttatcctgtaaaaagaatcaaaaaaagaaaaaaaaaaaaaaaaaaaaaaaaaaaaaaaaaaaaaaaaaacaagaagaacaaaaaaaaaaaaaaaaaagaaaaagagccgggccttctaaatggaaagatcatagaaagattatggctgatcaaatttacttctccataggggcgacaccttgagaatgcactgacggggacca

SEQ ID NO: 8932 - DNA, 183 bp, Oryza sativa
  Clone ID: PAT_MRT4530_15396C.1
gagtggagcttgtcccagatccagcggtttcttggattaggttcatgggggttctctccgctcggatccagttaggatgtggttcgttttggattgggttctagaattgacccttggtttggttgatggtggcgggaggggattcttgatcacgcgcggctgggatctgagctgacagaaatc

SEQ ID NO: 8933 - DNA, 1515 bp, Oryza sativa
  Clone ID: PAT_MRT4530_15397C.1
atggcggcggcaccgggggcgggagggcagggcggcggcgggatggacgccgtcctcctcgacgatatcatccgccgcctgctcgaggtgcggacggcgcgcccggggaagcaggtgcagctctccgagtcggagatccgccagctctgcactgtatcccgagaaatcttcctcagccagcccaatctcctcgagctcgaggcgcccatcaagatctgcggttgtttcgtgaacattttcaaaacgagcacattcacaagggctgatgagttaatagtaaatgtgggcagctgtaaccacttccagatctcccaggaggggccagtttcctccctgctcctcccgctgacggagatggaggagcttggcgagcacactgccacagtcgccatcgatttgcagttgatctccgccgtggaggcaccgcttgccaaggggtggggatatggttatggtgacatccatggtcagtacagtgaccttctaaggctttttgagtatggtggttttcccccagaagccaattatctattcttaggtgattatgttgatcgaggcaaacaaagtttggaaacaatatgcctcctccttgcatacaaaatcaagtacccggagaatttttttcttctcagaggcaatcatgagtgtgcatcaataaacaggatatatggattttatgatgaatgcaaacgccgatttaatgtgcgtctatggaaggtcttcactgattgttttaactgtctccctgtggctgcgctaattgatgataaaatattatgcatgcatggtggcctctctcctgatctgacacatttagatgagataaagagcttgccccgtcctactgatgtaccggatacaggtctgctatgcgacctactttggtcagatccaggaaaagacgttcaaggttggggcatgaatgataggggggtctcatacacttttggtgctgacaaagtttcagaattcctggaaaaacatgaccttgatcttatttgccgggcacatcaggttgttgaggatggatatgagttctttgccgacagacaacttgtcaccatattctcagctccaaactattgtggtgaatttgataatgcaggtaggaatacaaaataggatgaaactttgatgtgttcttttcaaattcttaaacctgctgagagaaaaggcaaatttatggcatcaaacaaaatgtgaaatggtgaagcccatttcgctcatagcgactctgaggctgtcctgtggatgcatctagacatcaacgtgcaggcgttaggcttgaagcaacattgggctaattctaccggagaagccaaataatatcatatctaacagttggtctggaaggttactcttcatgccaggaaaaatctgaatatggagtttctgtttggtagtttcactatttaaaagcacatgtatcacttgtatggaggtaacaactttacttatgcaagcccgtgttttctgttgcttgtaagcaaaattggatgagtttttatcttgttt

SEQ ID NO: 8934 - DNA, 231 bp, Oryza sativa
  Clone ID: PAT_MRT4530_15398C.1
atgtcgccactaatgggcatcttcatcttcttcacctgctgcatcgcctgtcaccgactgattatttcgctgccatagctacacaactttatcactgagcgccttcatattcattgctggctgatctgattgctgccgactggtttcttcgcctccatggctgtgcaacttcatcacttctgattggtatcactatcttcactatcaccaatatttttgccacctctgctg

SEQ ID NO: 8935 - DNA, 647 bp, Oryza sativa
  Clone ID: PAT_MRT4530_15399C.1
ccctgaggccgccggaccatccatggagcttcgtttccttgctcatccatctatcatccaggagcgtggaacgccacacgtgttttttttttatctatgctcatctgatccttagcacaggagagttttagccgtaggactggattaagtcggagtactttcattgttagtgcgtagggatcttaattagctttgattagacagacagtacagtatagtagaggatggtgtctgtgttcagcaggctgcggtggtggaggtgccgtcggagctggtggccggcgccagccggacgccggcgcccaagacgcgggcgcctaaactgctactactattcctcgacgccgacgagccgtccgtatccctgcagctccaagaccttggcctcctcggctactctcacgccaacctagtcttactcctaccaagatcctttgcatcaataagatgacatccctctgcctccgaagaggcaaagcctgaaccatctgttcaaggttgaacatcaaaatagtcacgcccaacagacaccgagatgttctcctggttactgctgctgtcactcatctgtgctacaatgcaccttaacctgctagctttgtgctatatgacactactgtcaactacgcctctaagcaacttgaccc

SEQ ID NO: 8936 - DNA, 518 bp, Oryza sativa
  Clone ID: PAT_MRT4530_1539C.1
gcggagagagtagtgctagccagtaataagcacctctagccaagaaatcagactggacgaccggccggcgccacgccggagttcgttcacaagttctcgccggtgagcctgcgttcgatgttgaaaagacgaggagtggctgcgcagcagcgggcgccggaagcgatggttctggcggcggtgctcctcctgatgatcgcctacggcgtggcccggaacgaggcggcggtgcccgactccagtctctcctgcctctccatgcctcgccaacaagacggcgcgacaactccaaatcggcgttccttatccgtgcacccgtcgtgctgcactagtagccccccgccgagctgctataaacctcaaccctgcccaccgtcctaatcgaccgaaaaggccaaaatatatacatacacaaaagttaccatatatatttcaagatcggtggaagtacttacaatatatattaacgtgttgtgtcatactatgtcagaatttacaagctagcctactactccttc

SEQ ID NO: 8937 - DNA, 221 bp, Oryza sativa
  unsure (1)..(221): unsure at all n locations
  Clone ID: PAT_MRT4530_153C.1
attgttcaannnccgtggtccattcatacatgaacttaacacatatttttacaacatcaaagatgaaaacattttctcacccttttaacagtccccaaaaaaatttaacggggcaaaaaaatggcaaacaaaatttcccccaaatcacccttcttggttcacctcaacaaccccctaacaaatcatataaacaactcactttttatgcccccctatctaca

SEQ ID NO: 8938 - DNA, 289 bp, Oryza sativa
  Clone ID: PAT_MRT4530_15400C.1
atggaggagaaggaggaggcactggactacgaggtctcacctcctcgcgacggcgatgcgaggatggatgcggggagcccgccgtcgcttcagctctcgccgaccgccaccaatccggcccacacccgccgctgccagttccagcccaccgttgccgctgctccagctagctcccgcgtcagctcccgccggccgccatcacttcagaccccgcccgccgcctctcgctccttgcagacggccgaaggagagagggagaacagaaagagagaagggaggaggaggggag

SEQ ID NO: 8939 - DNA, 142 bp, Oryza sativa
  Clone ID: PAT_MRT4530_15401C.1
atatccaaatagacagctatcacaacgggggaattttttagatcaagcagtcgttccaaccactacaaaccacaagcactgccttccgcacacggtcatcattaaatgccgaaatcaaaaacaactgaacagctacctaaag

SEQ ID NO: 8940 - DNA, 129 bp, Oryza sativa
  Clone ID: PAT_MRT4530_15402C.1
atgcaacttcggcagaggcaggaaaacattcatcatccttcagcgggtgcacagcaagacagcgaggcatcttccacctgcacctttgtgacaacaacgaccgacaatgtcgtcgtcgagcgcatcatg

SEQ ID NO: 8941 - DNA, 546 bp, Oryza sativa
  Clone ID: PAT_MRT4530_15403C.1
atggccagcggctacccggcgggaggcgaacaaccctccggtcgcctcgtggtcctccggcctctgcgactgctacgacgacgctgcctgaccttcttctgcccgtgcgtcgccttcgggaggatcgcggagatcgtcgaccagggagccacatcgtgctgcgcgagagggacgctgtatatgttgctggcgatggcgacggggttcgcgtgcgcctactcctgctgctaccgctccaggctgcaccagcagtacgggctccaggagaagccctgcggcgactgctgcgtccactggtgctgcgggccctgcgccctctgccaggagtaccgcgagctcaagagccgcggcttcgacatgtccctcggatggcaggggaacatggagaggatggggaagggcgtcgcgactgccccgccgcagatgcacccggggatgactcgctactatctagcttgctgccgcccgtcgcatgaccacgaccctcggatcgtggtggccgttggctccccgattagcttctcccattgccgctcctgtaggctg

SEQ ID NO: 8942 - DNA, 293 bp, Oryza sativa
  Clone ID: PAT_MRT4530_15404C.1
gggctgcaggaattcgggcacgagggggagaaatcgctcttatccgctcctgacccgagtcaagcagtcaactccccgtgcgtatcggcgaaaagcatcggagaaatctgcgacggcgatgttaattaacgagagaggaggagggcaccgatctgaatctgatgcccgcgacgacaacaccctgatcctgatatcccaaggcccctctaatttctaccggagatgaggatgaggcaacgccgcaacgctcgtttgggaagactgactaacagacggacattactgcttctgaa

SEQ ID NO: 8943 - DNA, 142 bp, Oryza sativa
  Clone ID: PAT_MRT4530_15405C.1
agtagagagaggacacccttttttctgaaaaacgggaactcaatgatgcattacatactcttacaacttacaataccagaggtattgatgagactagcagaaagtgaaccaaaaacggacagaacattaacaaaagaacacc

SEQ ID NO: 8944 - DNA, 195 bp, Oryza sativa
  Clone ID: PAT_MRT4530_15406C.1
atggagagaggtcaccgagggcccaaggaaactaagttccctgggcatggaaataagttccggatagacgactgccccgaggagcgagggagggagccgtttggagaacagctcatccacctacatctcagtgacgtaacgctgcatgcagcctcccgcatgcccacgtctgctagaggaatagaaggggcatga

SEQ ID NO: 8945 - DNA, 290 bp, Oryza sativa
  Clone ID: PAT_MRT4530_15407C.1
tgtcttacacacgcgtttcttgaggaaccgactgctggcctcaactggggtgtgtactagtatctgatggactggttgctccagacacatccatatgatcttggcaaggacaatgagccgcatgaagctacaaggcttgaatgtggagctgtgactggaaccataggccagactgtcgcttaccctcttgatgacatcacgaggagaatgcacaaggttgcttggaataatgcagcaactatagtcactggagaaggcaaagaggagctccagcccaaagcgtacgaccg

SEQ ID NO: 8946 - DNA, 1035 bp, Oryza sativa
  Clone ID: PAT_MRT4530_15408C.1
atggcgtcggcggtgttggagatgctcaagaacctgtgggagtcgcaggtcaccgacgaggagaaccgcgcgttcaactataggatactaaaggctgtaggtctttttgctggatccatcgccgtgatgcataactttgggctcatctctatcattgaccaggcgaggttttagctcagactattgcaggaggaagaggaaggtagagagaagcatggctgtcttctggctcatctctatcattgtccttgtactactttctggagaatccaatgccattccagctgcctctcagcagagtcaactgggtgtaaaccacaggaagccacttcaaactttgagaccttacaacattgcccacaggggttccaatggtgaaatacccgaagagaccacggctgcctacctgagggctattgaagaaggtgcagacttcatagagtctgacatacttgcaacaaaggacggacatctgatatgtttccacgatgttatattggtcgtgacaactgatcatcgccaatcgtcacagaatttagggtgaaacaacgctacaatttcagggaccaacagtacaatgggaagtaccagattattacatttgatgagtacatcttgattgcgctttatgccgatagggttgttgggatatacccagagctcaagaatcccattttcatcaacgagcacgtcaaatggtcagacgggaagaagtttgaggacaagtttgtccagacactgctgaaatatgtcatactacgagataacttcggacgcttaccttgcgttcataaggaagtgcatccatacactttcagaaacgagaacatgttcttgcacttcgacttccaccaagacccttatcttgagtacgagtattggctcggtgagattggcgtcgacgggcttttcactgatttcactggtaccttgcacaggttccaggaatgcacaactccgtatccaaagaatgaaaagaatgcagaggcactcttgcagaaaattaactacatgctgaaggatagcggatactaa

SEQ ID NO: 8947 - DNA, 448 bp, Oryza sativa
  Clone ID: PAT_MRT4530_15409C.1
cgagggggccgccggcccattctccttcctcctctcccctccgctgggccggccggctacctcctcccacccgggacgccgacaggtgggccctacctgtcgggcccgtctcctacctcgcaaccgccatcgccgcacccactcctccgctttccccgcgccccacgccgcgtcgcccgtgcccacgccacgtagccgccccctttccccgcgtcttccggccgcgcctgcgcacgagaggggcgggattcgattttgaatcgccccccaccttctctttcttctcccccacgtcgccggcgaaatcggggcgcctcccggccacgttcggctccccctccacctataaaatgctccccatgcccttctctctcgttttccgctctcaccgctccataccgagccccctaccgagctcgcgccgccgcccgttgcgccggcgcccccc

SEQ ID NO: 8948 - DNA, 807 bp, Oryza sativa
  unsure (1)..(807): unsure at all n locations
  Clone ID: PAT_MRT4530_1540C.1
accggccgggtnggggggggggggccaaaacacccctcccgggggnggtttaannnggcaaagttccgaaggagggcgggncaacatagcccccctcctgctggcccccgggtgagatccagttcgcctggtgcgccgtaaggggggccaaagttctacgctaccagtgcacccagagcaaccgcactgccctatcctcccctacgggaggctcgcggccctctccgcggcgcggcggttttgtgcttggtccccccgggccggccgggaacctcggcaatgccttatccccccttctgcttagagctatgtgagatccaaatttccaggtactccataaaaatggccaaagttctacactactaaagcaacaagagcaagggcacttcccaattatccccaacttcgtttctagctctttttggtgtgatttgatggtgctttggagggtggaggtgttcgtgttggagatggtgtgggtgatgctcagcggctggctctcctcctgcctcgccgtcgccgactacgtcgccacggcgctcaggcagagtggtgacgacgtctccggctagaatttctttggacgaactggatataaatcatcttccatgcctgcatttgttgtttggtttctttgtgtgtttgtgagcatttatacacattgcaattgtgtatatatccgaatgttattttaatttttttttgtacgacatgatttgaggcaaattaaaatagattgcaatggatatttctcaaactaaaaaaaaaaaaaaaaaagcggccaaaaaaaaaaacttgctcatgccc

SEQ ID NO: 8949 - DNA, 416 bp, Oryza sativa
  Clone ID: PAT_MRT4530_15410C.1
gtatggcgccgtctgcactctcaaaagccagcggcgccttcccaacggagccctcgaccgctatgactgagggcttggcactcatggatgaatacttccggcggcgcgtccacctgccccagatctaccaggcctaacttcctgcaccgcattttttgtaaatccctactgtggcatacttaacatctgcgactgaccattatggatctggcagtcattctacaaccaaggtgacctgaaagctccccacctactgatcccacctgagaactgggttactagattccggtacggtgctattctatttgcatcactaccgctcaatcagaagattctaatcctgtgatcaacataataatacttttataagccatatgatgcactcgggagatatattgactgaatctgacttttct

SEQ ID NO: 8950 - DNA, 503 bp, Oryza sativa
  Clone ID: PAT_MRT4530_15411C.1
cctatatacatttctatatatatatatatatattatatgtatatatatatatatatatgtatatatatatatgtatatatatatatatatatacatatatgtatatatatatatatatacatatacatatatgtatatatatacatatacatatatgtatatacatacatacatatatgtatatatatacatatacatatatgtatatacatactacatatatgtatatatatacatacatatatatatatacatatatatatacatacacatatatatatatgtatgtatgtatatatgtatgtatgtatatacaaatatgtgtgcacttaagtaattagaggccatatgcatatatatattaacaaaatatgagtttgcaagtaagtaaatatacatatatattaccaaaccaagtacacaaaagtaaatgcatgtgtgcatatatgaatacatagatatatatattacaattcgttcggacgttgtaatatttgtttctg

SEQ ID NO: 8951 - DNA, 275 bp, Oryza sativa
  Clone ID: PAT_MRT4530_15412C.1
atgtcgtcctccgccagcccgtctaccgcgccatcagccgagtacgctgaggtaaggtctcatcggctagatcccttttcctcgcatgaaatcgatttcccctttcctcatcttgttttcttcttctcgattcttttggatttgcagcacctctccaatctagttgcgattcccagcctgtcgcatgaaaaccattactttcttggtccaatcggcaaccttgaccccactgatttcatcatcggcgaaagcaacagaatcccctttagattagc

SEQ ID NO: 8952 - DNA, 1557 bp, Oryza sativa
  Clone ID: PAT_MRT4530_15413C.1
atggatgccgccggcgaggaagggggcatgacctacggggaagtggtggactacttcaactccttgcaggacccgccggcgcaggagcgcatcgactgcatcatcccctacctcatctccctcctccccgcgcccttcgtccccgcgccgcccgacgccgcctccgccgacgactccgaggacgaccacttctccttcacctcgtccgacgactactccgccgccgaagacgcccgctccttcccgtcgccgccgccgggggatggcgaggaggaccacatcagccgcctcgcggacgacctcctctcggagatcatctcccgcctctccaccaaggaagccgcgcgcaccatggcgctgtccacgcgctggcgccgcgtgtggacgaagacctccctcctcgtcgacgacgcgcacctcagggacgccgacaacgaggtctccctcgtccgcgccatctcccgctgcgtggacgcgcacccgggccccgtccgctccgcgcgcatcacccacgtcgccttctaccaccacgagtacgcgctccggcgcctcgtggcgagcctggccgacaaaaacgtcgaggacctcatcctcttcaaccgcccgtggccgctcaacatgccgctccccgacgacatcttccgctgcgcctacctccggcggctgtacctcggcgcatggatgttccccgaagtcgccgctgccgccttagtaaacctccgcgagctcggcctcttccactgcatcatccccgaccgagacttcgacgccctgctctcgctctgcagtaagctggaggtgctctccctcgccatgtcgtacaactgcccgtcgcggctccgcatcaagtccccaagcctccgggccgcggtggagtggatgtccagcctcgacgagattgtcgtcgacggcgcgccatgcctggagcggctgctcctccaccacgccatccccgtcgccgagcgtacgcccatcaagatcgtaagcgcgccaaggctggaggtgctcggcatcctggacctccagctccacgagctccagattggcggcaccaccatcaggcctgggatgtggatgtttgtgaagtctagcgccaagctcccgagcttgaagatacttgctgtcaaggtgtgtttggcgatcgaacgggagatcaagctgctgatgacgctgctcaaatgcttccctcacctcgagactcttcacatcaagtccattcctccatgcgcatcacctgaaatcgcgaattgcgcggatgtttgggaatccctgggttcctgcgaatgcctcaagtcgcatctcaagacagtcagcatccaagggttccacaccgagcgctatgaggtgttgtgcctcaagtacctcatcttggagggggaggtgctcgagaccgtggccttcttctgcgaggataaagtgtgcttcgccgccaaggacgacgaggcggtggagatcgagctgatgtttcccaagaacctcgtccaagatcgctggagcttccagagcgccattgatctgtctctcgacgatcccttcttctacgccgtggagagctga

SEQ ID NO: 8953 - DNA, 153 bp, Oryza sativa
  Clone ID: PAT_MRT4530_15414C.1
atgacatcgtgtcagcggttccacatacaccaccagcagagcaagaagaagggggcaaatgcagccgacatctcgtacatcagagattccagggtcaataaagagggctgcccagaagttgcaggtgaaagggcacagcaggcgctcttttga

SEQ ID NO: 8954 - DNA, 309 bp, Oryza sativa
  Clone ID: PAT_MRT4530_15415C.1
atggcgacgcgaggaagatggcgacggctccgggtcggtgtcgatagtggcgaaccggtgacaggaaagacggaggaggtggcggacagggaccggcttgacctggggaggcacgcattgctggctagagggagggcggcgccaccggatcgaccttccttctgctccgccctcacagtagtcaccgtcgccgccgtcagcgtcgctcctagctgcctccgtctcaaccaccggagaagagaagggggagaggaatggggaagagatgaggagaggaagagggagtggagagggaatgtgaagccttag

SEQ ID NO: 8955 - DNA, 1534 bp, Oryza sativa
  Clone ID: PAT_MRT4530_15417C.1
tatttaatcgtatagagatacatagcagcaccggaaagagatacatataaaaactatgcatgcattattatgctatgcaaatatgattgaacgacatatatatgctcctctctttactaaactaggtgatcaagactaacgagggacttacacatatatatatataagtgacaccatgatgatgagatttacacaaacatgagtaatactatatatttataagtacacatatgtttgctgattctccatgcgcgtgtgtcaggcgatgcgttgtaaatcagctgtgtaggtcaagcatgcgtgttcagttattgatcagaggaagaggaaagaacaggtcaatctccctgttgttcacatcctggaggggtctcgcgttgttctcattacccatgagcacagctgccttgagaagtgtgatttgggacagtgacacggtgtgcaccttcctgacaacggtccagatgaccccctccgtgcaaggtggtgtggtaaaggagcccatgtagcgatagtacacggtatcctttcccttggctacatttggatccgccccaccaacgaccatcttctctttaccttcttggtttgatatcgcaattatataaggctccatcttttgcagaaactcgtccggggtggtgccgatggtgtagaggatgccaatgacggcggcctggttctgggcattgaggtgcaccatatgtagctccatgtcatacctccggccatcgatggtgtgctccgacggcgtatgccagtgcatttgccggagctggtacgccgtgccatttatctttaggctaccagcgtcgccgtcaaacctaaccatgatgtcgtggccacggttgacgacggaggcgttggcgttcttgtaggtgtagttgaggttgccgaggccgggagccaaggtgaggtcgaggaggccgaggttgattggcgactgcatcttaccgctgctgcaggtggcccattccggtttcaggctgccccagttctgcggccccctgggcgagccagggatgtagctgtagccgtcgtcctcggctccggccaccggggcagtggccgagagcaggagtgcgatggcggcagcggcgccggcgaggaggaggaggcggcgagcgcgccgcctctctccccccactgcgccgcctccgtcctcggtggcgacatcgacgcgcggatccaccgaccccaacctcgggagcggcggcggcgggcggcagtgggcggtggcgggcagcgggcggatgcacccgccaccgacctctggagctagtggcggcagcttgcggatccgccgccctcgacctcggaagcggcaggtggtggcggtgggactgagcggcgacggcgggcagcggatccggtggcgccgccctcgggagtgctggatccgccgccctcggtaacggctatggctacggctacggtgatggcgtggcgtgactgcagcgatggggacgttggtggctgcggtctcaagtagccctccccagttggcctgttgtgtgcctgtgacggacgccat

SEQ ID NO: 8956 - DNA, 558 bp, Oryza sativa
  Clone ID: PAT_MRT4530_15418C.1
atggcggcggcggcggccgggggagagtcgggggaatgcaggagtcggggagccgagatagcgggcggtgcggggaggagggcggaaggccggagccccgtcacggcgggcggcggggccgccggagacctggtcgccggcgaggccgcggcggcgactcgtcgtcgcggcgtgagcgaggtgggcagtaggaggcgaccttgcgcgccaccaccgcactccaccttcgagccgctgccttcctctccccgccctcaccgccaccgctacctcaccttccaggctcctccctcgctggcccacctcctgcatcctcgtccccctgcgccgcctctgctcctcctccgtcccaccccaacggcgcatgccatcgccaccgggcacgtggagaccgagggcgcagtgaacggcgtcggcctcaccaagctcatgggccggagagccggccgcattgcgctccacgccacgctcatcagccgcgacgtcgactgttggtggcggatgcagcgcctggccaccatgggcaattgcccgggctccatgcgtacaacaccacaa

SEQ ID NO: 8957 - DNA, 345 bp, Oryza sativa
  Clone ID: PAT_MRT4530_15419C.1
atgcaacttgagtcgggcggcgacgtgggcagctcaggcggccatggcagttgccggctcgggctagaggttgggggggccgggcaaccgaacactgtgtcccaaccgcacgcgcaagccatgacttcgcccttcgccatgccatatccaaacgggcctctacagcaaggtgccgtgagcaaggcggggggcgaaaaggggctgccgctgagtgggggaagcaagattcgtccaatcccaccccagttcaagttctcacccgttccgcgatactcaggcgaaacggacccaaaagagttcctgtccatctacgagtccacgatcgaagccgctcatggcgactaa

SEQ ID NO: 8958 - DNA, 318 bp, Oryza sativa
  Clone ID: PAT_MRT4530_1541C.1
atgggaccacttagggatataaagaggacgaagaagagctctaagcgttttctcagcgcaataaagcgggctgcaagctcgcgctcacatcactattcctacagcttgagtgcgtgcccgtccaatgaggacgcaagagtgaagggcatgctgagtcatatggccaagtgccaatggatgaggatcaaggccaaactttccatcccgactccaagctgggcttgcaaagagatcaggatgtgcagacctacaacctcctcagggatcgggtgttcactcatacgcgagcatacgacccggagctgcttgtcaaaatag

SEQ ID NO: 8959 - DNA, 352 bp, Oryza sativa
  unsure (1)..(352): unsure at all n locations
  Clone ID: PAT_MRT4530_15420C.1
acatcttataatggtaggccactttatattctactattttttttttttttttttatttttngaaacaaaaagaaaactttcaacccccaaatcattttatatccacatttctcatgcatacttcaaaaaaaactttttcctcccttacaaaaaaaaaccaaaactttatttacaacccaacaaacacaccggacacaaagcgctttttcgatcaaaacaaacaaaaccaccatggcaaactactactaggtaacccacaacccctaggctttacagggatacaaccccccggggaaaccggccggaaaaccgcggcaaaaatcaacccctgccctttttgccctttttggaa

SEQ ID NO: 8960 - DNA, 561 bp, Oryza sativa
  Clone ID: PAT_MRT4530_15421C.1
atgtcggcggcggcgaaggcgaaggcgagcggcggcgggaggcggggaggagccaaggacccaaccgacgcgctccgctccgacaagaagcgccgcgacatggacgactccgacgacgccgagctcgacagtgttgctacagaaattcagactatcgtacaggatgccaagggcaagtttgagaaggaaaggcaaaattatctgaaagttctatcaaagacttcaaaagagtgtgaaggtttactgaagaacgagtacaccaagtttcaagcaacacatgataaattctgcaaagaaaaagctgcacacatgcaaactctcaaagaccttttctcaaagttcgaagatgcaaaggagaaattacttatccagtatgaactgcaaaggaagaaggagaaggctactctgtctgaactcgagaaaacattttcagagaagataactaatgcagaagaatctctgaagaagatgaagcaggatgacaaatccattgtcaaccttcgcaagtccattggctcattcctggacccggatgatgagtttggagcagacgatgactga

SEQ ID NO: 8961 - DNA, 378 bp, Oryza sativa
  Clone ID: PAT_MRT4530_15422C.1
atgtggccggtcagaccgtgctactctgcaacggctagaaaactagacgttgtagccctgtcagaggaccccatcgccctggccggtcagaccgccgttgagtggccggtcagaccggcctcagctcggtcagaccgccatcggcttggtcagaccgaatacggctccgtcggctctatatcggccaccccgagcaacacatcccggcctccagggggccagtctgatcgcgcatgtgccgtcggtcagaccgccgttttgtggccggtcagaccggccagggcacgccagttagaccgccactatgtggccggtctgaccgcccctagtcaggccgaacccagtcattacccccccttgatagtacggcgaaactaa

SEQ ID NO: 8962 - DNA, 198 bp, Oryza sativa
  Clone ID: PAT_MRT4530_15423C.1
atgtcggccgggcagctggcatttctggcgtgtgtgctgttgctcaagaaagagactgatgattctaaggctatccgaattggtctcttggacggcagtgggggcagtgaaaaccgtgggaaagatgagcttacaggacaaagtggtttggtggtggagcttgacaggatcagctgcaactgcaagagtagaggagag

SEQ ID NO: 8963 - DNA, 990 bp, Oryza sativa
  Clone ID: PAT_MRT4530_15424C.1
atggcgaggaaggaggtgggcatgctgcttggtatctctgacaagatcgacagcctccgcgtcaggcttgatgggctcaaggagttcctcgccgacgcggagcggaggcgcatcaccgatctgcacgtgcagggttgggtgaaggagctcaaggatgccatgtacgatgccacggacatcctggagctgtgtcagctcaaagccatggatcaggacagtaggcgcagcaacaacccgtcgctactctccctgcggaatcccttgaacgcccaccacattggaagccgcatcatggcgctgaaccagcggcttgatggcatcaagcagcgtgccgagcaattcagcttcatcaagctcgatcgctacggtgactgcagcaggacagctcaaggccatggcttacgccggacaacaccagagcttgatcggtcaggcgttgtcgggaataagatcgagcaagatacaaggagactggtggagttgctaacgagggaggaggaagaggcaagtgcggcgagtatcagcagcaacgtcagggtcgttgccatcgtcggtgttggaggtattggtaaaactaccctcgcacagaacatcttcaaccaccaggacatcaaggagaagttcgacaaaataatatggctgagcattaaccaggaattcagtgatcctgagctggtgaggacggccatcactggtgccggtggtgagcacagtgggcatcaagaactgtccctgcttcagccaatccttcgagaagcaatatctggaaagaaaatctttttggtgatggatgatatgtggagcgtccatgcttggaacaattcattaagaatccctttagttaactcggctgctcaaggcagctgggttctcatcaccaccagagacgaaagagttgcccgagagatgaaggccatacagccgtaccaccgcgtggacatattatctcggcaagatgcctggttgttactcaagaaacagtttcattaa

SEQ ID NO: 8964 - DNA, 253 bp, Oryza sativa
  unsure (1)..(253): unsure at all n locations
  Clone ID: PAT_MRT4530_15425C.1
caaganccgcacgcncggcctggccaccgtcgatgccccctcgccactgccgccgctagccgacgaaccagcatatcttcgccgacctcgacctccatggaccgggcctccnaggagctggagcgccgcagncgntacctcagttcgctcgtccgncgcaccaagctcgncgacccgnccgagccggagccggagcctgagccggagccggagagggagagggagagggaggtggcggcgaaggagagcggtn

SEQ ID NO: 8965 - DNA, 676 bp, Oryza sativa
  Clone ID: PAT_MRT4530_15426C.1
ctcgtctcggtgagtgcacgccggaagatgccccttcgttggtcctcgcagccggcggcgtcggcgtcggcgtcgtgtccgacaggacgcgcaggtcgagcagcgagtcgacgtaaggacggaacacgccgccgtcggcgtcgcgatgctgtgttcgccgccgttgggcgatgagtgggaggaaaatctcggcccagccggcggccggatgcgatgaagcggcgcagccgccaccagtgcacgaggttcgccagcatcgagccactgaagcccttgaccacgacgtcgagcttcaactcctgcatcacgcgccgtaggtcgcgcacatggcagctcgtcgatgtcgtcgccgaagcagaagcgcacggccagcgggaacaaggcgtcgtggacgacgtcgcggacgcccacctcgccgccgtcggcaccacgggcggcgatgtcggcgacgagggcgtcgacggccttctgctgcagcggcgcgaggaggccgacgcgcgacgggcggaggaatccggcggtgaggttgcgccagagcacgcgccactgcggcccgtagcgcacggtggtgagattgtcgctccggcgccgctctagaggatccaagcttacgtacgcgtgcatgcgacgtcatagctcttctataggtcacctaatcatcactgcccctagtgcc

SEQ ID NO: 8966 - DNA, 237 bp, Oryza sativa
  Clone ID: PAT_MRT4530_15427C.1
gtcgagtggaggcagcatcggatgaggcgaggggactggaggcaaaccgcctgccctacaactcaccgctaaatcacagctgataaaccacacaagagagcactacctacgggctcatatgctagagacgcatgattgacctactagacaccaggctggcggcagatgatgtaataatcagaaccagggatggctgtatgctcccatatgaaaccgacctgatgtatatgctttaag

SEQ ID NO: 8967 - DNA, 558 bp, Oryza sativa
  Clone ID: PAT_MRT4530_15428C.1
actaatggatgttgatgggaaaaagagctcaaggtacatgaattccagatatcggccaaagcaacatgatggaaaagagtcaaaagaaaatgagcatagtagctgtaaggaggccaagaacaacgaaatggaggttgacaagcaggttgatgagcttgcttcggccgtatcaagactgagcacagcggattcaactccttctagcataagctttggtcatcgtcgctctcgcggtcttgcttttgtccctaggtcgattcggcagaccaggcaggcgcccacgcgtccgccaaaatgacagcatttgataccatctttctcttcattgctgatctcggatgcatcaacaatcctgaatgtgctgtttcctgtacctggacattcaccgaatccactaatatacattcttgtagttgtatcacgagatatgtcttctagctggttatccttgcttatggatgtactgagcttcctgttactgccatgtagtagaacaatttttctgaagcggcaaatatgaagtgcaaaatacaagacagttcttgtggttgatcgatt

SEQ ID NO: 8968 - DNA, 458 bp, Oryza sativa
  unsure (1)..(458): unsure at all n locations
  Clone ID: PAT_MRT4530_15429C.1
ggtagaatcacaacacaccaagttcatcgcacgcaacagtggttggccaacagctccaggctggtagcgcanacanatctcactaaccaggccattaacgtacgcgtctcacgcgcgcatccgtcgccacgccaaacctaaccacgccctgggccacgcccaaggggttccggggttgttctcggtccctaaccctctcccgcaatcccaccaacctccacacgcctccacagcctccaaagccttttggctgggcccttaaaacttgcccatccatatgtggtatctatcctaactactacattgctccgacgaccatccccaccgttggtggtgtctggtactgaatcgtaatacctataatggttcaaatgttaaaaaataaagtcatgcatcatcatgcgtgacagtcgaaactcgatgtcatataaatctaaataaaaaaaaaaaaaaaaaaa

SEQ ID NO: 8969 - DNA, 300 bp, Oryza sativa
  Clone ID: PAT_MRT4530_1542C.1
ggggggccgtgaaatatgcttccggatttcatctaaactgaaatgagcaaattacaccgccaaattgccaatacaacccatccagcctttttgaagtttgagctttttacaggggctcccccgggtggcaaaaccaaccttgcagttgtttaacctttttttaaggttaaagttccctttaaaaaaagtttttaaacccacccccaaaattttaaattttttaattggccaaaattttttttgtgaccatgcggggaactttttttaaaccttggcctttttgcctgggttttttttttt

SEQ ID NO: 8970 - DNA, 579 bp, Oryza sativa
  Clone ID: PAT_MRT4530_15430C.1
atgccctccagcagcagcaccaaagctcaagctggcatcctgcccatgctttacgagtcacctaccgtgatcacacctgaaaagaggaaccctcaagttagtctatgcttgaataatgtgttctctgaaaatagatcaaatttcaaccaattcactggaaaatgcattcaccgtgcatcaaagccgaagcctcccttggtgctaccgacaacaggggtagaacatggttacacggaactgatgatggcaacttacagtgagaaaggcccagaaaacaagctggatcatggtgtagatgaaaccagaacatatgaggagatcaaaagcaaaatatttgcaggacggaagatggcttttggagttgcagtcatggagaaccacccaaaggatgctagaagcaaaccaagctcaggtgcaaaacattctgttggaaaatgtgggcatggaggaagaaaggatttgagtatgaactgttattttagaagtagaaaatttcctccaggggttaactttgatggccacatacccttcacagctgattaccgtacaccccggcaccacccgcccaagaacaactag

SEQ ID NO: 8971 - DNA, 378 bp, Oryza sativa
  unsure (1)..(378): unsure at all n locations
  Clone ID: PAT_MRT4530_15431C.1
ggcccacatgcttgctaaactctgaaagtttcagaatttcggtacttcagcaatgcacatgaagtttgggacgaattgatttttaagaaggattctaacactagtaccgttgtgcaaaatgactgatctcagtgcaaagaactgaatgatgcttgctatataatatcagctagatgagttatcctcgaatattaggcgttctcatgtagctgacaggtataatgtgaggcgtcatggttttatcattttgttgttatgcttgtngttgtattgaatgttaattagcttcaagaatgaggggaaatgtgtgatatcctccatccttgtgaagagatttataaatttgtncctttgttactgagntaaaaaaaaaaaaaa

SEQ ID NO: 8972 - DNA, 179 bp, Oryza sativa
  unsure (1)..(179): unsure at all n locations
  Clone ID: PAT_MRT4530_15432C.1
accgcacgaantcgttctctctcctangttcccacccggcgttgcnaatctccctctctncaaggcagcgtgtggcanccggctggaaagnagcncggctcgttggnaantgggaatanaatggctgctcttctctcnctcccagatctccaccccctcggctccggctcactcncctc

SEQ ID NO: 8973 - DNA, 196 bp, Oryza sativa
  unsure (1)..(196): unsure at all n locations
  Clone ID: PAT_MRT4530_15433C.1
gactgaaatcatcaagcaccactaagnaatntttaaaacctgaagtactcaacaccggcgaggtccacaaatcgnaatgggncaagctcaaagggggncaaaagtgcangaggggtggccccnncaaaaggtnantctngnatgttttcccctaactgncacgtatgtcatagagaggngtcggttttattatagg

SEQ ID NO: 8974 - DNA, 572 bp, Oryza sativa
  Clone ID: PAT_MRT4530_15434C.1
gttcacaaggacatatcaaattatataaataatgttgatggtgattacatcagctctcgatctgtgcatggctcatattagttcctgcaggacgataccacttcttctaggaaataacccggcgcgtgggaaacaagttaactttgagatgtgggaccccagattgggcacgagaaagcccccatatttcatatggcacctctggggcaggtcggatgcggatcatcatctatcagttaacatgggcggcgtagaatatcattccgttttttttttttctgtggctttcggtgtatcttattcacattttcatttgctgttatccattcaactagcttgccaagagaccttgtcaatgtaacggtatcttcttgttgtgtataccatctgttctcatgacatgttagtttttcagaacttatagcaggtagtaccttcatattgatgatatgactttgattttcattatttgctgcttccctgtgtacatattacagaccgtcatatcaacaggattttcagcaataagtgggtctagggagtgatttgagatcaatggcataatgttgttt

SEQ ID NO: 8975 - DNA, 486 bp, Oryza sativa
  Clone ID: PAT_MRT4530_15435C.1
atggtggggggagaggtcatgtgcgaggcggcggcgccgaggtacaggggggtgaggaagcggccgtgggggaggttcgcggcggagatccgggacccggcgaacgggcgcgcaaccaacttcccgctcgtctcctccctcccgctcccgtcgccccactaccacctccccgggaaggcggcggcggcggcgccgccggtggccggccccgcgtgcagcgcgagctccaccgtcgagtcctcgagcgggcctcgcgggcccagaccggcggccacggcggcggcggtgccccggaggcgggtcccgcggcccgcgccaccggcgcccgacgccggctgccacagcgactgcgcctcgtcggcctccgtcgtggacgacgccgacgacgcctccaccgttcggtcccgcgtggcggcgttcgacctcaacctcccgccgccgctggaccgggaccacgtcgacctgtgcacggacctgcggctctga

SEQ ID NO: 8976 - DNA, 500 bp, Oryza sativa
  Clone ID: PAT_MRT4530_15436C.1
caaaccccagattaacaggctatgtgtcccaaggggtggctcaaacaagggtgatgtgtttggtgtgtccactgaggggcttcagtcccacgtccaaggttcaaatccgtaacccaactacaagcccggcaagttgccattgctgcactgagtaccataaaatgcccggggttgattgactgatgtgccaatgcgggtgtttgggatgcagaacccaacctgatgctgcaagatggatgattgttggatgaaggcgtttccaggtggataaagaagatgcatgagatgttggctcccaacgctgcacgtccctagaagaacaaactgactggattggtgcactggttgggttgccaccattaggccaagtatactacaaggcacctgatggctaggtaactatcatgatatggatacgtagaaataatgggtttttatgccggcaaattgttatcatccatgataccccccccagtatcctattggaaaaaaaaaaaaaa

SEQ ID NO: 8977 - DNA, 881 bp, Oryza sativa
  Clone ID: PAT_MRT4530_15437C.1
gcacgaggccctcttctccccgtgagccaatccgccccggctcagctcaacccagcagcgcagcagctcaagccttctcgcgttgcagcgccgcgccgaggaggtgtttgttgatttgtggagatggtggggggagaggtcatgtgcgaggcggcggcgccgaggtacaggggggtgaggaagcggccgtgggggaggttcgcggcggagatccgggacccggcgaagcgggcgcgcgtgtggctcggcacctacgactccgccgaggccgcggcgcgggcctacgacgtcgccgcgcggaacctccgcggcccgctcgccagaaccaacttcccgctcgtctcctccctcccgctcccgtcgccccactaccacctccccgggaaggcggcggcggcggcgccgccggtggccggccccgcgtgcagcgcgagctccaccgtcgagtcctcgagcgggcctcgcgggcccagaccggcggccacggcggcggcggtgccccggaggcgggtcccgcggcccgcgccaccggcgcccgacgccggctgccacagcgactgcgcctcgtcggcctccgtcgtggacgacgccgacgacgcctccaccgttcggtcccgcgtggcggcgttcgacctcaacctcccgccgccgctggaccgggaccacgtcgacctgtgcacggacctgcggctctgataggaatccacaccgaatcgaagcaaccggagaagacgattctactgctcgtcatcttttcccaattagatgcttgtattcgactcgacaatagtctgtaccactattctttacgcgataattgacaaggaatggccctcttgagtttcaaaatcaaaaaaaaaaacctcgtgcaaaaaaaaaaa

SEQ ID NO: 8978 - DNA, 1962 bp, Oryza sativa
  Clone ID: PAT_MRT4530_15438C.1
tcggatatagtgcagcagcacataggagagagaggtacgtgcctgggagtgtctgtgtttggcacgtccacgacagcacgagacgggttggggacttggggggttgaagaagccaagctctccttggttggcgcgcacgtacgttcgcttcgcttcgattcgatggccactggtgacccaaaccctaccaccactccgccgtcgcagcagctgcaaggagcagatccccaaccccaatcccagcaggatgccgccgccaacgccactccggcggccgtggccgtgagagaggattatgtccagaacgccgtcaagttcctctcccaccccaaggtcaggggctcccccgtcctctaccgccgctccttcctagagaagaagggccttaccaaggacgagatcgacgaggccttccgacgagtccccgatccgcaacccagcgctactgctactgctgctgcttccccttcgccttcacagcaccccaacaaccagaaccactcttctaccgttgtgcaaccttatgcaccaaggcaaccagcaacacctgctggctctattattgttgccacacagcccaagttcagctggtaccgtgcattcgtcgctgcagggctattgcttggttttggagttagtgctgctgtgtttgtcaagaaattgctccttcctaggcttaagtcttggatccgcaaggtcgtagctgaaggtgatgaaaacgagggcaggcaaattaagtccaagatcgatgaggaaactgctgaagctgtaaaagcttctgcatctgctgtttctgctattgccaaaactaaccaagaattgcttgcttcaaaggatgaagaaaagaagatacttgtgacattaacacaagcactagattcccaagcaaaagaattgaaatccttatgtgagtctctgaaccatagcagggattctataaatattaccagggaagataggttttctcagtaccgggcattggaagagcatgccccttctgctgcaaggaatgggccagttaacactccatggagagcctctcagcaaactaatatgtatggtgtgccaaacagtgattttggctcagggaggccttcatttgcgtcaacacataatgaagctacacctggatcattttcaagatcgtacgttgagacatctgctgcacaccgaggggataataggtcttcagggagtaagccatgggagatgcagcaatactcacagcagaggattggctacggatccaacagccagttgagtgatgacggatgccctgaaactcaggacaactatggcgggggaccttcgtattcgtatcaccagaatcagaatcagaacgggaaggctccggctccggatattcaagcagaggaggccaggccatcggtatacataagtggggctgaggaaaggtcgcctccgcctccgcctcagcgccgctgggttcccccgcagcctccgggcgttgtgatgccggaagctgtggctgccatccgtcaaccaaagtccctcgcaaagcaaccgtcgagcgaagcttctcaagaggcagccggcgagacgcatgccaacggtgcttcaagttcgtcgcctcttcctgaagaggcgcttgttaatggcagtgacgccggacgtagtgagatcgaagaacaagcagaagccatctagaaacaatttgttttaaattgggacgagatgatgttgagaagctggaatatgtatttattttggatcagtacgggaacgcctactgtggtaacagaagatctcgatttgtggtcgagtttatactacactacgtcaaataacaagtgttgctactagctgtgactgtgagtaataccgatacattacattacattacatacatacacggtgattaaaacaaacaagcagacatttttacttggttatgttatgacaggcagagatggcatatgttaaggaaggataaaaaaaaaa

SEQ ID NO: 8979 - DNA, 653 bp, Oryza sativa
  Clone ID: PAT_MRT4530_15439C.1
tccccgggctgcaggaattcggcacgaggcatttcttgcatctccaattatactcttgcttccaatttcaacctctcttcccaaccatggcagccagagctctcctcgttgtggccatggcagccgcggtgctcgggacagcgatgggcgtcaccacctacacggtgggagctccggccggttcatgggacacacgaaccaactacgtgcagtgggtctccgctatcaccttccgtgtcggtgaccagcttgtcttcaagtactccccagcggcgcacgatgtggtggaggtgaacaaggctgactacgactcctgctctagctccagccccatctccaccttcaactctggcgatgacaccatccctctcgctgctatcggcacccgctatttcatctgcggcttccctggccattgcaccgcagggatgaaggtcgccgtcaaggtggaggccgccaccggcagcaaccctaccccgtcaccattggcccctcttccacgcactcctacagcaatagcaccaaatgcgatgccccctacgaacggtggccggcccgcccctccgtcaagctcagcgagcaagcctgttggtgttgcatctctggttggtctgagtttgagtgcaatcgttgctggtctcatggtcttttaa

SEQ ID NO: 8980 - DNA, 1133 bp, Oryza sativa
  Clone ID: PAT_MRT4530_1543C.1
ccatagttgttattatcaacttttgaaatgctttctgcctaaagataaatttcacaagagtgaattattttgctttggtcagacacaaaatgttatgaacaatattcaaacatttctggttgtataccgggagactttcctttaaaatatcttggtatttctatgtattttaaaaagctaagtaataaagattggaaaaagattaaacaaagaattaaaaaaaaacttagttgttggaaaggtaaacatacacctgcaggaggaaggttggttttgattaattatgtgctcttaagtctagctacgtttataatatttttttttaagattctcagaggggttctttgaaaattgattattatatatcactttttttggcaagatgatgatcacacaaaaaaatatagactgacgagatgggacataattttgaaatttaaaactagtgtttattgagcaaatagttgtttaagttaataaatgagcaaggagtttgacaagacttattgaaaataaaataccttaataaccaatcaataactcaagttgagaggaaacaagggattcccatttatggtcaggtctcctgaaagttaaaagtatttttctcaaatatgagttcctagataataaatagcggttaacaagtcagaatttggaaggataagcggatagataatacttcctttaaggaaagatacccatctttgtaccctatagttcgtagaagaaattgttaggttgtaaatgttacgagctctgttccactcaatatttcttttatgagagcattagtagatcaggacttggccaattagcacaatttgtgtgcttcaattgtgcatattcatttatcaaataacaatggcatttttaaatggaattttcaataaaatggtcaattctcggttagatctatgtatttagccttaattaataatgggtatattgagaggaataagtttatttgggagcttaaaggcacttcttaatatcaacatttttatgtggtatctgcttgaaggggcggtggtaaaaatacataatttggctaggaggaattggaatggtagcatgaggtgttgcttttgtataaaaaatgatacaatatatcaccttttcttggattgccg

SEQ ID NO: 8981 - DNA, 153 bp, Oryza sativa
  Clone ID: PAT_MRT4530_15440C.1
atgttggctggagtaacaaaagccttagagggaagcaactgcaaggtcaaatggcagccgtattgcattaaggatgcaggcctgaaaatgacctgctgcatgaaaaatattggagtccaggatggccaatgcaggtatccatcgcttctgaac

SEQ ID NO: 8982 - DNA, 286 bp, Oryza sativa
  Clone ID: PAT_MRT4530_15441C.1
ggggggcctctttttgcgctcgctctatacgtctcacttagggtttctggccgcctgctggtccggtccggatggccgggtttgcccaccgtcgccaccgttctgggttgcgcccgttctctccggcgctttcctggccgctctatccgctcgggcgccgccgccttggctgctgttttgcgctgggcggacctgtcgccggtcctgctgtgctctgtctgcttcaggctggacctcatgtgctgcgcctgcgctctgcggggcgtgctcggtgtggcgggcggcg

SEQ ID NO: 8983 - DNA, 435 bp, Oryza sativa
  Clone ID: PAT_MRT4530_15442C.1
cgcgccgcctgaggaggcgctagccatcgggggaggtgaggagggagaggttggtgcggacatcactccttcggatacacacaacaatcctccaccagtcattcaaggaccaattacaagagctcgcgcgcgacaattgaatttagaggtgagttcattcctatgttcttctttatatgattttgagaatagattgctatctaatgattatattatgattaggtacaatggagaggacaaggagacacttacggagggacttagaactgtggaggatcagtaagggcgtccaagttaagatggaggcccaaatcaagtcgacttcgagtacgtacgtttcggagtctaggaccagtttgcactaaaacgggcgcccaggtcgcatatgtgcttggattggggagttctttatatggatgaaaagctaagaagata

SEQ ID NO: 8984 - DNA, 385 bp, Oryza sativa
  Clone ID: PAT_MRT4530_15443C.1
cggattcgagggaggaacgaagctagggttcacgggagagggagagaggaggccgggcgggaggaaggagacgaccggcctggcgcgtgggccccacgcggtcggacgcgcggtcagcgcatgcgcggcgcgcgtgtgcacggccggctcggctcggcctggcttgggcgcagcttgggccgggcggccggcccaggagaagaggagggggaggcggcctgggagaaagagggaggaggagggagtgggccgggagggggagaggaggcccgggagaggagggaaagagagggaggagagggagactttggccgtgggccgggagagagagagggaggactttgagccaaatttggcccaaaagaaaaaggaggattatttttag

SEQ ID NO: 8985 - DNA, 424 bp, Oryza sativa
  Clone ID: PAT_MRT4530_15444C.1
gtgacccatcaaggatcgaagtacacacaaatgatgagaatgcgcagatcacaacatcgagagatatatcttgatcgatccggcacctctccagccggggtttccacttttggataatatgtggcgacgaagaggacaatgctagagacaaattgggtgacacgacaaatctctgataacaaatgcataagtagagagcgcaacatgaggatgcatactaatatatacatatacacatggacacatatataggtacagacatcgacatccgcgacaacatgcaggcatcagaaattgtgacggagaacaatgactaaggggataggctatgacggatgatgaaccgcaccaggacagtgttaaattcgacaaaatccggattggctgacttcaaacgtacgaattcgacagcagcttgggaggc

SEQ ID NO: 8986 - DNA, 869 bp, Oryza sativa
  Clone ID: PAT_MRT4530_15445C.1
tatactcgttaaaatatacgcttgagattaattctacttatagtcgtagtagaatactccaattagatagcaccgtaccggagagtcacccagataggaaacatgagaggggtgcaagtgtcgacagtcgtcactcgccaggaactggtgaggctcgtgcactcctcaaaaaatcgtggccatatgcaacattgacaagtttgcggagaagaagaggcagctggttctccatcaagaccacgtcggatctgataccatcggacaagtataagcatccgtgctcgctgaagacagggtcatcgggttcatagtcctcggctctcccatctagctgaaaaaccctcgccatctctagcaagaagcagccgtccatgagcatcagctccacgaagcgtgtaccttggtaccattcgtcttctagcttttcgtacgcgtcactgaagctgcacctttatctcctcaacggcagcgatgaactcctgcagaggcttcccgctccgcttgaccaagctcgccaccgcacggcacttgtgcttctccatcggcagcagggcaggatcgccgtggtggaaaggtcccagcgatactacctgtggctggtaggctctggggttcgtcatgttcttgatgtactccggcacccggtagatggagtgcctcggcttcgatcctcgcgccatctctccagatgtgtcgccactgatgtaactctcgatctctaccacccagctaccgctggccgtctcctcgacactcatggctcaagttgtatatttccaaagtttggggttggcacttggcactcggccggactcatgcaacaaaatcatatatgtatgtccagctcgatcctcctaaccaatagccag

SEQ ID NO: 8987 - DNA, 472 bp, Oryza sativa
  Clone ID: PAT_MRT4530_15446C.1
tgttttggcacgaatagatgctgcagacccatgcacagtacctggagtgtacaaacgcttcatgtcagaccaatatgttgatatagaggcaaggggacccatgactggcattgcggactacatctggatgaggagcgggacctacgtgctccgatactagactttgcaacctacggactacgctgacattgtggataggcaagataattgcctcttttggcattaatatatcatggcctgggacatgcacattgtgagcgcgacgaggaggaaattatcatgagaaccatcacactggttgagtttgggcaaaaccaacacagcgtgcagtaatgataggcagatgcaactgacctggataacttgagctgacaaccgtgattctacgatgacaagctaccagtacttatacttttgtatactgcaagactgctgagatcctcttggaataagtggatgaagctgcttatgt

SEQ ID NO: 8988 - DNA, 2454 bp, Oryza sativa
  Clone ID: PAT_MRT4530_15447C.1
tttttttttttttttttcttaaaaggaaatttctctcaaggatcattaggtgcaaaaaaggaatacattacatggtctttttgtttacatggttctaaattcagagataacaaagaggtcagaatcctctgctgggaaatactaacactaaatgaagtacaagcaggctctactatgtacagattacatacacctaactttttgacaaaatcattagtttcagttgaccagatgtctctagaacttctgcatcaacaccaagatcgatctttgatctaaattttttacaacctgttttcaccaggctcatactattgggacaagccttggccttgctggggggcgatgcgaagcctttctcgaggctctggagagcctacccacagatgccagcttcagcgctgccctgatcttgacccacttgcgtggggacaatggcaccgcaactctttcgttgctagaaaactgagaaatgaaattctgtatgagctgatcacatgagctggagtcaaagctgtttgttcttgatggctggaatggagcggcaatttgctgtgaggtttggtcattgcttgataggttgagcaggttactgaaattctcgctgttgcttggaggcactaagtgaggttgcatcaaagccacaacttcatctgtatggaggaaattatctggagaaaagcgcttgtatgattcttcaggtgaatgagatcgctcattatgtgcatactggccaattcgtgtggcagcatgatcagcctggatgctgctatgagcgtttggattaaaatatgttttttcggtattaggtatacacagaggagtgattcttggtctgggtatgaatgttccttgatttgaatgatgtgggataaaattgcccatgcccaactgttggctaaactgcacgttggaggtttgaccctgcacaaatcttgacatatccactgaagcattagaggcttcttggaatgaagaaaagttctccgttgattcaaatggttgaccagccagggctgaattgtattgaccacaagttgggatctgctgtttaggaataaagtcagtcaacatagaagttcccccacaatggaacctatgaagcggtacaggatagttgttgaccatcttatggtcatactgaataccacttatattcgcataagccaattgcttcattgtttcaactgcactctgctctatttcgtcgagctcatttatgggcttgtaagaatcaccaaacttcaccccaacaagctgatatattgcatcgaagaaaagtcccacgttgttgcccttcacttcatacaagcaaagatcgtcaccgacttcacatgtcatggcatggcttatgatggttttccaagctgcctgtgacatcttgctaaaagtctgaaaaagcttcttttcgtccgtaaaatatgattgtaagaacttctgtacagtatcaactccactgtttgtcaaggcctggtggtgagctccattgcggccgatcttttccaaacgccaaacttcgtcatccaacattggcgggtagtgcttttcaaatccctccaccctacgctcctttacacgaaaaggttcagtgattccttcaagaaccctatcttcagaattgttggctagcctcaaacccagcctgaacttcttagtgctagtgaagctagagttatcagtgaaggttgcattctcaagtaatgcttcccctccattgagcttcagtgtcagatttccggtgagaagttgtgcgcttttctctcgcccgcatactatctgcttgctgaagtcttcaggggtccattgttcctcatttttagcattaaagttgccgtggaggactacaacttcaaccttagcagaagcaagatgaccgaacctgacgatgcgcatctgattgttttcgagtctttcgactatagccaccttaagacccggtccatccttggcttctaatttcatcagtgtgtaaacaggctttagttcattcaggaacacgagttgataccttggacgctgctgattcaatcctgctagcagtcttggaggcgctggtgtgctgacttgtctgaaaattgctttctctacttcttctgaaaccactttctgaaccatcttggccaaagaaggggaggaaacatggcccatgaactcctcccccatcatctccctgaacccgaacaccccttccatgctcctcttcctcctcaccccgagccccaggacaagcgcccgccaccgcctgcgagggcgggacagctcgccgccggcgccggcgccgtcgtcgtcggaggaggaggaccaggagaggagcctcgtggaaggagccatcggtggaggaaacaatggaggagaggcatggttgcggggtgatatagaggagaagagaatgggagggaaagctcctggaacgagctgggcatgctcgctcccacgcgtccgcggacgcgtggg

SEQ ID NO: 8989 - DNA, 877 bp, Oryza sativa
  Clone ID: PAT_MRT4530_15448C.1
gggccggaattcccgggtcgacccacgcgtcttcttcaattttcctcgcaccgtcggcgaaggcgaagcggaagaggcggcggagcagtagctagtctactagctagtagtagtagctcgccggcgagcggagaggaggagccgaggaggaggaggagcttcgtggccggccgggccgccatggagagccgcaaggaggaggagcagcatgggggaggaggggcggtggggtggatgacggtgccggcgttcggggagtgggacatgaagaacggcgcggtgccggactactccatggacttctccaagatccgggagatgcgcaagcagaacaagcgcgagctctcccgcgccagcctcggcggggacgacgacctcctcgccgcgcagcagcacaaggccgccgcgccgcagcccgcccccaacgcctccgccgccgccgacgaccaccgccggccgctccacgccgcccacgacgactcgcccacggggaggaagaagttccttagctatttccagtgctgtatcagagcctgaagaactgtgaccctgcccgtcgtgttggcggcacgtaactcctgcgcaaatagctcttaggtttcttgggtactgtaaagtttgcgtaaatgtgtaatctccacctgctctgtaatctgttgctctttgcagagaaaaaaaggggaccgattgtgaacaatgaaaaagcgtatttgttcatgctgtttttcgcagaattgttcgcgacttccggtgcagtatcatcgtcctttgaaagggataggatccgaggatgtatgagtataacttatgattgatttggttcttggttggagaatataattttcacctggtgacctgtgatgatgaaaaaaaaaaa

SEQ ID NO: 8990 - DNA, 434 bp, Oryza sativa
  Clone ID: PAT_MRT4530_15449C.1
cgaccttattttttatttaagtcttttttttttcaccacaccatatatgaagctacaaactacatatagtaggctttaagtatgtccacccctgacggcatttatcaaactttttccctcctcccttttgcgggggaatgccttttataaaaattctacgtttaaaaccacaaaaggataatccaaaaagccccagccccccccccaagagataaatcccaaatgataatccacaaaaagggggatctgctctacggggggcccaaaaaacaataacccggaaatatagcacgacctgagaatattgggtaagttttcttcacctatgattaaagaacctaaaacccctatgggtggaactccaagggttggggggaaagctggggcaaacctgagcaggaacctttgccatggttttacaaaagatgcccccc

SEQ ID NO: 8991 - DNA, 345 bp, Oryza sativa
  Clone ID: PAT_MRT4530_1544C.1
gcaaaccccaacttttttcaagttttgaattctgggggggtaatatcaaattcatcacagaattgcacaatttgggcaagcattgggacacttagcgaaggaaaaagagagtactttacaagggggggtgggccattaacgaacccggggtgaacttgggggagaaaacccaagcgttgttggcaacagggttctggaagggggccgaccaggttttccaaggggcccttgccgggaacaatggcctggacaaaaaaaccgaacatggaaaacatggggaggcggccaatcttgatcccctggaccttgagcccggcgaaagggacggggttttccggaaggccc

SEQ ID NO: 8992 - DNA, 402 bp, Oryza sativa
  unsure (1)..(402): unsure at all n locations
  Clone ID: PAT_MRT4530_15450C.1
tganaacttgggttgggagcaaccgagcaaagcaagcggccgagcgggctgtggtatggggttccacctggtggcgatcgtggcggcgagggggttcctccacctgttccacctctcggcgccgctgctgtggccgctcaacctctggctgccgctcccgcgccacctgcccgccgcctgcgccgcgctctacggcggggttgtcttccacgccgccttgctgcgccgcgcctacgcgcgccggggcggcggcggcaacgtctggagccgaagcatccgcggcggcgacggcggcggcggagaggcggacgagctcctccgccaggcgctgctcagcatctcctactgaaaactgacgantgctattcttctctcttcttcntcttgggttttttttttttt

SEQ ID NO: 8993 - DNA, 231 bp, Oryza sativa
  unsure (1)..(231): unsure at all n locations
  Clone ID: PAT_MRT4530_15451C.1
ctctctctctccccttccttccccgtgtcttccagaagggtgcctttcgtcaccgcgccacgcctcgccctcaccccgcgctccgtcgccgccgcccgccgcgccatggcctncgccgccaccccgcagccaagcccgcccagccccaaggcggtgcgggttgtggtgaaggaccggctgcagggggacttattccgggactggacggcggagacggcacgcgcgctgggc

SEQ ID NO: 8994 - DNA, 555 bp, Oryza sativa
  Clone ID: PAT_MRT4530_15452C.1
tgcaggaattcggcacgagggggggggggttcttgggggtgtcggtgttgatggtttagcgagggatttttctgttggggggtttaggttggtgtagatcagagtttttttttttgcttcgaaaggcatcggctttccgtgcgtgggtgtgggaatttcaggagttttgggaggatttattttccttttggggttgcagtaatctcttgttctgtagatgtgcaactttgtctggctgctccgtgtaatctggacgatcttcagcttcgccctctgatggtattcagtccgtgttcttcacttccgcggcgattttagagtggattgagtttttttttccctcgggggaaagtggtgttcttgttactttttctcaatctccttattagggtttggtgtgagtgtgtgtggaaagctcgaacctttcagcctttgatctgaagaaactctggtgggctggtggttcattgatgtagtgtggtatccatcgtcctgaccattttggaggagctccaccatggcctgcctgaagctaggatcaagagctgatgtctt

SEQ ID NO: 8995 - DNA, 116 bp, Oryza sativa
  Clone ID: PAT_MRT4530_15453C.1
atgggcaagaaggctagggggggtgcctggcgacaaggctcaacgcagcgacgggacctggagacggcgtcgacgcaaaatgggagcgcagcgcacgcgtcggctccccttctacg

SEQ ID NO: 8996 - DNA, 234 bp, Oryza sativa
  Clone ID: PAT_MRT4530_15454C.1
atggagtgtgaggaatcttatggcctgggaaaatatattcttgtgctcacatcatgtggtaagtcgacgggcaaagctaaatgtgccatcgccaccgtggaatttttgtccaatttatctgatctggaatttttgttcatggtgtataaattaaaggacttggtactgacagtagacactgaagcaaaaggcgtttaccttcatgttcctagagagattggtgttctgggttaa

SEQ ID NO: 8997 - DNA, 165 bp, Oryza sativa
  Clone ID: PAT_MRT4530_15455C.1
atggatcgattgagtcgggtcgagtcgagccggatgggtgggtcgatgcacgctgatttatacgcgttttggagtccgcagcggaaggccgacgatggcgtcccgtcccatgcacaccttacccgtactagcacatccgaaaacgacatcgacatgtcttcaggt

SEQ ID NO: 8998 - DNA, 155 bp, Oryza sativa
  Clone ID: PAT_MRT4530_15456C.1
cggccggcctggtggagagggggagtattgtagtggaacagtgtacatagatgatgattgtagaagccatggtagtagggctcggcgaagttggggggtaagaacaccgaaccgaagaggaacaataaaaggggggcaagggcgaaggcaaaaag

SEQ ID NO: 8999 - DNA, 340 bp, Oryza sativa
  Clone ID: PAT_MRT4530_15457C.1
gattccgggccgacccagcctccgagaaactgtatttattcccatctgcagaggataggaaggactaagacgcgcgtaaggacctggcatatgcgatgcagatcactgatgcccgaaggcgatgtgcctttcctgttcctcctcggcaagccctaggcagatccactatcggggctagctctgccgcgatggccatggcgaacccggagaagctgaggagccagatcttttttctttatttcacctccaagtcggtggagaggtaggcgcgcaaggggcagaaggatgaggaggagcagaagctaaaggtgcagacgcccaaccaagaaggggaacatgg

SEQ ID NO: 9000 - DNA, 1095 bp, Oryza sativa
  Clone ID: PAT_MRT4530_15458C.1
ccggccgggatctaatcaaccatcacctctttcacaccatatcctataatggcgaactcaccgacgccgacaatgctggcgttcctggctcttgggctagcgctcctcctctccgccaccggccaggcgagcgcgcagaactgcggctgccagtcgaacatgtgctgcagcaaatgggggtactgcggcacgggcaaggactactgcggagatgggtgccgctctggcccgtgctacggcggcggcggcggtggaggaggaggaggcggaggtggtggaggcggaggcggaggcagcggcgtgtctgtagagagcgtggtcaccgaggcgttcttcaatgggatcaagaaccaggccccgaacggttgcgccggcaagaacttttacacacgacagtcgtttcttaacgctgcccactcctactcgggcttcgccagggaccgcaccaacgatgactccaagcgtgagatcgctgccttctttgcccacgtcactcatgagaccggacatatgtgctacatcaacgagataaacggggcgagcatggactactgcgacaagaacaacaagcagtggccgtgccagccggggaagaagtactacgggcgcgggccgctgcagatctcgtggaactacaactacgggcctgcggggcagaacatcgggttcgacgggctgagggacccggacagggtggcgcaggacccgacgatctccttcaagacggcgctctggttctggatgaacaacgtgcaccaggtgatgttgcaggggttcggcgccaccatccgggccatcaacggtgcgctcgagtgcaacggcaagaaccccggcgccgtcaacgcaagggtaaactactacaaagactactgccgccaattcggcgttgacccgggtggcaacctttactgttgagttacatgcacacatgctgcgcggctcatcgatcaggactgaataataaacaaagtaataacgaataaaacgtttggtgtgtacgtacattgcatgcacgtacggtacatgttgcaagtgacgtcaagagtttggtacggataaatatgaaaaataaaaccctgggatcagaataacaca

SEQ ID NO: 9001 - DNA, 436 bp, Oryza sativa
  Clone ID: PAT_MRT4530_15459C.1
gaaagtttctttcttgtccaataagaactcgtatctacccatcggtataaatatgtacacccgtggtcattgtaaactatctcaacgatcaatacaactactctcaccgcatcgccgccccctttaccgaggttttcacttatcatccggcaaaacttggcacctaacatgaggctgcatcggctttcgatctccggcgaagcggtaagtcctatgttttgctggcccttgcaattgtattggtttcatcggcgtcgttcaaggctgcatcagtacattcgacctcttggatcgctctggttcggttgatatatttacctacctatttatcacataactttgttaatttagtttggtagcttgatttacttgtatcggctgagattcgctttagggtttataccggtatcggctaaatcgctttgccagattaaat

SEQ ID NO: 9002 - DNA, 228 bp, Oryza sativa
  Clone ID: PAT_MRT4530_1545C.1
atggggcccagccgtcagccggtcgcgtcctcgtgtgtggctgacgcgtggggcccacggcgccggccggtgcgagccgggtgcgcccggtccaccgtggactgtgaggctgccgcgtgggcgccacccccccgtggacccgacgctgcagcttcggaagatccgctctacgtggaggttgaagccgacatttgggaaagcgagcaaggcaagtcacatcatccttga

SEQ ID NO: 9003 - DNA, 489 bp, Oryza sativa
  Clone ID: PAT_MRT4530_15460C.1
atgggcatgggattcgagcatggttttgctctacctgtgccgacccgacccgttgccatccctaaatgtataggttctaaaaagatcgacgccgctcgagctctggcgggggcggatctagcgaaggcggggagcagcggtggtggcggctcgccagatctggcggcgggggccacaacgcggcagtggttcctcgacaccgccgtcctcctcccctcacgacggcgcggcgagctcgccgacggcgtggcgagcttggcggcggcggcagcggtggcggcatatctggcaatgatgaccacggcggctgcgatggatctggcgaggcgacgacgaccacaacacgggggggaccggatgaggcaacgcgcggggctccgacgcctccaacgcgaggcttcggcttgtggcttcgcggctcccgagcccaggcgcgacgcttgcactggctcttctgcaagctcgatgacagcctgcgagaccacctaa

SEQ ID NO: 9004 - DNA, 5340 bp, Oryza sativa
  Clone ID: PAT_MRT4530_15461C.1
ccacgcgcccgggaagggaaggcggagcagcggtgatggggaaggcggcggcggtggggacggcggtggtggtggccgcggcggtcggggtggcggtggtgctggcgcggaggcggaggaggagggacctggagctggtggagggagccgcggcggagaggaagaggaaggtggcggcggtgatcgaggacgtggagcacgcgctgtcgaccccgacggcgctgctgcggggcatctcggacgccatggtcaccgagatggagcgaggcctgcgcggggacagccacgccatggttaagatgctcatcacctacgtcgacaacctccccaccggaaatgaacaggggttgttttatgcattggatcttggaggaaccaacttccgcgtcctgcgagtccaactcggtggcaaggagaaacgtgtcgtccaacaacagtacgaggaagtctcaattccaccacatctgatggttggaacttccatggaactgtttgattttattgcttctgcattgtcaaaatttgttgatactgaaggtgatgatttccacctcccagaagggagacagagagagctgggcttcaccttttccttcccagtgagccagacatcaatatcgtcaggaacgctcatcaagtggacaaagggtttctccatcaatgacgcggttggcgaagatgttgtatctgagttgggcaaggccatggagaggcagggattagatatgaaaattgcagcattggttaatgacactgtcggcacattggctggtgggaggtatgcggataacagtgttgttgctgctataatattgggcactggtacaaatgcagcatatgttgagaatgctaatgcaattcctaaatggaccggtttactgcctaggtccggaaatatggtaatcaacacagaatgggggagctttaaatcagataagcttcctctttcagaattcgataaagcaatggattttgaaagcttgaatcctggagagcagatatatgaaaagttgatttctggcatgtatcttggagagatagtgcgaagaatcttgctgaagcttgctcatgatgcagctttgtttggggatgttgttccatctaagctagagcaaccgtttgtactaaggacaccggatatgtcagccatgcatcatgactcgtcacatgaccttaaaactgttggagctaagctaaaggatatcgtcggggtcccagatacttccctggaagtaagatacattaccagtcacatttgtgacatagttgcagagcgtgctgcacgcttggctgctgctggcatatatggggtcctaaagaagctaggtcgggacaagatgccaaaagacggcagtaagatgcctaggactgtcattgccttggatggtgggctctatgaacattacaagaagttcagcagttgcttagaatcaactctaacagaccttcttggggatgatgtctcgtcttcggtggttaccaagctggccaacgatggttctggcattggagctgctcttctcgcagcctcgcactcccagtatgccgagatcgactagctttaaggatgatcttgatgaatgatgaatcaaactccgtttgtaggttctcatttcccccttcaaaatccacataatactcctggctccccccttgaaatcttaccatctttttttggctattctgagggcaaacataagtgcctctgcagcgggatatagctagtatagcgccaatgagtttggaggttttctaatggcataaaacgttggatggcagtagcagactaacagggaaatggaggcacaggcaatttccattcctgttctgtcagattcttttcccccttaattgatgttgagaaccaagatttttttgctctgtattttctcttcgtaataaagaaggggacataatctaattgctcttgtttgatctcatatatgtatgtgactgcactctcactgtcccaaaattttatagatgcatttacaaagttacaatactcattacatgcaaataactgaaggatggcgaatgtatttgtctggtatctacctgctctcctaactagcgtgccatctctcctagatggtaaccattggatcaggttatacttcttattgaccattgttctcatactatgctgtccaagctgccgttgccgtcgtcgatgcctttggtgtccgaaagctgcttccggcggctgccacccctgatcggcagaaacggcgcgccgtcgccgtcgtactccgccaccttcccgtccacggtgttctggagcgcctgctcgcacctcaccagaatctgcagaacgtccctcattgtcggcctcgtcgccggctgcgcgccggtgcagatgatgccgagcttgaacacgacctcggcgtcgtcgccgtacccggagtcggtgatgcacctgtccaccgcgtcggcgatgctcctgcccgattgcaggtgccgccacgcccactccgccagcgagccgtgctcgccgccgtcgtgggcttccctgccggtgatcagctcgaggagcaccaccccgaagctgtacacgtcgaccttctcgttcaccttcctcgtgtacgcgcactcgggagccatgtagccgaacgatccggcgacggcggtcatggtgtccggcgtcccggcctggaccagcatccgggcgagcccgaagtcggcgaccttggccatgagctcagcgtcgagcaggatgttgctggacttgatgtcccggtgcacgatcggcggcgagcactcgtggtgcatgtagcagaggcccctcgccgcgccgacggccaccctgaccctcgccagccagtccagcggcgctcgccggaccgacggcgccctcgccgtcgcgccaccggccagcaatttgttcccgtggagccacttgtcgaggctgccgttctccatgtactcgtacacgaggagcttcgtctccgcgcgggagaggcagcagaggagcttcacgatgttggtgtggcggacatggccgaggatgtccacctccgaatcgaactcgcgctccaggttcttgtccagcttgccgccggtccatatgcgcttcacggcgacggtgccgccggcgccgccgctgctccggctggcgtacgcgacgcggtacacgcgccccgcgccgcccttgccgatgaggttctcgtcggcgagcccgcgcacaagggaggcctcgctgaagtcgaggggctggaatggggtcatcttccatgccggctctgtccgcgcgagccgcttccgcctcttgatgtcgcggacgacgaagaaggcgagcgccccgatcaagacgacgagggccgcgccggcggcgaggagacccgaccggagacccggcgatacgccgtcggatgccttcgcggcgcacgagcgcaggcccgcgaagttacccgccggcgccgccgatacgcagagaccggggttgccgaggaagctctggtcgtaggcggagatggcgagcgcggccgggatctcgccggtgagctgatttgacgacaggttaagctggttaatcttcagcgatcccagcgacgtcggaataccgccggagagcttgttcgacgaaaggtcgagcagggtgagcaccggcatggagcccaatcccgccggaatatcgccggtgaactggttcctgctgaagttcatctgcgacaagccactgagcgacgcgatgctcaccgggatggccccggagagctgattccttgacaggtccagctcctgcagcaatggcatcccggcggcgaacccgtcaggtatctcgccggagaacaagttgttctcggcgttgaacttctggagcttggtggccgtcgccggaagccggccactgaaacggttgttgtggatgtaaagcctcgtcagattccaatacagcttctccggcaggcttccggtgaggtgtccattgttctgcaggagcacggtgatcagcctcgtctccgtccacagcgccgccggcacctcgccggaaagctcgttgtcctggagctggagactcagcagcgccgggcaagtggcaagactcgccggaattgagccgttcaaccggttgccggcggcggagatgatccacaaccggcggttgtcgcagaccccctccggtattggcccggtgaggtcgttgttgtcgacctcgatgtctctcagaaatggcgagtgcttcccgagctccgccggaatctgaccggtgagattgttctcgaacagcttcattatcaccagcgatggaagctgagcaaggctcgccggtatctcgccggagaagttgttcgtcatcaaggctaagttagttaggttcatcaaacttccaaagctctctgggatcgttccagtcagctggttctcagatatgtcgagataaattaagctcgctgctccaatcttgccattgacgacgacgtcgccggtgagctggttggtgtacaggaacaagtactgcagctttggaatgttccaaatcccaggaggtatgcttccggtgaatgaattctgggacaggtcgagatactccatctccatcatctctgtgacgtagctggggaaatcgccggtgaggttgcactgcgccagccagaccgtcttcaggctcgtcaagttcttgaacgatcccggcagctcgccgggggtgaactgattcacctcgagcttgagcgtctcgaggctagtgagctcgccgagcgccgccgggatcgtgccggtgagctggttgcagttgagggtaaacaccttcaggttcttgagcttcgacaccgccgccggtatcacgccggtgaagttgttgttgttcaaggcgaggtaggtcaggttcttgccgagccggtcaatgtcggcggggagctcgccgccgatactgttcatcgagaggtcgatggaggtgatcgcggtgaggttgtagaggaacgccgggaacacgccgccgacgctggtgttctggaggttgagcaccgtgagcgccgtcagcccgccgatggcgtcggggacggcgccggcgaccgcgacgttggggagggacagcgacgtgacgcggccggtgccgccgccgtcgcaggacacgtacacccagcggcagtgcggcgccgcgtccgtccacgacgcgagcgccgcggggtccccccacgcgcgcttgacctggagcaggagctgcttctcgtcgacgccgccctgctgcgccgcgccgcgccgcgcgacgaggcttggcaggatcgcgagcaggaggaggtggaggtagtaggctttgccgctcgggaatgccatgtcttcgcgtggtttcttggtcgccgccggcgagcgcgtgcgttcactcggtgaggcaagaca

SEQ ID NO: 9005 - DNA, 441 bp, Oryza sativa
  Clone ID: PAT_MRT4530_15462C.1
atggcgcaccaggcgcacaacccggccgtgcgccatagcgtcacccccttctccaacctcacccgggaggagttcgaggcacgcttaatgggcatcgccgccaaaggcgatgacgatttaagcaccaccggcaaccacctcaacctcagcgagcagcagctcgtcgactgcgaccacacgggagcaatgcccgactcccgtgatgccactaacgaggaacaggcaaagggcgaggcgaaggctagagaaggagatagaggtggaggaggacgacacgcagagggcctgcaagactctctagaaagaccacgggcgccaccctctgcttcagccatgctttatcccgccgtcaaaccattgccaccactgtcgttgggatgccctatcctagcgcgcctatctggctacctcgccgctggcagcgaccacgtcctcgtctaa

SEQ ID NO: 9006 - DNA, 477 bp, Oryza sativa
  Clone ID: PAT_MRT4530_15463C.1
gggcccgggaacaacccaaaccccgggcaaaaaaaaaacaaaaaaaaaccctttgggaaggaagggccccccccaacggaaaaaaaaaaccttgaaaaaaagaacggcccaaggaaaaagaaaaaaaaaaaacggccggggcggggactttcaaaaagggttaaaatttaaaaaggggcattcgcccaaaaaaagccccggggttggggggaccggaggaacccttggccaacggggggggggaaccccacccgggggaatgggggaaaaaagccccaatttttgcccccggccaagaaattcctgaaaaaagaaagggggccctgaagcccaaaaggggacaacccaatgggcttaaggataaaaaggtccagccaccgggggaagggaaaaccccaaaaaaagaacaggccaacaaaaaaaaagggccttggggggggagggaacccccccccgaaaagctggaaggggggaaag

SEQ ID NO: 9007 - DNA, 2547 bp, Oryza sativa
  Clone ID: PAT_MRT4530_15464C.1
atggccgacgccgacgtctcttcctccaagacgacgacggcgagggattacagcacggcgatcctggagtgcgccaagaagaagtccccgaaccggctgatggcggacgacgccgagggcggggtggccgtcgacaactccacggtgacgctcagcgaggcgaccatggaggagctcggcatcttccgcggcgacctggtgaccctccgcgggaggcggcgccgcgaggccgtctgctacgcgcagaaggacgagtcgtgccccgacggccgcctccgcctcagccgcggcgtccgcagcaacctccacgtccgcctcggcgacctcgtcaccgtcaagccgtgccccaccattaggaacgccaagagggtgcagctccgccccttcgacgactctgtcgagggcatctccggtgatctgttcgagccctacctcaaaccgtacttcatggatgcgttgcggccggtgaagaagggcgaccggttcctggtgcgcggccacatgcacgccgtggagttcaaggtgatggacacggagccgaacaacgagcccgtgatcgtggcgggcgacacggagatcttctgcgacgagggcgacccggtgaagcgcgaggacgaggagcggctcgacgggccgggctacgacgacgtcggcggcgtccgcaagcagctggcgcagatcagggagctcgtcgagctgcccctgcgccaccccaagctgttccagacgctcggcgtgcgcccgcccaagggcatcctcctctacgggccccccggcaccggcaagacgctgcttgcgcgcgccatcgccgccgagtccggcgcccacttcgtcgtcgtcaacgggccggagatcatgtccgggatgcccggcgagagcgaggccaacctgcgcgccgtgttcgccgaggcggacgccgcggcgccgtccatcgtgttcatggacgagatcgactccatcgcgcccagccgcgagaaggcgcacggcgaggtggagcgccgcgtcgtgtcgcagctgctcacgctcatggacggcctccgcccgcgggcccaggtgatcgtcatcggcgccaccaaccgccccaacagcctcgacccggcgctccgccgcttcggccgcttcgaccgcgagctcgacatcggcgtccccgacgagctcggccgcctcgagatcctccgcatccacaccaagaacatgccgctctccgacgacgtcgacctcgagcgcgtcggcaaggacacccacgggttcgtcggctccgacctcgcctcgctctgctccgaggccgccatgcagtgcatccgggagaagctggacatcatcgacatcgagaacgacaccatcgacgtggagatcctcaactcgctgaccgtcaccatggaccacctcaagttcgccatggaggtcaccaagccctccgccctgcgcgagaccgggatcgtcgaggtgcccaaggtgtcgtgggacgacatcggcggcctgggcgaggtcaagcgcgagctccaggagacggtgcagtacccggtggagcacccggagatgttcgacctgtttggcatgtcgccgtcgcgcggcgtgctcttctacggcccgccggggtgcggcaagacgatgatggccaaggccatcgccaaggagtgcaaggccaacttcatcagcatcaaggggcccgagctgctcaccatgtggttcggcgagagcgagggcaacgtccgcaacctgttcgacaaggcgcggcagtcggcgccgtgcatcctcttcttcgacgagctcgactccatcgccgtcaagcgcggcaacagcgtcggcgacgccggcggcacgccggaccgcgtgctcaaccagctgctcaccgagatggacggcatcaacgccaagaagacggtgttcgtcatcggcgccaccaaccggccggacatcatcgacccggcgatgctccggccgggccgcctcgaccagctcatctacatcccgctcccggacgcctcgtcgcggctggagatcttcagggcgaacctccgcaaggcgcccatgtcccgccacgtcgacctgccggccatggccgcctccaccgacgggttcagcggcgccgacatcaaggagatctgccagcgcgcgtgcaagctcgcggtgcgcgaggtggtccagaagagcaccctggtcgggaaggccctggcaatggcgggcgcggagctcaccgtggaccacttcaagagcgccatgaagcacgcaaggaagagcgtcagcgagctcgacgtcatcaagtacgagtacttcaagcacaagttcagcggcggcatccccgacgaggaggaggcgccggcgacggagccggagctgccggtgggacagctgaggttggtggcgaagccgaagacgaagacgaaggcggagctagaagcagaggcggaggctgcggcaaaagcgaaggcggaggcagaggcgaaggcgaaagcaaagctgaaggggaaggcggtggccgtggatgacgacgacgacgactctacgtactccatggattcgatggacgaggacttgctgtattag

SEQ ID NO: 9008 - DNA, 711 bp, Oryza sativa
  Clone ID: PAT_MRT4530_15465C.1
atgggatggccgggggcgcatgcggtgcggctctccctgtcgcgatttctccggggcgcgcacgaccggggggagtccgggacggccgccgacgtgggcgggccgctggctttgctggcaggaacagtttcagccagctgcccgtttggcttgagtacatcgaacatttgctcgtttggtctggaccaatgtgcacgccgcattcttgcccccttcccattgagagtgccaggcagccaccagcagggctccacagcgccggccacccagcacaggcctctgcccgtggttggaggagacggaacgagggcgggagagcgcaacagcgggtgcgacgaggaaggaacaagggcaggagggtgtgacagtggcaagggaggcctccgcctccccaccaagcgagtgcacctctaccgccgaccaaggtcgctcgctccttccgtcgctagccatcacagcttcacctccccacctcgtgagcccaccgccgtcatagttggtgctgttgttgccgctctcgtcttctcttgctacgtgccgcctccattggctatccatccctctcgctgcctaccaccaccatcggcttctccccctcttcttagcattgttgccgctgaaggatggaatattgaaggcattgtagttggaaatatggtgaaaagactgcatataggtctcactgtcatagactcagaatggagagcgtag

SEQ ID NO: 9009 - DNA, 1485 bp, Oryza sativa
  Clone ID: PAT_MRT4530_15466C.1
atgcctggagcagctgctgccgctgttgttgacagccgcccgtgcacacagcacgcggaaggccctgctgcggtcctcgccatcggcactgcaaaccccgcaaatatcgtctatcaagatgggtttgccgactactacttcggtctaaccgagagcgagcatcttactgagctgaaggacaaaatgaagaggatatgtcacaggtcaggaatagagaaacgctacatccaccttgatgaaaagctcatccgtgagcacccggagatcatcgacaaacacatgccctcccttgaaactcgtgtagacatcgtcaccactgagatcccaaagctcgctgagtccgccgcacggaaggccatcgccgagtggggccgtcctgccattgatattacccacctcatcttcagcacctactccgggtgcagtgctcctagcgctgacctcaagctggcatcactactcgggctcaacccttctgtctctcgcaccatcctcagcctccacggttgctctggaggcggtagggccctccaacttgccaaggagcttgccgagaacaaccgcgatgcacgcgttctcatagcctgcgccgagctgacgctgatatgcttctcaaaccagatgaaagcaaaatcgtcggccatggactatttggggatggtgccggagcaatcattgtcggcgctgacccattggtcgatggagaacgcccgctgtttgagatggtccttgcctcgcaaacaacgataccaggtgccgacgctaatcaaggacaacatccgacaatgcttgctcaacacattccgatcggttggaaacatggatcctaattggaatgacctcttctgggcggtgcaccctggtggccgtgcaatccttgacaacatagaaggtgagcttcagctgcaaccagcaaagcttgcggcaagccgccatgtgcttagcgagtacgggaatatgagtggcacgacgatcgcgtttgttcttgatgagttgcgttgtcgtcgggagaaggaaggagatgagcatcaacaacctgagtggggagtaatgctagcctttggaccaggtatcacaatagaggcaatgctccacctgtcggagaagtggaaacaagggttccctttccccctaggtgctcatggcgctgtgggccccaccaagcactacaagatctacaccttcaagggcccgaggacgctccgttcaatcaatgaagaggttcaccccattaaggacagctgctcggagggcaccaccgtgctgcgggagctcatccagaactccgacgacgcgggagtgttccacgtccgcctctgcctcgaccgccgcatgcatggcgcaggctacgctgccgctggccgccctccgcaatggcagggcccccgcgcggccacgccgccacgcccgccgccacccccggctccggtgccgggcgccgcgcaccgccaccgccaccggctgcccgcccgctgccgatgttag

SEQ ID NO: 9010 - DNA, 207 bp, Oryza sativa
  Clone ID: PAT_MRT4530_15467C.1
ctacgcgtggggcctggcccctcaggtgaaggtcagtctgcttggaagaacaaagaatatcaaccaaaggttttaacattggatgttgaagctgctttgccttcatcaaaacgtcttcatcgtgccttagaagctatgtccgctaatgttgctgaaactaataatctgcctgaagtgacagggtcaaagcaattgattccaaatggt

SEQ ID NO: 9011 - DNA, 939 bp, Oryza sativa
  Clone ID: PAT_MRT4530_15468C.1
atgcctggaacagctactgccgctgttgttgacagccgcctgtgcacacagcacgcagaaggccctgctgcggtcctcgccatcggcactgcaaaccccgcaaatatcgtctatcaagatgggtttgccgattactacttcggtctaaccaagagcgagtatcttactgagctgaaggataaaatgaagagaatatacatcgtcaccactgagatcccgaagcttgccgagtccgccgcacgtaaggccatcgccaagtggggccgtccagccactgacattacccacctcatcttcagcacctattccgggtgcaatgctccaagcgctgacctcaagctggcatcactactcggcctcaacccttcagtctcttgcaccatcctcagcctccacggttgctctggaggcggtagggcactccaacttgccaaggagctcgccgagaacaaccgtgaggcacgcgttcctgtagcctgcgccgagctgacgctaatatgcttctcaaacccagatgaaagaaaaatcgtcggtcatggactgtttggggatggtgccggagcaatcattgtcggcactggcccattggtcaatgcagagcgtccactattcgagatgatcgttgcctcgcaaacaacgataccaggttatgagcaagcacttggcatgcagaccaccgtgcaccctggtggccgtgcgatccttgacaacatagaaggcgagcttcagctgcagccagcaaagcttgcggcaagccgccatgtgttgagtgagtatgggaatatgagtggcacgacgatagcgttcgttcttgatgacttgcgtcgccgtcgggagaaggaaggagatgagcatcaacaacctgagtggggagtaatgctagcctttggaccgggaatcacaatagaggcaatggtgctacgtaacccactctcatga

SEQ ID NO: 9012 - DNA, 1179 bp, Oryza sativa
  Clone ID: PAT_MRT4530_15469C.1
atgcctggagcagctactgccgcagttgttgacagccgccagtgcaaacagcacgcggaaggccctgctgcggtcctcgccatcggcactgcaaaccccacaaatatcgtctatcaagatgggtttgccgactactacttcggtctaaccaagagcgagcatcttaccgagctgaaggacaaaatgaagagaatatgtcatagatcaggaatagagaaacgctacatccaccttgatgaaaagctcatccgtgagcacccggagatcatcgacaaacacatgccttcccttgaaaatcgcgtagacatcgttaccactgagatcccgaagctcgcggagtctgctgcacgaaaggccatcgccgagtggggccgtccggccactgacattacccacctcattttcagcacctactctgggtgcagtgctcctagtgctgacctcaagctagcatcactacttggcctcaacccttctgtctctcgcaccatccttagcctccacggttgctctggaggtggtagggccctccaacttgccaaggagcttgccgagaacaatcgcgatgcacgcgttctcatagcctgcgccgagttgacgctgatatgcttctcaaacccagatgaaagcaaaatcgtcggccatggactatttggggatggtgccggagcaatcattgtcggcgctgacccattggtcgatggagagcgcccgctgtttgagatggtccttgcctcgcaaacaacgataccaggtactgagcatgcacttggcatgcagaccacctgcagcggcatagatttccacctctctatccaggtgccaatgctgatcaaggacaacatccggcagtgcttgctcgacacattccgatcggttggaaacatgaatcctaattggaatgacctcttttgggcggtgcaccctggtggccgtgcgatccttgacaacatagaaggcgagcttcagctgcagccaacaaagcttgcagcaagccgccatgtgctgagcgagtacgggaatatgagtggcacgacgattgcgttcgttctggatgacttgcgtcgccgtcaggagaaggagggagatgagcatgaacaacctgagtggggagtaatgctagcctttggaccgggtatcacaatagaggcaatggtgctgcgtaacccgctctcttga

SEQ ID NO: 9013 - DNA, 449 bp, Oryza sativa
  Clone ID: PAT_MRT4530_1546C.1
ttcctcgagacccttcctctttcctcccgaacctttcccctcccttattcttctgcacccctcccatcctcccttcacatgctaggtactcgctccgcgcctttgataggcgcctgaatttgtgttgggagtgtgctaatgacaacaaaaaaaggctcctacctgctgatcaccaccaccggaatttgcatcgtgccattagatggtacacagaatcgctttggaatgaccattactggggcgccatgattggcctcgctactgatatacgactgcttctctcgatgttggatctgcgcacactcactctgcacttgaagtgacatgcactgactctgctgcatagaaccgacctttctgctcgatttgcctctcctcacctattgcaacctccacaccagacagaattggatgacctcctaccatccacgttgatcgctgcgacatca

SEQ ID NO: 9014 - DNA, 1659 bp, Oryza sativa
  unsure (1)..(1659): unsure at all n locations
  Clone ID: PAT_MRT4530_15470C.1
tttttttttttttttttaatggtctcatgaaaagtcaataaaagttgtgacaaatcgcacngtgtttttttttgggtttcttggggggttgtgtttttgttgttttttttttggttttggaaaccaatatttgactttttataatgttataagccaacgggataactattaataacttctaagaaaatcatgtgtaaagaaaatttaacataattttttatgtacgctagcgagtagccgtgctactgcgcgggactttatttacaaaagcaacctttgaggttaacttgctttggacgggcgtcggcagtcatgagttcactgtgcggttgtacatgcggctggttgaccacgcgcgagctcgtccagccccaccggcgaacacgcgaggatgaagcgtcccaacggctcggcctcgaccgagggcgcgcacggcacccattcccatcgctccacggcgctgcccaccccgtcacgtagctcgtagagcacggctccgattgtcgggtcggccgcattgtacacgtaccctccggcggcgttgccgcacaccccgatcgacggcgacatctcctcttcgtcctcctcatcgccgtcctcgtcacgggggaacagcctctcggacatctcccccggcatcgtgtcgtgcgccgcgccacgggacagcgcgaggccgtcgccgtccacttcccacgcttggatgacgactctgctcttcgcttgctcggctctaccgcagcgcttcgctccgaacaggacgagccgctcggcgccgccgcggccgggggcgaggccccatgtggagacggtggcgtcagggcggaggcggcaggtgggtccccactgctgcttcgccggatcgaaccagcttgcccacccggtggatctgtctgtgaggtacactcgctgatccgtcgcggccaccgagagccacgtcgccgccgcggactcccgcagctcggctggcatcggaccgcaggccgtccagctgccgctttcgtgtacctccaccaccgaggcgtcctcgccctcgcccagcgccaactggcacgcgccgccgagggcgacgacgcggtcacccaccgcggcgaacaccgggtcgacgcgccacacgccgggggccttcagcgcgacgcacacgtccttcccgagggggtccccggacacggcgagcccggagagggagagcgcgcagacgcggtccccgcccgcgccccgcaccaggcggacgtgcgacggcgtgtcgtggcgcgctgctggcacggtgacccacgcgcccgagtgcgggtcgtacgccgcggtgcggcgccgccggccatggaggtggaccacgagccagggcagccgccggggccgccgccgcagcgcggcgcgcaccgcgcggagccactcccgcgacacccgcgccgatgcggcgagatcggccgccggcacgcgctccaccaccgactcgagcacgtcgccgtacaggtccatctccccgagcgacgccacgccgtctcccgcgacctcactccccacctcctcgtgccgctgccgcccatgcttcaactcgtgaccccgaactcccactcccgcacacatctccaacgccaccatagctcacttcaacacgactcacccgcaaccgagaaaccacctctcgttgtctcctcgtgc

SEQ ID NO: 9015 - DNA, 519 bp, Oryza sativa
  unsure (1)..(519): unsure at all n locations
  Clone ID: PAT_MRT4530_15471C.1
taagaaggtggttcaatccgaaattgacgaggcacatcctcccctggaacacccagctgacttgctgtccctctggccgtccacgatttagccaaaggaatgtcgcagatgcagcagcgcaacatcaaggnaacctttctcttggagtgaatgccatggattggacactgtnccttgtctgcagtgggatacacaatttgttggcgtgaccaatcaagcaagggcacagagaaaaatcttgagaaacccccccagaaatagttcagcttgataaaatgatgtaaagagtttgctttgtgttacaggaaattgtatatatgcatacgtgagacacctcgtgtngcatccgattggcacacaacgcatatccggatatagaatattcagctgcttttgcagatgaatttggtgcttgccatcttgtaacatggtcacaagatcacacttgaaaataagaatataagaatggctggctgtgacgtttttcttttcttgccccaaaaaaaaaaaaaaaaaaaa

SEQ ID NO: 9016 - DNA, 2296 bp, Oryza sativa
  Clone ID: PAT_MRT4530_15472C.1
atgatgcaaagaggggcccactagcccccctcgatcccaccggcgacctcccgccgcctccgccggggacaagcccccctgcgcgccgcgctgcaatggcgttctccttcgcctcaccggcgccgcagaatccgttccagacgccggcgcaggccccgtccctgtctccttcgccgtttcagttcaacctgcagcagccgcagcagcagcagcagcagccgccgccacagcaacaggcggcgccggccgcgcaaccgcagcagcagcagcagcagcagctgatgctatatacgacggacgggaagcccgcggggtacaacacgaagtgggaggagcttcacgccgagtcgcagaaggcgctgctccagatcgaggataaattaagggagtacagggacgagagcgagaggttggatcagtgttctcgccttcatgactcttcaatctcaactgtcaattttgagaatgatgcaagtgaaattgctcaggaacttggagggacaaccaccatgatggaaagagagaaggcttccgttcaagagttaatgactgtttcgaaagaaatgatgcgaaaaacaaaatttgctattaggtcatatatgatgctaagtctcttttcaactccaacaactccaactctatccagcaacctttttggtacatctggatcagcccagctgtccacaccatttgggacagtctctactccaacgcttggatcaacgccggctccatctggatttgggaatacaactccatcttttgcttcaacgcccgctttaggtggaacctcactgttttctacgccgttcggagaaagtgcggtcaaaacctcggggccgacgctagctcctcttccccgcctcctccgttgaccgccaccgttgacctccccgccggcgaggtctccctcgccggaaacccccccgcctcccaccttgtcttcgcggcggcgttctcccgtcatctgatcggccggcgcctttggtctccgcctgcttccgggggctactcgattcgtctcctctcgatcccgctacggctcctctgcttgctcgccatggcgatccgaatcacggtgtcctactccggctacgtggcgcagagcctcgccgcgtcgctcggcctgcgctgctcctccgcctccacggcggcgggctgccgcttcttccaggacggcgggtggcgccccttctgcatgctcacctcctcctcccgcggccacgccgagcaccaccggaacggcggcggcggcggcgaacaccgccgtgaagccggggagggcgaccgcccgaaggccctgccgctctccgccgccgccgggggccactcgctgttcctctcgccggcgtacgcttcgtccagggcgcagccgccttcgctggccgtgggtttgctgtcggtgctcgcgcagggggcgacggggtcgaagggtgggatctacggcgccgcgtctctgtcgggctcgtcgtcgtcgatctctctcgggttcaaccctgcctccttcctccctttcctgcagacctcgaagtggctcccctgcagcgaccttgccacctcctcgtctgcgccgccgtcttctccttctccttctcctcctcctcccgcaccggcgccttcgattcgtcccaagaaggcgttggtgagtagtgcttccagctccccggcgattgcgaggagcagtggtggtagtggtgccgcgatgagcaggagcaactggttgtcgaggtggatgagctcctgctccgacgacaccaagacggccttcgcagcggtgactgtgcctctgctctacagctcgtcgctggccgagccgaggtccatcccgtccaagtccatgtacccgaccttcgatgttggtgaccggattctcgccgagaaggtctcgtacatattccgggagccggaaatcttggacattgtgatcttccgtgcaccaccagctcttcaggattggggctacagctcgggtgatgttttcatcaagagagttgtggccaaggcaggcgactatgtcgaagttcgtgatggcaagttgattgtcaacggagtagtccaggatgaggaatttgtgttggagcctcacaattacgagatggaacccatgcttgttccagaaggttatgtgtttgtgctgggagacaaccgtaacaacagcttcgattcccataactgggggcctcttcctgtgaggaacattattggaagatctgtgtttcggtactggcctccatcaagaataacagatacaatatacgagcctcgcgctgaatattctgtggctgggttgtcgtga

SEQ ID NO: 9017 - DNA, 663 bp, Oryza sativa
  Clone ID: PAT_MRT4530_15473C.1
atggccccgacccccgtcggccggaccggcatgggcccgacccctgtcaggctgtgccgtgcttgggtcgggccaaaacgtcgtgccgtgggccaggccgtcgggtctcggcccttatggccatctatagtcatggaccacgatcaaatcaactggcacgctcatacatttgaaggcgagctttggacctgcactggagttaagcagatctcccaggcctcgtgttttctgtcaacagcgatgtgtcgcgtcggccagccgcgccacgcccgcgccttcaccccgctgttgtggtgtcgttccctcaccaccgccgcactatgcttcggccgccgtcgtcaatccttcgccatcagtccccagtccactagcagcggaagcctggatgtcgagggcatggcgctggctgactacttcttcggccccgagttggacgacttgatgcagtggctgggcgacggcgacgtcggccggaagggcacgctgccaactaagaaggaggccagggagacgatgccgacggtggaggtgaccgccggccactccgcatccgccttcgcaactgcctcaaccgtctgtcgtgaggactacgccgttggcgagcacgccacggggacgccctacaggcacaggttccacgcaagtgcattgtgccatggctga

SEQ ID NO: 9018 - DNA, 422 bp, Oryza sativa
  Clone ID: PAT_MRT4530_15474C.1
ggccgcgggttttttttttttttttttcttttttttttttttttttttttttttttcttgtttttttttttttagtgttttcactttattttgttgtagcttcttattttcttttgttcttattttctccgtttgaaaaaaaacaaggacaagctgacagtttcctttagagacagtccaccccagcacacgttttttttttggaggggaaaaacaatcccccgcgtaattccctagaacagcgaagtttctccttagaaggctcagatcaccggggggcccgccccacaaaaaaaaaaaaaaaagggtcccgcgcaaccacacgcccccccctttttgagggggcgcccccctctaatgaggcgcccccgcccgttaaaaaaaaggtgcccaaaaagggcacggggcccccccacccgggg

SEQ ID NO: 9019 - DNA, 345 bp, Oryza sativa
  Clone ID: PAT_MRT4530_15475C.1
atgaccatcgtggaggtcggagaagtcggcctcgtcatcgacgtgatcagcgtcggtgccaaggccaaggagcagcacaacgcggtggccatcctcttctacctctcatcgaataactcggacgcatcctggaggcgatcaagacgctggtccagctcatctgggacggcgcacacccacagccagaagaacgccatggtcatcctgtacgggctgctccagagcgcggccaaccagagcacggccatcgccgcgggcgccgtgttagccctcacgaccttgctctccaacgaccgcgtcgacctcgcccaggacagcatcgtgctgctggcgaggaaagcctag

SEQ ID NO: 9020 - DNA, 224 bp, Oryza sativa
  Clone ID: PAT_MRT4530_15476C.1
agagagcgccagactctccccaggattcaggcatgaagggggccaaatacaagggcgccgccaagcccgacgtcaagtttggctgtgaagagtaagggctcggagaatcccgccgtcaatggcaggaaggggaaggccttcaaggacccctaacaagcccaaagagggcttccttcgttttttttcttttttattggaggagttcccttagggagtttaagggg

SEQ ID NO: 9021 - DNA, 867 bp, Oryza sativa
  Clone ID: PAT_MRT4530_15477C.1
atgaggtgccattggtgggtgcgaagaaagcaccccggccattgaagaatgggaagatgttctctgagccagtgtgcaagggagaggagaaatctcttggagctcatggctcggattgatggtgtcgccggccaaagatttggcataactcgggcaagaacagtgcgtgccgctagtgaatctatcgaaaaagatgcggcggtgttgctcctgaggagaaatcaaactgtgaaagtacttggatcggaggccctttctaaagctgctatcgttctcattgcttcgatgtcatgatgagatttctagttctagagataagatcctggaaatcacttaccagcaacctggccatccatttcggaaatcggtactgtgctggtaatgtcatcaaggcttaagtcctaaggtcttccggtgataaccaatgcaacacaaaccgtggttaatcctctgtaagattgactggatcaggaaggctggaaggctggaagtctgagcagcaaggcacggttgatcaacaatacctattgttgagcatttgagatttgttaatgaaattcattctccatgtaagcaaccggtaatcgagcagcaaggcacggttgatcaacaatacctattgttgagcatttgagatttgttaatgaaattcattctccatgtaagcaaccggtaatcattttgctgcttcagttcaagtttggagctttaaaatgatcactagttggaagtagattgttgtagcttttgcccaacttctttgattcatttttttccctatctgcatagaagaatcaccaactgttctgttgattgtatgtagataggaagcagaagtgcaatgttaaggaaaaaaagtattttatc

SEQ ID NO: 9022 - DNA, 623 bp, Oryza sativa
  unsure (1)..(623): unsure at all n locations
  Clone ID: PAT_MRT4530_15478C.1
ccgggtcgacctagcgtccgcccacgcttcncgaaaaaaaaaaaaccaaaaaaaaaaaaaaaaaaaaaaaaaaaaaaaaaaaaaaaaaaaaaaaaaaaaaaaaaaaaaaaaaaaaaaaaaaaaaatttaaaaaaaaaaaaaaaaaaaaaaaaaaagggggggggccgttttgggggtcccagttttccttccgggggttggggggggtttgttttttttttggggcccctaaatttaatttcgggggcggggtttttccacggtgggggggggaaaaccctggggttccccaattttattggtttgggggaaattccctttttggcggggggggtttttggggagggggccggcccggtggccttttccaaaagttggccccccttgatgggaaaggggccccccccttgtgggggccttttaacccggggggtgggggggtttcccccaagggggccctttcctttggcggggcccttggccccggttttttgggttttttcccttttttttttggcccgtttgggggtttttcccggaaaggttttaatgggggggttcctttgggggtcccattttggggtttaggggcccttggccccaaaaaatttggttgggggggg

SEQ ID NO: 9023 - DNA, 204 bp, Oryza sativa
  Clone ID: PAT_MRT4530_15479C.1
ttgtttttttaagttaagggggtttttttttttaattttttctcatattctttgaaacagaacaagttgtcggcacaacgatccataacgcaaggcaacaaaaggaaggaacatacgcgggcgtaaacatacgctacgtgcagagagcacggactctgagtgcaactgactctccaagaacacgaacagagaagctgctgactg

SEQ ID NO: 9024 - DNA, 421 bp, Oryza sativa
  Clone ID: PAT_MRT4530_1547C.1
aagggtaaaactggcaggacatttttattcaaattgggatcaccccgaggtttaaacggggcacacaacgagaggcaggactttatttttttttccgggactactatacgggtacaattaaaaaccagataccaccgacggggggaatgctacagggggcagggttgaagctgggggagaaaccgaatattgacgggatgtttagggccaaaaaagttgggggttgggcttgactttgatcgaagtaaaagttagaaaactgggggagcggtagttggtgaaaaaaaggttgaaaattgttaatgggttggaagggagaatgttgtgagaaaatattgaggggtgggaagaattgttggtgaaagattggggaggtttttagaggaaaaaaggggtgattggaaagaagggggatgggggg

SEQ ID NO: 9025 - DNA, 792 bp, Oryza sativa
  Clone ID: PAT_MRT4530_15480C.1
atgtgggacccacctgtccgtggttcatggctctggtctcttggtccactggtgccactgctgcttgtgccgccgccgccacgtgccggtagggctccccgcggttgctctcgccggagcgccgcccgccgccgcggggagagactgagaagggttatggcatgtgaaagattttcttccacctctttgaagaatttaacctttatctcacatagccctgacaatggtgattctgttcacgatgattataaagatcttgtgatagataccccgagccttgtttcactccacctggagtgccttccctttttagctccttgccttgtgaatgtatcatccgtggcaaaagcctacattcgccttgatgatatgtccttcccatgttttgatacgaaatacaacatcctcagtggtttgtcaaatgtaacaaaattgaagttgctaaatgaagaatacgatgatgaggatgaggatgaggatgattcttttcgttcaaggcaaaacgaggtactaaaaagggatctccggaggtgccaatcattcaataacctaaaaaaactgtctgtcgatgattgttcttgtcaccagattgaaggtttggcttgggaacagtggatgagttacccacaagaagagacgccagacctgtcgttcagttgtgagcgtcttaagaaggtcaaaatcatctgtgtgcaggacgacaaaagggtgcctgctatagttaatgctatacttgccaatgcgaactctctgccagaaattgttatcaaaccgtacaagcgtttcgactag

SEQ ID NO: 9026 - DNA, 782 bp, Oryza sativa
  unsure (1)..(782): unsure at all n locations
  Clone ID: PAT_MRT4530_15481C.1
ccggccggactacacgggaggccatacagacatgcgtgctgtccactaggtggcgtcacatttggaaatctgtacagtgcctcgagatcaaagcatctgaattcaccagcaagatgggatttgtgaattttatggacaacttggtactgcgccgtggttgcgtgcctctagatagccttcgcatgtatacgctatatcaacatggatgaggatgaggatgaggatgattcttttcgttcaaggcaaaacgaggtactaaaaagggatctccggaggtgccaatcattcaataacctaaaaaaactgtctgtcgatgattggtatgtggatgttgacctaagcgcgctgatttacttgcttcgttgctcaccaatcatagagaaactcactctgcatcttggaatgattgaaggtttggcttgggaacagtggatgagttacccacaagaagagacgccagacctgtcgttcagttgtgagcgtcttaagaaggtcaaaatcatctgtgtgcaggacgacaaaagggtgcctgctatagttaatgctatacttgccaatgcgaactctctgccagaaattgttatcaaaccgtacaagcgtttcgactaggtaggttcggcacttgggctcgggcagatgtacgagcatggtcctctgatcagtgattagatcctcatgatcggcaacccatgttcagtttgtagtttatatgttaacaaacattttgntgatgagagttgctgtgggtcatactgctctgcccagtaccaatcttcctggaa

SEQ ID NO: 9027 - DNA, 198 bp, Oryza sativa
  Clone ID: PAT_MRT4530_15482C.1
gcttcaaagccttttgcctctctatcaactttctttattgactgataatgttatatacccaaccttaagcatccatgtacccttatgaacatgacagaaaggatgtaggatgaaaacacattacaccatttatcccattcgtcatcttcaagaacctttggcgaaggggtgaagcaccggtgccgcctttaaccaggc

SEQ ID NO: 9028 - DNA, 1617 bp, Oryza sativa
  Clone ID: PAT_MRT4530_15483C.1
atggatttgatgaagagtaatccgcttcaggggagcccatggagcttgttgaacttgctggtattgatcattgtcgccgccatgatctgcggcgagctatgtcgtcgtcgtcgtcgtcgtcgtggcgacgagaatggtggcgccacgaggctgcctccggggccatggcggctgccgttcgtcggcagcctgcaccacctcgcggtgatgaggccgcgcggggtggtggtgcaccgcgcgctggccgagctggcgcggcggcacgacgcccccgtcatgtacctccgcctcggcgagctccccgtcgtggtggcgtcgtcgccggaggccgcgcgcgaggtcctcaagacgcacgacgcggcgttcgccacccgcgccatgagcgtcacggtgagggagtccatcggcgacaaggtcggcatcctcttctccccctacggcaagaagtggcgccagctccgcggcatctgcaccctcgagctgctcagcgtgaagcgggtgcgctcgttccgccccatccgggaggagcaggtcgcccgcctcgtcgacgccatcgccgccgccgcggcgtcgtccacggcggaggcggcggcggtgaacatcagcaggcagatcaccgggccgatgacggacctggcgctgcgcgcaatcatgggggagtgcttccggtggcgggaggagttcctggagacgctggcggaggcgctcaagaagacgaccgggctcggcgtcgccgacatgttcccgtcgtcgcggctcctccgcgccgtcgggagcacggtgcgcgacgtgaagctgctgaacgccaagctgttcgagctggtggagtgcgccatcgagcagcatcgggagcagattagagcggctcacgacaacggcggcgacgacgacgacgcgcatggccatggcgacaaggagtgcttcctgaatactctgatgagaattcagaaggaaggtgatgatcttgatgacactcaccatggcaaccgtcaaagctgtcattcttgtggaagtgaatcaacatcaacaacacttgaatgggccctgtcagagcttgtgaggaaccctcatgtgatgcaaaaggcacaagcagagatacgacatgctttgcaaggcaggactagggtaactgaagatgatttaattaatttaaagtacccaaagaacataatcaaggaaacactacggttacaccctgtagcacctctacttgtcccaaaagagtgtcaggagtcgtgtaaaatcctcggctatgatgttcctaagggaacaatcatgttcgtaaatgcatgggctatcggcagagaccctagatattggaacgatgcagaagtgtttatgccagagcgttttgagaaagttgcagttgatttcagaggcacaaactttgagttcaaaccatttggagcaggacggaggatgtgcccaggaataacatttgcaaatgcaacaatcgaaatggccctcactgctcttctataccacttcgattggcatctccctccaggtgtaacaccggatgggttggacatggaggaggaattcggcatgagcgtttcaaggaaaagggatctttatctacgaccgacactccatatgggacttgaaacaatatga

SEQ ID NO: 9029 - DNA, 1447 bp, Oryza sativa
  Clone ID: PAT_MRT4530_15484C.1
ccactacctcagttagctcagtagcacagctcacctcggctgtccgaatcgagaggcacggccatggagaagccgacgaagaagggggtggcgccgccgatggcgtggcggacgcgcctctccatcctcgccgcggggtgcctcaccgacgccacgtgccgcgccgacggcaccatcaaccgccgcctcctaaacttcctcgacccgcacgtcccgccctccgccgcgccgcgcaacggcgtcgcgtcgcgcgacgtcgtcgtcgacccggcgatcccgctccgcgcccgcctcttctacccctgcccctccggaggagacggcggcaccggcgacgcgacgaagccgctgcccgtcgtggtgttcttccacggcggcgggttcgcgtacctgtccgcggcgtcgcgcgcctacgacgccgcgtgccgacgcatcgccaggtacgccggcgcggccgtgctgtccgtcgactaccgccgctcgccggagcaccgctacccgacgccctacgacgacggcctcgccgcgctccgcttcctcgacgaccccaacaaccaccccctcgccgccgacgacggcgacgttccaccactcgacgtcacccgctgcttcgtcgccggggacagcgcgggcgccaacatcgcgcaccacgtcgcccgccgctacgccctcgcctccaccaccttcgccaacctccgcctcgccggcctcatcgccatccagccattcttcggcggcgaggagcgcacccccgccgagctccgccttgtcggcgcgcccatcgtctccgtcccgcgcaccgactggctctggcgcgcgttcctcccgcccggcgccgaccgcacccaagaggccgcgcaagccgcctcccccgccggcgccgccggcattgactccccggcgttccctccggccacggtggtgatcggcggctacgacccgctccaggactggcagcgccgctactgcgagacgctccgcgggaaggggaaggcggtgcgcgtgctggactaccccgacgccatccacgccttctacatcttcccggagttcgccgaggcgcgcgacctcatgctccggatcaaggacatcgtcgccggcggcggcggcgagcactgactggtcggcgtcgcagtgcacgacacgagcacgagcagtactgtggttggttggtggtggtgagtgagtgattggggtggggttgcgtgatgggggtggtgagtgatgacgtggactgattaggcgagatgccacgtattgtagctatcactaggcactagtgagcttatccagtagtaagatgacacgtgggacttgtgttggtcgcatatgttatactgcatggtgtaggatgaggtcgtcaataatttgttaggagtaaaaagtagaggccaccaataaaatgggatttatggttttagataaaaaaaaaaaaattttctaattt

SEQ ID NO: 9030 - DNA, 210 bp, Oryza sativa
  Clone ID: PAT_MRT4530_15485C.1
atgccgggcgggaggaaggagacgaccgggcaggtgggacccaccgagccaaagccccttccgccactgtttgtggcgcttggccgggtggttgatggtgtactcgggcagcgactgcggctgattcctgcccggcgaagtacattggcgcttgtgcgacttgaggcggaaagggctgggtcgtcacttgcggatggacttgagggctga

SEQ ID NO: 9031 - DNA, 225 bp, Oryza sativa
  Clone ID: PAT_MRT4530_15486C.1
atgggcgttgccaccccaacatgcagccggatacatggcttcactggcaccaataatgatctcggggatgccctggatgccttaaagtgctggttctacgtttttgctggaagagtgttcgtgtcatcgggaggttgcgctcaatccgccatcctcattgccaaccccaccccgccctgccgccggagtcgcaccggtagcattgctaaggagcacggcgaggcg

SEQ ID NO: 9032 - DNA, 1944 bp, Oryza sativa
  Clone ID: PAT_MRT4530_15487C.1
atggacttcactgccccttccttctccctcggctccgagttcgacgagccagaggaggcggtagggtatacggcgcccgatgccccgtccttctctctcggaatcgatttcgagggcgacggcgacgagtcccacctcaccgatgccggcaatggaggggaggagcagaagcgttatgaggctcccgatgcgccatccttctctgtcggcatcgattccggcagcgacggcggtgaggagcgccgccgggaggagcaacggcgaagttacgaggctcccgacgcgccctccttctccctcggtatcgactccgatggcgacggcggcgacgagccccacctcaccaacggaggccaccgggaggagcagcagcggcgttacgaggcgcccgacgcgccctctttctccctcggcatcgacttcggcgacggcgacgacgaaccccgcctccccaacgcaagccgccaagctccgcgctacgaggcgcccgatgcaccctccttctccctcgggttcgatgacgacgaagacgatgttctcatcggcggcagccgtcacgagctcgggactgtcgaggaggaggacgacgacttcgtcctcgccgacggccaacagcaacagcaacggcggcacgaaactgttgtccccgacccggcgccgccgccgccagagatgaatcgattcaagcggctgcggagaggccccgcgccgccatctcaagcgccaacaccacctcctcataggacaccagcgccggctacgatggaggcttctccggtggtgagctcgaaggccgtcttgggggatattgggagctttgaggatgagatcgaggatttcaccgacgaggagagattcatgcgagacgtaccgccgtctgttggtagctgcatcacttctagcagctcaaggttctctcatgccagcaattcaaagttctcgctgatgaaccatggtgtcctgatgagccaatcaacaagtaaatcaaagaaatttgcacaaacacctaattattctgcttcaaaatctatggaagaaagcagcaccaagaaactgctccctaagacagcattgagcccaatgaggaaaattcatttgcttgattcagatagtgactcggatgataacaaggaaatgcctggtttgcagcaaaactgcaaatccaaagtgagcactgttcaacataagggcaaggctgagatgaatgacagttgggcgacacctgctcttgatgagttctgcaatgagtatttcaaatccgtggaagactcgagaccatctcagcagaaagaaggcaacagtttttgtggccccaaagtcatacgttctaactactctgttagtgaaactggaggacattttccacatcaatccactccaagtggggctgtactagaggacaatcagacagatagtcatcctcctgcaatgcattattttttccaccatgaccagttggttcgtgacctggtccgtcaaagactcaagcattttgttcctgttggagtagacagcagaggaaatgagcaagatggaacacaaaatctccagtacaggagtcagaccggccggtgtgctgctgaaaatgatcggtgggtgactccgaacaagaggatgcctgttgcaactcaagttggcagaagaagagtaaatcctgctggaatgtctggctctggccattggttgactggagacgatgggaagaaggtctatatctccaaagatggccaggagttaactggaagggttgcttaccgacaataccaaagggaaagtggcaagggatttcgccagtcgaagaagaaaagttcggctggaactagagcaaagaaagccactactaaggctttgctactattttacacgtcgtgctcgtggttctctcatagcactaatgcaggaacacaaggccttggggctttgaagctgttcactgctgggtga

SEQ ID NO: 9033 - DNA, 205 bp, Oryza sativa
  Clone ID: PAT_MRT4530_15488C.1
gtttgcagaagccaagaagaacttcaaaaagatcaatcatgtctatccttacatgtatggatccgatgatgatgatgatgattccgaggtagcaacagccgagtgggtcagaagcaagaaggcagctattgagggaggaaaaatcaagtttgatgattccaagaagccgatgaaggtcaatggcaatccttttcctgtcaatatg

SEQ ID NO: 9034 - DNA, 213 bp, Oryza sativa
  Clone ID: PAT_MRT4530_15489C.1
atgcgctttggtaggttccggcggctctggataggagtccaaggcaaggcatccgaagaccccggccctggctatggagccaaagatccaaccacggaagccgcccgcacatggctcccgcaggtgacaggcatgggcagtgttccttgcccgtcatgtggtaataggcatgcccgcgggcgagaattacctcgcgggcactgggatgggtag

SEQ ID NO: 9035 - DNA, 500 bp, Oryza sativa
  unsure (1)..(500): unsure at all n locations
  Clone ID: PAT_MRT4530_1548C.1
tctggggcttgcgccaattcggaacgaagggctgttactgtcatgggttctaaaatttcnttgttactccccttgaagctaagcttgattcgtcccttctcttgcgtttcgagnagaaagttatcacagngcagtggnacacttcccttttggacttcagnatgcattcaagnaaaggttatcactgggccaaggcctccaaaagggatgtggatgcctccagccatttgttgccattgccgaatgcctccggggttgggctgaatccgcctgccaccggtttccgcaactttgcctgccgcctgttacattggttttttccaccccctttgtttttcaaagcctttaattgggtccgaacaagggttttgggcgggcgtttcccggtccgaagttccaaagggaccgcccgaatcaaaatttaagttgtttancccgttgaatgttgggaanaagttgaatcttgttccaaataacaaaccgcctttccttgaaaagcc

SEQ ID NO: 9036 - DNA, 199 bp, Oryza sativa
  unsure (1)..(199): unsure at all n locations
  Clone ID: PAT_MRT4530_15490C.1
cacacgtatacacgattgattgggnaggctgatattagttcgggtgcattattttacacagcaaaaacctcatttccttcatagtcgtcgtaggggacacaacaccaactcgatcataactctcgggggaataaacccatttttcccaacccaaagacaccggacttgttgggcagaatttcatccagccccaatttac

SEQ ID NO: 9037 - DNA, 1356 bp, Oryza sativa
  Clone ID: PAT_MRT4530_15491C.1
gctgcagaaccaggctatgcgcccaaccgcttacatgctttttatttagtgctgaataaaagtacaaccgattttacatgtacaaaatttacaaccccttttctgctggttgacaagcagacggattgtttggtacaagtgctcgacgtacaagctttgaccccaagggtctgacaaaggtagaagcagaatgatggattacaaatgggagcaaacgccaacctgaaactctcatttcggacacatcttgcacgaaaatgctggatctgtcctgctcctgactcctttcttacacgcatgtatacgcacctatgttatgtacatcactttacatgtgtctagtgtctacactaatgcatggcatgtttgcctctcatctcaggacctctccaatgcttgctgggcataagactctgataccttcttaggttttagctcacactcttcttttggccgccgcatcgccatgaattgcagtgacttgctctgaacttggtaaacatagcatccccatgggtaggcatctgacgaagcccatacaatttgctcctcgtatactgcatcttccgcaaatctctcactaacacagaaggcagagtcgagagggggctcctcaaaagcagatacagccacgcatccgagagctacgtatccttcaggtggccgtggaaaccatattgatacaggattcctgtaatcctcaccacagtttctccaaaccaggtcatagccaagtggcagagcgaaatttccacccacatttttgtagacagcagcaacatgtggtggatgaatgccaacatgagcaatatctccgattgagacatacccactagggcagagaggcctccagatactaaacacccttccatcatctgcaacctgctttgaaagtagtttgcatctgcttcgaatttcttgttcactgctccacatgttctggaagttaactgtatcgttaatgagtcgctcctcaacattacttgctgctccccttgggcttagcaaaggcctagcaaaactgtggaactccctcatatcttcatcaaatgcgaaatatacatcgtgctggcccccaggaacgtgagaaggcctttgatacccagcttttgccagctccaatgcaagcacatcttcccaaggaacgtcccaaagtattttcgaaggcttcttatccattttatctagatccacgcactgaagcagtatcactcgtttgtttgttaccaaagcaaccttctgattttgtacgataaaatgatcttcatagtaatctgaccatgcatactttgaaggttcccgaaataaatctgtgcatgcaaaatatctgctagcctctgctaggtaaagggccat

SEQ ID NO: 9038 - DNA, 1714 bp, Oryza sativa
  Clone ID: PAT_MRT4530_15492C.1
aaaagatacataatccagaaaatctaattaaagagaaaccaacaagtttgtgaaaataagacaggatgacatgcaaaatatctaagctcaatacataacagaaggctaatgaacctaaataaatacaatggttcaaaggctaatgaatacagtaccggtttcatgattccatttgcccatctaaacgatacgatgcattccgagaatttgtatagctagtagatcatagtcctttcaaactatagtgtaaggcaaatcctatgaggacaacatagggaaaactgctcattgaagctatagaggattgtacatagtcaagaagcaacatttggtttagtcaaaatctggcaaaccatgccacttgccaacatgcccatagtatcatcaacaagcattgtctaatctccaactcaatgatcttcacaatcgaagaaactccaattttctggcagatggcaacgcgatcatgagactttatcagaccaaaagctttaccatggacaagagcaacctttaaaactactaactcatttgtagcgctgatcgattcagccttcaggacaaagtgaaagaagatcgttacaaactcaccatcaagaaatatccacacaatcacctaacacctaagtgtgcagagtgctatttatcggcttcttgcagctaattcagcaacagaacaggtttacactagaactagctattctccgtagaatgtcgacaagaccatgataaccaacgtgtggacgtaaggcaaacttcgcaatttcagtaagcaaaatgaacggcaagttaccagcttcactttttacaggggaaaacagtatggtgtctaatgcaacgaacctagtaaccgcgtgccagaattgccgcgtcatcaatacatatcaaagctttcaccggatcgcatgtgggggaagctcccgggtcaaatgaagcaagggtgtttgtaggaggtacttggatttgacataacattgtcgtagaaggacatctggcccaaactgcctgacgatcgcgagctactgtcattggatgcatacatcatacgacggatttgctcatgctccgtgtcaaagtggtgcatctccgagatcctttcgctattgtgatctctcatggctatgttctggtgaagcggcctatctgatttgggttttttgtcagttggggactcctcatccgcttcagcttcagattctgcattattatttggtaaagcagcttgcttccgtttcgatcgtgcccgcctgttctggaaccagttatagacatttgtctctgagatctggccatgctgtgagagctctgctgttatgtcctttatcttttgcttgcttggtgttccattgccttggtcaaagatgttctcaagaatctgcaactgcattggggttggtgtccatcgctgccttgctgtgatcttgtgacctccgggaaccattagaggatcacagtacagattaccaagcctcattcctgcaatggagtcctgctgcgcggtgagggcgcggtgcatctcgacgagctgctcgcagatggtggcgtagatggagatctgcttccggagcacctccatctgctcgtccgtcatcaccttcacgtacccgagccctccttcccctccgcccctgtcgtccaccgcctcgccggaggacgccttggccttgtcccactccatgcctctacagggaggcgaaaaggaattgcctcgtgc

SEQ ID NO: 9039 - DNA, 262 bp, Oryza sativa
  Clone ID: PAT_MRT4530_15493C.1
tcttatgatcgtgagcggccgacctactatcggtggtttttggacgattgtttttagcgggctaatgctgatcccgttcgcggaaggtggctatgctggtggagcgcacaagccgaacaaaggcaatacgacctgggaaaagcacgccgaacgaagttgggcgcgaacccgaagccggcgccgtcctctgggcccgccggttgaactagcgggagctttggcgcagggccggttcggttgatgtcgtttacgcggaggatga

SEQ ID NO: 9040 - DNA, 720 bp, Oryza sativa
  Clone ID: PAT_MRT4530_15494C.1
atggacggcctccgtcttcccgtcgtcccggcaatccgcgtcggcagccagctgcacctcgccgccgcctacacggcgcccggtgccggccgacgcggctcatccggcgccgcagggccgccgccggcgctgatggccgacgtgagggtcgtcgtcaggaggcacttccccgtcggcccgaaccccacgaagggcgccggcggcgccgtgatcgtccggaaggtggccgaggacatcgccgtccggaggcagccgtcgcgcgggctacggagcccggagagcgtggagcgtgtcctcgccgagcgcgtcctcccgctcgtcgggcacccgttcgaccgccgcgccgtggccgtggcgagcaagcagatatgcgcgtacgtgtccgccgcgtgcgccgacccccgcgtcgcccacggcggcgtgcgggtgctcgtcctgctcgacaccttcgcgtgcgggacgttgttccaccccgcgccgccgcgcaagcagtgctccggcgacgccagctctctcgaggtcggcgccgtcgtgaggacctgtccgtgcatggagatcgttggcccggggagcaagaaggatccgcagctcgcgtgtccgtgcatggacattggggcgagaatgccgagcaagaagccgaggtcagtcggcgtcatcggagacggccggccggcgaaagacggcggcgaagatcggctgaaaggttggctgccgtggtaa

SEQ ID NO: 9041 - DNA, 224 bp, Oryza sativa
  Clone ID: PAT_MRT4530_15495C.1
gccccaaacctgggactgacccggcccaatgccggaaaacggatggcgggggacgccaaagatatggagagaaaagtgatggggtgggacacactgtgtggatgccaaacagggttgccaaacacggcgacaatgatgctgccccgcagtacctatagaaacccgatggcgcaatgcctgctggaaacctgcggttgggtatgcagtgcgtaaccggctgctga

SEQ ID NO: 9042 - DNA, 960 bp, Oryza sativa
  Clone ID: PAT_MRT4530_15496C.1
atggagaaacgtatggagacgttggagcagatcaaagagaccctgcgcgagaccagcaagctagtccccgacattgtccgcgccgcggtcggcctcgagcaccattaccagacagtcgagctcccccacgacgacggctgcgtcaaaagcttcgccgcggccttcttgcggccgcaggcgcaggagcaggcgcatggcgacggcgaggtccagcaggcagtgaggatggagtcggcgtcgtgctacgtgcccgaccacgacgaggacgcgcacttcgtgcacgacgcggccggcgtcgtcggcgggtaccgccgcagggtcggcgtggacgccggcgcgttctcgcgcgggctcatgacgagcgccttcgcgcagctcgtgacggcggagcccggcacgcccgtctgcccctacacgctgctggagcgcgcctacgaggagacgctggagtccggcgcgcagggcgggtccacggcggtcatcctctcgctcgccgacggcaacgtcctcaggtgggcgtacatcggcgacagcgccttcgccgtgctccgggacggcagggtcgtggtgcgctcggtgcagcagcagaggtacttcaacgccccctactacctcggcggccggcggggcgacgaaggcatgacggtggggatggtgggcgagatgaaggtgaggcgcggcgacgtcgtggtggccgggacggacggcctgttcgacaacatgtccgacgcggagctcgagaaggtcgtgcagatcgggacggcgctgggcttctcgcccaagaacatggcagacatcatcggcggcaccgcctacgagatgtcgcgctgcttgctgaaggactcgccgttcgccgtcgagtggcggaagcagcacgagaacgaggaggggcacttttacggcgggaaggtggacgacatcaccgtcgtcgtcgcgtgcatcgtctcgtcggattcatga

SEQ ID NO: 9043 - DNA, 1245 bp, Oryza sativa
  Clone ID: PAT_MRT4530_15497C.1
atggcagagctcgccattggtatctccaggacggcgcttgaggagttggtgaacaagttgaagtcagtcatcaaggaggaggaggagcagtggcagactatgcaccgtgatgtggtgttcatcagagatgagttcgagatgatgcagtcgttcctcaactctgccgatggggaggtggtgaagagcagtatggcgaggacctgggtgaggcaggtccgaaacctgtcctatgatcttgaggactgtatcgagttcatcctgcatctggacacaaataagcggtcatggtggctccggttgctgcagtcctggagctgcggcaagggaggagtatcgctgccagtggatgaagcggtcaccgagatgaaaaagctcaaggcccgcgtcgaggacgtgagccagaggaacacacgctacaggttcaccaatgacctcacgcagcatcagcaacagttggtgtcgtccggctccgccactggcggtggcgcaccaggatttgacatcctcgctgaggcgagggacaccgcggcaaggcgcaagggtgtagttgacctcatcaagttgatcaccgagaaaagcaacgatcttcgagtgatctcgttgtggggaaccggagatgatcttgggacgatgtccatcgtcaggaacatgtatgatgattcaagaatacacgacaacttcagatgccgtgcctgggtcaaggtggcgcatcccatcaatccccatgagttggtcaggagcttggtggttcagttttatgcaaactcttgccaacaacagctacctgctgctacagatgcactttcgtggttttctctaaaatataaaaaacaaagagatgccctgtcgtcgtcggaaacgtcgacgggagaactagtcaaggagttcttgcggcatgtcgacacacaccggtacctcatcatcctggaagacctatcgaccatggtgcagtgggatgccatctggccctacctgcggggaggcaagaatggaagtcgtgtccttgtgtcaacgcgccatcatgaaatcgcaagcctgtgcacggggaagcctcaccgagtattggagctccagaggatctcaattcatcagtctatctgcatctttttcaaagaggaggcggcagtcgggcgccagatccggccaggcggtggtggccaggaggcacttgccgggaggctgcgccagcatcaggcagcagtggccgagtggcaatggccggttggttttgtgatttttgtttag

SEQ ID NO: 9044 - DNA, 629 bp, Oryza sativa
  Clone ID: PAT_MRT4530_15498C.1
ccggccgggctaccttccaagatgtcaaatttagggaatggttcccagtcttccaagatgtcaaatttgggtaatggttctcagtctcttaatgctctgaaggcagaagcaaagcaagattcatcctaccaaccagctggatggaccgggttttaatgtgctgctgccaatgaagatacagtgatattgtatgccagaaaagttggggaagatggtcgaatgtatcataatcatatatattagtgaggactaggatcaagatgagtcggtacatatatggtggtattgacgaagcatgatgaagtgcccaacccaggtatgccagaactgatgtaactatgtaggtatgttcggtgatgcttctgtataattaattgttttggtgctgaatttgcatcgcaaaagcatcgatctgtaacttagggcacatgtaagttgtaacttgcaaatatttactgaaacatgagtcaagttgaacaatacttgccagatatcagaaatacaaagtcagtttttttccccttgtggaaaaaaaaaaaaaaaaaatttgcggccaaaaaaaaaaaaaaaaaaaaaaaaaaaaaaaaaaaaaaaaaaaaaaaaaaactcgagggggggcccggaaccca

SEQ ID NO: 9045 - DNA, 1219 bp, Oryza sativa
  Clone ID: PAT_MRT4530_15499C.1
gcgtctccgcgctgcaggaattccggcacgcggcaggtctcctcccgccttcccttccccctcgccttcctttccccaactaaaccctaactcctcgccgccgcctccgcctccgcctcctcgtcggagcagcgagccgctgctccttctcctccaccaccagccatggcgacccagatcagcaagaagaagaagttcgtgagcgatggcgtgttctacgcggagctgaacgagatgctgacgcgggagctggccgaggacggctactccggcgtggaggtgcgcgtgacgccgatgcgcacggagatcatcatccgggccacgaggacgcagaacgtgctcggcgagaaggggcgcaggatcagggagctcacctccgtcgtgcagaagcgcttcaacttccccgagaacggcgtcgagctctacgccgagaaggtcgtcaagccgcggtcctctgcgccatcgcccaggccgagtccctccgctacaagcttccttgggatgcctcgccgtccggcagggcttggctatggggtttcttacgccttgtaagtggaaggactggtccccaaggggcttgcgcaggtcatttagtaatgtggaaagctcaggtcccaaagagcctaagttcatgaaggttcattgatggttccatgatctcagctggtcatccagtcaatgagtacattgactcggctgtgagacacgtgctccgtggagacagggtgttcttggcatcaaggtgaagatcatgctcgactgggaccccaagggcaaggttggcccgaccacccctctgccggatcttgtaaccatccatgctcccaaggaggaggaggagctgcgccctccggtgttgatcgctgaggcttaagcttatgatgatatttcacatctttttgaagccttgggcatgtttgacagtaccctcttaaaactccagtttggccagttctagctaggtctctgtcttcagtaagggcaatgcaacagtcggttacttcagttttattatggacaaaagctatgtactggtgtcattttatttttttttaaactaagttttgccgagacaaaagttccagtcatatgtatgccaaatcttggtttgtagcctcaaatgcatcccatcttgtttgtgagcgcaaaaaaaaaaagttaaaaaaaaaattaagaatataaaaaaaaaaaaaaaaaaaaaaaaaaaaaaaaaaaaaaa

SEQ ID NO: 9046 - DNA, 394 bp, Oryza sativa
  Clone ID: PAT_MRT4530_1549C.1
tcgttcagaagcaataccatctgagcttgaagcaagaaagcgaggtaaacatggtcggcgacaccatggtcatctatttccccttgctggccgtcaaggccgacctgaaggtgttcggcgaggtgcgcatcaccatgcgcaagtctgcgaacaacaccatgcccgccgagttggaagagcccgtgagacggagccgaccgcgtgctctacctctgaccgctatacggcgagccggccagctacctgaccggctagtaccacggtgactacggctgggacaccatagggctcttcatccacccgtagacgtttgccatgaaccgtgagctggaggtgatccactccactaggacgacgactaggacgctaagctgccatgtgcctgagctcctct

SEQ ID NO: 9047 - DNA, 145 bp, Oryza sativa
  Clone ID: PAT_MRT4530_154C.1
atgtcgctagaatttgataggaagagccgtaagccgtccatatcgatcaccgtaacgcaaactgatccatccatcaggatcgggatcggaatcgggatcgggatcgagatcgagatcgagattgagagagattgctcttccaccg

SEQ ID NO: 9048 - DNA, 1057 bp, Oryza sativa
  Clone ID: PAT_MRT4530_15500C.1
ggagagagccagccaaacagtcaatagctcgaacagttgcaccgcaaccaactacgccacaggtgcgtgggagcggtcaaatcgcatactactcctttctgttatgcaccgcgaaacaccagaatcacaccgcttgctactgcatcatttggtgacacagctgactcttcttcagccatctttcctagaatccatgtgaaggatccctatcagcgacttggaatcagcagggacgcatctggagaagaaattcgagctgccaggaattttctgataaacaagtatgcagggcataagccaagtgttgatgcagttgagtctgcccatgacagaatcatcatgcagagtttctctgatagaaaaaaaccaaaagtggatctcaagaaaaagtatagggaacttactcagtcacgtccagtcaaggctattcagggaagatttcaaacaccttctagtaaagtgatttggcagacagcaataacttttgtattgcttggagtgcttacccttgttttccctactgaagaagggccaactctccaggtggccatctcttgtgcagcaaatatctatttcatttatcagaggctgaaaagtggatggcgaacattcttttatgggttcggatccttctttgcttcctggttccttgccacattcttgatggtttctgtaattccgcctatactgcctggtccaagaaacttggaagtgagcactgcatgtgttacttatgcactcctttttgtatcatcggccttcctgaagtaggaaatctccatgttgtcattttcttgttagccactagtctttcaacaatcaaaatgattcccacttataatagcttgtacaatccatcggcatcttccttttttcagagtttttttcagaagtggaaatgtagtcctttgctgggttgctaatagttaatataaggttgtagtgtgaggtgtagaacatttttttgccctggcccttgagagagtttgatacctcctctagatattctcaatgctgtattaaatacaggtggttttgagatagataatatgagata

SEQ ID NO: 9049 - DNA, 1542 bp, Oryza sativa
  unsure (1)..(1542): unsure at all n locations
  Clone ID: PAT_MRT4530_15501C.1
tgtctctcgacgacgacgccacaatgatggccggccggcgaagcgcccacgttgacgccgccgtcatcggcgccgccgccctcctcctactcgccgcgacggaggcggagggcgccgtgtccagctgggagtccaactgctgcgaggactaccacatcttcgtggacaaccgcgtgtcggacagcatgcacctgagctgctacgccttacaggggggcggacggagcgagttctaccacagattactgggcatcgatgcgaataccaagagagaaaaaaaagagagaataatttcccccttttctctcttccgtgccggagaatcgatggagattagggcccggccggggacgcgacaccaccccgcccccccttatccacggaggcggcctcctcctccgcccagcgccgccgctcttggtccgccggacgcgcgggtcacctcccacggaggggaaaggcctcaatttaggctgttcaactattccttgagatgttggcacatagtctagcaatcaatccttcaagggctgctcaatgtccggttacttcgagggcgtcgagtgcacccttgggacttgtctcttcgttggccttcagcaggggacgtaaggaaagtgttaaacttttcatcaatgtggatagatacacaaagtatagtactcctttctgttatgcaccgcgaaacaccagaatcacaccgcttgctactgcatcatttggtgacacagctgactcgtcaactcccatctttcctagaatccatgtgaaggatccctatcagcgacttggaatcagcagggaagcatctgaagaagaaattcgagctgccaggaattttctgataaacaagtatgcagggcataagccaagtgttgatgcagttgagtctgcccatgacagaatcatcatgcagagtttctctgatagaaaaaaaccaaaagtggatctcaagaaaaagtatagggaacttactcagtcacgtccagtcaaggctattcagggaagatttcaaacaccttctagtaaagtgatttggcagacagcaataacttttgtattgcttggagtgcttacccttgttttccctactgaagaagggccaactctccaggtggccatctcttgtgcagcaaatatctatttcatttatcagaggctgaaaagtggatggcgaacattcttttatgggtatgttttcttcctccttcgcagtttttttgtgtgttttagccattagctaatggtatatccgagtaatctatggttagttccatacactatagtgtttacacagcactgcatgtgttacttatgcactcctttttgtatcatcggccttcctgaagtaggaaatctccatgttgtcattttcttgttagccactagtctttcaacaatcaaaatgattcccnacttataatagcnttgtacaatccatcggcatcttccttttttcagagtttttttcagaagtggaaatgtagtcctttgctccgccgctaatagttaatataaggttgtagtgtgaggtgtagcccc

SEQ ID NO: 9050 - DNA, 733 bp, Oryza sativa
  Clone ID: PAT_MRT4530_15502C.1
ctacaccgtcacttctggctcctggagcgccgccatcgccgccggcgattgcacgaacccagctagccacctgccctcccacctcccaccctttttcaccagtacaatctcacggttccagccgttcggtactgcccactcaacgtccggccggtgcagctgccgccgtcgatcgacagacgaagctccggcgccggcgagcacgccgtcgtacgtcgcatccgccgccgccgccgcggtctccttttcacgacgaaccccggcataatattgttggtggcgcaatgggcagcgagtggtgatgtcctcgttggccggcatcagcagccgcggcagggagaacgacgacgggtcgacctccgactccgacgtggtggcacttgtgctctccgtggttaccggcggccgcctcttgcgcttgtcactgtcacgccgccgtggttccccgcagcagcagcagcagcagaagaggcggctgaagaaggacgccacggcgtcgcagagcgagctgcagcactcgtcgatgctgcagtcgcagtcgcagcagcagcagcaacagtcgcagtcaccgcagtcgcagcagtcgcagtcgcagtcgccgcagtcgatgctgatgtcgtcggacatgtcggctatgggcggcggcggccggcggcgagagcagctcgatcgcagtagcgatggatggatgcagatcgatgagcaggtgaagagcaaatcaattgatatatga

SEQ ID NO: 9051 - DNA, 430 bp, Oryza sativa
  Clone ID: PAT_MRT4530_15503C.1
ctagcagcggatttcaagctcgagtgtcgtcaccgtctccctcgagaacaacccctccctctcccttggctgcgcatgactctggtggtggccggcggtggcgtgaaccctgagctgggagaggggaggagcaatgtgtgtccttgctgttgttgtcatcaccgccatggccgtgcgatacaaaggtggaggcaaaggggaggaggagggcaaggtgttggaatcgcgcttcgcaggagagttgtctgagttggcaaggagctttgaggtggcggtggcattcctcttcctcgcccttccatcaagctgctcactagcctcctccaccaccgccatcgagcacgccgcacgttgtgccgctgcacgcggtgaccgtgctgctatccaactagccgtcgctcctcagggacgcctgagtggcagggcttga

SEQ ID NO: 9052 - DNA, 141 bp, Oryza sativa
  Clone ID: PAT_MRT4530_15504C.1
atggagcctaaccaaagcttctcaaatctgatacccgatgatagtggcctagtatggagaggtattggctggtaccgactaggaatcaattggtacctgcgatgggtactggacgatgcccatgtcgcacataggtattag

SEQ ID NO: 9053 - DNA, 240 bp, Oryza sativa
  Clone ID: PAT_MRT4530_15505C.1
atggcgctgaccgtgggacactcagcgccagcccacaaggcccagaccagcaagcctgctggatggcttgcgggctgggacctcagcgccagccataatggcgctgaccgtgggacactcagcgccagcgccagcccacctggcgttgaggttggacttggccgtttcggccgtggcccagctcagcaagccttctggatggctgggctgggacctcagcgccaggtgcactggcgctga

SEQ ID NO: 9054 - DNA, 429 bp, Oryza sativa
  Clone ID: PAT_MRT4530_15506C.1
atggccgccagctacgccgccgccacctgctgctgccgctgccaactccacctccaccgcggcggcgaacaactcgtcgtcgtcgtcgtccaccaccgcgccgccgcagcagccgaccgccttccccatggtacgcccatcaaaacgatcacagattatgaaattaatccacattgcgctcatttcgtcctcctctccgatccgttcttgcagtacggcgtgacccccggcagcctccggccgcaagagtgcgggggtcggtgcgcgtacaggtgctcggcgacggcgtacaggaagccgtgcatgttcttctgccagaagtgctgcgcctcctgcctctgcgtgctgccggggacctacggcaacaagcagtcgtgcccctgctacaacgattggaagaccaagcgaggaggccccaagtgcccctag

SEQ ID NO: 9055 - DNA, 171 bp, Oryza sativa
  Clone ID: PAT_MRT4530_15507C.1
atggaggcgctcgtcggcaagtattttccacaccttgccaaagtgctcgcgcaggaggcaactatagccgcgaagggaaaattaaaccattaccatgtacagatttgggtcaagaggaggaccccctatgactattactacaatgaccccgataacttagagaatccctag

SEQ ID NO: 9056 - DNA, 2568 bp, Oryza sativa
  Clone ID: PAT_MRT4530_15508C.1
atgagggtactaatggttgacggtgacgcctggcggcgagctccggcgccggccacctcaccggcagcggaggaggcggagttcctctgggagctccgcaagtacgtcctgcttctggccacgctcgccgccacggtcacctacacggcggggctggacccgccgggcgggttctggacggacaacgtgggcgagctcctcgccggcgacccggtgctccagaagacctaccctggccgctacaaggccttcttctactgcaacgctaccgcgttcgtcgcctccctcgtcatcgtcaacctcctcctcgtccgcttcctgtgccgccgccggtggtggctgcgcgcgctccaggccgcgatgatactcgacatgttcggcctcatgggggcctacgccgccggcagcagcagggaggcggccatgtccgcctacatcctcgttctcgtcatcttggtctgctcctacgtctccgcccatgtcctgctctacgggctgacgacggcgcaggtgagcgcgccggacgcgccggagcgggtggagcgcgcgcgcaagtacctgctcatcttcgcgactctggcggcgaccgtggcgtaccaagccgggctgagcacgccgggcggattctggctaggcagccttgagaaccagcacctcgccggcgaccccatgctccgcggcaaccacccgtcgagcgcgctctgggtgtgcgtgggcgcggccatggtcgggctcatgggcgccttcgccgccggcagctgccgcagcttcaagacgtccatctacgtcatcgcgttggtgggcgccgtcctgctctacattgctatccagttcatggtgttcatcagcgagcccgtgaaggattggctccaccgtgctggagagacgctgcaaaagtgcttgaaattggatgaactggagcagcgaaatcagcagcagatcacactatccaaccaaggcaatggcgacgcctaccttcttctcaagaaatctcgcatgtacttgctcctgcttgggattctcgcggcgagcgtcacataccaagcaggactgaacccgccgggaggcttctggcaaagcgatggcaccgacggataccgccattacctcgccggcgatccggttcttcacatcacgtatcaccggcgatacatggtgttcttctactccaacgccaccgccttcatcgcgtcgctggtcatcctcatcctcctcttgagcaacatgatcagcacgcaggggatcaagtactgtgcgctgcaggtcgccatgattctgaacttgtttggcctgatcggagcttacgccgctgggagctgcaggcaggcgtccaaatccgtgtacgtctcggttcttgttttgccggtgtttctctatgttggtatccatgtcttggtgttcatgctcgaagtgtctccgacatgggcgacatggcgagtagaagtgagggagaagctgaagcaatgtatgcctgaatggctcaagaatctgcttgagttggagaagcatgtcgaggaggaagaggaagagtggaagctggagaagaggcgaaagctcctactcctcgttgcgattcttgcagcaagcctcacctacgaagcaggcatgaacccaccgggtggtttctggcaggagaagaagtccggccatgtcggtgacccggtgctcaacaacgacaactaccggcaccgctacctggcgttcttcttctgcaacaccacggcgttcgtcgcgtccttggccatcatcatgctgctggtgaaccggaagctctcggcgagaggaatccggtcgtacgcgctgcgggtgtgcgtgatccttgtcctcgtcgggctcatgggggccttcgccgccggcagctgcaggaaggtgaagacgtccatctatgtcttcgtcttggtcctcgccgttctgctctgcatcgcgttccaggtcgcactggtcgtgtcggggtcgctgcgacgtctcgtcaacagcctcctctccaagctaggggcgccgcttgaggaggacgccggtgagcggctgccgcacacggccgccgacggcggcgacggcgagcctcgcgatctctgggacgagaagctccccaaatacttgctgctcctcgcagcgctcgcggcggccgtcacctaccaagccgcgatgagcccgcccggtggcctctgggatgacggccaaaccgagcacatcgtcggtgaccctgttctcctgaccaactatgcacgtcgctacaaggtcttcttctactgcaacgcgacgtcgttcatggcgtcgctggtgataatggtgttgctgctgatcaagagggtgagcaacacccagccggcgctcctggcgctgcacgccgccatgatactggacctgttcggcctcatgggcgtgtacgccgccgggagctgcaggagggtgacgacgtcggcttacatcttggcactgctcgtcggggtttcggcgtacattgttgttcttgtggtggtgtccgttggtgtggcgagatggatgaagaaggtgatggacaaggtgggggagaagctcacacactgcttctcctttgaagatttgtag

SEQ ID NO: 9057 - DNA, 305 bp, Oryza sativa
  Clone ID: PAT_MRT4530_15509C.1
agcactcgtacgaacatgcgttcgaaggcagcagcatatcatagcggcacacacattctggtaactagatacttttcagtcgattaacaagaaagttatgcatgagcgcggtggacgacaattaacgctggatgcgcagcagtatgactagcatgccattagcatcgatcctgcgagagtgcctgaactacagctgcagcccgtcatagatgtctactctgatgagactgaggctgctgattaagctctgatgagatgatagttgacagccatatggggcatatatcctaactactacattgata

SEQ ID NO: 9058 - DNA, 563 bp, Oryza sativa
  unsure (1)..(563): unsure at all n locations
  Clone ID: PAT_MRT4530_1550C.1
ccacaagcaactggattgatcgatcgatcgatcgtgaggaacaaacaatgccttgcctggcacaggagtatcatcccaagctaccagccaccaatcactactgcaagtccctctcctccctcatcagggagacctacgcccactgccatgtcccctgcgccaggatccccgccgccggctggagctccggcgacgacagcgacgacgatgacagcttgctcgacgaagtgctcgacaccaagcaggtgatcatgaacgagatgaggaaccggcagatgaagaagagggcgaggtgcagcctggattccccgatgtcgagcccgttcgtctggtcgttcacgccgctcgacccgaggagcgttctggagaagtttccgagtcccaaggagtcggtaacggaggaggagaagacgacgggcaaggaggaggaggtaggcggcggacgccgaccgacggagagcgaggggggttcttcttcggtgaagagcttcttcctccgcgcagaccgagccgtgggcgcgaccggtgggtgtcgtcggcgttcggcggccgtnggacccgcc

SEQ ID NO: 9059 - DNA, 637 bp, Oryza sativa
  Clone ID: PAT_MRT4530_15510C.1
acagctggcgccgaccatggggaacccagaccgaaagggcgaaatgggaccccttttgccacacccacacccttcgccacagtacctgcgaggtacagcgacaagggctaggggcgaaagtgagttaagtccaagctggggggctacgaagccgcccaagcctctagacacctttcgccacacgccacgcccttcgccatagtaccaatgaggtacgtttcgccacacgccacacccttcgccatagtaccaataaggtatggcatcaagggctgggggcgaaaataagttgcttccaagctagggggctacgaggccaccctagcctctggagcctttcgccacacccatgcccttcgccacagtacccgcaaggtacggcgacaagagctggggacggaaatgagttgcttccaagctcaggggctatgaggccaccctagcctctggagcctttcgccatacccatacccttcaccacaataccaataagttcattaccggcaataacaagcggtttgactccgagaagtccaaggaaatgtgcgaacggctaaaacttgaaatcgagttcgcatcggttacacacccgcagacaaacggggcagccgaaagggacgaatgacaaaaccctagc

SEQ ID NO: 9060 - DNA, 2661 bp, Oryza sativa
  Clone ID: PAT_MRT4530_15511C.1
atggccgctgacgcttacgctgacgccgcgccgccgcggcgagctccggcgccggcgacttcgacagtggcgaaggaggcggagttcctctgggagcttcgcaagtatgttctgctgctggccacgctcgccgccaccgtcacctacacggcggggctggacccgccgggcgggttctggacggacaacgtgggcgagctcctcgccggcgacccggtgctccagaagacctaccctcgccgctacaaggccttcttctactgcaacgccaccgcgttcgtcgcctccctcgtcatcgtcaacctcctgctcgtccgcttcctgtgccgccgccggtggtggctgcgcgcgctccaggccgcgatgacactcgacatgttcggcctcatgggggcctacgccgccggcagcagcagggaggcggccatgtccgcctacatcctcgttctcgtcatcttggtttgctcctacgtctccgcccatgtcctgctctacgggctgacggcgcaggtgagcgcgccggacgcgccggagcgggtggagcgcgcgcgcaagtacctgctcatcttcgcgactctggcggcgaccgtggcgtaccaagccgggctgagcacgccgggcgggttctggctaggcagcctggacaaccagcacctcgccggcgaccccatgctccgcggcaaccacccgtaccgattcatggtgttcttctacttcaacaccacggcgttcgtcgcgtcgctggtcaccatcatgctgctcatgagcaggaccgtgtcgcgccacgggttccggtcgagcgcgctctgggtgtgcgtgggcgcggccatggtcgggctcatgggcgccttcgccgccggcagctgccgcagcttcaagacgtccatctacgtcatcgcgttggtgggcgccgtcctgctctacattgccatccaggccatggtgttcttcagcgagcccgtgaaggattggctccaccgcgccggagagacgctgcagaagtgcttgaaattggatgaactggagcagcgaaatcagcagcagatcactctatccaaccaaggcaatggcgacgcctaccttcttctcaagaaatctcgcatgtacttgctcctgcttgggattctcgcggcgagcgtcacataccaagcaggactgaacccaccgggaggcttctggcaaagcgatggcaccgacggttaccgccattacctcgccggcgatccggttcttcacatcacgtatcaccggcgatacatggtgttcttctactccaacgccaccgccttcatcgcgtcgctggtcatcctcatcctcctcttgagcaacatgattagcacgcaggggatcaagtactgtgcgctgcaggtcgccatgattctgaacttgtttggcctgatcggagcttacgccgctggcagctgcaggcaggcgtccaaatccgtgtacgtctcggttcttgttctgccggtgttcctatatgtaggtatccatgtcttggtgttcatgctcgaggtatctccgacatgggcgacatggcgaggacgggtgagggagaagctgaagcaacgtatgcctgaatggctcaagaatctgcttgagttggagaagcatgtcgaggaggaagaggaggagtggaagctggagaagaggcgaaagctcctgctcctcgtcgcgattcttgcagcaagcctcacctacgaagcaggcatgaacccaccgggcgggttctggcaggagggcaagtccggccatgtcggcgacccggtgctcaacaacgacaactaccggcaccgctacctggcgttcttcttctgcaacacgacggcgttcgtcgcgtccttggccatcatcatgctgctggggaaccggaagctctcggcgagaggaatccggtcgtacgcgctgcgggtgtgcgtgattcttgtcctcgtcgggctcatgggcgccttcgccgccgccagctgcaggaaggtgaagacgtccgtctacgtcttcgtcttggtcctcgccgttctgctctgcatcgcgttccaggtcgcactggtcgtgtcggggtcgctgcgacgtctcgtcaacagcctcctctccaagctaggggcgccgcttgaggaggacgccggtgagcggctgccgcacacggccgccgacgagcctcgcgatctctgggacgagaagctccccaaatacttgctgctcctcgctgcgctcgcggcggccgtcacctaccaagccgcgatgagcccgcccggtggcctctgggatgacggccaaaccgagcacatcgttggtgaccctgtcctcctgaccaactatgcacgtcgctacaaggccttcttctactgcaacgcgacgtcgttcatggcgtcgctggtgataatggtgttgctgctgatcaagagggtgagcaacacccagccggcgctcctggcgctgcacgccgccatgatactggacctgttcggcctcatgggcgcgtacgccgccgagagctgcaggagggtgacgacgtcggcttacatcttggcactgctcgtcggggtttcggcgtacatcgttgttcttgtggtggtgtccattggtgtggcgagatggatgaagaaggtgatggacaaggtgggggagaagctcacacactgcttctccttcgaagatttgtag

SEQ ID NO: 9061 - DNA, 270 bp, Oryza sativa
  Clone ID: PAT_MRT4530_15512C.1
atggaaggccttcggccgaacctgccgaaaccgaaaagttcaagtatcaggctcacaccaaaggacaagagcgaagccatatgggcgaaagccgtgattgtgggtaacaccaccttcgtcaagtggagttctcgacagaaggcggaacgagcgaagatgatgtggcgaaagcctcggcacacgggcacaggtttcgccatagcaccaaaacccgttaacgggagacttggcgggccgctatgccctcgggggatttcgcaagatagatag

SEQ ID NO: 9062 - DNA, 458 bp, Oryza sativa
  Clone ID: PAT_MRT4530_15513C.1
cggcaaacaattaacattaaaagggccgccaaattctcgggccccccaaaaaaaaaaaatatccctaaaaacaaaaagtccctcgaaaaaaaagggacaaaaaaccccggtttacaaaacaaactatacagccgggcaaaaaaaaaacctcttctatgtggcacttcaagggcacttgggcagccctatatcctggcaagggggatgctgctgccccaagggacccccggggcaagggctgaattctcatcggcaactaagggacggggttggaggttccccggatgccaaccgggggggaacccatattatattgggagtcctgcagttgctccagcttttccaaaacctaaaacatccgggggcgcattttggcatcattgcaaatgcattgcagggcgatgttcgcaagggcggggccccctttcttcggatatgggccccccagctttgtatcc

SEQ ID NO: 9063 - DNA, 628 bp, Oryza sativa
  Clone ID: PAT_MRT4530_15514C.1
tatggtcaaaatctcatggagatgtcccttgtgccaggtaggccatcacaaaatcagctgatgatcactcatcactcgctctccttaaataccactaggttgctgccaaatcaaggagcagaaatgctgcggctaccccttattttacaaatagacccatgaaaaaaacttattccaaaaatggtcctttttggacgccaaagtcgcttgcaccgtggtccaataggatggcaccaacaactctggtgccatcctcctgccaccgtggcgggtcggtgctgacgagcacataagaaccaaccatagaaaagttaaactcaaatggatgtaatatgtgacctgtagaattttccaaagctctaccgaaaagcttctcgcctcgaaaacataatcttgcaagcggaatttggaggttctaatttcaccaaacccgatgaagcgggggacaatcagatgtaactttttatgtacatgtccatgggtatagaatttgcctaattccgagtccaactcggacttgggaggggggggcgccagagaggctggcgcgctccccctaccatgtaagtttctgacctccacggtgatagaagggtggcgccagcaactctggcgtcaaaaaaggact

SEQ ID NO: 9064 - DNA, 486 bp, Oryza sativa
  Clone ID: PAT_MRT4530_15515C.1
atgtccctctcggctctccctcgtccccgcggaggagcggcggcaggagcggaggggcggagcggcagcggcggcaagccacaggcggcggaggtggtcggaggaggaggtcgccgccacatggagctcgtccccttgcatcctggtgagggcgccgggccggcggaggtggagacgggttcagtacccatcggcggcatggtcgacgggcggccggtggagggtgccgaggccagtgccccgttagccaggtggcagcgctgtggcggagaagtcgaggacaccgtggctggcggcagagccgcgaggcagtggcgtaggtgggccggcggcttgctccaggtgccgtcggaggcggcgcggcagtcggggctccgtgagcaggaccgtcggcgcaaagacgacgaacaggagctcgtcccccggccgccgcgcaccgccccttctcacccgacggagaggacagaggagaggggagagagatga

SEQ ID NO: 9065 - DNA, 467 bp, Oryza sativa
  Clone ID: PAT_MRT4530_15516C.1
ataattactcttatgagggatgcggaataaaccaaagggtatagtattttaacagagcccgttgctcataatatgatagggcaggaatgcatcttgagatttccgacaagatcaaatatcagttcagacctgtctgggtctctggagaaaagcgctccaaacctcaacaccctgctgaccaccaccaacgactgatttctgcttgataggaacgaggatggcctggctggccctaaactgggtactaagtgcgcgcttcattacggcctagatcaagactgtgattgacagtagcagctgccatacgataaatgctcatgccatcaggcgactacaaagataaattcattcgcaggagcctccggagcaacccttgcagttggtgccaaacttgcaagggttgcagacggatgcggcgttttgggcgtgtactccgacatctacattcctccatagctcgtcttgct

SEQ ID NO: 9066 - DNA, 445 bp, Oryza sativa
  unsure (1)..(445): unsure at all n locations
  Clone ID: PAT_MRT4530_15517C.1
ataagaaaattcatataacttcttttttatttataaggaaccagattccattaatgaactagaaaatattatcctaatccatgatgataaatacatatatgttgcagttagtctgttgcgtaatatgtgcttgcacgcataaatttagctcactgaattagacctaaagtaactatcttatcntatttttatcttatttaaatatttatatatatttatttatttttataataaattattattttattttttatataaatatttataatattatttaaaaaattaatttaataacttattctattatatttatttaatatttatattatttttaatatattataaataatatattatatattttatattaaatatttttattaatattattatatttttattctatattttattataataattattaaaaaataatttataatat

SEQ ID NO: 9067 - DNA, 456 bp, Oryza sativa
  Clone ID: PAT_MRT4530_15518C.1
atgccaagattcgtgcaccaccttctctcctccaactccggcgggctccccttcttctccggcgccggcgacaccccaactccagcagggagacggccgtgggcggcggaggaccggcggtgggcggtggacttcggcgggcggcggcgccgccgccgaagccgcggggatggaggaggacggtgggccagtgtcggcggcgggggcaaagcaagagtgaggttaggaggtggcgggcggtggttgcggatccggcggcggagagccgccggagacggggaagacggcggcgcgggggcacctcaccgtcgccgccatgaggagaaagagaggggggaaggggagagggggagggggctcgccggcgccgttgactctttccggccagtcggcgaggcaggcggcggcgcggtggggcagtggtggtggcggtggaatcgcgcgacggcgcgagga

SEQ ID NO: 9068 - DNA, 948 bp, Oryza sativa
  Clone ID: PAT_MRT4530_15519C.1
atgggtgggaagcgcttcgcgcgactgctccctgttcgaccacaacagctcatctacctctttgctcacgtgctgcgcattgtcgtcaacgctcacaaccgcgaatctaatgatgcgtttatgctagtttatatttgcaatgtcatgatttatttatggaacaaattaaattattatgtgtttataaattcaacaatcgtcgccccgctcggcccgctccggacagctgcatccaccagccagccagggaaggccgtggcgggtgctagatttggaggcctcagcctccccgttggccattgcggcggttgtactggacggtggtggaggcgacagcagctggcgacgtttcagtgggccgccagcgaaaaggagcgcatctttgctggcggccgtcctaactcggccaccagtgaagatccatttttcctggcgaggaaaatgggtaggaaatttaacgtccactccaacatcatggtgaaggcaaatcatctagttgttacagacttatctgggagggaggggccgggagccgccggccaccgctctccccccgccccctctggccagatctgggagggagggcccgagagccgcgccgcctcgaccctcctcgtcgctgccgtcctctgccaagggagggaggggcgcgcccgccgccatcgccgggagcacacgccggcaccgccccgcgcccggccgccggccgccggcctcccccctcccccctccggccagatctggaggggaggaagggagggaggggagccgccgctccacgccgtccgccctgcaccgtccgccgccggccgccccgcgctgtccgccccttctgccagtggggagagtgaggggagaggagaggcgcacctcatgttattttttgggggacgcactggagtcgccagtggtccttgcttcttaaagaaggtgacaaggaagctgtga

SEQ ID NO: 9069 - DNA, 1257 bp, Oryza sativa
  Clone ID: PAT_MRT4530_1551C.1
gaacaaccgataaatgacttcttgagagattacatgctgatgacggttcgcgactccaacccgtgggtctgcaccgatggcttactaagaagatgtgtgccgactgaagaaggacttaagatcataaagcgatgccatgcctcaccctatggtggccattatggtgcattcggcacccaggacttaatggaacctttccctaagtcccgtaactgcgagtacattctggtggcagtcgactatctctccaagtgggttgaggctatgccgtgcaacaccgtggatgcgaagcatgccaaaaagatgttcacagaaatcatcttcccaagatttggtacccctaggatggtcataagtgacagaggttctcacttcatcgacaaaaccttccgagacctcctacgagatatgggagccaaacacaatgtggccattccttaccatccacaaaccaagggagaatggagaaaaatgcaaattgctgaacttgaagaatggagagagaaggcttatcacaacacgaacatatacaaagaaaggacgaagcactggcatgataaaaggataaaaatcaagaaattcaagccagaagacaaagtattgatgttcaactccagggttaagcttttcggccacgaaaaattgcgcagtaaatgggaaggaccgttcgacatcatagacacctcttcgcacggggcaatcacactccgctacgactcaggtaatatattcaaggatgatgagaagatcgctccgcctcccgccgagcaatatgtgggcaccctgttcaccaaggcaggggatgaagtgctccacaaatatatcacacccaccgctactccatccactccgaaggagtaccggttttgcattcagggagtgcgaactcccggcggtgggtatggtaagggtttacttcagcctttgacggcgtcggagaaggagggggcagcggaatccagaagccctccacctatgaaggtgaagcgtcacttgatgccccctccaattgtaagggcagccggccaattccaagaagataaagtgaaatcaccggagccctcggttcataagctcgccgcccaagtgaagaaactccgcaaggagaacatagagcttagggatcgcaacacggaactaggggtagaacttgctgaacttaggaataattttgatacccttagtcgcggccgggagggcctagcccaggttcggctgtaccccatggttcggccgaacccccctgatcaccgttga

SEQ ID NO: 9070 - DNA, 348 bp, Oryza sativa
  Clone ID: PAT_MRT4530_15520C.1
atggaagttctattggtgaaagttcttgggtcatcgtttggaggaggctacttctgtgtcgcctctagatctgaggcgatccgggaggcgtcggccccgaacctggctccccccatgtatagcaccggcagccacctccatcccttcccgaggcaggcaacagctatgaaggcagcgaggggatggtcggatctggccacccaaggtccaaatctggcgtatcttcagcgaggtatgggcatctctccagcgcgagaggctggatcccctattgcggtggtggcgacggctggctgtggtggcgaaggcaccgagatggatgaccggatttggccccacaaggtctag

SEQ ID NO: 9071 - DNA, 491 bp, Oryza sativa
  Clone ID: PAT_MRT4530_15521C.1
cggtctccgtgctcccgcgcggcgaccatggcggaccaccacaaagaccagttggtgtacagcctcgcgagcagttgtcagccaggatacgatgcaactccggcaggactgctgccaggcagctcgccgcggtcgacgacagctggtgcaggtgctcggcgctcaaccacatggttggaggcatctacagggagctcggcgccaccgatgttgggcaccccatggccgaggtgttccccggctgccggagaggggacttggagcgcgtcggcggcgagcctcccggcgttctgcaacgtggacatccccaatgggacaggtggtgtctgctactggctaggttatcctaggaccccgagaactggtcataggctactaagctactgtgtgtatgactctgtgggttgctaaataactagtgctttcatttgtcaggaagcatatatacatatggtgaataaatgatgacttcaatgttcttctgaaaaaaa

SEQ ID NO: 9072 - DNA, 667 bp, Oryza sativa
  unsure (1)..(667): unsure at all n locations
  Clone ID: PAT_MRT4530_15522C.1
ctctcatacaaattcagactaaagattttctgcaaacaaaaagccatggcttccaacaaggtagtgttctcggcgttgctcctcatcatcgtctccgtgctcgccgcgacgggagccatggcggaccaccacaaagaccaggtggtgtacagcctcggcgagcgttgtcagccaggaatgggctacccgatgtactcgctgccacgctgccgggcggtggtgaagcgccagtgcgtgggncacggcgcacccggcggcgcgtggacgagcaactccggcaggacttcttgccggcagcttcgccgcggtcgacgacagctggtgcaggtgctcggcgctcaaccacatggtttgggaggcatctacaagggagctcggcgccaccgatgttgggcaccccatggccgaggtgttccccggcttgccggagagggaacttgaagcgcacgacggcaaacctcccggcgttttgcaacgtggacatccccaatgggacaggtggtgtctgctactggctaggttatcctaggacccccagaactggtcactaggctactaaagctagctgtgtgtatgactctgtggggttgctaaataactagtgctttcatttgtcaggaagcatatatacatatggtgaataaatgatgaacttcaatgtcttctg

SEQ ID NO: 9073 - DNA, 1158 bp, Oryza sativa
  Clone ID: PAT_MRT4530_15523C.1
ccggccgggaaaacctatccctctcatacaaattcagactaaagattttctgcaaacaaaaagccatggccttccaacaaggtagtgttctcggcgttgctcctcatcatcggtctccgtggctcgccgcgacggcgaccatggcggaccaccacaaagaccaggtggtgtacagcctcggcgagcgttgtcacccaggaatgggctacccgatgtactcgctgccacgctgccgggcggtggtgaagcgccagtgcgtgggccacggcgcacccggcggcgccgtggacgagcaactccggcaggactgctgccggcagctcgccgcggtcgacgacagctggtgcaggtgctcggcgctcaaccacatggttggaggcatctacagggagctcggcgccaccgatgttgggcaccccatggccgaggtgttccccggctgccggagaggggacttggagcgcgcggcggcgagcctcccggcgttctgcaacgtggacatccccaatgggacaggtggtgtctgctactggctaggttatcctaggaccccgagaactggtcactaggctactaaagctagctgtgtgtatgactctgtggggttgctaaataactagtgctttcatttgtcaggaagcatatatacatatggtgaataaatgatgaacttcaatgttcttctgaaaaaatctaaccaattgggtagcaaaaaaaaaaaaaaaaaaaaaagggggaggaaaaaaaaaaaaaaaaattggaaaattaaaaaaaaaaaaaaaaaaaaaaaaaaaaaaaaaaaaaaaaaaaaaaaaaaaaaaaaaaaaaaaaaaaaaaaaagggggggcccgttttaagagaacccaaatttacctccccggggtttgcaacgtaaaaattttttttttggggccccaaaaataaatttatgggcccgggtttaaaaaccgtgggaatgggaaaaaccctggggttccccaaattaaaccccttgaaaaaaaacccctttttcccaaggggggaaaaaacaaaaaggccccccccaatcccccttccaaaaaattgcccccccctaatgggaaaggggaccccccctttaacggccctttaaaccccgggggtgggggggttccccccagggggacccttaaatttgcc

SEQ ID NO: 9074 - DNA, 169 bp, Oryza sativa
  unsure (1)..(169): unsure at all n locations
  Clone ID: PAT_MRT4530_15524C.1
gacgaaacgccatatgagttactttataaggggaccgccgcagacgccgatgttgatgcaaagttatttctttgttggacttccgagtgcgcatccggcgggttgggccttgctcctctntggggtggccgggcgggggggggggccttttggtgggtttgtggggggg

SEQ ID NO: 9075 - DNA, 423 bp, Oryza sativa
  Clone ID: PAT_MRT4530_15525C.1
atggcgggcaatccttcaggcgctcggctgacaccaatccacaacgtggacaaggacggccactgctccgcgcgtggcagcagcgggccagcggcggggggagcacggggtgggagggtgtcgctgatggcactgctggagcaggcgaaacggcaatgggtgacggtggccggggatgccaatcggaggcacgtcgtggaggaccacgcgatagcggcgatggcggaggaggaatggatgaacaagggcgtcctcgccgccgatgaggtggccgcagcagaggccgggcccgaggatgtagagcagagggagggcagcttgcacggaggatgtggtagcgttgtgcccgtggtggcgcggctgggtggacatggaggcgtgaagaggaaagaggagaagaaaggagaggaagagggactctga

SEQ ID NO: 9076 - DNA, 465 bp, Oryza sativa
  Clone ID: PAT_MRT4530_15526C.1
gctacgcgttcgtgctagatcgcgagcggtcagatgctttttcaaacagtacaactagtgctacagatctactgaagctgtataagagaactataggacaggaactggaagcccaccgctggttaacctacattatccagattctgcgaaggtggctgacaaccaactgattattacagtctggatgtctgacggactttggatataatactacttgagaacacgggctgtggactctggcaacgagaccgattgggtggactgacgccgattgtcatgaggatgtgatgagtggggatggcgatattgcacaatggtgcgctataggagacgcgcatatgatttcatatgtgcgacgagcaccgttccttggctggcctgagaaaacgagcaagacagtgaatttggaatgggaatataatatcaggtattctactgtcatagaatggcccttcaacaaagggg

SEQ ID NO: 9077 - DNA, 1570 bp, Oryza sativa
  Clone ID: PAT_MRT4530_15527C.1
ccgggctgcaggctctcctcctcctcttcctcctcgcatcagtccgcataaagtctcctccccttccccctcctcctcctcctctccaagcttggcagcagcagcagcaaaggggcggtgggttctttgtctctctctctctcgggcggatttcggtttcttcgtgtgtttcttggttgcgttggcgtttggagcggcggcggtggcggtgagtgtgcagtggtgcaggaggaggaggccgccatgggcgcgggcgggaggtgggtggaggagtacgggcgttcgtcgtcgccgtcgtccaacctgcagtgcttcttggactgcaccacccccgccgtcgacacgcacctcctccccaaggcgaatggccggttttcgagcgattcttggcaccacgccgagatggacagcgtcgagtacttcaacctcgcggacctatgggagcagtactatgagtggagcgcgtacggggctggaactacggtgcagctgtatggaggggaaagagtagtccaatactatgttccctacttgtcagggatacagctatataccaacaaagcccagactgcatccaggagttttggtgaagataatggcatggactattggagcgatgatgaggacaatgagaagatgtcaagatcttggagttcaacatctgaagactcattatttaactgtgatgcaataagtggcaatagaaaacgccacgggcacatgtattttgagttcttcgaggtttgctctccttatggaaggattccactcattgacaaggtgtatgaactatcccagagctatcctgggttgacatccctgagaagtgttgacctttcgcctgctagttggatgtcagttgcctggtatcccatctaccatattccctaccagcgcaatgtgaaggacttatctgcatgcttcctaacttatcataccatttcctcttcatttcaagattacgcgctcgagagcatggccaacgggaagcgaaacgacgagacggagaagaaggtcagcaagactcatcttgctccgttcgggctcgcggcgcacaagctgcagggttctctctggaccaacccgagaacaggggaccgtgacaggatggtctccctcttcggcgccgcggattcctggctcaagcagctcggagtccagcaccatgactacaactacttcatcactcaccccatgtgatctgaacagctgatctgtgtcatctgagaagagtaggttgcaacttgcaaagaaaccccatggctgcagactttggagaggaggcatcagatttttacttaccccagcgacaatggtagcaaacgttttaccgttttgtcaaaatgacactgacatttgccggatagagttttataccgcttgagacttgagacttgagagtttacctgcagctgaatatataccgaatatatcaggacttataggttttgtgtttttcttggctgaagatgtaaaccgaccgtgtacagaaagttttggaactattttgatatccaatatatgtcgtggttggaattggattcatactgtaaaaaaaaaaaaaaaaaaa

SEQ ID NO: 9078 - DNA, 589 bp, Oryza sativa
  unsure (1)..(589): unsure at all n locations
  Clone ID: PAT_MRT4530_15528C.1
cgggctgcaggaattcggcacgagggtttttcttttgccccagttcttatatgtttttttcttttccatagatgtgtcttatgtacaaaggaactatgagggtgctacttatactactgcatgactttcctgaatttctgtgcaattaccacttcagtttctgtgacatgattccttccagttgcattcaaatgcgcaatgtcattcttgatgctcatccacaagacatgagagtggtagatccagctagtcctaatttgaagattgatctgttaccggaaatttcaatggctccacaaatcatgtcggatgttgagggtgctctgaaatcaaagctgatgaagactgaggttgatgagtacttcaagaaatcagaaggctctttgtttcttagtgatctgaagcaaaagttattgctgccacaaaatgaaactagtgttgccgggacacgctacaatgttcctctcattaattcgcttgttctctatgtcggtatccaangtttgcaacagcaacaaacggagtctagtgcatctggtccagcaatccatactggccacatggatatttcagaactcttatggcagac

SEQ ID NO: 9079 - DNA, 2672 bp, Oryza sativa
  Clone ID: PAT_MRT4530_15529C.1
atgatcaccggcggccagagctacgtctccgcgccgccggccttctcggccgacgggcgtctcctcctcgcctgcaccggccgcaccgtctccgtcttcagcgcctccaccggcatgctggtgtcggagctggaggggcacgagggggacgtcacggcggtggtggtggcgccgccgccggtggcggcggcggcgaagctcgcgagctactgctggacggcggggcttgacgggtttctggtttactgggacttcgcggcggcggagctggtgcggaaggtccaggtcggcctccccgtgcactccatggtcattcctaacatagccagaatatcgagaggagctgaaatttacacgccgtttgcattcgtctctgttgaagacaccagtaagccatctaatgagaaattgcgcgggcagttgcgaatttatgacttaaccaaagggcgtcaagtgggtagtcttctggctgagacccgtaaaccggaaatgattgttgcaagtagctctggtgaatttttgggtattacaaataagagaaagctccatgtatggaggataccaacaaaaaatttcaagcccgacaagataatgctgggaaagcttagctacaaaaaaaacttgaggacactggttttgcatctaagtgagagtatggttgctagcattgattgaacgggacgaatacttatctggagcgattttggaaatgcaccgtttactggattaatggactcaatatctgaactaaatgaagccagggctgctgtaaggggtagtggtgattcagaaactgtcactacatgtcattagagtacaaacggagtgtcaggtacaacaaaccaatttcgtcttcaaaaaatgccctacatggaggtcatggaattttctgctggactaaatttagatataacctcaccaaatctggatggttttaatcgagatgtttatggatttgattacagtaacaaacttgttgctgtgccaacagaagattattgcatacagttctacgatttatttgagaatactgaagtttcagaggtgcaagtttgtgagaggaactttcaccctgttgatgatatcacaatgtacatttccttagtttcattgtcaattgatggtaagtttatgtgcaccattgatgtcaagcttcctgaagaagaattaggtgggcttgttacattgaaattttggaaccaagggtctcgtgctggacaatattttttgtccactgtcatttatgagccgcacagcgatgctggaatttctgctattgctttccgccctggaaaaaacatggctgtgagctcttcatttggtggcaactttaaggtttgggtccaaagtatgctttcacaaccaagtgatgaaaaaaatcaatctggttggagatgccaatccgtcggctcatacaagaataaacctatgacagccgcaactttctcaagcgatggatctgttcttgcggttgcagctgagaatgtcgtcacattgtgggatcctgataataacacacttgttggtgtgattgcagaggcactatcgcccatcacaaaactttcgttcattgggacatcaccatttttgatgtctctatctcagagctccaaaccacaggttgccatgtggaatgttccaaatctttccatgcaatggtcttacagcctctttgcagaagctgcgtgttgctcgtcaagtagaagtgagtttgcagttcttgctcttctaagctgtcctgatggagaaacactggcagagcaagatggggtgatactacttttcgatgcagaaaatccaaagcctgtttcttcctggtcagtaaagaaggcaaggggaggcagcgttgcttttttgaagggtgattcctctttggatgcaaacagaaaagacaggatagatggagaggcatcatcgctggtttatgtcaacggttctcatgagtatgttatatttgatccccgaagcaatgaagaattgcatattggcaagagtgcacacaaaaatattcaaactgaggagcctggaccaattggttatgcttctatttttggagaacttccgaaactggagtcaaagaaagatgttccagaaattctatttataccgtcagagagaccttgggagactatattcagtggatcaactcatgttcttccgcctctcacaaagttatgtcctgcattcttggcatcattgcttgagaagagaccagttgcaaatgagtgagaaagtgccgaagttttgttccgtcatacaatgcaacaaggaaccctgctagttacaaatggcattgcacatgaaatccttatgactagtgctgcccgaagctcgtccaatactgctgaagctggttgtgggcattgattatctgtcagctcagctcacaagagaacacatgcgatgatggctacagcaacgctgttgggtgaatgagccaccctacctctttttgtaggtgatatctagtgatctatcttcagatcctagcaaattttgtttccataggctaatctgtaattctgatagcaaaaactagctctttttggtgaaaatgtaacgcgctaagatatccagtaacacggtgagtgaatgatgctgttttactgactctgaatgaagtgtgtgttgatctggtaaactgaaaactcgatgcttccctcagagtttcc

SEQ ID NO: 9080 - DNA, 384 bp, Oryza sativa
  Clone ID: PAT_MRT4530_1552C.1
atggcctcgccctcacctcgctctcctctctgctcgatgagaggcgactcaagcgctcgcccacgtgtccccctgggtgctgcgccctccgccgctcccaactcggcggtggtggccctcattggaggtgccggccgacgaacaggatctgcgcaatgggagaggaggacgacgtcgggcagcgcaactggagaggaagacaacattagacggcgccggcttgtagatgaagcgtgccgccctctccccgtcggtcgctgcaccaatcccaacgctcgcttcccaccgaggacgggcttgaacatggcggcggcgcggccagtcgaggaccgcccgtggtcggagcagccgctactggagccgtgcaagcagcgccgccgctga

SEQ ID NO: 9081 - DNA, 328 bp, Oryza sativa
  Clone ID: PAT_MRT4530_15530C.1
ggacaagcaccaagtatgttttttcagccatttttaaaactgctacaagggggcgcgaggaacacataactcggggggtttgtgacacttcacactaactggagtgtcgtgaacgaggtaagaacaaaacaggcagtggcggacctaccctcttcatttccacggaaattttacccatttggaatccatggaaaccgagccttccctcccggcgaacaggggccaccgtggtccgaggagaaaaatggtcattgggggcttataatacctatcgcatcccggcggccttgaagggggcgagcagattgtcctggcgggtgttgaggag

SEQ ID NO: 9082 - DNA, 558 bp, Oryza sativa
  Clone ID: PAT_MRT4530_15531C.1
ccccgggctgcaggaattcggcacgaggctctcgctgcctcccgcccgcccgccctgcgggaagtcggcgcgagggagagaagggagagagggaggaggaaggaggactgacatgtgggccccacatgtcagtgggcccacattctttttgtgtgaatgactaatgggtcccactcatattttttaattcaactgccacgtaagtgccacgtcaaagccacgtacaacgaagactcggtcaatatcgccacgtaggcgccacgtcagcgaaaccgctctccaaaaccgcccagggagtcaaattgaatcggttttaagagtttgggggttaagatatttggttttgtggtttagggccacggataagatttcgataccttttgagggtcgcaaagtgaacttattcctacagtgaaagggagatgcggcccattacgagtttacgacatggcccaatcacacgcggggaaagttgcgtgagggacttctcatgcgtacgagccgcgtcgcgtctccccccccctcccccaaggaccatgacacgtgggccatagcaac

SEQ ID NO: 9083 - DNA, 481 bp, Oryza sativa
  Clone ID: PAT_MRT4530_15532C.1
ggccccccatttcagagcccaccgaattccattcctcgcgattcctctcccctcgcctcctcgtcctccccctcctaggacatagacggaatactgaaatgttttgaaaacaaaatagctggtgataaagtactatatatgattttgtgcgttctggaccaaaaacaaaaaaaaaaaaagaaaaaaaaaaatagagaaaaatcatcagtccatcaccaacaaacaaaagacgaaaagaaacatatacacttctagtgattgtctgattgatcatcaatgggtagcaaggacgtcttcttcgccgcgccgctcatgccgcccatggtggacatctccggcgcgcagctgagcgagtctcagatgaggttcagggacaagcagtgccaccggcaggtgcaggacaccccgctgaacacgtgccgctaggtgctcgaccggaacttcaccgcccgggaaaggttccagccgatgttcccccccc

SEQ ID NO: 9084 - DNA, 333 bp, Oryza sativa
  Clone ID: PAT_MRT4530_15533C.1
atgaagttcaatgtcgtggaacagaggcagattgcgtgccacccgcatagccgccgcgccattgcatctcgccgtgccacccgcacggccaccacgagccccagccggacgcaccctacacggtgtcgccacgagccactgcagccgccgccgcgccactacgcctcgccgtgccacccgcatagccgccgcacccgcgctggacctccgctcgccgcctcgccttgcagtaccgcctgcacggccgtcgcgctcgtggcggcccgccgcgcgcccccgcgccgctcccgggacggagcggccgcgatagcatcagtgcagcaggccggctga

SEQ ID NO: 9085 - DNA, 279 bp, Oryza sativa
  Clone ID: PAT_MRT4530_15534C.1
atggaggagagccacgccttcaccgccagccatagggtcaccctgttgattgcaggcagccagctatatgccgacaacctcaccaaagaagagagaatggagggagagagaggaaaagagagaaacgagggaggaatgatttggaagcaggggatgaggcacagtcgcacagagggtgttaggatagcaggacatgtggaaaagggaggacgtggcagccttgcaccttgcagggtgtcaaacatcgccgttttgtctaggaaaaatgatcattcatga

SEQ ID NO: 9086 - DNA, 267 bp, Oryza sativa
  unsure (1)..(267): unsure at all n locations
  Clone ID: PAT_MRT4530_15535C.1
tttttaatatcaagccaangggagacaaaatgcacaggggattatttaaaagaaaggggggcacaccagccatgaactacaggctacagatcccgcacttacacaagttacgatactacgagatcatttggcgcagggcaaaagagagcggaaatcttggcgcaacacgtacggagagagagtgcgccgggaatacacacagacactcacttcgggtggcgctgatagtggccaacctagcaagcggaggggaagaagaccatgagg

SEQ ID NO: 9087 - DNA, 382 bp, Oryza sativa
  unsure (1)..(382): unsure at all n locations
  Clone ID: PAT_MRT4530_15536C.1
gagaaaagacaacacaaaacagaagatcaaattgaaaaacaacgaaaatatccatcatgaaacgcaggttactcaacaacctaaaattattnnngtcagtctggaaatgcaggttaataatcactaatttcatcaacataaagtttagacccaatatgtaactgattagtgccttaaaaaaatccagtaaaaaccagtgattcaagacagcagaaacaagaaaatgccatatcttaatttggcacaggtaagttaaaaatgtgtgagaacataaagttttgtgctcattttagtatcttctgctnnaactccaaatcatagtcaagtaaatcaannnngnaccgttgtaagcaacataaacaccaactgactggatatnnta

SEQ ID NO: 9088 - DNA, 715 bp, Oryza sativa
  Clone ID: PAT_MRT4530_15537C.1
atggcatgggcgttgttgctctgcctcgccgccgccgccgcagcggtggctgctgctccaccgcactcccagtgcctcgacaacctgccggacttgacagccggcggaggtgaggccggcgtggtcgtccatgacctggcaggcttcgaggcctatgtcactggtgccgtccattccaccaaggttgtcctccttgcctccgtcggtttcggtcgtctagcgcccttgcgacggaaaattgctgacaaagttggtcaagcaggatattatgtcgctgtacctgatttcttccacggagatccttacacactagacctgaaccttacggaatggttcagcaaacattctccggtaaaagcagctgaagatgctaaagcaatcttttctgatctaagaaagaaagggatatctgttatttggagttggaggttactgttggggtgggaagtttgccgtggaggtagcaaaaaccaacgaggttgaagcgattgtcaccacccatcctggattggtgactgtcgatgacattaaagaggtcaaatgccccatcgagatcattggagctcagaacgacacactgacaccaccaaaactagtgtaccagtatgttcaggccttgcgtcatagaactgatcggattgattactttgccaaggtcttccaaggagtgaaccatggatttgcttgcagatataacgccagcaacccattcgag

SEQ ID NO: 9089 - DNA, 1915 bp, Oryza sativa
  unsure (1)..(1915): unsure at all n locations
  Clone ID: PAT_MRT4530_15538C.1
atggcggccgccaagtccgtcgagcggctcgggcagcggcgggtggtgccggccgagccgacgccggccggtcccctccgtctgtcgtggctcgaccgctaccctacccagatggcgctgatcgagtcgctccacgtgttcaagccggctctcgatagggcgatcggcggcgatgacgtggcggttgggccggcccgcacgatcgagcgggccttggcgagggccttggtgcattactaccccctcgcgggccggctcgccttctccgactccggcgaggtgtgcgtggactgcggcgacgccggcgtgtggttcacggaggcggaggcgagctgcagcctcgaggacgtggactacctcgagtacccgatgatggtgcccaaggacgagctgctcccgccgacgccggcgggggaggaggagcgcgagctcgtgctgctcgtccaggtcaccgcgttcgcgtgcggcggcttcgtcgtcgggttccggttcagccacgcggtggcggacggccccggcgcagcgcagttcatggccgccgtcggcgagctcgcccgcggcgcgggcggcgtgtccgtcgatcccgtgtggggccgcgacgcgatcccggaccccgccgccgccgtcatcggcagcctccccgaccccgccggcgccaagcgcctcgagtacctcgccgtcgacatctccgccgactacatcaaccacttcaagaaccagtacaacgcggaggcgcacgccgccgccgcgggcgtcgccaggtgctcggcgttcgaggtgctgatcgccaaggcgtggcggagccggacgcgcgcggcggggttcgagcccgacaccaccgtcaacctctgcttcgccatgaacgcgcgccccctcctccacgcctccctcccgcgcggcggcgccgggttctacggcaactgctactacatcatgcgcgtctccgcccccgccgggaaggtggcgggctcgtcggtgacggaggtggtgaagatcatcaaggacgggaagcggcggatgccgtcggagttctcccggtgggccgccggcgacatggccggcggcgacccgtaccagatcacctccgactaccggacgctgctggtgtcggactggacccggctgggcttcgccgaggtggactacgggtggggcccaccggcccacgtcgtgccactgacgaacctggactacatcgccacgtgcatcctcgtcaggccctgggcccacaagcccggggcccggctcatcacccagtgcgtcacccccgaccgcgtcgccgccttccacgagggcctcctcgacctgaactgacgccgccggcggcgaacctggactcgccggaggccgggaggatgggtggattagcgtcgcgtgattaggtgggggtgattactactgatgattagatgggtggtcgttgtgtgattagtgggggttggtaactgaattggattggattagttattaatacggaagctcgtgggtggagcgtggtgtgggtgtgggtgatgtaagcctgaaaataagcagctcaactctaatgaatcgggggtgtttttggttcatccattcataaagaaaggtgaaaagtacatattgatattgagggtacaggtagatggtagtagttgttggcattattagtgggattggtattggattcctttggtgttgtttggtcaagtgtatactggagaacagctactacatgctgggtattccttttatttttttttcttttttttgggatcaaaagctggaattggtgggaagccaccaactaaccagtatgtcccccttgataagtgtaccatatattgtattcaatttttatcttattttcagaatggtatatataagctggcaaggtgtacagcctctttagttgtgnnnnnnnnnnnnnnnnnnannn

SEQ ID NO: 9090 - DNA, 342 bp, Oryza sativa
  Clone ID: PAT_MRT4530_15539C.1
atgtgcagcagctgcgagtgcgtcgcgtggtgctcagcaccttcagcaacttgcagaaagacgctgttcttcctcaagagcatcagccatcacctccgcttcggcagccactacctcttcgtacgtcttggagcggatcgaggagtaaccggcgccggaatcgcccggctgctcgatgacggcgccatcggcgagagcttgtggagcaagccgacgtcgaacaccgggacgtcgaggcctcgccgcagtgccgcgagttcgtcgtgctcgagcgaatcgaaggtgttgaggattagccctgacgacgtcctcgccaccgcgacggcctgggatactagctaa

SEQ ID NO: 9091 - DNA, 3180 bp, Oryza sativa
  Clone ID: PAT_MRT4530_1553C.1
atgacgcaatctgatgaaccccagccggaggcatccgtgtccaagatagaggaacctctaacaatcgagccacactctgaaccatccttttctgctagctcgattgatgagaaggttcctgagcagccatccgtcgagaatgaagaaattcagactccggattgtgccgcaattctatttagtgacggttttgacgaagactatgccaacaccctgaactattttagcaagaagaaaccactcgtccctttgccgcctcccgatcctatggaacttgggttcctaagggaaaccgttcgggaattaacatccataatgagcgacgaatggctaagggaggcagagttttcatccgaagtaattcggataaataccgctccacgaatcattcattgccatctggaagggaacgatgttggtattctctatagtccaaccgtcggggccaacctcgtttctaagtcttttgcattcgcttatttaagcgacaaggcagtgaccccgacgaacaaattcttcaagcacccgaacggaaatatgattgaaggatttgggattgtgcaaaatgtgcctgtctgctttgaagacaaggaggcgatcttggatttccacgtctttgagatccaagactttgatatcctaattgggctacccattgagcaacatctcataaacacaccccgattagacagcctcaaaataacactaggagggaataaattttcagttccattctcacgagcaaggatcgccttgaccgaccctctcacagaaattgagtgtatgatgtctatcttctcggacatgattgaggacattatggaagtcttcatggttgacttctctgtctatggaaagaccttcggtcactatcaacagaatttagaaaaagtcttacaacgatgccaagagaaagacctggtacttaattggggaaagtgccagttcatggtccgtgaagggatagttcttggccatcgagtgtccgaacgaggaatcgaagttgatcgtgcaaaaatcgatgtaatagatcagcttcctcctcatgtgaatatcaaggggattcacagattctcgggacacgccggcttttatggaaggttcatcaaggacttttctacaatcgcccgacctctaaccaatctgctggccaaggatgcgccctttgagttcgacgacgcatgcctgaaatcatttgaaatcctcaaaaaggcactcgtctctgctccaatcattcaacctcctaattggactctgcccttcgagatcatgtgtgatgcaagcgatttcgctgttggtgcggtcttgggccaaaccaaggataaaaagcatcatgcaatctgttacgctagcaaaactctaaccgaagatcagttaaattatgcaactaccgaaaaagagctgctcgcggttgtttttgctaccgacaagtttagatcttacttggaacaaccgataaatgacttcttgagagattacatgctgatgacggttcgcgactccaacccgtggtatgcaaccatagtgaattacatggtatccaaatacataccaccaggggaaaatcaacgaaatttgaagtacgaaagtcaccgtcatatatgggatgagccatacctatacagggtctgcaccgatggcttactaagaagatgtgtgccgactgaagaaggacttaagatcataaagcgatgccatgcctcaccctatggtggccattatggtgcattcggcacccaggattcaaaagaattcgtcagaagatgcacaagctgccagaggcaaggaggaatcactactcgtgatgcaatgcccctcacatacaatttgcaagtcgaaatattcgatgtctggggtatagacttaatggaacctttccctaagtcccgtaactgcgagtacattctggtggcagtcgactatctctccaagtgggttgaggctatgccgtgcaacaccgtggatgcgaagcatgccaaaaagatgttcacagaaatcatcttcccaagatttggtacccctaggatggtcataagtgacagaggttctcacttcatcgacaaaaccttccgagacctcctacgagatatgggagccaaacacaatgtggccattccttaccatccacaaaccaagggtcaaacagaaacatcgaataaacaaatcaagaatattctgcaaaagacggtcaacaatatgggaacaggatggaaggatagattgccagacgcactgtgggcataccggacagcatacaagacacccattggaatgtgcccctatcagatagtctacgggaaatcatgccgactccctgtagaactcgagtatagagcatattgggccattaggaactggaatatggactttgaaggagcaggagaatggagaaaaatgcaaattgctgaacttgaagaatggagagagaaggcttatcacaacacgaacatatacaaagaaaggacgaagcactggcatgataaaaggataaaaatcaagaaattcaagccagaagacaaagtattgatgttcaactccagggttaagcttttcggccacgaaaaattgcgcagtaaatgggaaggaccgttcgacatcatagacacctcttcgcacggggcaatcacactccgctacgactcaggtaatatattcaaggatgatgagaagatcgctccgcctcccgccgagcaatatgtgggcaccctgttcaccaaggcaggggatgaagtgctccacaaatatatcacacccaccgctactccatccactccgaaggagtaccggttttgcattcagggagtgcgaactcccggcggtgggtatggtaagggtttacttcagcctttgacggcgtcggagaaggagggggcagcggaatccagaagccctccacctatgaaggtgaagcgtcacttgatgccccctccaattgtaagggcagccggccaattccaagaagataaagtgaaatcaccggagccctcggttcataagctcgccgcccaagtgaagaaactccgcaaggagaacatagagcttagggatcgcaacacggaactaggggtagaacttgctgaacttaggaataattttgatacccttagtcgcggtttgtgcgctaaaatcaagtgtgcatttgaagaaacgggaaaggagaataagtattatgctaattag

SEQ ID NO: 9092 - DNA, 227 bp, Oryza sativa
  Clone ID: PAT_MRT4530_15540C.1
aaaaagacccttttgaaggatggcccttaccttcaaaactggtattgtaaaaaacttttacagggcatagccaccacccaattggttgcaatttaattattcatttatttaggtattccttatccgcattggccacttaagaagatttccccaccttattaacgttctggtagcttttggattgggggggagggaatgcccccaactcattctctatggtatgcttg

SEQ ID NO: 9093 - DNA, 195 bp, Oryza sativa
  Clone ID: PAT_MRT4530_15541C.1
gcggattaatcgccatatgcgcgggcaccagggggccggggcacaccgacgcctgcacccacgctgcacgccgcccgtgactccgcccaccggcgttctgcgcccctgcgcccgggcgattactccttctccttctgtccgtcccggccgtcgtccgggggcttgttggccgcttcccttcttgggccttgactt

SEQ ID NO: 9094 - DNA, 388 bp, Oryza sativa
  Clone ID: PAT_MRT4530_15542C.1
gtcaatgatctggattgaatataaatgagagatcactgaaagtaggtttacatcagtatcatgctgggtcccatactcccttgcgccacatggtcaacttgcgcggcttacatccggagaaaagcattgaccataccagagcaagtgtaaatctacctaactccatccagagagctagcattgtcagctttacaacacggacgaaccacaggaagttcaacggttggaaatttggaatgagttgctgcacgatttagctcgctttggagtttgtacgaattctccacgcgaaacaatttaactccttcgtggagcccaaccattaaatggatgtaccagatttttctttgaaaacatacttaataaataaaaaaaaaaaaaaaaaaaa

SEQ ID NO: 9095 - DNA, 294 bp, Oryza sativa
  Clone ID: PAT_MRT4530_15543C.1
atgccatcctgcatcgtcgcttcctacgtcacctacacgagccaccgccgttcttgcgtacccacgccgacatcatgtgtagccactccctacctgtctccattgcccgcccataccaccgccgtcggtgtggggattgggggccggtctgacctcaggtatgtgggcggtctgaccgtcagggtcgagtccgagtctgttttcatcgggtcgcgggtttccttgctcgggaaggctatgtttcgtgtttactttggtttatatcctgagttagacatggataagggtctgtag

SEQ ID NO: 9096 - DNA, 315 bp, Oryza sativa
  Clone ID: PAT_MRT4530_15544C.1
tttttgtttttttaatttttttgtttttttacttttttttttttttttgggcacagccaaaatggttttatttatttgtagggccacaaagatcccaacagagggtccaaggataaacaaccaagttccctccaccctggggtgtttcttacattaaaaaaaaggggatagctttggacctccttatccaaaataagcgtaacacattggccataaaaattaaaaaccggtgcttccaccctacaaggggcttaacagtcaggagcaaccaaatatttcccaaaatttgaaggatttcacattttagcacaccgc

SEQ ID NO: 9097 - DNA, 767 bp, Oryza sativa
  Clone ID: PAT_MRT4530_15545C.1
gcagcctgcagctccttgctgttcctccttccctcgacactgcgaatacggagggggtgtcggcgcggccggacgcggcttcgagcgccgcggcaagcggcaggaggcagctcgggtgtggtggtggaaaggcgatttcggtggcgatttggggaagtgtagtggcggccgatgtgcggcaaggggcggtggagctagtggtggcggcggcgcagcgcggcgacgactatagcggcggcggcgcgcggctggacgacgccggcgggcggtggagctcgggcgcgcgtgcggcggcggctagggcggcgaggagcgacggccggagctcgccggaaagcggtgacgcacgggctcggcgtggggtgagcgggagaacgcgcggggagctcgggaaacgagagaggaggctgcggggagtgtttatatgggcttggagtggcgagatcgtggctgtggagggtggaatcggccggcaacggccgtcggagtggggcggcatcgtgggcgcgtggaggaggtggtgggggtcggttccaccacttgggcaagaaggggggtggcggggtggcgcggaatcggcggcgcgtgaggcggcaatggcggcatgacggttggaattggggagccggaggtaggaggaggacctgacaagtgggtccgacggtcccacttgtcggcgtgagagggagagggatgagggggttaggtgaactttggagggagccggtcgtcttcttcctcccgccggcctcctctctctcccataa

SEQ ID NO: 9098 - DNA, 731 bp, Oryza sativa
  Clone ID: PAT_MRT4530_15546C.1
cgaagcagaaaaggcggagctggacaatcagattgctgccctggaagccgaggcacgcatactggatcaggaagaaaacgagttctggaagagcagaaacgccttcaacacgaccttgactgaatttcaaaacgagcgcgatgccctggccactcggtacgcccacgatgcacaggtgctcaatcaactacagagaagaagcgtctacaacgacaccttcaacatcacgcacgacaaccactttgccaccatcaacggccttcgcctcggccgcctaccaaatccctacgtcgactggcccgaaatcaacgcggcatggggccaaacctgtctcctactcgctacgctcgcagaacgcctaggctacaaattcgacggctacgaactctgtcccatgggctccacatccaccatcacgcgcatagaatctaaaggcggaggtgcttccgtcgtcgctgaaccaactaccactagaccgcaacaagcatcctccaccgccacgactgcatcttcaccacagatatcgaaacagcgcctagagttgtattcctcgggcgacttccccatcaacttcggcttcctacaccgcaaattcgacgctgcgatggtggcgtttctcgagtgtctaagacaactcggcgactttgtcgagcatcaccatcaggccccttcgagcgctgctagcggcagtggaggcgtcaggatgccgtatgaatccgtaagatcgtatc

SEQ ID NO: 9099 - DNA, 1143 bp, Oryza sativa
  Clone ID: PAT_MRT4530_15547C.1
atggtgactcgcgaagagggaggggtggccgacgtacagctcgacactgcgaatacggagggggtgtcggcgcggccggacgcggctccgagcgccgcggcaagcggcaggaggcagctcgggtgtggtggtggaaaggcgatttcggtggcgatttggggaagtgtagtggcggccgatgtgcggcaaggggcggtggagctagtggtggcggcggcgcatcgcggcgacgactatagcggcggcggcgcgcggctggacgacgccggcgggcggtggagctcgggcgcgcggtgcggcagtgtttctgaggtggagaggggaaaaggaataggggccggggtgcggcacagcacggcgatgccgatggtggtggcggcgcagtgcggcggcggctagggcggcgaggagcgacggccggagctcgccggaaagcggtgacgcacgggctcggcgtggggtgagcgggagaacgcgcggggagctcgggaaacgagagaggaggctgcggggagtgtttatatgggcttggagtggcgagatcgtggctgtggagggtggaatcggccggcaacggccgtcggagtggggcggcatcgtgggcgcgtggcggggcaaaccggcgccgtatttttgggaagagagggggaagaggtggaggaggtggtgggggtcggttccaccacttgggcaagaaggggggtggcggggtggcgcggaatcggcggcgcgtgaggcggcaatggcggcatgacggttggaattggggagccggaggtaggaggaggacctgacaagtgggtccgacggtcccacttgtcggcgtgagagggagagggatgagggggttaggtgaactttggagggagaggggagcgagcgggctgcgggaggaggaggtggagggaagcccaacgggctgcgggaggagtcggctctctctcttgcctataaaatggggcctaattgttgttatttcttaacgacattactagaaatataatccccggcaatggcgcagaaatacttctggtatattatggttacagagttcatccgtaagcgcacggatataccattgtagcattttacccgagagtattccaagggtatcgtatttattttatcccgtgggaagatcat

SEQ ID NO: 9100 - DNA, 402 bp, Oryza sativa
  Clone ID: PAT_MRT4530_15548C.1
atggtgaggagacgcgacgatgacggtggcggcgacggcaatgcaagacagcaagagggaaagggaggagaggagataggcacctccaccttggatggcggccgccagcggcagcactattccctacagccctggccgcacgtcgccggtactgtggtgcccaggccccagaaccccagatctagtccggccgtgcggcgggcgtgcatccttgatcgggtggttcactggttctggggccgttccccgggttgcctccccggcatgtgcttgccgcactgcagcagcagccgcatcaccatgatgtattcacttgctgaatttgaaggcaatcaacagcaggtcggccagtctgaccgccgcaacacttgcggtccgaccagtggcactcagccggtctga

SEQ ID NO: 9101 - DNA, 553 bp, Oryza sativa
  Clone ID: PAT_MRT4530_15549C.1
atcttcttccttcacttttaagaaaacatcccgcttaatgaatgtgactatacaatcatccaaaagctcatcacctatcttttttctcaaccatcattagtaaatgcatcaattctactataatttaatatcacaatgcacaggagtaaagagttcaaaatttcaaaactgaaaattgaaaaaaagtaaaaaaaatagaaaacctatttttttttttggcttggtgcaggactgcatcactgcgggcgggcgttggcggcacacgctgcaggtctgcagcagtgcgctagtgcggcactgcggctgcagctgcggcggcagccggccaaggtgtcgacgcgcgcgcgtggcccggtggcgctcgctctcacgatctgatcagatcgctgatcgcgtcggcgtcgcgactcgcgagggcgaggaggagagatacagagagtcctgtgacggcgcgacgcttcggtttcttaattccgatcgattagatacaccatacacgcgcgtgtagggtggggcctgtggtaatctaatggtttaaaatattaggtacacc

SEQ ID NO: 9102 - DNA, 2883 bp, Oryza sativa
  Clone ID: PAT_MRT4530_1554C.1
tggcggtctgaccgagccgaggccggtttgaccggccaccccatgtcggtctgaccggctacggctgtggggcccaatgacatccctacaacggctagaaaactagccattgtagagtagcacggtctgaccgaccacatacctccggtcagaccggcagagcacagaggagtattgtggatataggctttgctatcaccgacacgcccttgacgttgattgatcaccggaacctccaactcaatgcccaagccatgaatgctttgttcaactctttgagccaaaagtagttcgatagagtgagcaaccttgagatcgcatatgagatttggaacaagttggcggagatccatgaggccagaagcgagtacaaggatgccaagcttcatttcctcaagatccaatatgagacattctccatgttgcctcatgagagtgtgaatgacatgtatgggaggctatccgaatgggtaaggagcaaaaagattataccatgccaatgggtaaagaactctagaaaagaggagaggtatgactttgatatcactaaggctgacaagatttttgacttgttactccggaagaagcagattcaacttcctactggtcacacaattccatcggctgaggaattgggcaagaaaagatattgcaagtggcataattctgggtctcatacgactaatgattgcaaggtcttcaggcagcagatccaagcggctattgaagggggcaaaatcaaatttgatgactctaagaggccgatgaaggttgatggcaatcctttcctgttaatatggtgcatacagctggccgaacaaccgataggggtcgtgcaagaggttttcaggtaaattcggctaagattatcaacaaatatcagaggaggtatgaaaagtagcaggagaagcattatgaagaagatgacgatggctttgatcctcattgggagaagggttcaaagattgaggagcagggagcactttcaggaagtcgagcaggaaatcaaccatcggttgaagaagacaaagccgaagcaggagtggcgtgttaagaatcaagttcctgtagctgaggaagccacagccgatgaagcaaaaaggttggccaaaggaaaaagtgttgtagctgcttcggtcatcatggttttcacattgcctgccgaatctgggattaagcaagaagatattgacgaagttgaagaagaatcggctaagttgattttttcaccagagcaggcagttttcgagaagccagaggggacggagaatcggcatcttaagccattgtatataaatggttatgtcaatgggaagccgatgtccaaggtgatggtcgatggtggggctgcagtaaatttgatgccttacactacgtttaggaagttgggcagaaatgctgaagatctcatcaagacaaacatggtgctcatttagatgtcctggtgcaatcggcttatttgaatgggttgtgatgactttcggcttgaagagtgcaggagctacatatcaacgagccatgaattatatataccatgatctaatcggctggttggttgaggtccacattgatgatgtggttgttaaatctaaggaaatagaagaccatatagctgatttaaggaaagtctttgagagaaccagaaaatatggcctgaagatgaacccgacaaaatgtgcttttggtgtatcggctggccagtttttgagatttcttgttcatgagagggggatcgaggtgactcagaggagtttaattaatattcgcaaaataataaatttttacagtggtggatagttcctctcaaaagaatagaattctacgcagcggaataaaggacataagtttatattggtggcgaccgattatttcaccaaatgggtagaggtgattcctttgaagaaggttgattatggggatgcgatacagtttgtttaggagcatgtaatctaccgatttggtattcctaaaacaattacaaccgatcaaggttcgatctttgtgtccgatgagtttgttcagtttgccgatagcatgggtatcaaattattgaattcttcaccatattatgcacaagctaacgggtaagccgaggcatctaacaaaagcttgattaagttgattaaaaggaagatttctgattatcctcgcctcgtgttttatgtcaacaaagccataaacaccgcttgccatgcaaccaataggctttatttgcatcgtctcttgaaaaagacttcctatgagctaattgttgggaggaagccaaatgttgcctattttcgagtttttggttgcaagtgttatatttatcgaaagggtgttagactaaccaaatttgaaagtcggtgttgatgaagggtttcttctaggttatgcctcaaatagcaaggcataccgggtctacaataagaacaaaggtattgtggaagaaaccgccgatgttcaatttgatgagactaatggctcccaagaggggcacgagaatttggatgatgtaggtgatgaaggcttgatgagagctatgaagaacatgtctattggagatgtcaagcctattgaactcaacaactttgcaagaaacaaggtgtggactttggttgaaagacctagagaccacaatgtcatagggacaaagtgggtctttaggaacaaacaagatgagaacgggttggtggtgagaaacaaggcaaggttggtggcacaaggtttcacacaagttgaaggtttggactttggtgaaacttttgcccccgtggcaagacttgaggctattcgcatccttcttgcatttgcatcatgctttgatataaaactatttcaaatggatgtgaaaagtgcttttctaaatggtgaaattgccgaacttgtctttgttgaacaact

SEQ ID NO: 9103 - DNA, 606 bp, Oryza sativa
  Clone ID: PAT_MRT4530_15550C.1
gcacgaggaaaatgcaggaacttgacatcatgcgtactgagtgatgagctgagcaaagttcagtcagaaaacagtatcgtttctgtactttttatagactttttcttaaatgaaattgatgcctcaaagttaaagttgtgctccgttgaactttcaagttcgatttctttctaggaaatccagtaaactgatccttttgacagtagcactagtgctacttttgtgggataaccgcttactttcacttcctttttttttttttgcatgtttcagtttctaaagtgtcaaccaagtccaattactggttatgacgtatagatatttggtagtaaggctttaataacacgcaactaataagactatatttcttcatccctgcatgcaaatggtgtgcctaatgtttgattcttagcagactggacttaatttcacaccatcctaattgacacacccattaatgaccgttagtaggtgcctttcaagaaacataaggatgatgtttgaagccatatggtgtaaataggtagtttggcataaatatttcgcgtgccagttcatccacctaaaaattcctgaatctgcccctcttatgcgatgtttctgcat

SEQ ID NO: 9104 - DNA, 521 bp, Oryza sativa
  Clone ID: PAT_MRT4530_15552C.1
ggcaggaaaacccatttttttttttgcaaacgggcccaaggggggggcacattaaacaaaacaaaagggggttccacgaggctacttgacaaaagcaaaaaacaaaacaagagtttaaaccccccgaaacagggaaaagggcctttaattatggattttaaaaacgaactaaaaccggaaaggaaggacatccgggcagccgattcccaaccccttggaaaaaatcggattttggagcaactcccttttttccatggaacacggatatttggagggggaaaccttcattttgattttaggaaccaaaacaccgcaattttaacaaaccttcctggaaaaaagggaaaccccctttaaataaacggccacttccataacacgcctaacaaatcccaccaagttgtcgccgggtgggaacccaaaaagggggaccttaaataggttctggggccggaaaccatcaggggcaaatgattcccaatctacaactggttgggcaccataaccctcctccctccggg

SEQ ID NO: 9105 - DNA, 642 bp, Oryza sativa
  Clone ID: PAT_MRT4530_15553C.1
atggcaaagctgcaggtcacatacacagtgtatccttcgtcaggcaagccagcacgcgtgggccgcatcatcgccgcctctgcttccggcgagcacggcggcggcctgaaggtgaggctcaccaccgtcctgtcgatcgcgtcgcggcgacggcgcggccgcgtcgtcgacgcactggagaggattcgccgcggcgagaggagaagaggagacagaaagcatcaggatcacgagctggaggatttcaagaagcgatcgactaaggtcgacggcggcttgcgcgtggtacctggtggcctcggcgacggtggcgccgtctgcggcggcggcggcggagcgcggcgacctcgagccctcggccagccggtagaaggcgtcgcggaggcatatccgcgtcgtcctcgccatctacaagacacaggagcagccatttttgtcaggagaggagagaatttgcggtgcccacagttcgccggcggcgaggatgccgaccatacctgcaccatcacctcctcgagctcctcgagcacagcttcttcgaatcccggcggcgaactccccggatcgcctctctccgtcgcgctcgctccagcctgcaacatgatcagctggcgggttctcagaaatcggagaacatttcgg

SEQ ID NO: 9106 - DNA, 2467 bp, Oryza sativa
  Clone ID: PAT_MRT4530_15554C.1
atggccacgccacgtggccatctccccgcctgcgtcgccgccgtcgcggcggcggcggcgctcctaacctccctcctaccgccgcccgtcgcgggccagcccctcggcaacttctgcggcgacagcggcaactacacggcgaacagcacctaccagggcaacatccggagcatctccgccaccctccccaagaacgcctcctcgtcccgcacgctcttcgccaccgccaccctcggcgccgtcccggacatcgtctacgcgctcgcgctctgccgcggcgacaccgccaacgccaccgcctgcgccggctgcgtcgccgccgcgttccaggacgcgcagcagctctgcccctacaacaaggacgccaccgtcttctacgacgcctgcgcgctccgcttctccaaccagaacttcctcgcctccaccaacggcgacaacaagttcctcatcctcatgaacacgcagaacgtgtccgcgccggccaaggtgttcgacgccgccgtgggcgtcctcatcaacgccaccgccgactacgcggcggcgaactcgtccaggcggttcggcacgggggaggaagggttcaacggcagcaagatttacgggctggcgcagtgcacgccggacatggcgacggccacctgccggagctgcctggggggaatcgtcgggatgatgcccaagtatttcagcgggaagcagggcggcagggttctcggactgcggtgcaactacaggtacgagatatatcctttcttcgacggggtctcgctgctgcagctcccggcggcatcactgggagcgccgccggcgccatctccggcggccgtaaacgtcacgccgccggccaccaccaccggtaccagacgacgagttgatataacacgtaagtgcactgtaattttgataaaaatatcgtttaatatgacatttgatatgatatggaacaccactggtagggttttagccattgcattgcctatagtcgctgcaatactggctgctgtagtaatttgcttttatatctggaagaggaagacggaacgagcaagaaagccatcaatagcagatccaacagacccagcggacatagaaagtattgattcacttattcatcatttttcattcccaagagtgacacagactcaaatatatactcggaatcacacccactaacttcccaatcgactgcctcgaccggtaggtgggagggatgtcagttaatgatgtgtcaattacagagcttgaaccaagataaggaaaccaaatccttcgaatttaagataagaaaatcattgacaacggtaatggatttgttacgttttagaaacaaacttcagggagaaggccataaacttgtaggagaagcattgaattctgagtgcatttctccattggctgagtcaatattttggttggtttttgtttgttcgaacaagccaacccttgtttatgattcagttttgaaaattggattggttgcacatccagtgacaaaaatttgttgttgaaggcgatcgctcgaggcttacaatatcttcacgaagattctcagctgaagataattcaccgggacctaaaagcaagtaatgttctgttagattccgattttaatcctaagatttcagattttggcttagcaaggctatttgggaatgatcaatcacaagacgtcacgaaccgtgttgtcggaacatatggatacatggcccctgagtacgctatgcgcgggcattactccatcaaatcagatgttttcagctttggcgttctgattttagaaatcgtcacgggaaggaaaaacaatgtctcctacgactccgagcaatcggttgatctcttaactttagtgtgggagcactggttggcaggaacagttgtggagcttgcggattcatccatggcggggcattgtcctggagaccagatcttgaagtgcgtccacatcggactcctgtgtgttcaagaagaccccacggagaggccaatgatgtcgatggtgaatgtgatgcttagcagcagcaccgtgtctttacaagctccatctaggccggcattttgcatccaaaagagtagtgtcaactcagattcgtactcggagccattccgtggagctaatcagtccacagtataggcgcctgccccgtggcgctgcccgctcctccttggccggcatttggcatcccaaagagtgagtgtgcaactcagattcgtactcggagcccattccgtggagctaatcactccacagacagatcgcctatgtgcccccaatgaggtgttcgatcatctgagcttgagcccagatgaaatgcccatgtgatgctgaattcatgattggaccttgttgggtttccaaaaaaaaaatctgatgtagggaaagacctacttcatatgtattattacacccatcagacgagagctaccttatgacccggtatattttctgtaaaaaaaaaaaaaaaaaaaa

SEQ ID NO: 9107 - DNA, 3942 bp, Oryza sativa
  Clone ID: PAT_MRT4530_15555C.1
atgtctcggaagcaagaaggcgtcgtagagagaggaggagatggcaaggtggtatgggacatggggagctcgctgtacgactcctacgagctggcctcgctgtgccgaatcctggacaggcacatcggcaccgacctgccgtcgttgcacggcgagccacggcaggaggggctcgccgccggagcgccgccgccgccgcctacggagaggaacgggcagcaggtcgtggtgctcagggacgaccgccgaggcaggaccgggaccggcaggaaggtgacgctgcgaacgctgttcagggcagcggcgtcatgggcgatcaggcagaggaaggcgcatgactgtgcctgtgttggcgcagctaccactggagcaatccaaccggttgtctctccgggccggccgaggctctttctgcctatatcaacaaaggtgcggccccgtacaggggttcaacgcttctcattccgttttacatggtatcagagccataccgatccaatccaatctcttgagcgcgacgccatggcgagttcgtcgaagaacaataccggcaaccccctagttggccagcccatatcagagaagctaggaaaatcaaatcacgccgtatggaaggcgcagattctggcgacaatccgaggtgcccgtttggaagggcatctcacaggagatgatcagccgctggctcccatccttcgccggaaagaaggagaaaaagaagttgtggtcagcaatccagaatatgaagaatgggttgcaactgatcaacaggtactcgcatatttactttcctccatgactaaagatctgcttgtccaagttgcaacctgtagaacagtagcgtcggcatggagtatgatccagggcatgttcgggtcaatgacccgagcacgaacaatcaacacgcgactctccctctccacactgcagaaaggtgacatgaacatcaccacgtacgtcggcaagatgcgtgccttggctgatgatctgatggctgttggcaaacctgttgatgatgatgagttgatcggctacatctttgccggtcttgatgatgagttcgaaccggtgatctcgaccatcgtcgggaggccggatccagtcaccattggagagacctatgctcagctaatcagctttgagcaaaggctcgcacatcgccggagtggagatcaatcttctgtgaactctgcaaaccgcagccgtggacaaccacaacgcggcggcagcaggagtggtggcgacagcaaccgcggccgaggagctccaagcaatggcgccaaccgcggaagaggaagaggcaaccctagcggtggccgagcaaatgcaggaggaggaactgacaatcgacccaagtgtcaactttgctacaaaaggggacacacagtacgtgattgctggtatcgatatgatgaaaattttgtcccagatgagagatttgcagggacggctgtgtcgtatggcgttgataccaactggtatcttgataccggcgccacagatcatgtcaccggcgagcttgacaagctaactgttcgtgacaagtaccatggcaatgatcaagttcacacggcaagtggtgcagaattatatcgtaaatttttctttataaaggatctggccacgaggagaactctgcttaggggtcgatgccacaaagggctttatgctcttccatctccatcctcgcaccaccatcaagtcaagcaagtttatggagtcaccaagcaatccttcgagcgatggcatagtcgtcttggtcatccttcctacactgttgtagagaagattggggtggtgaatatcagaaactccactctttctttaataaagttggcatcactcatcatgtatcgtgtcctcacactcatcaacagaatgggtccgcagaaagaaaacatcgtcacattgttgagagatgttgtttttgatgaaacacaatttccttttaccaaacttcatcccaatgctggggcaaagttaagggccgaaatagctctagtccctgaactagctgcttctttacctaggggtttgcagcaaatttcttctgtgattaatactcctgaaaatgctaatgtgtctaatgagaatatgcagcaagattctacatatgataatgaaccagaaacggagaccgacggtgcaccagacacggtctcagctaacgcgccagcagagtcctcgggatcgccgccgattaatgaaccagcttctccgttcggcgaatcggacagcgccacggcgtcccctgcatctgcacctgtcaactcggctccgcatccggacgctgcagcctcgggatcctctgcgccacgggggagtacaagtcagggaggaactccttcagtcgccacagatgatccacacccagccacgacagtgacaggacaggaggcacagcgcccgcgcactcggctgcaaagtggcatccgaaaagaaaaagtctacactgacggtacagtaaaatggggtatgttaacctctacagtcccaccgcaacaaggtagaaatgttattgattgcaagtgggtctataaaataaagagaaaacaagatggtagtctagacagatataaggctcgccttgttgcaaaaggatttaaacaaagatatgggatagattatgaagatactttcagtcctgttgtcaaggcagcaactattagaattattctgtccattgctgtgtctaggggatggtgcctaagacagttagatgttcagaatgcttttcttcatggtgttctagaagaagaggtttatatgaaacaaccaccagggtatgagaacccttccactcctgattatgtgtgtaagctagataaagctttgtatggattaaagcaagcgcctagggcatggtactctaggctaagtggcaagcttcatgaacttggcttcaaggggtctaaggcagatacatcactattcttttataataaatgtagcttgactatctttctgcttatttatgttgatgacattattgttgtaagttcaaggaaggaagcagtttcagctcttctccaggatcttcagaaggagtttgctttgaaagacttgggagatctacattacttccttggtatagaggtaacaaaaatcccgggtggaatacttatgtctcaagaaaaatatgcttctgatttactgaaaagagttaacatgagtgattgcaaatctgttgctacaccgttatctgctagtgaaaagttaattgctggtaagggtactattttaggacccaatgatgctactcaatatagaagcatagttggggctttacaatatttaactctgactagaccagatattgctttctcagtaaacaaagtgtgtcagttcttacataatcccactacagaacattgggcagcagttaaaagaattttaaggtatattaaacaatgcactggacttggtcttaggatatgcaagtcttcttctatgatagtaagtggatactctgatgctgattgggctggatgcttagatgatagaaggtcaactggtggttttgctgtttatttgggtgacaatcttgtttcctggaatgcaaagaaacaagccactgtttcaaggtcaagtacagaggcagaatacaaggctttagctaatgctacagctgaaattatgtgggtgcagactttgttgcaggaattaaatattgttagtccagctatggcacagttatggtgtgataatatgggagcaaaatatctatcttttaatcctgtgttccatgcaaggactaagcacatagaagttgattatcattttgtcagagagagagttgctaggaaacttttgcaggttgattatgtgtcaaccaatgatcaagtagctgatgggtttactaaagctttacctgtgaagcagctggaaaatttcaagtacaatctcaacttagggaaagttgtgattgagggaggatgttag

SEQ ID NO: 9108 - DNA, 461 bp, Oryza sativa
  Clone ID: PAT_MRT4530_15556C.1
gggcgggcaaaaagaacctattttcaccccttttcaaaccaacggaaagagggggggaggaacacataatggggggggatcggtcaattgtacagaaacacgaatttgcagagggaggaaaaaacagaacaggagggagaagaactaccccttctatttgcaccgaatttttccacaggtgagaatccagggaaaccaggccttccctccctgtggctggggagtccccgggacccgcatgaaaaaaatggctagggccggcgtaaaaaccgaatgactcgcacggccgtcggaaaaggaggccggggcaaatttctcgacggatatagaagaccgggctaaaagccttgacgacgagacttacgatgggccgaaacgccccctcttacgctccccccggcgcatgtacggtatgcattttcagaacaaccttggaaagaaaatccccttcagaccttgga

SEQ ID NO: 9109 - DNA, 537 bp, Oryza sativa
  Clone ID: PAT_MRT4530_15557C.1
tctttctccatggtagtctagcgagggtgctctctctctctccaaaattccaaggcgctgcagcagcagacagcaggtttgagagagagagaagaaaaaaaaaaacggacaccgaaacggtccgagacgcgacaccaaccggcttttctctctccccttccaccgccaccgccaaccccttctagaatcttctggaatccagtcggtggcggagggcggaggcttctggaaggcagcgcggggatctcggcggcgccggaggcgtccatggcgaggccgtgaagccctcgctcgcccggaggccacgcgacgcgcgggttaggaggaggaggagggatccgggtgggtgaggtgggactgtctctctcgtcctataacggatagcgctccttgttggcgccactggtgggtgttgtggcgcaaccaatgtcttgtctccaccggcaatgatccgcttgtacctagattactctttccattgtcatcggctaacattgtgataatatcagtttgcgtatgttagattaaattggttct

SEQ ID NO: 9110 - DNA, 741 bp, Oryza sativa
  Clone ID: PAT_MRT4530_15558C.1
ctacccttattaatactattttctgttccaaaattatggcaagatatgctacgtaataaatatttgggatcgcaacctttatctcaggctttttgaaaagcgggggactcatatttttgggctagccttatgaaagccaaacaagattttcttaggtttaggtcctttcgtattagggaaagctctcaaataaggttttgggaggataaatggttgggtaatgcctcgttgagagattaatatccttgtctctataacatagcaaggcataaacaatcgactatctcataaatctttcaaaacaatcctccaagcttttcatggagacgagatttaatcggagcaaaattagccgcatggcacaatttatggcctcgcatagctgatttggtgttggcacaggagcaagatgaatttcgatggaatctcacccccaatgggatcttttcggtcaattctcattacttagctcttgtccatacgggcatcccgaatataaatagatgtatttggaaggtaaaagtattgctcaaagtaaagattttcttttggtacttacgtcggggcataattctaaccaaggataatctagctaagcgaaagtggaaaggtaataagaaacgttgcttctgtcataaggacgaaaccatccaacatttgttcttccaatgtcatgttactcgtttgactctttctgatttttaaagtaaatacaagttgttttagcactctcaactcttt

SEQ ID NO: 9111 - DNA, 222 bp, Oryza sativa
  Clone ID: PAT_MRT4530_15559C.1
atggcggtggtgctaggttcggccaaggcggggctggaggcatgctgcgccaaaattgagagcccagatgatctctccaacgatggtgatggaatccaccgaccacgctggggacgtcgatctgataagcagggcatggaaaggtgggatgacaccaaaaccatatgtaaaacactgtacaatgtgggcatgggagccatatggatgtggattttgggctga

SEQ ID NO: 9112 - DNA, 2619 bp, Oryza sativa
  Clone ID: PAT_MRT4530_1555C.1
atggcgctggtcgcatcttctacagctacatctaccaccggggcttcaccacccgtaccgcctgggtgccatgccgcacgccgggggcttcgtcctacacccggctggcacgcttcgccgacttcgccatgggctcgggggcttcaccaccctcactgcctgggcgctacgccgcacgctgagagcttcgtccttcacctggctagcacgcttcgccgacttcgccacgggctcgggggcttcaactccctcgccgcctgggcgctactccgcccgccgggaatcttacgcctccacccggctggcacgcttcgccgacctcgctacgggctcaggggcttcacctgcctcaccgcccaggcactacaccgcccgccggggctcttcaccttcacccgactagcacgcttcaccaacctcgccacgggcttaggggcttcacctccctcttcacccatcaggcacgcttcgccgaccttgccacaggattactgcgcccaggggctacgccgcatgttaggggctccgcctacacccggccgaaacgactccgctccgggcgtgactactacgccagggggctacaccgcatgctggggtacgctgcacgccgggggctccgccttcacccggccgacacgactcagccctaggcacgacggctatgcccgggggctacgccgcacactgagggctccgccttcacctggccggcacgagtccgccctaggtgttattgctacgcccggggctacgccgcacgccgagggctccgccttcacccagccgacacgtctcggccttggccatgactgctacgcccgggggctacgccgcatgctaggggctccgccttcacctggccggcacgactccgccctgggcattactgctatgcccggaggctacacctcacgccgggggctctgccttcagccagccgacacgactcggccatgggcacgactactacgcccgggagctgcaccacacgctgggggctccgccttcacccggtcggcacgactccgccccaagcaggactactgcgccggagggctacgccgtatgctgggggctccacctgcacccggccggcacgactccgcccttggtgcgactactacgcccgggggctacgccgcatgctgggggctccgccttcacctaggggttccattctcacgggcaaggatcgccttgaccgaccctctcccagaaattgagtcagcagaggaggttatagcagttccccctcatgagtctcccgaggcccttctagaagatgaagtccccgacttcatcaaggatgaagcggaacccgttcaagttgtgccaaagaagggaggaatgatggtcgttgcaaatgctcaaaatgaacttattctgcaacgaaccatcactgacacgcaggaacaaccaataaatgacttcttgagagatgacatgctgatgacggttcgcgactccaacctgtgggtccactccaatggcttactaagaagatgtgtgccgactgaagaaggacttaagatcatagagcaatgccatacctcaccctatggtggccattacggtgcattccgcacccagggcaagatttggcaaagtggcttcttctggctgacaatgcacgaagattcaaaagaatttgtcagaagaagcacaagctgccagaggcaaggaggaatcactgctcgtgatgcaatgcccctcacatacaatttgcaagtcgagatattcgatgtttggggtatagacttcatgggacctttccctaagtcttgcaactgcgagtacattctggtggcagtcgactatgtctccaagtgggttgaggctatgccatgcagcgccacggatgtgaagcatgccaagaagatgttcacagaaatcgttttcccaagatttggtaaccctaggatggtcataagtgacagaggttctcacttcttcgacaagaccttccgagacctcctacgagacatgggagccaagcacaatgtggccactccttaccatcctcagaccaacggtcaagcagaaatattaaacaaacagatcaagaatattctgcaaaagacggtcaacaaaatgggaacaggatggaaggatagattgccggacgctgtcggtgatatgggcccggggtggccaagggccctcggggtgccccgtcgcacccctcaggcccttggcgcgcgccgccccgaggccctcacccggagcgacgcctttttcaagacgatgagaatgccgctccgccttccgccgagcgatatgtgggcaccctattcaccaaggcatgggatgaaggagtgcgaactcccggcggtgggtatggtgaagcgtcatttgacgccccctccaattgtaagggcggccggccaattccaagaagacgaagtgaaatcaccggagccctcggtccataagcacgccgcgcaagtgaagaaactccacaaggagaacatagagcttagggtttgcaacgcggaactaggcgtagaacttgctgaacttaggaataatgttgatacccttagtcgcggtttgtgtgctaaaatcaagcgtgcatttgtagaaatggggaaggagaataagtattatgcaaattag

SEQ ID NO: 9113 - DNA, 1168 bp, Oryza sativa
  Clone ID: PAT_MRT4530_15560C.1
tttttttttttttttttttttttttttcttaaggaaaagcacacaacagatccttcatccatctgcgtgccataaatactaatgcatatattagatagcatgtctcgacatgaagtcacgaaccttgcagtaagctcccaacctttccaaaattacacttcctggtctcaccaagtacatccagaacatgccaactagtcagcaaaagcatcgaggcaaaacgaagggctgggactgaactttgtcgcagccgaatggggtgcaaaagaacacagataaataaggcgatcctaggattgacaaaaggattttttggatattcaagaaacgcctacgcttgaaccggtgtttgcctgggtccattgaagcgagcaggccgcccatttccattcccattgtggaagatgcggtcctgacgatagccattcccattctgatgatagtatccagacccattctgccgatgtccattgccattgccgttctgatagtactcatctccgttctgatggtatctgttcccgttctgattgtatctgttcccattctgatggtatccatcaccgttctgatggtatccatttccattctgatggtaaccaccaccgttaccattctgatggtaaccattcccctgaggcccacgaccacgccctgagtactcgttctgatttctgaatccgttcctcatgttatcaccatcacggtagttaccattgttcacgaaacctgcttctcgtcccctgaagttgtccccacggtatccaccacctctgttgtcttgctggaaccgaccaccccgagcattgccattgttttcaatatgggtgacaccattaacaactcgagttgtagttcgtttctcctcaacaatggatgcttttgagccaatagaaactggagaggcctcaattgctgctagcatggattgccgagactcaaattcaacaaagccaaagcagaatccatcgggctgacggtgtcgaacttgaataccaccaggcctgatagcaccaaatttcctgaacttttcctcaacatctttcgtggtacattcataaggtaagtgctttacataaacagaatacccttgctcaacaagaacatttttgtcatttggagatgtggtatcagctgcattagtaggtttcacaggtgaggacacagc

SEQ ID NO: 9114 - DNA, 3506 bp, Oryza sativa
  Clone ID: PAT_MRT4530_15561C.1
atggcctgcagtcagaaatcgtccagcacgccgcatagggatctcatcaactcggatccgtcttgcatgccggccggcggggcgtcgtcgcaccggtagtcgtcgtcgtctgcggcgtggggagcggcgggtggcgccatgtagtggtccgcgtttggaccagcgaatagctattagaggacgggaaccgtgtgccagatccagaacttgtcctctcccgactgataggctctcaacactaccctcccgcagcatgacaggaagaagaaggcaagtcactctgtgcgagaaccccgggccttttccatctcagctccctggttcgattcttactctggtacctctactctttttcgtgccatccgtttttgaagctctaagagatagattgtaaacagcgtagtaccctagcttgcggtgtacaattctatcgatccttcggtggcgccatatctcctcatttgtctccggcaatacgagatcagaaatcgaccgcacttcagctaatgtgatctgactctgatattgctatgtcatggggcgcagggttgaaagatgacgtttggcagacctacgctaaagctgggggttctctaaaacatttactttgtggctagagagacacgagccgatgttgtaccaagaatagttgatcagctctcagctgaatcaaccagcgatgatgttgagtttcatgctaggagacttgctgctctgaaggcccttacctcctcctccacaagcaattctgagatgttggaaaaactctacgaaattgtgtttggcattttggagaaggtggctgatactaaacagaaacgaaagaaaggtatatttactaagcaaggtggtgataaggagtctattatacggagtaatttgcagtatgcttctctaagtgccctgagaaggcttccacttgatcctggtaatccggcatttctgcaccgagctgtccaaggggttgaattttctgacccagttgcagtaagacatgcgttgtcaatagcctctgaaattgccgtgagagatccgtactctgtcgcaatggcactgggcaagaacgcacagcctggtggagctcttcaggatatccttcatttgcatgatgttcttgccagagtttaccttgcaaagctgtgccattcaatttctagggcacgtgtattggatgagagacctgacataaagtcccagtacagttctctcctttaacctgattcggagtaaacgggcatacatatggcgtctggggaggttccttctgtgatcttagtagtggacataaccttttgtgagctccctagcatttgacaggcacatgtccttgttggaggccaaattcaatcatcgtgatgtctgtaagacgcagcaattttcttgctggttgtgtttctttgctttatacacaccacgagtccattcaattcattgtttatgtgtagagatgtacacgtgcttcggggttttacctttcgtgtgctattctggcccgtctgttatgattgaaagacgcagtttactcctctagttctccatcagataggcattattttgtcaaattgttgctctattggaggctgtaaactgctgaaggctgtatcttgctccccaccattatttcggtcttgtttatggtgattcagtagaagtagtaggcctgttaatttgtgtaaattttgtcttgtgcggagtatacatacatgaacacatacgacaatggaatggtatgcgtcgataaatatcttacactaaaaacttaatgcagtatacgctatattctggctcctcatgagtcttttgaagaattaaaatctattattgcatgtgagctggctgatccggcctggccttcttctctcctgaatgatgtcctattaactctacatgctaggttcaaggcaactcctgatatggccgtgactctgcttgagattgctagaatttttgctaccaaagttcctggcaagatcgatgctgatgtactacaactcctgtggaaggtttacttcatgaaagagaccccaatttctgtgacatgccttgttggagcaggaccagatggaaaacatacagctttggaagctgtgacaatagtccttgatctaccaccacctcagcctggttcaatgtctggatttgcatctgtcgatatggtatctgcctccgatccaaaatcagctatggcactgcaaagattagttcaagctgcggtttggtttctaggtgaaaatgcaaattatgctgcttctgaatatgcctgggagtctgcaacacctcctgctagctctcgcaatcctacgcttgctagtgctttgacacgtctgcaaaggtgtgcattcagcggtagctgggagatccgtattgctgctgtccaagccctaaccaccattgcaataaggtctggtgaaccttacagactgcagatatatgagtttcttcatgctttagctctagggggtgtacaatcaaacttttcagaattgcagctaagtaatggggaaaaccaaggtgctagtggtactggtcttggatcattgataagcccaatgctcaaggtcctggatgaaatgtatagagctcaagatgatctcgctagggatatccgtcagcatgataatagtaagcaagaatggaatgatgatgaacttaagaaactttatgagacccacgagaggcttcttgatttcgtctctttgttctgttttgttccaagggccaagtacttgcctttaggtcctaccagtgcgaaactcattgacatctaccgcaaccggcataacattagtacttcttctggtctaagtgatcctgctgttgctactggcatatctgatctcatgtatgagcccaaagatgtgcccaaagaggccactcttatacagactggaattgaccctgatctggctatggcctgggcagcaggtttggaagatgatgtttgggaaaacaacgcaccagctgtggataaagtaaaggatttccttgctggcgctggaactgatgctcctgatgtggatgatgaggaatacatgaattctaggccatcagatgatgatggaagatcatctgggggatcctctcctgagtcaactggttctgtagaaacatccatatcgtcccattttagtggcatgaactatccgtcgttgttcagttcaaaaccatcaggatatggggcttcacaacaaacgatacgtgaagaaccaccatcatattcaacatcagttctacagaaacgtgagtcattcgaaaacccccttgctgggcgtggtggtcggagttttggatcccatgaggacgaagacaggagttcagggaaccctcaatctgggaaagcactgtatgacttcacagcaggtggcgatgatgagttgagtttaactgctggagaagatgtggaaatcgaatatgaggtcgatggttggtactatgtaaagaagaagagacccggaagggatggaaagacagcaggtctggtccctgttctgtatgtgaattcgtga

SEQ ID NO: 9115 - DNA, 616 bp, Oryza sativa
  Clone ID: PAT_MRT4530_15562C.1
tcgtttgaaagctgattcggagtaaacgggcagcaggtttggaagatgatgtttgggaaaacaacgcaccagctgtggataaagtaaaggatttccttgctggcgctggaactgatgctcctgatgtggatgatgaggaatacatgaattctaggccatcagtcggttatgatgatatgtgggccaagacaattcttgaaacatatgaagcagaggatgatgatggaagatcatctgggggatcctctcctgagtcaactggttctgtagaaacatccatatcgtcccattttagtggcatgaactatccgtcgttgttcagttcaaaaccatcaggatatggggcttcacaacaaacgatacgtgaagaaccaccatcatattcaacatcagttctacagaaacgtgagtcattcgaaaacccccttgctgggcgtggtggtcggagttttggatcccatgaggacgaagacaggagttcagggaaccctcaatctgggaaagcactgtatgacttcacagcaggtggcgatgatgagttgagtttaactgctggagaagatgtggaaatcgaatatgaggtcgatggttggtactatgtaaagaagaagagacc

SEQ ID NO: 9116 - DNA, 424 bp, Oryza sativa
  Clone ID: PAT_MRT4530_15563C.1
taaagacagcaggtctggtccctgttctgtatgcgaattcgtgatagctatgagtcctgcgacataatgctctcgaaagctgattcggagtaaacgggcatacatatggcgtctggggaggttccttctgtgatcttagtagtgcacataaccttttttgagctccctagcatttgacaggcacatgtccttgttggaggccaaattcaatcatcgtgatgtctgtaagacgcagcaatcttcttgctgggtgggtttctttgctttatacacaccacgagtccattcaattcattgtttatgtgtagagatgtacacgtgcttcggggttttacctttcgtgtgctattctggcccgtctgttatgattgaaagacgcagtttactcctctaggtctccatcagataggcattattttgccaa

SEQ ID NO: 9117 - DNA, 478 bp, Oryza sativa
  Clone ID: PAT_MRT4530_15564C.1
tttttcttctttttttttttttttgtattttttcctgtgtttatttttttttactgtaagggtacataccattacggagagttaatactcactcacgggggacaggaggagccacactctaaaaacaggggacaaaattgctccgcagaacaaactcagggtacaaaaaaaacatccaacacacaagcacggacgaacgcatgtggattctacaaacgccgtagaggctcggaagggaggtgcaaaacttatctctcaactgccttatgggctgagattaacagaatgccacgaacaaccagcgggtgcagcacaactattgctagaccccttaccttggaattgcgcgattcaaggaatgctgcgaccacctagcaactgagcccatcagcccatgtcttgcattggccttcaagagctaaattccatccgctggcaccaaatgctggaaacccaaggataagtctcctgaccagac

SEQ ID NO: 9118 - DNA, 552 bp, Oryza sativa
  Clone ID: PAT_MRT4530_15565C.1
atgacgatcgtggagatgcagatgaacatcgactgcgacggttgcgaggacaacgtgaggaaggcactccagaggctccaaggggtggattacgtggacgtggacagggtgagggggaaggtgacggtgacggggtcggcgagccagaagaaggtgctgcgtgcagcgcggcgctccgggaggatcgccgtgctctggccgtcggcgtacgacaccgaccaccgccaccaccaccaagcctactacgcgcagccggcgtaccatcaccaccaccactaccaacaaaccatcaagcccgccgccgccgccgccgccgccgtcgccgtcgccgcgcgcgcgccccaccaccaccaccaacactacagcagcgtgcagcacggcaggatgagcggaggaggcaaggcggtgagctcgtacaactaccacgtccacggatacttcgactccgacctccacgggtacagcggcggccaccaccacggcgacgtcgtgccggccgccgcgcggagctacttcagcgacgagaacccgcacgcctgcgccgtcatgtga

SEQ ID NO: 9119 - DNA, 210 bp, Oryza sativa
  Clone ID: PAT_MRT4530_15566C.1
atggccgctggtggggggctatcgacgggatcccctaataatttgcctgacgagaaggggacacgccgaggccaacaaaggctgacaagctacaccaacgcccggagggcataccagctaagtacaaaggagggcgtgctgcctcacagctggctgtggaacacgctcaacttcctagcagtttttgagatcgcgtcctcccgcatttaa

SEQ ID NO: 9120 - DNA, 427 bp, Oryza sativa
  Clone ID: PAT_MRT4530_15567C.1
cggacgcgtgggctaaccatgcccggcagagtgatgatgttggtggtggtgatcgggatgtataaatgcacgggcacccatatagaaagcaggggaagatgtttatttctaccacatatcaagtaagggcagctgttgctacgtccataggtgtagctgctgcccgtgctaaaatgcttgcagaccaggaagaacgggaaatggagctcctaatggcgtccataatagaaactcagctaaaaaagatccaatacaagatcaaacactttgaggagctagagttgatcatggatcatgaatacgcttctctacagcaaatgaagattttccttgtctatgaatggctaaaggttcttcagcgagcatttgagacttgggtccaatatcgagggatgtaatgctaataaagttgttcaatacatgccaa

SEQ ID NO: 9121 - DNA, 1112 bp, Oryza sativa
  Clone ID: PAT_MRT4530_15568C.1
gggtttgtctcttcctcctcaccacccacccccttctctttctgctagctagctgctgtacagacaacatcacaacactggagaaagggcaagcaagcaagaacagaagcagcagcagcagcagcagcatgcaggcagccacaaaagagagctgctgccaactcctacacagcctgggttctcctcctctgatcattgattgatgcaaacccagctattaccttccctttttattttatagctacacacacacacatatatatataatcccacccatcccaatacttgcttcttggttcttggcacctctctgtcctttttagatttccttggattccattcaggcctcacccccccccccccatagatagatacatctcctctctgatagcttcctggttgttttgctcttcttggttttcttgatttcttgggttcttggctactggggctgtctctctatctttcttgatcctggtttgcgccgaaagactgcaattttcttgagttcttgttgctgctggatgccatggatgagaggatcccaccaccggccttcttccagttcttgccatccggtgctcattcttctccccatcatcagagccccttgaggtctcctgcctctgagagggagagatatcttgctgagttacttgctgagaggcagaagttagccccgttcatgcaagttcttccgttttgtaacaggcttttaaaccaagagattttgagggcatcttctttgccacctaacccaaattttgttgaacctgagagagtcaatcatggtagcccattaaggttaactggccaccctatgaatggtcaaccaatggatctggagggatggtcaggaatgcaaacagagatgggggtactccaatcgccctccatgggctggaatgttgctccaggagttgctggaagccctgttgttaagaaagttgtcaggattgatgttcctgtcgacaagtatcccaattacaattttgcctgcattcaactatagccatttggagctttcttttgtatgcactataacaagtccaaatcatttataatcttttgttatggttagtacaattttgttggtcgattgttgggaccac

SEQ ID NO: 9122 - DNA, 288 bp, Oryza sativa
  Clone ID: PAT_MRT4530_15569C.1
atggaggggtgtgtgataatacatgaggtgctccacgaaaagagaaccaaaaagctgaaagggattataatgaaaatagactttgagaaagcttatgacaaggtgaactgggactttctgatacaggacttgggtctctcccctctcatttgtaaccttgttagtgatgccttctgcattggcacttccaggagtgaaggagttcaatatgttgatgatacagtcctcttcattgccaatgatgacaaccaaaattgtggcaacaaaattcatcttgtactgctttga

SEQ ID NO: 9123 - DNA, 218 bp, Oryza sativa
  Clone ID: PAT_MRT4530_1556C.1
ctagggcgacggctcggagtgtggtggagctcgaggcatggatccagcagtcggcggctcgaagtgtgacggcggatcctgggcagtggctcgatcgtgggccacggatccggccgacagcggagctcgaggtgcagctagggcgacagatccgggcggcggcggttcggaacgtggcagagcctctaggtgtggccggagtgcgacgacggatctag

SEQ ID NO: 9124 - DNA, 1817 bp, Oryza sativa
  Clone ID: PAT_MRT4530_15570C.1
gttgctacgagtacttgctaggaagaaactgcagtgtgctctgttccaaagagtagtgatggcttctgcctcttctcttggccggacgggggtacttggggcggtcacgtagtctactggtcactgcatcgagctatgtatggcaatgggcctcgcggctgccgctcagtggtagctccctctgcatggcttctgctcctagttcgtgcaccttagctctattcttcgcggcgctgctcccaacggctccggggcatcggcgcagctacgtgcgacggtccgtggtgcgccgtcgcccaatgcattgtccacagcacagagccggctgccatgcaccgcgaaccgcgaaggggggcttggggcgtcggtgctcaggttgcacttccccgagtccaacgtcgagaggcgcgacgcttcagttctgcagtccgggcaggagcagaatgctggcccgaacgtggggtcgctgagtgggattcagcgtcatcgacaacgccaaggcgcgggtggagggccatctgcaaccagaccgtctcctgcgccgacatcctcgccgtcgccgcccgtgactccgtcgtcgcgctgggagggccatcatggacggttctggttggggagaacggactccacccctgcaagggaggccttgacaaataccgacctccctgccccttccgctcgcctcgcagaacttatcggcaatttctccagaaagggactcgacgcaaccgacatggttgctctctcaggagcacacacgatcggccaggcccagtgccagggcttcagggcgaggatctacaacgacaactgcccgccgtacgcccggcagcggcgacagcaagcctggcgccgctggacacgacgacgccctaccacggcgctcgcccgcctactaccgcaacctctctgtccaagcaacgggctcctgcaccgccgactaggagctctccagaccgtcaacagcacggacggagctcgctaaggacgtccggacggccaacagggtcggcgtcttcgcgtgcacgccggcggcgttcggccacgcctgcacaagggggacagtcataagggcgaacatctcggagctgactggaggtcagggggtagatcagtcccaccaggtgcaacgataaatactaagatatgaggaatgcaaaactgggttacaaaatacggcaacacaatggtgtgaataaggctgggccatatatgtcacattagtatgtattttactagtctgaaatgtttgctaagagtgttttctctgatcagcacaaagtatttgaaacagatcaggaagccgatggtatgtaccgttaagaatgcttttgaagttatcaaggaatggatgacgctatcatcgaaaacataaaaacaacagattcaactggcgtgttaaccaagtgaagtgctagtttcggttgcaaaaaaaaatctgatcgaccggtttgtatatatccagacgctgggcactcgacaacatgattaattaccagtgcacgaatgcatcaaggaaagaattccagttgcaattaattacaggtgaaacatacttctccgtcctagattctccgtcctagaaagaatccaatcctaacaatgaaatcttgacacatgttcgttattaggattagatttttttttcttggaacggagggggtacgctcgtattagcatacgcaattatagtcctttaaaatcgtagagcattcagtgaagatgtcaccgagaatgtcatgaggaatgttactgaatctgcgtccgtttattagcaggtttgcatgcttcttgatctgtaaaaaaaaaaaaaaaaa

SEQ ID NO: 9125 - DNA, 337 bp, Oryza sativa
  Clone ID: PAT_MRT4530_15571C.1
ttggtttttttacaatttctggtttatatacttattatcagttttttttttaatctgtttttttcttgtccaaaggaaggaactttaataagggagacacccggtgaataaaaaaacaagggggaataaaaccgggtccataaaaattttaaaggggaaatatcccaacacgaaagggggaaacaaatcgagaaacaaaaaaaggtgacccggcttaattaaagctggggataaaaagatgcaaccacccataaacgggggggaaccggaaaacgggaggatccggccccagtgcgagagaccaaaatcttttgagaaaaatcacataattattaaa

SEQ ID NO: 9126 - DNA, 2999 bp, Oryza sativa
  Clone ID: PAT_MRT4530_15572C.1
ttatcgttcaatttccttcctaccgaccgagcatgggggctaaaggacgagctacggaccgagccatggaggaatacaaggctcgctcattcatggcaatggcagcccgccaccttagcttgaggatggcatcacttggggcgttgatcacgatgtgccaaactgccaataagagcagtgcatggacttttggttcttcatttactgttggggtgaaatttcatcaatataggaaaatagattataccatcagtttttgcacacggagaggcaccatggagaaagtcgaggtcgatgggaacttcattggtacgggtaattggaagctgcatggagcactatgtaagcaacttcacaaagtagttcttgaagtattggatgttattcctgtccttgaagctacaaggcctggaaacagttctggacttcttgcattgagttccttgcgcatagctgttgagaaggccaagaatctacttcagtattgctcagagtgcagcaagctatacttggcctttacagcagaaaatgtcctggcaaaatttgagaaagcaagatatgcgcttctggaaagtcttcaccaattggaagaaacacttccagaagcagccagttctcagatactagatatcgcaaaagatctggagaaagcagtttttaccttggatctgattgaaaagcaagctggtgtggatgtgaatcaattagttcagaatgaggcaaaatccaatggctttcttcatgacaatgaacttgaatttttccgacaaactgcatttcgggtcggcgttgcgtcatcggcaacagctcttaccgagagaagagcacttagaaggcttcttgagagggctcatgcagaggaagacataaagaaagaatcagttgcatcttatctactgcacctaatgaggaaatactcaagcatttttaggagcgaaacgacggatttcaccaacacatccatgtgctcaagcccttcttgctcttcccgttcattgtccagctcgattgatctccatggaaatggtcatgttattgaaaagtcgatatctagggttggctccttcaatctcaggcagatcaaaggcttatcaggtagcatgccattgccacctgaggaactaaggtgcccgatctccttgcaactcatgcatgaccctgttattatcgcatctggtcagacatatgagcgggcttgcattgagaaatggtttagcagcggcaacacaacctgcccaaagactcggaatgaattatcccagctctccatgacgcccaactattgcatcaagggtttgatagcttcatggtgcgagcagaacggggttctagttccatcggcgccgcctgattctcccaagctcaagtacctgaggatatcatccttgaatagtagcaaatgtcttgtgaccaatggcgttagcacggtcttgtttgaagacacatgcgcggaggatgatattaaggatggtggtaaagttgcttcggaggagtgcactcggcagaactccggagaggctccatctgagatatgtgaagttgatcaggcctcaccagaaaaacatcctcatgagaactccgagaaggtagcagaggcgacatgtgagctttggctgcgtgtgctgagcaaggacgacgatgagtgtgtcgacgagcaacgtgaggtgatcgagcagattagattccttttgaaggatgacaacgagcttaggaaatacgcgggtgctaatggtattaccgagctactcatccactttgtgaagaaggcagtctgcagagatgatgttcagtgccaggtggttggaacaatggctctgttcaaccttgctgtcagcaatgataggaacaagaaacaacttctctcaggtggagtcctccccttgatggagcagatgatacagaagcctgaaacctacgaggctgccgtcgcaatgtacctgaacatttcctgcctcgccgaggcgcaggcgatcatcgggcagagcgaggccgcgcctctcctgatcaagggcctgcaaggagacggcttccggatgagcaagacctgctgcctcgacgctctcctgacgctgtacaacctgtcgctgcaatcgtcaaacatcccgaccctcatctcctccggcatcatgcagagcctccacgacgtcctgacgccgtcctccccgacgacggagaaggccctggccgtgctgatcaacttggcgctgacccgcgccggcaagaaggagatcatggccgactcggacatggtgggcgccatcgtcgtcatcctcgagaacggggaccccgccgagaaggagaaggccgtgtcgtgcctgtggatcatctgcagcggcgatgacggcggcagccagatggtgctccaggaaggcgtgatcccggcgctggtgtccctgacggccaacggcacgggcaagacgaaggataaggcgcagaggctgctcctgctgttccgcgggaagcggcagcgggaggtcgagcagctgcagccaagggtgcagctgcacgaggtggtgagccaggcaaccgcgcagcacgagcagcagcagcagcagcaacaagaagaaagcagcgagccaggcagcgacaagatgtcgcggctgcgcaattcaaagtcgaagttgagaaggttcacgagggccctggctaggttgctcaagaaatggggcatccgctgatctgatctactacagaggaaagaaccacgtcggctagtgtgaactttggcaaatgcaatatcaatgttatcttcccgtgtgggttgactcactcgttttcgtctccttcgcattgccgcgatatccatactcgtctcacttatgcgggcattgaccgtctctctgtacctattaaccttgtgctaaggcaaaattagtaaaaagggtttaagcttattgtgttttgccaaaatgtaagccaagatgtgttaacaaggattaagtgcgatcatcaaagtgtgtaacaaggattaattcaggtcataaaaaaaaaaaaaaaaa

SEQ ID NO: 9127 - DNA, 784 bp, Oryza sativa
  Clone ID: PAT_MRT4530_15573C.1
ccacgccgtccgaaaacaaatcaatttccttcctcccgaccgagcaagggggcgaaaggacgagctacggaccgagccatggaggaattcaaggctcgctccttcgtcgccttgtctccctcgggtgaaatttcatcaatataggaaaatagattataccatcagtttttgcacacgcggatgaaatttgactaggagaggcaccatggagaaagtcgaggtcgatgggaacttcattggtacgggtaattggaagctgcatggagcactatgtaagcaacttcacaaagtagttcttgaagtattggatgttattcctgtccttgaagctacaaggcctggaaacagttctggacttcttgcattgagttccttgcgcatagctgttgagaaggccaagaatctacttcagtattgctcagagtgcagcaagctatacttggcctttacagcagaaaatgtcctggcaaaatttgagaaagcaagatatgcgcttctggaaagtcttcaccaattggaagaaacacttccagaagcagccagttctcagatactagatatcgcaaaagatctggagaaagcagtttttaccttggatctgattgaaaagcaagctggtgtggatgtgaatcaattagttcagaatgaggcaaaatccaatggctttcttcatgacaatgaacttgaatttttccgacaactgcatttcgggtcggcgttgcgtcatcggcaacagctcttaccgagagaagagcacttagaaggcttcttgagagggctcatg

SEQ ID NO: 9128 - DNA, 137 bp, Oryza sativa
  Clone ID: PAT_MRT4530_15574C.1
aacttaagaattaagatctgcatcacataaaagcttacatagtctagaataacactgacatgatagagtggttcaaggttcagataggttaaatattttggggacttttacagttgttttttttgacatttggaaag

SEQ ID NO: 9129 - DNA, 633 bp, Oryza sativa
  Clone ID: PAT_MRT4530_15575C.1
ggataaaaaacccccattttttttattaatttttattatttttgttttttggggttctattttacattgcttaggggaagaacgacccccttttttctaaaggacccgtttaaaaatgggtggagggggggaaaactgaactgcaaggggacccccccctttttttttttgggaaggccccggggcccaaggccaggggtgaattccgaccgggggatcccccgcccgccccgggttgtttttggttggaaggatggttgcccccccccaacgataaaaccgccccccgggaaaaaccccggcggggccggggggggcaccgggggggggggggggacccggtcggagaaaatgagcgcgtcctgggaaaaaaaggggggggcccacagcgccggcagggttttcctgggggaggggggggggtaaaaaggggggccccccccctttaccgggtgcggcgagcccaccagaaacgggtggagagggatgttgttacccccccggggggggcgccccccccctaaccaaaaaaggggcttcccaaggaccccgggggggcccccgccggccccccccgggggggtcaccccgggcttgcaaaaaaaaaaagccccggggagggtttacgggggg

SEQ ID NO: 9130 - DNA, 1593 bp, Oryza sativa
  Clone ID: PAT_MRT4530_15576C.1
ggataaaaagcacactaactcggtactcacattctcaatagcatcaggaattcaggaccattacagccgcgctggagagatctgcgcttctgtaattgtgtttgccattccacaggagtgagtggcagacaaatcgaatgaacgcaacaaaaattgggcacaacccgacgctgcccgacaaaaacacagccggccacagcttctgtacaaaattatgtagcatcaacggcgagagccgctctgttaccacagcaggttgccgacgaggcagagagcgaacgccccaagaacgtcgccgacgacgtgccggccggccggaggagggccggagctcgccgccggggtgctcgtcggcgccatgccggccatgacgcctccttcggatgccatcggcgtcggcgaagggccgaggtacgtctcgaagaaggacgacgtcggcggcggaatcagcggaggatactgatgcggacctgcacgaaaagcaagagctgcataaagtctcggtttttcaaggcagaaatggtgaactgagacataattgagcacgaattttatacctgggcattgaggcttgagtgctgtggttaacgtggtgagaattgtgccgttcacgaatccgccgtagctgcaggacgtgacgctgcagccggagctggtcatgaggagagtgaagttgccgagcatcatgctgctgttggcgcactgcatgctggagcacgtcgagtcggcgagcggcgccggcacgcagaacaggcggttggcagtaactgcgtaggtcccgttcgccaccgccaggccgtagtccgccgtgaacgccgggaatgatgatgtgcacgctggcagcgggacgacgatgatgtcaccggcggcgagctcgggggtggccatgtcgttgacgctcatgaggtcggtggccgtggtccggtacctctgcgcgactgcggcgacggtgtcccccttcccggcgacgtacgtgaggtacaccgcggggaggccgttgtcgacgccgccgaagcaggcgcagtgcagcggcacgaacagagtcgtcccggcgtcgacggcggcgtcgggcttggcgccgaggatgccgttggagtcgctgatccagtccggggtggtgaggccgccgtagacggaggaggcgacggaggcgagcgtgtcgcccgggcgcgcaacgtagcgcacggtggtgaccctgcggatgccgtcggagcaggcgcaggggacgggcacgcggagcgggagccccgcggggaggatgcggtcggcggggtccgggacggcgaagtcgatggagttggcggcgaggatggcgagcgggtcggcggagaagagcgcggccagctcggcgagcttgaggtcggcgtagagcgtgtaggagagcagcgctgggcaggcggtggaagaggagcaggactccagcgtcgacttggaccgcgcgggcgcgacggcggcggcggcggcggcgaggaggaggaggaggagcaagggtggtggcatgatgatggcgacggtggtcgggagcgcggaggcgtgggagtgtgtgcgactgcgagccagtgagagtggagactgttgacctggagtggggcg

SEQ ID NO: 9131 - DNA, 421 bp, Oryza sativa
  Clone ID: PAT_MRT4530_15577C.1
ggtgtgttttttttttttttttttttttttttttgtttttttttttttttttttttttttttttttttttttttttttttaagaaaaaggcaaagaaaaaagaaaaaaaaggggaggggacaaacccctaaccccaatttttttaacttcaacgggggggggggggagaacacacaaagagcccaaattaaactggggggcggcccccccattttatattttaaactttggggggaaaaaagccatttacgcatagaagcccagaccaccaaaacttgactttgaatggacctaatatatttatttcttccttcttcctttggtttggaccaccaccaaaggggggaggaaaaaaaaaatttttatgacttaaccccccttttttattaatagggccattaagggaccggaagtttttttt

SEQ ID NO: 9132 - DNA, 842 bp, Oryza sativa
  Clone ID: PAT_MRT4530_15578C.1
cgataaaaagcacactacttcggtactcacattctcaatagcatcaggaattcaggaccattacagccgcgctggagagatctgcgcttctgtaattgtgtttgccattccacaggagtgagtggcagacaaatcgaatgaacgcaacaaaaattgggcacaacccgacgctgcccgacaaaaacacagccggccacagcttctgtacaaaattatgtagcatcaacggcgagagccgctctgttaccacagcaggttgccgacgaggcagagagcgaacgccccaagaacgtcgccgacgacgtgccggccggccggaggagggccggagctcgccgccggggtgctcgtcggcgccatgccggccatgacgcctccttcggatgccatcggcgtcggcgaagggccgaggtacgtctcgaagaaggacgacgtcggcggcggaatcagcggaggatactgatgcggacctgggcattgaggcttgagtgctgtggttaacgtggtgagaattgtgccgttcacgaatccgccgtagctgcaggacgtgacgctgcagccggagctggtcatgaggagagtgaagttgccgagcatcatgctgctgttggcgcactgcatgctggagcacgtcgagtcggcgagcggcgccggcacgcagaacaggtccaagttgcctgggccacagctgcactggacacaccggttggcagtaactgcgtaggtcccgttcgccaccgccaggccgtagtccgccgtgaacgccgggaatgatgatgtgcacgctgcatgttcgagagaaaaaaaatggtactccgtcatgattaattcggacgcgtggg

SEQ ID NO: 9133 - DNA, 1284 bp, Oryza sativa
  Clone ID: PAT_MRT4530_15579C.1
atggcggccacgaagcgggagcccctccgccccatcagctccaacgctggcacggtcgagagacgggctcgcggcggcgcggctgcggctgcggcggcgaaggagaaggagaaggagaacgaggtgcccaccgagattgggcgggggaaggatggaggggagaagaagccgcctgtggtggtggcggtggtggtgccgccggcgccgccgctgaagccgtcgtcgctgcaggttcgcatgaaggccgaggaggagaaggagagggaggaggaggaggaggggtcgtctccgccggtggcgttggtggcggggttgcaggtgaggatggggccgagggggagggagctgctacttccaccgccgccaccgccgccgccgctgccgctgccgacgtcgtcgtcgtacgaggcgtgggacctctccgacaacgaggcggcgccggcctcgtcatgggcgacgctccccaaccgcgccctcctctgccgccctctccccctcgacgtcggcaggtgcacctgcatcatcgccaaggagactctcgccgccgccgccgcaggcgcccgtggcgtcgcgctctactccctctacaccaacgaggggcaggggcggcaggacaggaagctggcggtggcgcggcaccggaggaggagagggaggtcggagttcgtggtggcgcagaatctggacggcatcttctgcacctccgacaagaacttcctcggcacattgagctcaaacctcgtcggatccagataccgaatctggggccaggggaacagggtggatgagatcaagagccagtcgaagcggctcctcggcgtcgtcgcgtttgcgcctactgttactacgcttacagggagcttcagaagcatgagggcttggattcccaagaaccaatccattcatctgaagaacagcaattcagctcaggcaagtgaatttcctgttgtggagattcagcacatcagtgggcttccaaaggattggcaagagaagaagatcaaggctgatcagctctgctcaagatctcctttctacaacaatatgacaaaacggtatgaactggacttcagagagagggcagggaggatgggatacaaggtgcagccatcggtgaagaacttccagatgactttggaggagaaaggaaggcagacaatattgcagcttggtaggattggcaaatccaagtacattatggacttcaggtacccattgactggctaccaggcattgtgcatttgcctggcatccatcgactccaagctatgctgcacactatga

SEQ ID NO: 9134 - DNA, 1731 bp, Oryza sativa
  Clone ID: PAT_MRT4530_1557C.1
atgtcgaacgaggtgaaccatgtagggaaggctctcatgtttaatggcacaaactattctatttggaaaattaaaatgtctactcacctcaaagctatgagcttccatatttggagtattgtggatgtaggctttgctatcaccggcacgcccttgacggagattgatcaccgcaacctccaactcaatacccaagccatgaatgctttgttcaactctttgagccaagaggagtttgatagagtgagaaaccttgagaccacatatgagatttggaacaagttggcggagatccatgagggcacaagtgagtacaaggatgccaagcttcatttcctcaagatccaatatgagacattctccatgttgcctcatgagagtgtgaatgacatgtatgggaggctcaatgtcattgtgaatgatctcaaggggcttggggcaaactacaccgatcttgaggttgcccaaaagatgcttagggctctaccggagaagagaaaggagagaggaagaggctccaactccaataggagaagaaatagaagacccaacaagactctctccaacttgaggtgttttgagtgtggtgagaagggacactttgcttcaacactttgcttccaatgcccttccaaggatgatgatggagacaagtcatccaagaagaagagtggaggctacaagctcatgaagaagctcaagaaggaaggcaagaagattgaggctttcatcggggaatgggactcaaatgaggagagcttcgcatcatccgggtccgaggaagaaggtggtgatgatgcaagctccaagaagaagaagatggtcgttgttgccatcaaggaggctccatcactcttcggtccactttgtctcatggcaaaggactcatctaaggtaacatcttttaatgatagtgagagtgatgatgattgtgataatgtttcctatgatgagcttgtgagtatgtttgaggagctccatgcttataatgagaaggagattgtcaagttcaaggccctaaagaaggatcatgcttctttggaggtcttgtatgaggagctaaagacttctcatgagagactcaccatttctcatgagaagcttaaggaagctcatgacaacctcctttccactactcaacatgaagctctcattgatgttggcatatcttgtgatttgcttgatgatagtgctacttgccatattgctcatgttgcatcatctagcatttctacctcttgtgatgatcttgtggatatgtctagctctagctctaactcttgtgtttctatttgtgatgcctcacttgttgttaaaaacaatgagcttaaggagcaagtggctaagctcaataagagcttggagaggtgcttcaagggtaagaacactcttgacaagattttgagtgagcaacggtgcatccttaacaaggagggacttggattcattccaaagaagggtaagaaaccttctcaccgtgccactcgttttgtcaagagtaatggttttagatatggaaatctttatttggttgatttcaattctagtgaagcaaatttgaaaacttgtttagttgcaaaaacttcattgggttggctttggcataggaggctagcccatgttggcatgaatcaattgagcaaactttcaaaacgtgatctagttgtggacttgaaagatgtgaagtttgagaaagataagctttgtagtgcttgtcaagccggcaaataa

SEQ ID NO: 9135 - DNA, 295 bp, Oryza sativa
  Clone ID: PAT_MRT4530_15580C.1
cggacccttggggggaccggggaatgaccgaggaaaaccggacggggaaccgaagggcccaaaagtgggcccaaagagagctgggtaaaagcagggcaaaagcagggaccaaggtaaaaccggtgagaaattacaatgccacaaaaaatacaaacaagaaggaaaacgggaaaaaaaaggggaaactaaggggggaccaaaaagaaaggaaacgcaaaggaatggccggacgctaacaagccggtaaaacgggggggaaaccggcatgaaggatgtgtcaaaaaagcggacaaag

SEQ ID NO: 9136 - DNA, 202 bp, Oryza sativa
  Clone ID: PAT_MRT4530_15581C.1
tttaatgatacgctggcttggcaaaataaaagaaactgtagattatttttgcaaaacacatctgcttgctacagaaaaaaaaaaaagtgtgtggaaaggaaaataggacattgattcaaatttccctggacagcttttaaaaccagcttttgaaaaaatcatgtcaaagaatactttctaatttctaagaaagccaaaaagt

SEQ ID NO: 9137 - DNA, 1728 bp, Oryza sativa
  Clone ID: PAT_MRT4530_15582C.1
ccgtcacatcgttccaatttcaaccaaactttcaattttagcgtgaactaaacacaccctaggaggtacagcatgggagtgaaattagcagcaggaatcgcttttacatcaaatgaatggatcacataaaagggagtagggcttaactgaccaaatagacggtgtggtttgtttaatcatggttcatctattgagagatacaacatgaaatacataagtgttacgaggttgccgatgatccaaatctttcaccaggttaaccccacacagcagtacaagaaacttcccatgtgccgccacaaaggctttcgtatcatcaaccgaagtacatgtctctggactctggcttcctttccaagtattctatttccttggataggaaggaaaagaacaagaattacctcatgaatctacagcaattggagtcggaacggaagcttcatctttggatacttcagccattgcatgggcacggatgttagttaacactggcatctccttctccctccagattgcatgaacttcgtccgttcggaatctttgagtaaaagtggactcctctaggggagtggtcatgccatgtgcgtatgccagtaaaccagtgtatgcaatcattgccccgttgtcaatacagtatcgatcatcggttgcgaacagcctaccccctctttctgaacacattatcctcatcatctcttgcaaacgttcattgcacccaacaccaccaacaataagaacatccttcgaatcacaatgtgccatggcacgctcagtgatttcaacaagcatagcaaagagagtttcctgcaatgagtagcatagatctgcaggcgtgcactcattatttttaagcttctcaattgctgtagcttcaatgaagctcagtatgccactaaatgacacgtccataccctttacaacataagggagatcaatgaacttctctcccttcttcgcaagctgctcgatgttatacccagggctaggatcattggacagctcaagcaccctggcaaagcgatcgaggcagttccccaccgcgatgtcgatggtctcgccgaagatcctgtacctcccttcgctgtacgcgatgacctgcgtgttcccgccggagacgtagagcacgacggggtcgacggcgccggtgaccgcgcggcccatctcgacgtgcgcgacgcagtggttcacgccgacgagcggcttcccccagagcagcgagagcgcgcgcgccgcggcggcggcgacctggagcggcgcgcccatcccgggccccttggtgtagcacacgcaggcgaggtcggcgggggtcaccccggcctcgcccagcgccgcgcggaggagcgggaggaggtgggcgaggtggtggtgcgccgtctcccgcggcaggaagccgtgccccggcggggtgacgtaggtgtgacgcgggttggagaggatctcccccgagagggagacgacgccgatgccgatcttgttcgccgacgactccagccccagcgccagcggacccggcggccggcgcctcgccgccggcgatgacgtcatagctgcgggggcggcggcgacggtagggttttgcagcgaagtgaggggacacgagagatgagacgaaacaagtgtaagctgcggactaaaagcgggccgaaacgaagaacgaattgggcccttaagcccaaaatattctcgacccaaaaagaagcccagaatattatcggcccaatagcccat

SEQ ID NO: 9138 - DNA, 771 bp, Oryza sativa
  Clone ID: PAT_MRT4530_15583C.1
atgacgccctggatggatgagtggggacgacgtctttcagcgaggcgccgcagtggcgatggggaggagagcgcggaggaggcgcggtggatgccaggagcggtggagggagcggcggagagagggatcgagccatcgagggcgagagatcgcggtggttgtgaggaacgaggagaggtcggcgactcggggggtggggaggggatgtgcgtgtctgccaatagcacgcattctgaagcgttagatatctggatccaatgggtgccgttgaggagggaaggtgttggaattgccaagaaggctgaactccaccaattggtctaccactcctttggcaagatcagcctcaacctgggactgtggcgggtgcgacgcggacttgcaacttccgcgtgctaccccttctgccccatcgacgaagatgtggaacatctcttccttagctgctccggagtggcagccatttggcactcctatggactcgatgaacaacaagtcgcctccctagcacatctcgaagacctatggggtctccctccccctgacaatgctctcaccccacggatctggcgcaccatcttactcgccgccgtttggaacatctggaaacgccacaacaacaagatcttcaactccattgatgaagcccactcggtagttcttcatcgttgcgccaacgatatcgaattgtggtcaaaccgatgtaacgacgttgtaggcaaacaacaacttcactcttgggcgctaaatctttctgtaattaaccactaa

SEQ ID NO: 9139 - DNA, 421 bp, Oryza sativa
  Clone ID: PAT_MRT4530_15584C.1
gagggattggacgatgcggctgatgccgcgctggagtgagcgccgccgccgctggcgacgaccaagaagcgggtgtcctccaacgtgctgtccgaggagatcgcccatgtcttcaagacgataataggggaaagacagaggaattgagggtgccatgacgtggctactctgacatgtggggtccacgtgggtcccatattgattcagttgccacgtaggacaaaaccgggatcaaaaccgcttgaggatgtaaagtgaccggtttcgaaaattgagggatgtcatatatctaattttatggttgggggacgattttgtaactcgatgacaagttgagggaccttcggagcactttttccaattggaaacctaaccaaaaatatcacaaagggcccatttggattcaaaaaaaaaaaaagaa

SEQ ID NO: 9140 - DNA, 601 bp, Oryza sativa
  Clone ID: PAT_MRT4530_15585C.1
gtttcttggttcttgtgtccaagccggctgtaacctctaccaaagctgcctatgatctaagcttttctgagttaccggttgacccatttgctgggcccacttgggacaaccatgctcaaaccaaatgcaagatcttcctttggacggcgcacaagagacgtatctataccaatgacaggcgggtgcggcgcggactagcaacttccgcgtgatgccccttctgccccatcgacacttctgccccatcgacaaagatgtggaacatctcttccttcgctgctcctgagtggcagccatttggcactcctatggactcgatgaacagcaagtcgcctccctagcacagctcgaagacctatggggcctcccactccctgacaatgctctcacccctcgggtctggtgcactatcttactcgccgtcgtttggaacatctggaaacgccgcaacaacaagatcttcatctccatcgacgaaaccaacacgctagttcttcgtcgctgcgccaacgatatcgagttgtggtcaaaccgatgtaacgacattgtaggcaaacaacaacttcactcttgggcgctaaatctttctgtaattaaccac

SEQ ID NO: 9141 - DNA, 408 bp, Oryza sativa
  Clone ID: PAT_MRT4530_15586C.1
cccacgcgtccgtccactcgtccgtccacgcgtccgcccacgcgtccgtggcgtgcggagggtccccggcgtgggcctcctctacacggagctcgtccagggcattccgccgctgttcccgcgcctcgtacgcaagatccgctaggtccactccgtcttcagtttcatctccatcaagcaccttcccatgcagcacgtcgacgccgccgagcgcttcctgttccgacaggtctgtccacgcgctcgccgagtgttgcgctgaggcgggcgctacagctacaccgactccctggaggagccctgggagttcgccggcttgctcgtgatcggactcaagatgttcatccaggaggagtccggcttcgctcctcatcaagagatgatcgatgcagcccctgatggcgacta

SEQ ID NO: 9142 - DNA, 418 bp, Oryza sativa
  unsure (1)..(418): unsure at all n locations
  Clone ID: PAT_MRT4530_15587C.1
ctatcccatcttacccatgggattaaccaaggggactgactcgtggactaaaactacggntgtttctgtactttggcaacccctcagtttggatgagcgagtcccaatgtgtaaacaacacggctaacaactgggtgccccctcctttctttcnagatagaagacgtttgtttgatnaatgtaatcttttgttttaaatctgggantttntctaggtgctcnaactgctgactctgttgagatcaaactgaaagtactagcaacacgggtttnttgatttgtggcnccttgtgggtaggnttgaggatnatgtactnactacttgggacaatcccgttttcaagttcaggttcaantcaatccagatttggganatccccaattcgagatgaatcatgacaaaaaaaaaaaaaaaaaa

SEQ ID NO: 9143 - DNA, 1120 bp, Oryza sativa
  Clone ID: PAT_MRT4530_15588C.1
cctctctcatccatttcaattctctctcttgacacagctacaagacaagccacctcctccctccctcctctactgaaccaagaagaggagagagaaagtagaggagagggagacaagcagacagacagaattgcctgccaagaaacgagatacacacacatctagagagagaaagtagagagagatcaagaacaagaacaagatcaagaagaggagatctgtggcgatggggatgaggccgggttgggtaggcgggctggtggaggagagcttcttcgtgggttgcccagcgcacgagagccggaagaagaacgagaagaacatcttctgcctcgcctgctgcaccagcatctgccctcactgcgccccctcccatcgccaccaccctctcctccaggtgcggcggtacgtgtacaatgacgtcgtccgcctcggcgacctcgagaagctcatcgaatgctcctacgtccagccgtacacgatcaacagcgcgaaggtgatattcctgaagccgaggccgcagtcgaggccgttcaaggggtcaggcaatgtgtgcctcacctgcgaccgcatcctgcaggagcccttccacttctgctccctctcctgcaaggtggaccacgtcatggtccacggtggcggcgacctctccaacatcatcctcctccacccccaccaccaccccaacaccgccaccgcctcggccttcccccgtttcgaggacctccgtgtcggcgctgacgatgatgctgccgctatcaccgccgtcacgccagaaggacgttatggtggcggcggtggtgggtctagtgataatggcggcggtgatggcggtggcggcgaggtgggggaggtgaagaggaagaagaagaaggggggaggcactcacttggatctgtacttccatgcgttggcatgcatcacggtggaggtggaggagcagcaatcgtgtggtgcccgccggttgccggagctcgctctttggctccagtcgctggagctcgagcttggactgcaggcgatgaaatggcagccgctggacgccggtgccgaccggctaactccttggatgaagaagaagatagaacaagatgtggtctgccttgagtcatgggagtag

SEQ ID NO: 9144 - DNA, 351 bp, Oryza sativa
  Clone ID: PAT_MRT4530_15589C.1
cagcactcacttggatctgtacttccatgcgttggcatgcatcacggtggaggtggaggagcagcaatcgtgtggtgcccgccggttgccggagctcgctctttggctgtaggctaccaagaaaagacatgcatgaatggagaagatggaagtgcggtgggagcaacgactccgaactgccgtgtcaggagcagcagctgtcaggtgcttgcttgctgcagccagtcgctggagctcgagcttggactgcaggcgatgaaatggcagccgctggacgccggtgccgaccggctaactccttggatgaagaagaagatagaacaagatgtggtctgccttgagtcatgggag

SEQ ID NO: 9145 - DNA, 1197 bp, Oryza sativa
  Clone ID: PAT_MRT4530_1558C.1
ttttcgagctggtactaccccacatctgacttgatataggtaagagttcatataataagttccatcataagccgaaaatggagaagtcgggtaattctgaatgtttagaatttacaagagaatatatttttcgatcagacaacagtttggtgtttctgaagttgctaagacactaaaagatatacaaatcatccattggaatggaagtaccatccttcggtccagttttgcatttcagaaagtatagctgctacatctaaaaggcaatgtgcagtgcacaacaagagcagcaactgctcgtcagtggccaagccatgcagatggtactggctgaaacctagacttggcacccgctagtgcatcatggtaatcccctcggctgaagcagtcacggaagtcggtgaacagcttgtcgaacaccctccacaagactttatatgatctggagtatgggaatggaaggaaaaattctccttcttgagaaaggtgttttaacagcaagaaagtttgctggttttcttccaagttgtcaataactgcaagccatatctttgaagcaagttcatgtgccttttctcctgtcctaccacaagcaatgaactgatcgatgatggtgccatggagtatgctggaaggagcaacaactgggcgctcaagctgttctttcaaatagagataagtgtggccaacaagttcatcaatatccccaccagatgagacaaggttctggctgacgtataatgcttggaatctccttctagcagaacctctgggaattggcccaggccagcgtttccgtaaaccagctgatggccagttccttgcaatagcagtttgccacatacattctccttgaaatatgcttgcccagtgcttgctgacacatgatatttgaacccattcgcatgttggtaaccggataaatatttctacaaggagatgttcagggagcctaccaaatggtccattcctgtctgtcataaggctgcggccggcggcgcggctcagctccctggactgtggaggaccaggaacccccaccccaccccaccccacccaccctcgtcgggagaggaacgagcggaggagcagaggccgccgagtcgggtggtggcggaggaagaagcccggccggctgcggccggcggcgcggctcagctccctggactgtggaggaccaggaaccccccctcgtgc

SEQ ID NO: 9146 - DNA, 615 bp, Oryza sativa
  Clone ID: PAT_MRT4530_15590C.1
atggggataatatggcatcatcttagaattgttactgccagaatttaccatatgtgtgtggtgcggcggtacgtgtacaatgacgtcgtccgcctcggcgacctcgagaagctcatcgaatgctcctacgtccagccgtacacgatcaacagcgcgaaggtgatattcctgaagccgaggccgcagtcgaggccgttcaaggggtcaggcaatgtgtgcctcacctgcgaccgcatcctgcaggagcccttccacttctgctccctctcctgcaaggtggaccacgtcatggtccacggtggcggcgacctctccaacatcatcctcctccacccccaccaccaccccaacaccgccaccgcctcggccttcccccgtttcgaggacctccgtgtcggcgctgacgatgatgctgccgctatcaccgccgtcacgccagaaggacgttatggtggcggcggtggtgggtctagtgataatggcggcggtgatggcggtggcggcgaggtgggggaggtgaagaggaagaagaagaaggggggagggttcttcccccagattctggggctggggagtaggaggaagggtgcaccccacagatcacccctgtcctaa

SEQ ID NO: 9147 - DNA, 915 bp, Oryza sativa
  Clone ID: PAT_MRT4530_15591C.1
atggagggtggaggactgatcgccgatatgagctggaccgtcttcgacttgccatcgcacagcgatgagtcggagatgatggcgcaactcttcagtgcattccccatccatggtgaggaggaaggccatgagcagctcccatggtttgatcaatcttccaatccatgctactatagctgcaatgctagcagcactgcatacagcaacagcaatgctagtagcattcctgctccatctgagtatgaaggatactgcttcagtgactcaaatgaggccctgggtgtcagctccagcattgcaccacatgacctgagcatggtccaggtgcaaggtgcaactgagtttctgaatgtgatcccaaaccattcccttgattcattcggtaatggcgagctgggccacgaggatcttgattcggttagtgggactaacaagagaaaacagtcggcagaaggagaatttgatggccaaacaagaggttcaaaatgcgcgagaaaggctgaaccgaagcgagcgaagaaggccaagcaaactgtggagaaggatgcaagtgttgccatcccaaatgggagctgttccatttctgacaatgattccagttcatcccaggaggttgcagatgctggtgctacttcgaaaggcaaatcccgggctggccgcggagcagccactgatccccagagcctctatgcaaggaaaaggagagagaggatcaatgagaggctcaagacacttcagaaccttgtgcccaatggcaccaaagttgatatcagcaccatgcttgaggaggcagtccactatgtgaagttcctgcagcttcagatcaagctcctcagctccgatgaaatgtggatgtatgcgccaattgcgtacaacgggatgaacattgggctcgatctgaacattgatacatga

SEQ ID NO: 9148 - DNA, 531 bp, Oryza sativa
  Clone ID: PAT_MRT4530_15592C.1
atgatggagatcatgaccgggggagtggactgcatcgcagcggcgaatcagtggggacaacaagaccttcgcgagggagggagaaggcagcggcgttttcggagtccgccgcgcggagccctccctacgctagcgatggttcgacggaggtggtggcagcgggggactggacggcatgggggaacgggcaacgacgcgggcacctcccagcgttggcgacggagacggtggcagcaggggactggacggcgtggggaacgggtgacgacgcgggcacctcccagcgctggcgacggcgatggtgaatgccctccccacgccagcagaaggagacgagcgcgtcgtcggttggatcgggaaccggagtcctccctgcaccagcagcggtttgacggaggcggtggcggcaggggactggacggcgtggggaatggggcagggggagcgacggagacgagcacgtcggcggttggtgatgggggtgatgtaggaggaggaggagcacgatgcagtgatggggcagatgcgtag

SEQ ID NO: 9149 - DNA, 325 bp, Oryza sativa
  Clone ID: PAT_MRT4530_15593C.1
ttaatcaaaatcattttatcatgtgtggtcctttccttcattgcagaggttagatcgcttgaatggaaacggtacgataccttataaccagacggttgcacatgaatttgctagagaattagacagttaatttacatctcatcattgcataatgcgctgggccgtttgctcaagagatggcctacattgccatgggatgcattgataggtaatatatgatttgtgaagctgcatgatatgaactggatcacggggatacagtatcctctatcctctttgaattgacaaggggcagcgtgtgttctggatcatcttgattaggtag

SEQ ID NO: 9150 - DNA, 858 bp, Oryza sativa
  Clone ID: PAT_MRT4530_15594C.1
gcacgaggctctgctctgcttctgctcctctcttcctctctaaaaagcgtcgccccaaccaacctgccccgtcctagctaaagccatagcagtaggcgggctacgcatcatctcccgatttggcaacacccatattgctgcagtgcagttgcagttgttgcggttgcagtgcaagagggagaagaggagtttcttggtgagggagagggagagatgagggacgtggtggtggcggttggcggcgggacgaaggcggcgagcaggcagcaggggcagggcggggtgacgttggcggcggcggcggcggggtcggggtcggggtcggcggcgtcgccatgcgcggcgtgcaagctgctgcggcggcggtgcgcggcggggtgcgtgttcgcgccctacttcccgccgggcgagccgcacaagttcgccaacgtccacaaggtcttcggcgccagcaatgtcagcaagctcctccaggagataccggtgcagcacaggggggacgccgtgagcagcctggtgtacgaggcgaacgcgcgggtgagggacccgatctacggctgcgtcggcgccatctcgtcgctgcagcagcaggtggaggcgctgcaggcgcagctggcgctggcgcaggcggagatggtcaggctgaggatgagcaacgactacatcggccgccgcctccgggcgcgcggctgcgacggcggcggcggaggcgaaggcgggagcaccaccaccaccaccggctcgccgtcgtccatgtcgtcgccggccaagacggcggagccggagccgctctgcaagcccacgccggagctggacatggtggtggaccagccggacttcggcttctggtcctactag

SEQ ID NO: 9151 - DNA, 238 bp, Oryza sativa
  Clone ID: PAT_MRT4530_15595C.1
attccgctgacgcacgcgtccgatcgattttgctacaatcaacctacgttgttgtgcatctaccgagatggagatctaaaaaagcatcgtaccacagtcgaaatcgaaacgcgctactgaaattgttctgctaaagatgtcacttgtcctagaaattgtccattgaagatttttttgatgaaagttattttatgattgtgagaccagcctaaatatttttcactttgttccaatttat

SEQ ID NO: 9152 - DNA, 375 bp, Oryza sativa
  Clone ID: PAT_MRT4530_15596C.1
atggtggtggaagatatgcacgattgggctcattttcgttatgcagtcgtgctggaatttgagggtaacacacacagggagaaaacgctagctctggaaatgttgactcagacatgcactgtggctgagtataaacaacaatttgattcattagtttacaaacaagcagccgctgttgctctgacacaagaatgtgtttcgttggaacaatctcagcaatatgtgaagaaactgacttataagagggttggtcctacgttggaagggttacctgctgtagctgaaacattggccattaaacctcaaagagaagagctaatgggctctgctttaagtgtggggataagtattctcctaaacacatgcacgcagtga

SEQ ID NO: 9153 - DNA, 667 bp, Oryza sativa
  Clone ID: PAT_MRT4530_15597C.1
gtgacgagtgtactatgaaacatttctaactctgggagcatactttaagcaacaattcaaccggttcggaacatgttgatagctgacaatgcttagaaggacgctggagcaaagggaatgattttagccgcatatgcttttgatatattggacgatgctgaaagtggtggcagcatgccttgtgttatggtggactttggagctgcccaacagataaaacattctgctgatgaaaacaccaaactggttgttaaggtgattgactcttatactagtattgaacgtgaagtgctcgctctgaaaatttcacacttctccatcggaggacctatcttattttatgcagaattcctcatgcctgacattacggcgcctggatctaacatattgtcagcaatccaagactcatacaacttgatgtgtggaacttcaatggcatgcctccatgtgtcaggtgtagttgcattgctcaaagcattgcatggcggatcggtctactgctattatcaaatcagcactggtgactacagccagtaacgaaaaatatggggtcccaatattaactgatgggctttcccaaaacataacagatccatttgactatggtggcggcttcattgatccaaacagaggccgagatcctgcctagcatatgatgttgacccaa

SEQ ID NO: 9154 - DNA, 211 bp, Oryza sativa
  unsure (1)..(211): unsure at all n locations
  Clone ID: PAT_MRT4530_15598C.1
cccacgcgtccgccacaattcaaatattatagttgaagcatagtagtagaatccaacaacaatgaagatcattttcgtatttgctctccttgctattgttgcatgcaatgcctctgcgcggnttgatcctcttatttattgttataggctgtatcaactacagtcgcatctcctactattttttcaagcgctcagcccatgcagtgagttc

SEQ ID NO: 9155 - DNA, 219 bp, Oryza sativa
  Clone ID: PAT_MRT4530_15599C.1
ggtgttacaacaacgcacctgtccgtcgcgccgtgcgtatggtggccgtcgcgcctcgccatcgccggcggtgagaccctagcagagcgccgccgctttttccgctgcgcgccgagccgtcccggctcgggccgtcgcgtcgttcctccgctccgcctcgtgcgtgaggaagaagaggatagaagagagatgtggaccccacttatgattagcaaatag

SEQ ID NO: 9156 - DNA, 2732 bp, Oryza sativa
  Clone ID: PAT_MRT4530_1559C.1
ctagaagatgaagtccccgacttcatcaaggatgaagcggaacccggtgagactcccgatctgccaatcatggaaccgccaccttgacctccgcttgagcttgaacctctacctcagggcctacgctatgctttcctacacaatgatagagaagcccctgtcataatcagtgacaagctctccgaagacgagattcaacgtcttctaactgtgttggaaaagcctcgttctgttcttggctattcctttcaagatctcagagggatcaatcccgcactttgcactcatcgtatccatattgacccttagagtactctctctagggaacctcaacgacggctcaataatgcgatgcgagaaatcgtaaagaaagaggtcttgaaactcctgcatgccaggattatttatcccgtaccatacagtgaatgggttagcccagttcaagttgtgccaaagaagggaggaatgatggtcgttgcaaatgctcaaaatgaacttattctgcaacgaaccgtaaccggatggagaatgtgcattgactacatgaagcttaacaaggctatgaaaaaggatcatttcccactgcccttcattgacgaaatgttggaacggctggcaaatcattcattcttctgtttcctcgatgggtattccgggtatcatcaaattcctatccatccggaggaccagagtaatactacgttcacatgtctgtacaacacctatgcatatcgtaggatgtccttcggactgtgcaacgctcctgcatctttccaaaggtgtatgatgtctattttcttggacatgatcgaggacaatatggaagtcttcatggatgacttctctgtctatggaaagtccttcggtcattgtctacaaaatttagacaaagtcttacaatgatgcaaagagaaggacttgtttagatcttacttggtgggagctaaggtaataatttttactgatcatgctgctctgaagtgcctgctcactaagaaagatgctaaaccacgtctcttaagatggattttgctgctccatgaatttgacttagaaattcaggataaaaagggagtagaaaattccgtagcagatcatttgtctacgttgcagatcactgacacgcaggaacaaccaataaatgacttcttgagagatgacatgctgatgacggttcgcgactccaacctgtggtatgccaacatagtaaactacatggtatccaagtatataccactaggggaaaatcaacgaaagctgaagtatgaaagtcgctgtcatatatgggatgagctatacctatacagggtccactccaatggcttactaagaagatgtgtgccgactgaagaaggacttaagatcatagagcaatgccatacctcaccctatggtggccattacggtgcattccgcacccagggcaagatttggcaaagtggcttcttctggctgacaatgcacgaagattcaaaagaatttgtcagaagaagcacaagctgccagaggcaaggaggaatcactgctcgtgatgcaatgcccctcacatacaatttgcaagtcgagatattcgatgtttggggtatagacttcatgggacctttccctaagtcttgcaactgcgagtacattctggtggcagtcgactatgtctcgatggtcataagtgacagaggttctcacttcttcgacaagaccttccgagacctcctacgagacatgggagccaagcacaatgtggccactccttaccatcctcagaccaacggtcaagcagaaatattaaacaaacagatcaagaatattctgcaaaagacggtcaacaaaatgggaacaggatggaaggatagattgccggacgctgtcggggtctcacgacctcccgctagaaaggattactcctcgacagacgcactgtgggcataccggacagcatacaagacacccattggaatgtccccttatcaaatagtctacgggaagtcatgccaaatccctgtagaactcgagcacagagcatactaggccatcaggaactggaatatggactttgaaggagcaggagaatggagaaaaatgtaaattgatgaacttgaagaatggagggagaaggcttatcacaacgcgaagatatacaaagaaaggacaaagcgctagcatgataaaaggataaaaatcaagaaattcaagccaggagacaaagtattgatgttcaactccagagttatgctttttggccacggaaaattgcgtagtaaatgggaatgaccgttcaacgtcatcgacacctctacacacggggcaatcacactccacgacgactcaggtaatatattcaaggagcgacgcctttttcaagacgatgagaatgccgctccgccttccgccgagcgatatgtgggcaccctattcaccaaggcatgggatgaagtgctccacaaatatatcacacccaccgctactccatccactccgaaggaggaccggttttgcattcagggagtgcgaactcccggcggtgggtatggtaagggtttgctccagcctttgatgacatcttagaaggagggggcagcggaatcccatagccctccacctatgaaggtgaagcgtcatttgaagtaacagagaacatatggtagtaacggtactactacatgttaacgaccaaatttggtaattcaagtatcagagatgaagataaaaccgaagcgaaatccgagagatagatc

SEQ ID NO: 9157 - DNA, 315 bp, Oryza sativa
  Clone ID: PAT_MRT4530_155C.1
atatcaacacataattctatggggccggcacttttctaaaaatacattcccccatttcacccttctttttaatactcataacaaactaaagatacatgctcaaatatcattctatccactaaggatttacatattttccatctattattgatactaccatatattattacaaccatgccattggatgcacacaccataaacactttcttaacactaccttatcagcctagcctgtacactacacaatactaaacgtgttcattgtgccatgaccatccccgattccatgaaccttttttgtccgactatttacaa

SEQ ID NO: 9158 - DNA, 113 bp, Oryza sativa
  Clone ID: PAT_MRT4530_15600C.1
attcatattcctggttcctattttacattacctaaagtaataccaaatacttttatgcattacttgtaaatcttgataggttaattgtccctcgttccgttagaaagatttta

SEQ ID NO: 9159 - DNA, 573 bp, Oryza sativa
  Clone ID: PAT_MRT4530_15601C.1
ggcgctctaaactagtggatccccgggctcaggcccctgccgctctcgcacccccggcggcgacccgtctccggcatgaggaggcggcacagcgcaccgggaaggcctcgcggcggcgcggcgcgtggctgcggatccgctgtgccgccgccggatctggccctttcgtggctggatctggcccgtcaccacctgatctggccggtgagctgacggagcggtcgacggcggctggtggcgtgaggacggcggcgtttggcgggggagacggacgacgggagacgcgggcgacggcgcggctggccggtgagacgccggtggcagcggctgatgacatcggccgaggagctggcgtggttggcggtgaggctggcggctggctgggcgccgccgacgtgcttgggcggcgttgggcgaagagccggggcggccgtgttgcggcggcgtacttggtggtggcggcgtcggtcgaagccagggcggttttgctgcgccggcgtgcttggtggtggctgcgttcgtccccgaacacccgctgctcgacgccctcagttgcttcgcccaggtcatcgg

SEQ ID NO: 9160 - DNA, 1541 bp, Oryza sativa
  Clone ID: PAT_MRT4530_15602C.1
atggctattatggatacaaccattgctcatatcatgaataaacaagaagacaccaagatcaagtccttcaagtgttggaatccgatacagccacatgctacattgctgacttctaaaggccgttagatgtgcaattgtgcatacgagctccgttttgggtacaattggagagacaatgtgctgtggcacctgtcatgggcctttgggcttgtaactttgtttgggaccccgatgcaggaataatgttgatctgcatcggcaaaatcaacaacccacggggaggagtaatgattgctaaggcacaatgcaacaacatctagtacggttgtagtcgggtcatcaacgtttctcccaaatttcatcgcagtcgccgtgtctttgttgtcgtcgagacctacgaaaacggaatcatctttctgctagggttccatttttctagttttcagaagtttctgtcactatacgacaggtgtttgtaaaggcatcgatacatccaacctccattggggtgcttagttgagtcagtgtacatcaccattccgcttgcattgggagttcaaaacattcaacaaaaggaagagaataatgttcttgagaagaaagcggaggagtatgaagcacctgcgatgtttgaagaaagtttgcaaggtaaattaaatggtgctgagataaatgaaggtgagtattctcaagccgagctacacatgtccaccattagctacacacttgctattccttgcgataaaaaagagttgtgtgataattcttcagttatattaatgccacaactactgaatgaacatgctatttatagtgaatgagcatgttgttcaaattgctaatgaagttgaggaacgtgaattgctatcttctttaaaaactttgggctatgtattgtttcatggattttgtgagctcgataatttgaaggagaaattatttgctaagtctaatttgccatatctatccaactaatgctaattttcatatctttggttaatataatgatagaggaatatatttggtgcatagagtttacagatgttgttgtggataaaaattgcaagctagagagacatattattgcttatcatgttatctcaagtttttcttgttttgatgtaaagaaataggatggttttgaatgcactatgcagcgagcaccacatggaaaatccgaggacggttatctatgaagaaggggaggatgatgtgactatgactactatttatacaaccgtcactcacatcaagatcaagttcaccgagtgatggaatctgattcggccacctacgacattgctgaattcaaacggccaccaaatctaagatacgagctccgttttcagcccgatcacaaaaacaaggtgttgagtctcctataatgggcctatgggcttgtaacttcatttgggaccccagcccaagtagggcccatgtgggagagaactatgctaataatttcatatattacttgcatatatcaaagtctatgtatggggttaattaattcaaaaggggtaggtgacacgaggaagaat

SEQ ID NO: 9161 - DNA, 538 bp, Oryza sativa
  Clone ID: PAT_MRT4530_15603C.1
gctggtttgatcttgcaaccagcaacgaaacatgatgtgaccatggctattatggatacaaccattgctcatatcatgaataaacaagaagacaccaagatcaagtcccttcaagtgttggaatccgatacagccacatgctacattgctgacttctaaaggccgttagatgtgcaattgtgcatacgagctccgttttgggtacatgagtagttgatgaaaagtctcggagtcctctttccgatggattcggccatatcgccaaattccacctcagctgtccagaattggagagacaatgtgctgtggcacctgtcatgggcctttgggcttgtaactttgtttgggaccccgagccaagtggggcttgtgtgtggtgcaccccaaccaagtggagcacgaccctagggacccttacgtagtcctcccaccttcttaaatagctaggaataaggttgatttgcattggcaagatcaacaacacaagaagaggtgaatcgatcgctaaggcgcaacataacaacgtcttgtatagttg

SEQ ID NO: 9162 - DNA, 1478 bp, Oryza sativa
  Clone ID: PAT_MRT4530_15604C.1
atgacaacttctccatgaagtgcatatgaggtacctgactataagtttgcatgagttgaatctaagttatcattatgcgacgagaagtatgattttgttgcttatattgattggaagctagcaatagacaatgaatttgacaagatttttctgatgctcaaatgattaaggctgctaataataagttgacctcttctgcattattttggtggagttatgtgagtaataaacctaaaacttgggatgaatgcaaaacaatgatgggaaagagttttgtaagttcttattacaaatgtactattattgagaaattagaaaatctgaaacaagatgatagaaatgttaaggtgtacatctgagaatttaaagtttttcaaaacattcaacaaaaggaagagaataatgttcttgagaagaaagcggaggagtatgaagcacctgcgatgtttgaagaaagtttgcaaggtaaattaaatggtgctgagataaatgaaggtgagtattctcaagccgagctacacatgtccaccattagctacacacttgctattccttgcgataaaaaagagttgtgtgataattcttcagttatattaatgccacaactactgaatgaacatgctatttatagtgaatgagcatgttgttcaaattgctaatgaagttgaggaacgtgaattgctatcttctttaaaaactttgggctatgtattgtttcatggattttgtgagctcgataatttgaaggagaaattatttgctaagtctaatttgccatatctatccaactaatgctaattttcatatctttggttaatataatgatagaggaatatatttggtgcatagagtttacagatgttgttgtggataaaaattgcaagctagagagacatattattgcttatcatgttatctcaagtttttcttgttttgatgtaaagaaataggatggttttgaatgcactatgcagcgagcaccacatggaaaatccgaggacggttatctatgaagaaggggaggatgatgtgactatgactactatttatacaaccgtcactcacatcaagatcaagttcaccgagtgatggaatctgattcggccacctacgacattgctgaattcaaacggccaccaaatctaagatacgagctccgttttcagcccgtgagtacttgatggaaagctctcagagttatctttccaagtgatccagcctcatctccgaattcgatctagtttgaccgcgatcacaaaaacaaggtgttgagtctcctataatgggcctatgggcttgtaacttcatttgggaccccagcccaagtagggcccatagccgatgcgcagtccgactctaattccaatttgatttcataccaaatccacttagatcttgtatcttcttctttgaatcggatgtgaaattccgttgttaacaggatcaaacacaccacatgacatgaacgtaatcgacga

SEQ ID NO: 9163 - DNA, 1170 bp, Oryza sativa
  Clone ID: PAT_MRT4530_15605C.1
atggcatttttgggacaaaatcgtttgtacgatggtatttcttggaactcacacttgtcgatggtgtttttcgtgccgcttgcaatggaggttgattcaatccgcttgcctgcaccagatgagagggattggtcagagctaccggtcgacgcgctctctgtattctttgccaagattggggccattgagattctgatgggtgctggccttgtgtgccactcatggttggaggctgccaaggtccctgacttgtggagatctctcgacatgacgcgccataaggtgatcttcaagaagaccatcggtgtcatgtgcgcgatggctagggtggctgtggatcggtctgctgggaagctcgagtcgttttgggctcagaattttgtgacttctgatctactgaaatacatcggggagaggacaacttcactgaagagcatccgactgattgcatacacacgtgttccatggaaagaactggtcaatcttgctgcaaaatctccgttgctggaggacctagagcactcttacagagattcccttgaagaattcttcgaacaccttggttgcaagtgcccacagctgaggtgtctccgggtgaacaatgacggcttcgtgtatgacgatgccaagtatgacctgatggaccaagttattggcgaccacgacgacgacgatgatgaagaagatgaactcgaatatggcccttgggactggccatccaataacaacggcgtcgccttcgccattgcagagagcatgcacgagctgcgtatccttcagatcacaaacaacactctgacaaacgccggcgtcctcgccattcttgacagctgcaacaacgtatccccaaatgaccagctccgggcaagatgggccagtctcaggcatttcaatctttcagaaggctgcaggtggagcaatttcaaggagctccgtgtcatcggcgaggacgaaggccaagaattcaggcctgaagatgaactctctgatggattgtccaaggagttttgctacccttccaaggatgcagggatgggggatggttgggatgatgtttactgggatgatatctcacttccttcagatgatggccgtgatcctgacctgagcaatgtgaactgtgacgatatcacccagtacacctacctccatgattactattctctttaa

SEQ ID NO: 9164 - DNA, 499 bp, Oryza sativa
  Clone ID: PAT_MRT4530_15606C.1
gggcacaaaacaatcactaggggaaatgcgactttagtagcatttttttcatactggcatacgaaagaagataaacgagcttcattgatagggaaatacatatacctatgtactcaaactttaaaaaaataaaagggaaaaaactatttaaatgaagggtcaccaactatactttttcccacaaatattatatacgtaataaacccaaaatcggcgggatatatacctctgcggcaacatgcaaacatgggatacggaaggctttattttgggggggacatatttcacaaaatacccatagaaaattaattatgggcttccccaaaggcaaacttgatctcttttttgaaaaaaaggggatcttagagggggtaagaattttttcaaaaaaacacccccccccccctttattggaaaccggggccacatatagctccacaaccatggtttggaaggacacatgggtgccttattttaccacggggcttattcccccaaa

SEQ ID NO: 9165 - DNA, 388 bp, Oryza sativa
  Clone ID: PAT_MRT4530_15607C.1
aaaaaaccccctattatttttaaggaaatgaatttcacggtgacaatcccttaaaaccgaaagcggcaaaaaatttaaaatcaaaattttttgaaccaaaattgaaaaccccatcatgggcccaggggggggagcaaaccccaaaaaccggtagactttttggtcactccaaaaacctagctttattttttaaaataaaaaaacatttttttcccccccctgggggcaaagggggctagacaaccgaagaattccatgccggcttaagccacttggatcttttatttgaaaagaggggtggccttccaaatataggggaaaacccctttggccacaagcttttgggcaaaatcgggggggacaccgggggggaaggggcccctgaggg

SEQ ID NO: 9166 - DNA, 1221 bp, Oryza sativa
  Clone ID: PAT_MRT4530_15608C.1
atggccggcggcgatggcggcggcggcgggggagacgagagcgagtttgttggggtaggcggcggcggaggaggaggaggagaaggagaagggaaccagagcccccccaaccgtaggttcttcgtggccgtgcacgtcggcgccggcttccacgcgccggcgaacgagaaggcgtaccgccgagccatgaagcgcgcttgcctcgccgccgccgcagtgctccgcgagggaaatggcacaagccttgatgcggttgcagctgccattcaagtattggaggatgatcccatcacaaatgctggacgcggttcaaatttgactgagagtggtcatgtggaatgcgatgcaagtatcatggatggttctactactacctttggagctgttggagctgtgcaaggtgtaaagaatcccatccaaattgctttgcacttggcaagggaacagatgtggttggtgactgagagtgcaaaagcacagtggggaaaatacagatcattgcttgcaagtgccaaggaatcagttaatcatagcactggttctggttcagaatctagttcagtacagttggaagcaccaggagctgaagctgaggatattactggtgtaaagaagatgaagatgatcacacgatcaatcatggaggatgatcaagactgcgtgatggatactgttggtgctgtttgtgttgatgcttatggaaatatagcatcaggagcatccagtggtggcattgcactaaaggtccagtggatacaatctggccctgcttctgcttgtaccaaagttctgcgccaagcggttcaaagcagcagcgagatgtctcatgatacaggcgctgggttgttgctaattcaggctgatgttctaaaggtgagaggggaggtatctgcattgggagccgctgaacttgttgctgcctattcctccccttcatttggtgttggttatctcggaagcaatatgaacagtcctaaggttgcaatgcttagatcttcaaaagctgcacccaatacgataaaccattttgctactcgtgtcaactttgacgcacaatctgaccaatgatgtgctgttgttttaatggcgtgtgccactgcagtacctcttgtgaaaagagcatgttggtggtgcatgtagtctggtcttgtaccgaagatattgtttttggcctaacccaaaatttctgtcgttcctaatactcccttttcctataaacaa

SEQ ID NO: 9167 - DNA, 265 bp, Oryza sativa
  Clone ID: PAT_MRT4530_15609C.1
gagatatgttaggagccgaattaataatttttagacgttgcttgctgttggtgatgataggagtaggtgggatccatagtgtaatagcgcaacagatgcatgctttttatcagtcagtacctgaatttcatggagtatatcgctggttagatccatttttccctataaacccaaaggtcgccgccaggagaatcttgatgtaatagaggacgattatacagaaaatcacataaagcaatacgttcaacggaaaaaaaaaaaaaaa

SEQ ID NO: 9168 - DNA, 232 bp, Oryza sativa
  Clone ID: PAT_MRT4530_1560C.1
aaccaagcttaattttaccggtcacaaaaaaagcaaccgcttcccctatccacactttcgaacgagcctgcccaaaaatgaacaacccgactccctgaaaggaaaaaaagctacctatcgcactacaccgccacgggaacccgccacatatcggtcgcaacccggaatgccaaagggctggggcaccgaaaataaaccagcctatgcaaacatccccaaaccaaggcaggaa

SEQ ID NO: 9169 - DNA, 624 bp, Oryza sativa
  Clone ID: PAT_MRT4530_15610C.1
atggcgacagcgacggcagcggcgtttgcggatgagggcggtggcggcggaggttacggacgaggacagcggcggtcgagggcggcggctgcggcggacgcggaagaggcgattgagggcggcggtagtcgagggcggcggcggacgcggacgagggcggtggcagcggcggcgacgacgacggcggacgcggacgagggcagcagcgacggaggtcgcgagaggacagcggtggtcgagggtggtagcggacgcggaagagggaggcggcagcggtcgagggtggaggtggacgaggacgaggggggcagagattggggacaaagaggatcccctcctgtccaagatgcggaaagaggtggtggtggctgggggaaaggatactatggagccatggaggtggacaatgacttcttcctggtgcctgtcaagatctctgatcaccagggtttgtatgtaattagagaacttgttagcgacaccattagaatcggagcacttgtttacggagtccatgatgagagaacactgcaagagaaggagaaaatcccatacgtatcctttagagttcgtccaatcccttatgtacttttgaattttgcctcatcccttatatacccctga

SEQ ID NO: 9170 - DNA, 494 bp, Oryza sativa
  Clone ID: PAT_MRT4530_15611C.1
gcctgccccccttccttagcctggattcctttaagcgggccgcccttttttttttttttttttattaaccaaccctggaattggccctaaggggaaacctaagaccgttaatattcatttcagttttaccggtggagcacctggaaaaaaaagggaaaaaaattcgggggccaagaaattaatcttaggggcggttggccaatgggtggtctcccaccttgaggaataacctttaaaccttagagcctgcttcggactcccagggttctgattaaccaagttctttccaccattttcggccaaagggggggatggaaaaaggcttaccatttggttgatccgggaagggttttcggggagggtaaaccaaccttcccgaaaccattccagctgggttaaggcggccagtccaccccacttcaattaaaacggggttcaacgggggtttaaaaagggttacacctggcctggcaggtgccccaaattcttccccc

SEQ ID NO: 9171 - DNA, 153 bp, Oryza sativa
  Clone ID: PAT_MRT4530_15612C.1
atggcagttaaggaccggttcacggaaaaccctgggagacttatcgtgcttaccacaagcgggagtggggtgtccgattgtccagctgccggattcaccgcggtgcaagaagggaccgcccactgcccgttgggggtgggggtgaaaccttag

SEQ ID NO: 9172 - DNA, 1041 bp, Oryza sativa
  Clone ID: PAT_MRT4530_15613C.1
atggcagcagcccttgtgttcggctgggttgaagaaggccggggtggttactgcgacggcacactcggtccgcaggaagcagagccaccaagctcgcatgacacgtcgcgcacgattgctagaactcggcaattgctgccatggtgcacgacgatcttttctgacgtttccctcgttgagaggaaggccaacgtgtacggcctcttcgatgaggaggaggaggaggaggaggaggaggccgagagcttattctactgcgtggcaccggagtgccgatctggcgtcgaggaagaccaccagacccacgcggctggacacgacacgttgctcattaggttcttaggcggaggaggtggaggttatcttcgtgtgattggggatgagccttggagctggtttgttggcgggatcgagtccattccagtagagaagggcaaggggaagctggtccccctgcgtccaccgagcgggcggcgctgcaagacgtgtgcggacgtgctggtagccgccgagagcgcgctgttttgcacgttccagtgcaaggcgcgctctggcgaggtcgccggacaccgttgggcgcaggacctcctactggacgattttgctgtgccatgcgagagccaccattcctgcgcgcctgggacattcggcagcaagaactcgaggttcaccaccggccgcgtgatcgacagcgacggccgcacagtgattcgccacgtcagtgacccagacggcgggcgctgtaggggagtctgtacgatctgcaagggtgacgtcgcctcggcggatcacgcgtgccttcgtagcctacagttgatggatgacgaggcagtcgcggtctccgaggagcgacactacagagacgcattttgttttgattgtgccaggggtttctcctcagcggtgtgtggccatcatcatgggcacacttggctccgtgtgtgcttacatggtggccaccatggtggcctcgtcgtggatacttacgggcctgaatgccgttcagggcagccacaatatggccataagaagaggccataa

SEQ ID NO: 9173 - DNA, 1332 bp, Oryza sativa
  Clone ID: PAT_MRT4530_15614C.1
tcattgctccccatttatcatcagagaagggtaaggaactttgtttatctcgataatggttgactgctcctgtaggagtggttgtttccatggctctccatccatctgaacatacgcacgattccattggcctcccctcatttcatactcgatagatgcagcctgaacattatgctttgcttgatttcccctgaaataacctaagacacaacataaattttatgatacaccggtacattttgcccgattgtgctccggccatggctaatccctgcatgctgctcccgaactatacataatctaacgatctagaatacgaccctgattgaaatcggggaagatctcattgctccccatttatcatcagagaagggtaaggaactttgtttaactcgataatggttgactgctcctgtaggagtggttgtttccatggctctccatccaactgaacatacgcgcgattcctttggccacccctcgtttcaaacttgatggctgcagcctgagcaatgtgctttgctttaattagctcagccataacgaatgaagcatgccaaccttctttcagaccgaatatttcaagcaatccatcatcggaatgaagttctctgcagcttcccttttcttaggtgcaaatggcaactcttttccctctccatctggcatcataactacagcttgccaactgtcaagactgcaggtgggagctgtagctgccttgctgagataacgcttcacagcttccctcaaaagcttagttaacactgtgggtggaactggttctcttttcaacctataaagatctgtgagacagccaagtacccaaccaactgtgccatcaccaccagcaaccataatcctcaatttttttcgaatggtctccgcacaattgtcaccttgttcggccaatttctccaaacaacccaacccgtagttaatgaaatcagaaggcttcacgacagagagatcaaagacctgctcctcgctgatgagctcgtggagccgcaccttgagctcgggcccgtgcctaccgccgctccgcgagttgacgaacaccaccaccggcgtcacggccgcctccacctccacctccacctccccctcctcgcccctctccgccgccgccgccacgccgacggcctcgtccttggccttcacggcggccgcgaccgcacgccgcgcgtacagcggcatgacgacctgcctccgcagctcggccttgtccacctccttcccccacaccccgcacgcgcgcaccgactcccagatcgacaccctcgccgacggcgccgtcgacggcgccctcggcgtctcctccgctcgctccat

SEQ ID NO: 9174 - DNA, 328 bp, Oryza sativa
  Clone ID: PAT_MRT4530_15615C.1
ggtcccattcgcacgaaaggggaaagaaatgaagacatcaaccgaagaggcagggaggggagaagacagagcgacgcgacgaggcgaggacgaagaaagtattggggtggaggcgctcgaggatgaggaggccagcgcgagctcgcatccggcgctgcacccgtcccccgccgcctacgccgcgaacgccgcggccgtgaggacaaggatgaggaggaaggtggaagcttccacggcgggaggtggaattaatcacctgtggtgtgaacacatagggaagcaggggagggagctcctgctcctgcatgacgtcatccggcagcggtag

SEQ ID NO: 9175 - DNA, 357 bp, Oryza sativa
  Clone ID: PAT_MRT4530_15616C.1
atgtcgtccgggagcgccaccccgaggaggatttccgactgcgccgccaccgctgttgacgccgacgacgccgttgccggaggttgcaaagcctccccaaaaccgatagcaacggcgtactggtcatggcgcttgaatgcgatagcaacagctcatgagatctctctccaccgattatcttctcctggcggcagttgcgtggcagccgacgaagccaacggctcctgtgacgaggacgaagcgatgtcggcgaggggtggtggtggctcgtgctcgtggcgaggtagaggcggtggaagttgtgaattagtgaaactgcagcttgacctatatttgagggagtccgccgcgccctaa

SEQ ID NO: 9176 - DNA, 509 bp, Oryza sativa
  unsure (1)..(509): unsure at all n locations
  Clone ID: PAT_MRT4530_15617C.1
cataaggtgctttaattacttctatgaattttgttaaatcaaaattgatccatttgtggcttttattgtttgagattgaaaaaaaaaatcaggttgctgctcaagagcaaaaggcaaaaacatagggcagtgataaaactatttttgggcacagttagtctgtgaccatgtcttcataggcataaatgaaagggaaactcattgttaaaaaactgaaatggaaacaacttttccatggtaatccgattgaccatgctaggatcttggatatcaatactgtaattcataaagtgcagaatacatgatttagatggagaaaggcaatacatgaggaagatgttttgaacaaaatattatcttaggttaaactaatgtttgttttcttatctggtgttttgtacccttactaataataaatttgtactatctgttgtaattcatcaagtgttaccaatgttgaattggttgtactctatagcaacctagcaggactttatattttgntcttt

SEQ ID NO: 9177 - DNA, 450 bp, Oryza sativa
  unsure (1)..(450): unsure at all n locations
  Clone ID: PAT_MRT4530_15618C.1
caggattcggcacgagcaagcccaagtcgcgtcgcacccgaagcanagtntagaangagaggacggagcgcatcagccgtccgatcgantgatccgatggntctcgctctctccacctctgctgctgctgccgctgccgccgcggcgcgggcgctcgcggcgagggtgacaacgacaaagggttacgccgcgtccgcggcgtcgtcngctataaagcgggcngcggcggcggtggaaaggaaaggcgctgcggggattacccaagcgaaagacgggtcgtcctcttccgcggcnaaggangtgtcttgggttcccacccntgacngggcactnccggcctcccacttccccgnggggccgangccgccgaactccgcgccgcccacctccccgcanntacncccccgtnatgcgcgcgaactcccgtcntccnancgacnannanaccat

SEQ ID NO: 9178 - DNA, 542 bp, Oryza sativa
  Clone ID: PAT_MRT4530_15619C.1
gcgacacgtacagacaagctttccggccgcacacattacgaacgtggaggtgtcctacagaggcaaactgttactgggattggtctggttcctcctcaccctggataccgtgggaacctttctgcattcattcacgcgcaagagcgctatcgagctattcagagtgacctggggtgtcactgcaaagaacgcgcatatgtgctttaacgatctggtcctttcatacaaagcgatctacaccgactcgagcggtgggaactgcaccatttgctgcgtcacttaccatgagcgaaggtactaaatcatgactgtacatgacacattatcgacatcactggacactaactatgacgaacatccagaggggcactggctgtagtcccgaaggatagaccgctgctgatgtatctaggtagattgtcggcacacataccccgacatttcatcatgtgatgcaatgaatatgtattgacgatgtataaatgtgggctgcatcgacagagatcacagcgcaggcgcgaatttggacgaacaggaagcag

SEQ ID NO: 9179 - DNA, 4326 bp, Oryza sativa
  Clone ID: PAT_MRT4530_1561C.1
atgtcgaacgaggtgaaccaagtagggaaggctcccatgtttaatggcacaaactactccacttggaaaattaaaatgtctactcacctcaaagctatgagcttccatatttggagtattgtggatgtaggctttactatcaccggcacacccttgacggagattgatcaccgcaacctccaactcaatgcccaagccatgaatgccttgttcaactctttgagccaagaggagttcgatagagtgagcaaccttgagaccgcatatgagatttggaacaagttggcggagatccatgagggtacaagtaagtacaaggatgccaagcttcatttcctcaagatccaatatgagacattctccatgttgcctcatgagagtgtgaatgacatgtatgggaggctcaatgtcattgtgaatgatctcaaggggcttggggcaaactacaccgatcttgaggttgcccaaaagatgcttagagccctaccggagaagtatgagacccttgtcactatgcttatcaactccgacatgtcaagaatgacacccgcaagcctcttggggaagatcaacaccaatgacatgtacaagttgaagaagaaggagatggaggaagcctcaccttccaagaagtgtattgctctccaagccgaagttgaagacaagagcaagagcaaggtgaatgaagtcaataaggacttggaggaagagatggtccttcttgctagaaggttcaatgatctcttgggaaggagaaaggagagaggaaggggctccaactccaataggagaagaaatagaagacccaacaagactctctccaacttgaggtgttttgagtgtggtgagaagggacactttgcttccaagtgcccttccaaggatgatgatggagacaatatgtttgaggagctccatgcttatagtgagaaggagattgtcaagttcaaggccctaaagaaggatcatgcttctttggaggtcttgtatgagaagctaaagacctctcatgagagactcaccattcctcatgagaagcttaatgctacttgccatattgctcatgttgcatcatctaacatttctacctcttgtgatgatcttatggatatgcctagccctagctctagctctagctcttgtgtttctatttgtgatgcctcacttgttgttgagaacaatgagcttaaggagcaagtggctaagctcaacaagagtttggagagatgcttcaagggtaagaacactcttgacaagattttgagtgagcaacggtgcatccttaacaaggagggacttggattcattccaaagaagggtaagaaaccttctcacagtgccactcgttttgtcaagagtaatggtaagtattgctccaagtgtcgtgaagttgggcatttggtgaactaccgcaccggtgggagccattgggtgcttgatagtggatgcactcaacacatgaccggtgatagggctatgttcaccacatttgaagtaggagggaatgaacaagagaaagtgacatttggagacaatagcaaaggaaaggtaattgggttagttgcaaaaacttctttgggttggctttggcatagaaggctagcccatgttggcatgaatcaattgagcaaactttcaaaacgtgatctagttgtgggcttgaaagatgtgaagtttgagaaagataagctttgtagtgcttatcaagccggcaagcaagttgcatgttctcatcctactaagagtatcatgtccacatctagaccattggagctcttgcatatggatttgtttggcccaacaacctataagagcattggtggtaatagtcattgtcttgtgattgttgatgattattctcgctatacttgggtgttctttttgcatgataagtctattgttgccgagcttttcaaaaagtttgcaaaaagggcccaaaatgaatttagttgcactcttgtgaaaattagaagtgacaatggttccgagtttaagaataccaatatcgaggactattgtgatgatcttggtattaaacacgaactttccgctacctactcacctcaacaaaatggtgtagtggagaggaaaaatcgtacattgattgagatggcaaggactatgctagatgaatatggtgtttctgattccttttgggcggaagccgtaaacaccgcttgctatgcaaccaataggctttatttgcatcgtctcttgaaaaagacttcctatgagctaattgttgggaggaagccaaatgttgcctattttcgagtttttggttgcaagtgttatatttaccgaaagggtgttagactaaccaaatttgaaagttggtgtgatgaagggtttcttctaggttatgcctcaaatagtaaggcataccgggtctacaacaagaacaaaggtattgtggaagaaaccgccaatgttcaatttgatgagactaacggctcccaagaggggcacgagaatttggatgatgtaggtgatgaaggcttgatgagagctatgaagcacatgtctattggagatgtcaagcttattgaagtggaagacaagccatccacctccactcaaaatgagccatctacttccgcttcaccaagtcaagctcaagttgaagtggaggaggagaaggcacaagatccacctatgcctccaaggatacacaccgctctttccaaggatcacccaattgaccaagtgttgggtgacattagtaagggtgttcaaactcgatctcgtgtcgcttcgatttgtgaacattactcatttgtttcttgtcttgagccaaaacatgtagatgaagctctttgtgatccggattggatgaatgctatgcatgaagagctcaacaactttgcaagaaacaaggtgtggactttggttgaaagacctagagaccacaatgtcatagggacaaagtgggtctttaggaacaaacaagatgagaacggattggtggtgagaaacaaggcaaggttggtggcgcaaggtttcacacaagttgaaggtttggactttggtgaaacttttgcccccgtgacaagacttgaggctattcgcatctttcttgcatttgcatcatgctttgatataaaactatttcaaatggatgtgaaaagtgcttttctaaatggtgaaattgccgaacttgtctttgttgaacaacctcccggttttgaagatcctaaatatcctaaccatgtttacaaactctcaaaagctttttatggtttaaaacaagctcctagggcttggtatgaaagattgaaagattttcttttgtcaaaggatttcaaaattggaaaagttgacaccacccttttcacaaaaatcattggtgatgatttctttgtgtgtcaaatttatgttgatgacatcatattcggttctactaatgaggtattttgcaaggaatttggtgatatgatgtctagggaatttgagatgtccatgattggagagttgagcttcttccttggacttcaaatcaagcaactcaaggatgggacgttcgtgagccaaaccaaatacatcaaggatctactcaagaggtttggcttggaggatgcgaagcccaccaagacacctatggcaaccaacaggcatctcgaccttgatgagggaggtaaaccggtagatttaaagctttattgttccatgattggtagcttgctttaccttaccgcatctaggccggatatcatgtttagtgtttacatgtgtgcacggtttcaagccactcctaaggagtgtcacttagtggccgtgaaaaggattccaagatatttaaagcattcctctactattggcttgtggtacccaaaatgtgctaaatttaagcttgttggctatttcgattcggattatgccggttgcaaagtggatagaaagagcacatccgatagttgccaaatgcttggtagatcccttgtgtcatggtcatccaagaaacaaaattccgtagccctctctaccgccgaggcggaatatgtttcagcgggtagttgttgtgcccaattgctttggatgaaacaaaccttgttggactatggcatatccttcaccaaaaccccactcctatgtgacaatgatagtgccataaaaatagccaataacccggtccaacattctagaaccaagcatattgacattcgccatcacttcctaagagaccatgttgacaagtgtgacatagtcattagccacataagaaccgagaaccaactagccgacatctttaccaagcctcttgatgaaacccgcttttgcaagttgaggaatgagttaaatgtcatagatttctctaatgtggcttga

SEQ ID NO: 9180 - DNA, 244 bp, Oryza sativa
  unsure (1)..(244): unsure at all n locations
  Clone ID: PAT_MRT4530_15620C.1
cccacgcgtccgcggagaacgacgtggtgcaggtgaccgagctgctcatgaacgagctgctcaagctcgacgcggtggtcgccgacggcgacgtcaaggcgcagaggcggntacaggtgangctgcnagctaccntcgccgctggtccaatttccaccgactagcttgaccgccatggttaatgagctcaacctgtgcctcccatgactttaaaagcgaagcgcgtgcataactacgtgcatac

SEQ ID NO: 9181 - DNA, 310 bp, Oryza sativa
  Clone ID: PAT_MRT4530_15621C.1
gtaaattggggtggggaggaatcatagaaggtttcttactatattacatcatccaatcggggccacacatacggagtccatttacttacctacaccaagggggggttccttccgaggttgttccagaaaatgggaagggggggtggttttcttgagccggctgatttttccgtaccaaaccctacacaggaaaaatacaggagcgggcctgatggggttctaccaccttatgatgggattgatttgccccgtttctggtcttaattagttgatattttcccgccctattttttagaaacgaaaacctccc

SEQ ID NO: 9182 - DNA, 621 bp, Oryza sativa
  Clone ID: PAT_MRT4530_15622C.1
gcacgagggtgagctcaatcgtgtgaagaagctagagcataaactgcaactgataggaagctagctagctagcaggaggatcaatggcgtcgtctccgacgatgttggtggtgatctgtagtagcttggccatggcggtgatcctgtcgtcgagctcgccggcgatggcgcagctggacgtggggttctacagcaagacgtgccccaaggtggaggagatcgtgcgggaggagatgatcaggatccttgccgtcgcccccaccctcgccggccctctcctccgcctccatttccacgactgcttcgtcaggggttgcgacgggtcggtgctgatcgactcgacggcgagcaacacggcggagaaggacgcgccgccgaaccagacgctgcgagggttcggctccgtgcagcggatcaaggcgaggctcgacgccgcctgcccgggcaccgtctcctgcgccgacgtgctcgcgctcatggcccgcgacgccgtcgccctctccggcggcccccgctggcccgtgcccctcggccggcgagacggccgcgtctccgccgccaacgacaccgccacccagctgccgccgcccaccggcaacatcacgcagctcgcccggatgt

SEQ ID NO: 9183 - DNA, 429 bp, Oryza sativa
  Clone ID: PAT_MRT4530_15623C.1
atggcgacggccgggcagcatggcggaggcagaaaacaacagcggctgtgcggcgggcgacgggggcaacggcagccgggtcgcaaggctaaggcggaagatggcggcgaccgtgcggcgggcgatggggggcagcggcggctaggccgcacaattgaggcggaagacggcggcagttgtacgacgggcgacgagggtagcggcgaccgggtcgcgtggctgatgcggaagacggtggcagccaggccgcgcggcggaggcaaaagacggcggtggttgcaacaagggcagcggcggcagttagcgacggaggcaggcaacatcgcagcgaaaggcatggctgatgcgggagttggcgaggagaagaggccgcgcaaggcaggccccacagtctcctcgagcggcgcgtgcagcccgacaacaaattag

SEQ ID NO: 9184 - DNA, 2158 bp, Oryza sativa
  Clone ID: PAT_MRT4530_15624C.1
cttcgtcatccgccgctgcaccgtcgccatggctctcttcgccgccgctcgccgcgccgccacatccaccctccccctgctccgcccgctggccgccgcggcggcgcggccgcagccccgctcgatgccgttctcgtcgtcggcccccttgacgaagcccgccttcgacagtgagctcgtcaggatcatcgacaacgcgatcaacgacgccgaggaggagagcgacggcgaccaagaccgggtttccatggacagccttgagagtgacgatgaacctgagcctgccactgccaaggtcaaatgtgagaaaagatggaccagcgatgaatctgagtacgaagagattcaggttccctccaaatccagcattcctctcaccgtcaccatctcaaagggagatggacagatccttgaattctcctgcactgcccatcctgaagagatcgtcatcgacaccttgtccttgatgcagccaccagaggatgacaacaatgaaatgatcgcagatgagggtcctgatttcgatgacctcgatgaaagtctgcaaaaggcgttgaacaagtacctggagctgcgtgggatcacacccatggccgcaaaattcttgcaagagtacatgatctacaaggaaaacgaagaatacctcctatggttgagaaagctgaaggatttttcctcgtccatccagaacgaactgttcgtcgtctgggcctgcttcctcctcctcctcctcggcagcgccgacaccatgacggcgttcagcttcaatgacagcagccagcagacgaggtccatgatgaaccagaccctccacgtcgtgtacctcctcttcctcatcctctactacaaaggccagctccgcggcaccttcctcgtcagcctcttcctcctctgggagaaccaggtggtgtacgagtacatgaagtacgagccgctcaacagcgctggcattcaaggtggctcctcggagtacatctatctcgtcgacggtgaggaggtggagaaggtggacaatggggaggtcataaaagtgtcgtacaaggttccagagacggtggacgtcgaaaagtgtccacaagtgaggttaaggttcgcagccgatcatgtcggtcatatcaacttccctttacagtacgacaagtgccgagactttgtcgtcaaggggctcctcgccaatgacgaagacctcggcagggcattccgggtgatcgaggctgagcttgggttcctctttgacttcttttacgctcggtacccctcaatcaaggacaccctggctcctgaccttgctgtcaacgctgccaacaacatccttatccatggctttaatctcgacctccttgtcacccgcttggtcattgtctggtacatcttcctcgagtcgtaccaattccttgcctttatcttctccgactggcacaaggggaccatcggccaatacttcatcctcgacaacatccaacctcactgggtcaagaccttcctctcatggttctctctcgaggcccaggcccttgattcatcattgatgactcgctccgtccgcttgatgccggtggtgctccgtgagctcaacaactgcgatggcaagatcaccgacgggaggatgtggatgtaccggacaggcattatcgacttgaacctcgatcgtgatgtcttgcacgcatggacaccactgctggtggcattccagccggagctggtcccggacagcacgtacacgagcacttcgatggcccgtggcacactgcagaatgcctgcgacttcctcgccaaatgcgagtccgccagtgacaagtatgataagctgatggatctggggcgcttggaccacacggagcacaatgttcggttcctatctgagggcgcaaggatcgccgtgtacctcgttgagcggatcgaggatgccgggaagcggtggaaggtgcttgccgccttctgggcaaacatgatgttgtacatcgccccgtcggatagggcggtcgcacacgccacgaggatggccactggcggggagtttgtaacgatcatttgggctctgctgtcacatgcccatgtagtagacaagcttcaacatcgtggcggtgccccgggattgcctattctacttgaagaagaggaagataaaagggcacaagcagggccggccctgatctga

SEQ ID NO: 9185 - DNA, 330 bp, Oryza sativa
  Clone ID: PAT_MRT4530_15625C.1
atgagacctgtcatcccgtcaggacttcaagagagacctgccagtgccaactcatcaagcagggtttacgaggcgagcatttcggcgccctggagacggatacagacgccgccgagtattccgaatcaccgcgtcggccgacgaccgcccgccgacagcagaggtgatcggaaatgcttgtcctcgccgtcggaggtgtggacgcctcgccgcctcggcggagctgttcccagttgccaacccgctcaccgctgggtgatcgattcgaccttctgcattgaagattattcacaaatgaacaccgtaaccatcaagttcttgaaatgttga

SEQ ID NO: 9186 - DNA, 818 bp, Oryza sativa
  unsure (1)..(818): unsure at all n locations
  Clone ID: PAT_MRT4530_15626C.1
atggctcccaccaagaaggcggtaaggttcctgatcgattgcgcctccctccccctcctcgtcgcgctctcccgctgcgcatctcaccatttcgttgcgatgtttttgctggtttctgattggtgggttgtggcgatgatgcagaagaagagcacggacaacatcaacaacaagctgcagctggtgatgaagagcggcaagtacacgctcggctacaagaccgtcctcaagacgctgcgcaactccaaggggaagctgattatccttgcaaacaactgccctccactcaggaagtctgagattgagtattacgccatgttgggaaaagttagcgttcaccatttccatggaaacaatgttgatcttggaactgcctgcggcaagtactaccgggtgtgctgcctcagcatcatcgaccctggtgactcggacatcatcaacacaacccctgcctcccagtgaagaagtttttacctatttagttgagatgtagggttcagacgtgcttacatggccaatggctgtttcttggttatctttagttgtgtaattttgctatgctgagttgggatctgccatacagataatactccatattgttgttaaggcatttctatggttttgtttgatgagatctctnatttaatatattgagcaaagtttattctcctgccgcgctccgagcatnagcatgtgagcatcagcaaagagagcatcatccaagatgtttgcttccttgcttatgtggttcaaaagctagactatggttgttaactatctcgaagcttcgaatcacttgctttgttttttatccaaaa

SEQ ID NO: 9187 - DNA, 1013 bp, Oryza sativa
  Clone ID: PAT_MRT4530_15627C.1
atgtgcttgccgttctcgtcctgctttggcggcaagaacgagctggacttcggcgaaaccagcagggaccccgactaccatcccctctcaaccacgcccagcggcaacagctaccaaggtggtgacgccaccgaaacgaggtatgcctaccagcagcaacggaagcccgccgccgcaccgtccaccgacgggtcggcgaaggcgccgcctctcgctgccgctgggtggagcaacaacaaggagttgtgctttgtaagccgatgtcgtcgtgtattcgccgtggctggtgagcttccaagttattttgtcctcttcgtgctcaatcaggtgcagattctgcactacgctccagacttcgatgagctgccaacccgagtcccagaagctaacttttgtgccgtctccaaccgttatagatgttgcggctgcaaaaaccttaaggctcttgcgaatttctccaagtttaggatgcctagacctcctgaggcagttgggaggggctccttggatgttttcaggcccgtcaggaggaatacttgctgcgaggcatatccaaggcaagattatttcgctggtgtcaaacttgtcaagctgccagtaactagtatagtaagggacggatcagctcagtttccagtcgtgcgagccgagcatacgacggtcgaggccctgcagcagtcgagcatgtgcttcaagctgggcacctgctttggcgttggcgttggcggcggcgacgactactaccgaggctacaccaccgtggccaccgacgagacaggccgcaaagccaacaacgacgtcgcaagaaaacccgtcaccgccgccgccgccgcaacgagggatgtctacggccgcgccgccgaccagccgtcgccgaagccgccggccgctgcgaggaacagcaaggtcgctgatgacacgggggtaaagcagccagctgatgctgctgctccggtcatctcgagggatccgggtcatgtcgactagctgcagttttattgatgaaatcctaa

SEQ ID NO: 9188 - DNA, 1486 bp, Oryza sativa
  Clone ID: PAT_MRT4530_15628C.1
ggttcagacagccgattagtttgataaataatgcatggcaaaaaatgttactaatcatgttgaggaaatacagctcgtttcctagcattagcggtctctcggatggcttctcctgtagcacaagctacagatgcatatacaaccatgcatccaatagattaagttgcaaaaagataagaaaaaaaataaggatgcctcaatagtacaagaccttatttctactcaacagtacacaagcgactctttccgaatgttgtgtggtatgtatgtttcttagggagacctgaatgcctccccagcatagcgcacattgcctagctccatttcgatccgcagaagctgattgtactttgccagtctctcgctacggcatggagcaccagttttgatctgaccacttgctaaaccaacagccagatctgcgatgaaattatcttccgtttccccactcctgtggctgaccatcacgccccaaccagcagcttttgaatcaagagcagcttgaattgattcagtgacagtgccaatttgattaaccttcagcaaaagagcattgcaagccttcttgccaatagcctctgcaatacgttttgggttcgtgacgagtaaatcatcccccacaatttggatattaactgaagactgcaatgatgcccatgagctccagtcatcttgatcgaaagggtcctcaattgatacaatggggaaatcccggacgcgtgggcggacgcgatcgcagagatgctgggctgaaataacataagctccatcattaggctgattcttaaagtttaagtcatagcttccatcctttgtaagaaactctgatgctgcaacatccattccaattttaatctttccagagtagcctgccttctcaatggcatccataagcaagacaaggccttctctgttgtcttgaacattaggagcaaagccaccttcatctccaacattgcatgcatcttgaccatatttcgccttaatgatgccctttagggcatggtaaacttcactacccatgcgaagagcctcagaaaatgaagatgctcccacaggtaaaagcatgaactcctgcatggccagattgtcgcctgcatggctacctccatttattacattgaaagctgggacgggcatgacaagctcctccgcgccccccaactcctgaatatgtttatataaaggaacttcctttgcaccagcaccagccctgcatacgcttaaagagactccaagaatagcattggcacccaattttgacttgttcggacgcttccatcaatgtctagcatgattgcatcaacatcactctggttcctgacgtcgacgccgacgagcttgggcgcgatgacctcgttgatgttgcggacggcgttgagcacgcccttcccgccgtacgccgccccgtccccgtcgcggcgctcgagcgcctcgtagatccccgtggatgcgccgctgggcaccgcggagcggtgcctcgtgc

SEQ ID NO: 9189 - DNA, 195 bp, Oryza sativa
  Clone ID: PAT_MRT4530_15629C.1
atgccggccaggtcggtgctccgctgccgttgcctctccctcgcctgggccgccgcgctctcctccgacgccttcgtcggccaccacctctgcctctccaacctccgccgccacggtcccaagctctgcatcccgccgtctagcctaaccatactcttggaatactcacttaatgttgagaccggatatgaatag

SEQ ID NO: 9190 - DNA, 4107 bp, Oryza sativa
  Clone ID: PAT_MRT4530_1562C.1
atgtcgaacgaggtgaaccatgtagggaaggctcccatgtttaatggcacaaactactccacttggaaaattaaaatatctactcacctcaaagctatgagcttccatatttggagtattgtggatgtagactttgccatcaccggcacacccttgacggagattgatcaccgcaacctccaactcaatgcccaagccatgaatgccttgttcaactctttgagccaagaggagttcgatagagtgagcaaccttgagaccgcatatgagatttggaacaagttggcggagatccatgagggtacaagtgagtacaaggatgccaagcttcatttcctcaagatccaatatgagacattctccatgttgcctcatgagagggcttggggcaactacaccgatcttgaggttgcccaaaagatgcttagagccctatcggagaagtatgagacccttgtcaccatgctcatcaattccgacatgtcaagaatgacatccacaagcctcttggggaagatcaacaccaatgacatgtacaagttgaagaagaaggagatggaggaagcctcaccctccaagaagtgcattgctctccaagccgaagttgaagacaagagcaagagtaaggtgaatgaagtcaatgaggacttggaggaagagatgggacactttgcttccaagtgcccttccaaggatgatgatggagacaagtcatccaagaagaagagtggaggctacaagctcatgaagaagcttaagaaggaagggaagaagattgaggctttcatcggggaatgggactcaaatgaggagtgctccgcctcatccgggtccgaggaagaaggtggtgatgatgcaagctccaagaagaagaagatgatcgttgttgccatcaaggaggctccatcactctttgctccactttatctcatggcaaagggttcctctaaggtaacatctcttagtgatagtgagagtgatgatgattgtgatgatgtttcctatgatgagcttgtgagtatgtttgaggagctccatgcttatagtgagaaggagattgtcaagttcaaggccctaaagaaggatcatgcttctttggaggtcttgtatgaggagctaaagacctctcatgagagacttaccatttctcatgagaagcttaaggaagctcatgacaacctcctttcaactactcaacatggagctcacattgatgttggcatatcttgtgatttgcttgatgatagtgctacttgccatattactcatgttgcatcatctagcatttctacctcttgtgattatcttatggatatgcctagcccttgctctagttctagctcgtgtgtttctatttgtgatgcctcacttgttgttgagaacaatgagcttaaggagcaagtggctaagctcaacaagagtttggagagatgcttcaagggtaataacactcttgacaagattatgagtgagcaacggtgcatccttaacaaggagggacttggattcattccaaagaaggataagaaaccttctcaccatgccactcgttttgtcaagagaaatggtaagtattgctccaagtgtcgtgaggttgggcatttggtgagtgattgccccggaggttatgcctcaaatagcaaggcataccgggtctacaacaagaacaaaggtattgtggaagaaaccgccgatgttcaatttgatgagactaatggctcccaagaggggcacgagaatttggatgatgtaggtgatgaaggcttgatgagagctatgaagaacatgtctattggagatgtcaagcctattgaagtggaagacaagccatccacctccactcaagaagagccatctacttccgcctcgtcaagtcaagctcaagttgaagtggaggaggagaaggcacaagatccacctatgcctccaagaatacacaccgctctttccaaggatcacccaattgaccaagtgttgggtgacattagtaaggatgaagctctttgtgatccggattggatgaatgctatgcatgaagagctcaacaactttgcaagaaacaagttgtggactttggttgaaagacctagagaccataatgtcatagggacaaaatggatctttaggaacaaacaagatgagaatggattgatggtgagaaacaaggcaaggttggtggcgcaaggtttcacacaagttgaaggtttggactttggtgaaacttttgcccccgtggcaagacttgaggctattcgcatccttcttgcatttgcatcatgctttgatataaaactatttcaaatggatgtgaaaagtgcttttctaaatggtgaaattgccgaacttgtctttgttgaacaacctcccggttttgaagatcctaaaaatcctaaccatgtttacaaactctcaaaagctctttatggtttaaaacaagctcctagggcttgggaatttgagatgtccatgattggagagttgagcttcttccttggacttcaaatcaagcaactcaaggatgggacgttcgtgagccaaaccaagtacatcaaggatctactcaagaggtttggcttggaggatgcgaagcccatcaagacacctatggcaaccaacggacatcttgaccttgatgagggagctatgcctccccgcactcggcatggtcgtcgtgctcccacgcccgatcccgttagtgagaatgaggaatcaagcggagatgagtatgttcaaagtgatgaggacaatatggaaaatgttgagggtgatgagatggaagtaagtgatgatggtgatgacaatgagagtgcaaatggtgaagatgatgaggcaagtgatgatgggagtcctctcgattcctcgatccaatttgtgcttaatttgaggaatgctcaacaatacactatcctccgtcatcatgatcaattccggaggcctaacgattgtaatgatccaagatttcatacacggttccaaaagtccgtgtatgtacaagtgtatgccaacaaagccttcgccgaacacaaatggatctcttggaggcacattggtgagacaccggagtttgagaatttgcaagagatgttccggaccattgggattgatagaattgtcaccatgaagcaaccttttgatgaagatctcatccggcaattctatgccaccgtatgggtgtccggcgattgtgatgcaatgaagtggatgtcggggaccctccgatgctctatcaaccgccgtgaattcaaggagctcttgcacattcgcttcaacaacggggatgaccttcatgatgagcacacccacaatctctttcccattgatcacttttctcagttttatgaagaagggggaaggcacacatatggaaaggtggcgggtttaagggctctcccaagtgtgatcaaccgcatagtaagggccaccatcctcccaagatacggcaacaatgatgacatacgcggagttgcttggcatgttattgatgccattatggatggtcgtcggtttgatgttatcaaccttatgatgaaggagattgccatctcaaaggggactattggacaaggaatctattatgctccctacataatgagcccccctcctcctcaagggtatgatccaagtactttattccatccacaatatgcctactttggaatgcaaccaaatgacttctttaacccggtccttggggctattaataccctcagtgaaagcattcaacgcttatccaccgggcatgaagcattgcgtgaggatgttcgtggcttgcgcaccgatgttggcaacttgaatacttcgaccggcctcctggaggccgagatgatgctgctcgggatggccgatacagagccgacggagccgtaccaagagtcaagtgcatttgcttccattgtagagctacttgtggaggagttgcccggtgacctctccgagaagattgtggaggaggcccggcgccggtttgtgagtggtttagagttcaccaccttcggagtgaaggaagaactaccccgagtgatcgaggcttgggtagtcctctccgtgggccggctcccgccttgcccaccccttgacgaagggggcgtgcggtggcttcgtagttga

SEQ ID NO: 9191 - DNA, 171 bp, Oryza sativa
  Clone ID: PAT_MRT4530_15630C.1
agatatcatactccgtggctaccgacgtcgccgcgtagtaagtcactttataagccttaacaccagctttaaattcaacacttgctttagtctctgtttgtggggacataagagcctccctacattttttgaattaagaatttttacaacgacagggtctactcggtatgg

SEQ ID NO: 9192 - DNA, 285 bp, Oryza sativa
  Clone ID: PAT_MRT4530_15631C.1
ttaagcttcaggaatgatcctctgaagcacattgaccttcaccacgcggtattcagtgggcgcacagttgtcggaaaccactccgccgtcgcaggggcagccccagccgcaccgcaaggagcagttcagtggcagaccatcgacatggcgcagctcgttgtcgactccggatttcctaccaggatgggattccttgcaccgtacccacatgtacggtaccacagggatcaacttgcggtcgagggagccccaccacccgtaggacgggaagagactttcaaccat

SEQ ID NO: 9193 - DNA, 342 bp, Oryza sativa
  Clone ID: PAT_MRT4530_15632C.1
atgctccagcgcatcggcgctcgcatggtgacgccctgtctcgccatggtcgtggcggcgctcgtcgaggcaaggcggctccgcgtggcccgcgacgctggcctggtcgaccggccggacacggcgacggcctgcctcgccatggtcgtggcggtgctcgtcgaggcaaggcggctccacgtggcccgcgacgccgccgctcatctcctctgccgcaccccgccgccgctcctctcctccgccgtaccctgccgctgctcgcctccttcgccgcaccccgccgctcgcctccactgctccctgtcgctcgcctgcctcaggcgcgtgagtgagagagaatga

SEQ ID NO: 9194 - DNA, 125 bp, Oryza sativa
  Clone ID: PAT_MRT4530_15633C.1
ggcttgcaacttgcggaaattcacaaccttttaatgatactacttcactccacaactttccaggtttgaattttaaaatccccctaaaggaaaccaaatccgttgctgcttttatttggaattta

SEQ ID NO: 9195 - DNA, 481 bp, Oryza sativa
  Clone ID: PAT_MRT4530_15634C.1
cgctcctgcacccttatcacaccctctccctccccctccccctcccccgacctctactcctcgacctacccacctccaatggggtgtcctccgccgccgccgccgccaccacttcctccggtgcgtcgccgcctccgctgccaccctgcagaaggaactcacggtgccgcgcaccccaacagccgcgcagagccccggtccagtgaacccgcctacgctgttcgacagaatgcccgagaggagcgtcgcgacggtttccgctgcggataacctgctcgacgaaatgtctcggacgtgcggcgcgggccagcgtggtcggcctgtggaggcgcctcctcgggacggcggcgggaagagcgcgagcgccgcgatcgtggcgctggcgcatgccggccggcacgcggaggtcgtcgagctcttctggcggatggaggggggcggcgtccccgtaagcaggttcgtgctcccgaacgttctcgcg

SEQ ID NO: 9196 - DNA, 234 bp, Oryza sativa
  Clone ID: PAT_MRT4530_15635C.1
atgagcgtcttcgtcattatcatcggttgctacactgctattgactggatcaccgacatcgtcatcttcatcaatatcctgtcaagcctcttcaacatagccctattctactgctcgacggcagagggggagtgtgaaagtggcagcagcggctcagcgacggtgctcgggaaggtggcggcgggtcgggaaggcgatggtgaggagcacagatccatcgccgctaggccatag

SEQ ID NO: 9197 - DNA, 450 bp, Oryza sativa
  Clone ID: PAT_MRT4530_15636C.1
ctgcgaggccatcgtccgtgtgatggagagggggggcgacgaggtccaacccgccagatagccggccttgtggagagtgctgctgtactacgactggtggctgctatgcatggctgaccgaaagatctgttgtccagtaggcacgagatgccgcccgataggacccgcctgaattttctataacaggaggtatctggagcgggcactcagtgggagataactacgatgatcacagcgggacatgatcggaaagaccctcttgacgataccatggggtacggattaggacctgacgagcatttgaagctcatgagtcttgcgcacaggttacagaggccgtgcggatgactgtgcttgaacgatgcggatgaactccgaccgcgcacagtacatatctgcacactgctatcagactgcgaggacgggacgctctagcaccattgattgaca

SEQ ID NO: 9198 - DNA, 2117 bp, Oryza sativa
  Clone ID: PAT_MRT4530_15637C.1
atgaccatttaagggtggaggctggatacaggaacaggcaaccccacgacctcgcggcgtatctctaccctcctacgcctcgtcccggaaggttcccccgccgtagccgacggaggaacaccgcacgcgaggtatctgtggcgcagcacgcgagagaagcactcctctcccccgggccacgagcaggtgtatagtccttccatgaatttcgtcctaattaacattgattttactggaagaaaatacattccttctccacttcctgacaaggatatgtcttattgttggagggattttcactgttgctggcatcatagattcttttgtctaccatggtcatcgtgctataaagaaaaagatggagatcggaaaacttggataattccatatttagcatataccctgtaggatcatagtttgaattgagtcgactaatgcttgcctgagaaaggtacgaagtaaattcaggaggaattttggctaatatgttgtaatacattttctagccgctcagacttttgctgattattcaagcctagagcatagacatgtttgtataagctgttgcatcgtcgtatttaactgtgttttgggctaaatgtactgtaacatattcataaaccttgcagaaagatgtatttcgctccggaaactaaaaaaaaaaaaagaaaattaccggcgtatactgcctgaattaaaagagaattgacatgatctctaagaacattgaggatctaagggacaaagagcttcaaccacagttggaggaattaattgggagtggcaacacgaaggtcttaattcggtcggagtcacaatttcaagcagctctactcctccaggttgagctaaacactttatattcaaccttcctgaaatggatagcataccacagatcgtacttgcatagcctaaattcatggctacttaagtgtgtgaaaccactgaggggcaagaagagctccaggaggaagaaggaagcagatactcccataactaaatttgctgttgcacccatgtttaaaacctgtgaaagctggataaagttattggatgatttaccaaccaaggacttggaagatgctatcaaaggcctcgtggcagatataaaccactctgtgcctcgccaagaaaagcggcgtgatgtttcactgaagaagtatatggaactcgcggttgacattaacaaagcaaaggaacaatatgagaatgtgaagttaaagaacatgggaaaaaacaccctcccatatccctcgcggcgggccaacggacggggccaccccacggcttcgcggcagatctccctcctcctcctcctcgtcctgggcggctccggcggcgtcgccggcaggggaagccagaacgcgatggatctgtggaacaagctgcggagcctcgacgcctaccccaaggtgaacgaggacttctacagccgcaccctctccggcggcctcatcaccatcgcctcctcgctcgccatcctcctcctcttcctctccgagatccggctgtatctatattctgctacagatagtaagctcacagtcgatacctcaagaggggaaaggctacacatcaattttgatgttacgttcccagctcttccttgttcacttgttgctgttgatacaatggatgtcagtggagagcagcactatgatatagcatactggcatgaagggatcggtataatggttgtgaaatatgctgtcaaggataattcagatgatcagtgctgtaactcctgtgaagacgtccgtgatgcctatcggaaaaaagggtgggcactcaccaatatagaagagattgatcagataagtcacaagataaacaagctttcctttggggtagaattccctggtgttgtcaatcctcttgatggtgtagagtggatacaggagcacacaaatggattaacaggaatgtaccaatactttgtcaaggttgttcccacaatctataccgacattagaggacggaaaatcaactcaaatcagttttctgtgacggagcactttagagaagcaattggctatcccaggcctccgcctggtgtatatttcttctatgaattttctccaattaaggtgaagaatggatatactgattttatgtag

SEQ ID NO: 9199 - DNA, 281 bp, Oryza sativa
  unsure (1)..(281): unsure at all n locations
  Clone ID: PAT_MRT4530_15638C.1
acttgggctgaggatccggtnaagncgnctcantccgtcaccnccgccncgccncctcccnctcgtccgccgccgcgccgcggtccgccaacttcgcccgcgccgnggcgcgcgggttcccctcnctacncctcgcgccaccactccggggggggganggggggnaagtctcanggtctcctcccactccctcagaaagaagggtnnnntacngcgntctcctaagtngtctccgataannnnangtntaagcnagncngtctgacctnggagaatcncna

SEQ ID NO: 9200 - DNA, 550 bp, Oryza sativa
  Clone ID: PAT_MRT4530_15639C.1
ccacgcgtccggatgatgggaggaggggcgccgcggagctacccaccgacagccgagccgtatgcatgctgcctctcggcgaggaggggtgctaggcccgccgctgccccactgttaaatctgatgccgcgcccgggaccctggcttactactccaccagggcggtgactgatgatagactcggatagtgatggttttctggacaccgtaccgtgcgaggctgattctcatatacgccgaggggctaataaggggcagcagactcgaagtcaaccaggtgatctagacgatggacggtgacatcgaatatcgaacatacgtgccagacccaggttatgataatctatataccgcatggcgtcctgaaagggatgtacatgttagtcagtcacaatagaagtctgtgatagaaaacatgctcatgcgttacgaccctgatgtgataggagtggagcgcgaccttgatgaagacgaagaagctgaactgactggacatggaggaatgactttcctttacggtcaactctactgatgttgacatgtcgaggga

SEQ ID NO: 9201 - DNA, 2244 bp, Oryza sativa
  Clone ID: PAT_MRT4530_1563C.1
atgaagaaactcaagaaggaaggcaagaagattgaggccttcatcagggaatgggattcaaatgaggagagctccgcctcatccgggtccgaggaagaaggtggtgatgatgcaagctccaagaagaagaagatggtcgttgttgccatcaaggaggctccatcactcttcgctccaatttgtctcatggcaaagggctcctctaagaacaatgagcttgaggagcaagtggctaagctcaacaagagtttggagaggtgcttcaagggtaagaacactcttaacatgattttaagtgagcaacggtgcatccttaacaaggagggacttggattcattccaaagaagggaaggctcatgatggtagcattgttgctagatatgtgggttcccctatactcggtggtgaactaccgcaccggtggaagccattgggtgcttgatagtggatgcactcaacacatgaccggttatgcctcaaatagcaagacataccgggtctacaacaagaacaaaggtattgtagaagaaaccgccgatgttcaatttgatgagactaatggctcccaagaggggcacgagaatttggatgatgtaggtgatgaaggcttgatgagagctatgaagaacatgtcaattggagatgtcaagcctattgaagtggaagacaagccatccacctccactcaagatgagccatctacttccgctacgccaaatgaagctctttgtgatccggattggatgaatgctatgcatgaagagctcaacaactttgcaagaaacaaggtgtggactttggttgaaagacctagagaccacaatgtcatagggacaaagtgggtctttaggaacaaacaagatgagaacgggttggtggtgagaaacaaggcaagggaatttgagatgtccatgattggagagttgagtttcttccttggacttcaaatcaagcaactcaaggatgggacgttcgtgagccaaaccaagtacatcaaggatactcaagagggggcctggcggtctgaccggtgctatatgagcggtctgaccggccagatgcggcggtctgaccggccaaggcggtctgaccatgggtcagctgccgttctgaccggcgtgtgcgcccagtctaaccggctggcagccgtcggtctgaccggccaccagcgggcggggctagtgaggaggctagtggagatgatgacagtggaagtggagaggatagaggatgaaggaaggaaagtttttgcagagcataagtggatttcttggagagacatcaatgagactccagagtttgagggcttgcaggatctcttcaagactgttggcattgaccggattgtgactctcaaacaagactacaatgaagatttgatccggcagttctatgctacagtgtgggtggctggggactacaatggagtgcggtacacacatgggaagcttgccggcctgaggactatccccagtgtggttaataggattgtgagagctaccatcctccctcgccttggtaacaatgatgatattaggggggtggcttggcatgtcatcgatgcaatcattcagggccgccagttcgacattgtgtctctcatgatgcaagagattgccatctccaaggagaccttcactcagggaatctattatgccccttacatcatgaggttgattcaagacaagcttggggctgctgggcaaaatttgaagaagcacaagcagtacaagccccgccttcagcttggagctccccgtgctcctagggcggcgccctcctctcatcctagagctagctcaagctcagcacctcttcctcctccttggtatgatccaaatgctttcttccatccacagtatgcttattttggaatgcaacccaacgagcacttcaacccggtacttggggctattaataccctaagtgaaagcattcaacgcttgtctaccgggcatgaagctttgcatgaggatgttcgtggcttgcgcacggatgttggagacttgaatgcttccatggggagattgcacactagagtgggctggtctgaccggcggcacatgcgcggtcagaccggccccctggaggccaggatggtgctgctcgggatggccaatacagagccgacggagccaggagttgccggtgacctctccgagaagattgtggaggaggcccggcgccggtttgtgagtggtttggagttcaccaccttcggagtgaaggaagaactaccctag

SEQ ID NO: 9202 - DNA, 360 bp, Oryza sativa
  Clone ID: PAT_MRT4530_15640C.1
atgcatggcggccgccggtggcggtcggcggccgtggcgatctgcctgctgccggtcgtcctgccgctggcgctcctctgcctcccgctgctctgcttcgccgtgaccgtcgtccggttccgccgccggcggcggctgaggatggccgcgaggaaggggaaggcgcccggctgctgcttcgtcgacggggaggagcggacgtctccggagaaggaggagggcggcgggagccgcgcggcgctgctgctgcagtatctggaggaccagatggagctcgtcggcggcggcagcggcggcgaggcggaggagggcaagaaagcatcggcgccaattggagacgagcatcacgagcttagctaa

SEQ ID NO: 9203 - DNA, 158 bp, Oryza sativa
  Clone ID: PAT_MRT4530_15641C.1
gaacttgataatgttcggccttgtacatcttgctcagttcttagatgatttctagcgatctgtatttgggatttcatctgggctttttgagaaccaaacatctaattgttaggtccacctgcggtggttgctcacgtgtttaaaaaaaaaaaaaaaaa

SEQ ID NO: 9204 - DNA, 177 bp, Oryza sativa
  Clone ID: PAT_MRT4530_15642C.1
atgctcctggccgtggtgctcacggcagctgtggcgctggcgctcgtcaacgccgtcaactcgcatgacttcgcagcgcacctcgccggcgtggactgccgcatggggctagctggtccagcacgatgcccagcctcgggcttcatggagctcctcatgccggcgctacatgattga

SEQ ID NO: 9205 - DNA, 332 bp, Oryza sativa
  Clone ID: PAT_MRT4530_15643C.1
cgcgagcggtctttgtgtgaaggatacaggctttttattcacccgaataggatagaatatttcgagacggctacatattattgttttacaaagtgtcaggccagggacacacacatcatctgcaatggaaacagtctgcccaaagaagcgtaattcaacaagcgcataatcaatgctataggttctggagacattaccgactgcacaacacctaaacattactcccagcagggtgctacaaaaattcggatgtgggcaaaaccaatggtcatgtgcttacatctgagaacgctttccacaatcaagatgacacgcgcacggtatccgcctta

SEQ ID NO: 9206 - DNA, 407 bp, Oryza sativa
  unsure (1)..(407): unsure at all n locations
  Clone ID: PAT_MRT4530_15644C.1
tgtcatgcccaaaagttggccgtcctaattgtggatatgatcaccatggtcgaccattagaactgatccagttgctgttttctgttctttgcatacgctgtgaaacgtgcgcgagattttttgttctgcgtgttttttttttttgggtgtgtgtgtgtgatagatatgtgcnattgcacattcatgccccctttgggttattgcttcagatcatgtcccatctgaatccngtttatcatgtgatatctgttggttagttcagtgccntggctgctggcggtgctgccctggtgtggtgaaaatatatggcctgtgtatgcatatggaagtatggaaccatttggggattttnccaaaaggagnccatgccattacctttcatattgtaaaaaaaaaaaaaaaaaaaa

SEQ ID NO: 9207 - DNA, 953 bp, Oryza sativa
  Clone ID: PAT_MRT4530_15645C.1
attcctctccctgcccgagggagagagagagccctcctctcctctcctaccctcttcttcctcctcctcctcctcgcctcccaccaaaccctagcacgagcagcccaatccatctccagcctcacgagctccagttcggagcagcctcgcggtgggacgagtcgccagttggggagctcggaggaggtgaggccgtggttgggggttgggaaggggggaaggccaagaaatggcggagaaggaggagggcaaggtggcggcggagggtggggcggaggcggaggccgacgaggaggtggaggtcaagttccgcctcttcgacggctccgacatcgggcccctccgctgcaacgccgtcgccaccaccgtcgccgccctcaaggaccgcgtcgtcgccgactggcccaaagataaaacaattgtcccgaagactgctaatgatgtcaaactgataagtggaggaaaaattctagaaaacgacaagaacattgcgcagtgcagagcaccttttggtgatcttccgagcactgctatcacaatgcacgttgttgtgcagccatcatcagccaaatcaaaacctgacaagaagaccaacaagttgccaaagaccactcgctgctcatgtaccatactatgaaggttcagtgtcaactccatcgacaataatttgtatgtccgtgaaaattatgcagagagacgacgaatggagagaagattgaagaaaatctggtgccagaggagtccgatgtgttgtgagattgtatggtaatggtaagcttagatactacagagagttcgtccctctccggctagggaaaaatagatgtcgttcggtcggttgcttgtctgttttacccaccaaagtgtttctataggaggcacaatatacacatacatcctgttctggaggaagaagtgggtggtttttccgtgtcaaaaaaaaaaaaaaaaaa

SEQ ID NO: 9208 - DNA, 444 bp, Oryza sativa
  Clone ID: PAT_MRT4530_15646C.1
ataattaagcataaactatgccttcaaatgatactttttcaatagagtaaagtccatcatcggtccctaaacttgtaccgctgtgtcatcccggtccctaaactcacaaatcgaccgttcaggtcctcaaacttgttcgactgtgtcatccaagtccctaaacttacagatcactcgtttatgtcctctaacttgctcagttgtgtcaccccggtccctagacttggatttgaatattatctgggttaaataggacgggaccggggtgacacaactaaacaagttggagaaactaaaggagtgatctacaagtttagggaccgggatgacacaatcgaacaacgtagggaattacctagtatatactaccaattgtccgaaatagggtccaatatcagatctgattatttcagcttacatcttttcgaactggtatatccacca

SEQ ID NO: 9209 - DNA, 529 bp, Oryza sativa
  Clone ID: PAT_MRT4530_15647C.1
ggctaatgggtatagtttttaggccaaagagacccacaagggggactaagtcccttaaaaaaaaaggggaccaagagggggcccttacaaagaagggaaaatgacgacgacgaccaccaaaaaacataaacctcacaggattagcaatggctacccctggccaaacaaaaattcctgctcgcaggggctttaaaaaccgaagcaactctgggtttgggcctcaagacgtcgacccaaaaaaagccggcccaccgcacatccttttttggagaagctccaggctcgccaccccctgaaaggagggtggccggccaatcttgccggcagccaaagcgccattgacgaaatccttgtcctcctgagcccaaaaagggatggcgggcatgtaaatgctggtaccccccatggcaatgttagaagcgaaagaattccccggcccctcttttaagggaacagcaggggctgacgttccttcaaaaggggagctgtccaaaggcccgctgagggaagacaaataaaaagggggggg

SEQ ID NO: 9210 - DNA, 219 bp, Oryza sativa
  Clone ID: PAT_MRT4530_15648C.1
atgaaccgccggacgccgccgatcgacgccggcagagagcccggcccagggatcttgccgccgccgagattcgaaggatgcggctgcttggcattggggcttgagctgccacctggattcgaagcggaagagcaggtggacgggtgggcccgcccagcgagcgccaaggaccatacgtccttggtcgagggctacctcccggagctgcggacgaagtag

SEQ ID NO: 9211 - DNA, 918 bp, Oryza sativa
  Clone ID: PAT_MRT4530_15649C.1
atgccctcctccgccaacggccatggcaactcgtcgacgcggtccacctccgccatcgtggtcgacagggtgaccgggcaccacctcttcaagatcgacggctactcgttcaccaaggagacccccaccggcacgcccatcgcatccggcgagttcaccgtcggcggctaccgctggagaatcgagtactaccccaacgggagaggcaagaaatccgccgattacataccgctttacctctcgctagacaagaacaccagcggggaggtgaaggtgaagtaccagattgagctggccgatagggtgaagaagaagaagaagcaaccttcgctgatatccaagccatttatgaggaggagaaaattcgaaaagtctaaatatctcagggacgactgtttcaccattcggtgtgacatagtcgtcatgcgtgagattcgcactgaggaagcaacatttgtgtccgttcccccatccgacctgaagcagcagctcggagacctcctcgagaccgggaagggcgccgacgtggtgtttgaggtcggcggcggcgagacgttcgccgcgcaccgtttcttcggctcgatgaaggagagcgacgccgccgccggaggagtcgtgcgcatcgaagagatggaggctcaggtgttcaagctgttgctccgcttcgtgtacaccgactcgttgccgaagatgaaggaggaagacgtcatgtgccagcatctgctcgtcgctgcggatcgttacaacctgaagaggctcaagctgatctgcgagaagaagttgtgcaagtacattggcgtgggtaccgtggcgagcatcctggcactggctgatcagcactactgcgatgggctgaagaaggcgtgcttcaattttctcggctcatcggagaatccgccggtggcttcgataatctga

SEQ ID NO: 9212 - DNA, 699 bp, Oryza sativa
  Clone ID: PAT_MRT4530_1564C.1
tgttcttactaattacagtccgtgataccactgagccagcagctggaatacttcaaggaatacatagaaaagctaaagcaagccaagggcgaagatgtcgcgaacgagatcatcaccgaagcgctctacgtcttcagtatcggcaccaacgatttcatcatcaactactttaatctgcctctccggcgcgcagtctacaccacggcggagtacaccgcttacctcgttggcgaggctgcagccgccgtccgcgacacccacgagctcggtgcccacaagatcatatttgccgggctcgcgccgatcgggtgcttgccatcggcgaggacgctgaaccacgatgcgccgggggagtgcaacgaagagcacagccaggtggcggtggcattcaacaccgcactgacggaggccatcggcaagctcaacgacgagctcaccggattaagggtggtatattcagatacttacagtgttttgtccgccatcctgtccaacccgtcatactacgggtttgtgaatatagctcaaggttgctgtggcacaggacttattgagacatccgtcctttgcggcttcaacgatcatttgacatgtcaagatgctaattcttatgtgttcttcgattcagtccatccgtcggagagaacatatcagattatagctaacaaaatcattaatacagatcttaaattagtacta

SEQ ID NO: 9213 - DNA, 654 bp, Oryza sativa
  Clone ID: PAT_MRT4530_15650C.1
gattctccttggcgcggcgctctctctcttttccccgccgacgatgcccacggcgacggcgtcgacctcgcgacgcggggctcctgcaggctgctgacgatgggagatgggcacgtccgatgcagattccaggcagaagtgcgtgggttctcgttgatgagtggtcagcacatcatcatcgtgcgacgacggacgcacgacctgttctccggcgggctcgcgcggcgtgccaccccgcgtcagaaggcggcagatcgcctcgcatgaaggagcgtgaaggccggggaggacgagcgaaggcggggactcagctggcgcgactgcgcgatctgcctggacgccattcagccgcccgggaaggagactgccgtcgcagggacacacggttccacagcgagctcgccatcagaacaggtggctcggcgtccacgggagctgccccgtctgccgccgcgagctccccccggcggatacaaacaaccaccagaggagcagcagaacggcggcgcgggacagccggcgagaggcggaggccgaggtcggtgctggtgagctacgtggtgctcggagacgcgccgctctagaggatccaagcttacgtacgcgtgcatgcgacgtcatagctcttctatagtgtcacctaatcattcctgc

SEQ ID NO: 9214 - DNA, 795 bp, Oryza sativa
  unsure (1)..(795): unsure at all n locations
  Clone ID: PAT_MRT4530_15651C.1
ttttttttttttttttttttttaggaattcgggatagcaaatcatcaaatctccggtctagagagtggcaaaacattgaatcccctgctcacaagtcacaaatagacaagccacttaatagaagtccgctacatagcacacacacacacatctttgtagtagtttgcagtcagtggcctgaatggcaggggagacgcaactctccagccattctccactccatggttatcattcctacagatatagagtcctactgtacattatttgagttctgagtttattcacacagcttcttcttcctctaggccaggaaggaacacctcatcatccaccaggcaatagggcattcaccaggaccaagcgcccaaaacaccatcagtatgcgtggctaggcaccatggttcttccagcccggtgcgggtggagggcgcaggcgcagtggacagacgtcaggctgaggcagccactgatgatcagggagtgcctcccagggcaagtgtggagggccgggaaggagtcgcagaccgcctggaccgctgggggtgtcagggccgtgcactggctgatgttcaggtttgcgagaccgtcttcctcccttccgctgctgcccccttccccctcccaccttctgcgttttgctcttgacccggctgtttgcgagggagtacatggcttcggtcggtgatgttcttggcagtagttacaaagcctaaagaatcgcaagtgtnggacaccccaattggcaaagaagcgatcacacttttcatctnggtattaagaacnccaaccacacca

SEQ ID NO: 9215 - DNA, 891 bp, Oryza sativa
  Clone ID: PAT_MRT4530_15652C.1
atgaccgcgaggagggcgaggacggcgtgggacgggagcaggcagtttcataagatggttttactccagaaaagaagtcaagatggcataggcaggagcaacatcatggaagcagaaggtattttgaaagatctgattgatgataaggtgaacaatgttgatgccgagttgcatgtcttacaagaagagcatgaaaaagacctgctcgagcatgacacaagttcttccctactccctctccaccctgcgcaattccctcgcattctcatcctactccaagagcagaggaggaaggagatggagaggcaggacggcgacgctgagggatcgggacggggagagcataggagcagaggctgccgttccccggcagagaccaagactgaccgaagccccggcattcccagagttctggaggtggggttcgccaccgtgcgagaacaccacgggaccaagagcaccacgggaccccaaaagagcaacaacctccagaacaagaagataaaatcaagagaagatggcagagaaccggaggccgcagagttgagacggggcgagaggagaagagaccacgaggtggtatttgccgctgctgcgcgagatccacctacactgcagcgccccgacttcgactgcgtgcgtcagaacaaacatcccaatgccaatactgagaatgagatgacgggcggtgatctcgagaaagcaagtggaagcttactagaccagagcaagcaaccgctgaacataaagagggatcgtcgcaggctagaagaagtcagtgataaaatgtggaaggatgaagcgaaggagattggaagcaggtcgccagcactaacaaaggggagcacgaaagagtctcagatgcttcagtctctcggtaaatatatttga

SEQ ID NO: 9216 - DNA, 162 bp, Oryza sativa
  Clone ID: PAT_MRT4530_15653C.1
tttcacggccgattmaatkacttcacaggtttgaaatcaatgcgacgacaatatccaaaccaatcttacaccgaatttcaaattttgtacattccatctgaacatctaatgggttcacgtaacttgaatgggaccacaggtgccaaagtttcggcagtactg

SEQ ID NO: 9217 - DNA, 885 bp, Oryza sativa
  Clone ID: PAT_MRT4530_15654C.1
ttcgacgtgtcacctcttcccgccctccggcctccctccccaacccaacccaagcctatctcacaaacccgcgcgctatccctctccccccttcccctctcacaccgcgagctcgcgtaggacacgaacgagatgaggccagcgtcgtcccccgtgccggccgtcctcacggccccggctaccgctgccactgccgccatcgccgtaaagccaacgccgcctcaacgcgcgcttcaagccagcaggcgcgagttggtggtggcggcgggaggggtggcggcggcggcggtggcgctgtggccgtgcgggggagcggcgcgggcggcgtcggacgacgagtacgtgagcgagacgaaggacgtgatcgggaaggtgcggtcgacgatcaacatggacagggcggaccccggggtggcggacgcggtggcggagctccgcgagctgtccaactcgtgggtggccaagtaccgcagggagaagtcgctgctgggccgcccgtccttcagggagatgtactccgcgctcaacgccgtgtcgggccactacatcagcttcggccccacggcccccatccccaacaagcgccgcgcccgcatcctcgaggagatggacaccgccgagaaggccctgctccgcggccggtgaggtgagtgatgattgattgagccgagtgcttacggccaccgattctccctttctcgtgtgagacgcacgcacgcgcgtgcgtacgcggcacattcactttttgtaactactatactaccgtcgcgtcgcgatggggccgggcgtcggctttgctcttgtcgagtggaatcgaatcggtggaggctttgaaattattactactgagttgtatgtgtattttttttttctgtaacgggcatc

SEQ ID NO: 9218 - DNA, 1546 bp, Oryza sativa
  Clone ID: PAT_MRT4530_15655C.1
acaccacgaggctcgccagcagcagcaccgccacgaacggcatgtagtggcgcggccgcacgtccgaccacgaccacctcacgccggccttccgcttcgcactccccggctccgccgccgccgcggcggcggcggggcgcgcgggcttgatcacgtcctccctggggctggcgggctccgacgtcggtggcgtggacgactgcgacgaggtcgccgacgtcgcggccgcctgctgcttccgcttgttcttccctcccttccgctgctgctgctcctcctcctcaggcgggagcttgacgacgatgggcacccaccctttcccctccgactgcacgaccggacgagcacatgctcaccaccaccaccgccgccgccctcccccggtgcgccgccgccgccggcgccgccgccaccaccaccaccgccgccctgcttcttcttcttcgcctccggcgccgccgccttgcccggtgtttccccttcggccttctcgtccgccccttctctcctccaccatccgcctcaccggcgtacggctccgacgagatggccgccccgctccggcggagcctcccctccctggggcgcacgctcctctcgccgtcccccgcgcccgcgcggatgctctccgcggcggcgtccgacgccctctcccacgcgatcttggccgagcacgagaaccccttgcatgtctccggcagcgccgccgccgccgccgccggctcggacactaccagcgccacctcgccgctgatcctcctggacgcggcggtggccacggcgtcgagccacgggcactcgggctgccccaccattcgcttgtacgcgtcgttcaccagccggacgcggttgctggagtccgagaccaccgccgggagggagtccgactccagctccgcctccacctcctccgcccccacggggcgcaccgcgcgcggctccagcagcttccgcggctccagcagcttccgcagcaggtcgcgctccacgagcaccacgcccctctcctcgtcctcgtcctccacctccaccaccgtcggcgagagcctcgtcgagtccccggcactcggcgacaccggcgccagcgcactaaccccgcccgcactctccggggccgggacgaccaccaccgacacgcgcgccctcgtcgccgtggccaccgccgcgcaccggagcggcgccacggggaccgggtacgccggcgccctcttcctcttggcccccgccggcggggacaccggcggcactacgctgggccgcccccgcttccgcgcccggcacggcctgctctgcagctggcagagcacgcggttcgtcgccgccaccgccgcagcaccgtcaccaccacccgtcacccccgccgccgccgccggcagcacgggcttgggcgcgatgggcctgaacctcgccatgatctcgttggccttcacggccatgtccaccggctgcaccatggccaccgccgccgccgccgccgccgcggcggacgcgccggccaccgcacccgccttcggcctggaccccaactctgattatattacggtgg

SEQ ID NO: 9219 - DNA, 878 bp, Oryza sativa
  Clone ID: PAT_MRT4530_15656C.1
atgcgggcacgggtgatgatgccgaactggccgaggccgccgatcaaggacggcgaagaagaggtcggggtcggcggagggaagaagagggagaaccgagagaggagagagaatgacattttcaaggacgtcgacggcaaggcggcggcgccggaggcgaagaagaagaagcagggcggcggtggtggtggtgggaagaaggagaacccgtacgcgtcgagggggctcgacaagttctccaccgtgctgtccgagctcgagtcgcggcgggagaagatccttcgccaatcggaggggaaagggtgggtgcccatcgtcgtcaagctcccgcctgaggaggaggagcagcagcagcggaagggagggaagaacaagcggaagcagcaggcggccgcgacgtcggcgacctcgtcgcagtcgtccacgccaccgacgtcggagcccgccagccccagggaggacgtgatcaagcccgcgcgccccgccgccgccgcggcggcggcggagccggggagtgcgaagcggaaggccggcgtgaggtggtcgtggtcggacgtgcggccgcgccactacatgccgttcgtggcggtgctgctgctggcgagcctcgtggtgttcggcaaggtgttcgccatctgctgcacctccgtctggtggtacctcgtgccgatcctgacggccagctctaatggcgccggcggcgccggcggggcgcacggcgtgaggagatcgaaggccgccgtcaaggttctcggcaagaaggcgagcgacaagaagatggccgtgacgccattgctgggtccttcgcacggcaagaggggtagctccggtgtccatgagttgatctcgccgagaagtcatccacatgggaagaaagg

SEQ ID NO: 9220 - DNA, 201 bp, Oryza sativa
  Clone ID: PAT_MRT4530_15657C.1
atggccatccagcaggacaccaggcaggcaccagtggctgcaatcctgcctcccgacaagcttggtcgtgatgctgttccccagtacatgatttatgggttcaagcaggtcagcccacggttccagcgatttaattggagttacatctggggctccagctggtgcacgaccttgaaggactatgaaaggagacctgactaa

SEQ ID NO: 9221 - DNA, 870 bp, Oryza sativa
  Clone ID: PAT_MRT4530_15658C.1
atgttgttctgcggcacgggcagtttcaaggacgtcgacggcaaggcggcggcgccggaggcgaagaagaagaagcagggcggcggtggtggtggtgggaagaaggagaacccgtacgcgtcgagggggctcgacaagttctccaccgtgctgtccgagctcgagtcgcggcgggagaagatccttcgccaagtcggcggcgccggcggcggcggcgcaccgggggagggcggcggcggtggtggtggtgagcatgtgctcgtccggttcgtgcagtcggaggggaaagggtgggtgcccatcgtcgtcaagctcccgcctgaggaggaggagcagcagcagcggaagggagggaagaacaagcggaagcagcaggcggccgcgacgtcggcgacctcgtcgcagtcgtccacgccaccgacgtcggagcccgccagccccagggaggacgtgatcaagcccgcgcgccccgccgccgccgcggcggcggcggagccggggagtgcgaagcggaaggccggcgtgaggtggtcgtggtcggacgtgcggccgcgccactacatgccgttcgtggcggtgctgctgctggcgagcctcgtggtgttcggcaaggtgttcgccatctgctgcacctccgtctggtggtacctcgtgccgatcctgacggccagctctaatggcgccggcggcgccggcggggcgcacggcgtgaggagatcgaaggccgccgtcaaggttctcggcaagaaggcgagcgacaagaagatggccgtgacgccattgctgggtccttcgcacggcaagaggggtagctccggtgtccatgagttgatctcgccgagaagtcatccacatgggaagaaagggtag

SEQ ID NO: 9222 - DNA, 1293 bp, Oryza sativa
  Clone ID: PAT_MRT4530_15659C.1
gagaacaaacaaatctcactaaagcaaaagttacaattttcccttgcattctccggtcaacatcatatatactttagaacctggccttgcatcctataagcttcgcaaaagaggaagcagccgatctagtttgctactactagtaacattgcaccttaacacgattacatctatgcactactaaagtttgctccggcttgatgcatcacgtcgtcacgcgtcgccggcggcgcggcggtgggtgttgcattcgtcgccggcggcgcggaacctccaggcgaagacgtagtccctcgactcgcactgcagccgggtgacgtcgcacggtgcatggacggatgaccacttgccgtcgcgctcccacgcgatcttggccgagcacgagaaccccttgcatgtctccggcagcgccgccgccgccgccgccggctcggacactaccagcgccacctcgccgctgatcctcctggacgcggcggtggccacggcgtcgagccacgggcactcgggctgccccaccattcgcttgtacgcgtcgttcaccagccggacgcggttgctggagtccgagaccaccgccgggagggagtccgactccagctccgcctccacctcctccgccgtcttcggggcggctgcggcggcggcggcggtggtgcggccgacgtcgatgtggactgactcgacgtggatggtggagcccacggggcgcaccgcgcgcggctccagcagcttccgcggctccagcagcttccgcagcaggtcgcgctccacgagcaccacgcccctctcctcgtcctcgtcctccacctccaccaccgtcggcgagagcctcgtcgagtccccggcactcggcgacaccggcgccagcgcactaaccccgcccgcactctccggggccgggacgaccaccaccgacacgcgcgccctcgtcgccgtggccaccgccgcgcaccggagcggcgccacggggaccgggtacgccggcgccctcttcctcttggcccccgccggcggggacaccggcggcactacgctgggccgcccccgcttccgcgcccggcacggcctgctctgcagctggcagagcacgcggttcgtcgccgccaccgccgcagcaccgtcaccaccacccgtcacccccgccgccgccgccggcagcacgggcttgggcgcgatgggcctgaacctcgccatgatctcgttggccttcacggccatgtccaccggctgcaccatggccatggcgagacgtacaccggacgaacgaacgaacggtacgctcgctctcgc

SEQ ID NO: 9223 - DNA, 4840 bp, Oryza sativa
  Clone ID: PAT_MRT4530_1565C.1
actcccggtaaaaagatgaagtggaaggatgaaagcatttggataatacccaggaggaggaggaggtgctgagcttgagctagctccaggatgagaggagggcgccgccctaggagcacggggagctccaagctaaaggcggggcttgtactgcttgtgcttcttcaaattttgcccagcagccccaagcttgtcttgaatcaacctcatgatgtaaggggcataatagattccctaagtgaaggtccccttggagatggcaatctcttgcatcataagagacacaatgtcgaactgacggccctgaatgatggcatcgatgacgtgccaatccgcccccataatgtcatcattgttgccaaggcgagggaggatggtagctctcacaatcctgttaaccacactggggatggtcctcaagccggcaaccttcccatgtgtgtaccgcactccatcttcataaaatgtagcataaaactgccggatcaaatcttcattgtagtcttgcttgagagtaacaatccgatcaatgctaacagtcttgaagagatcctgcaacccctcaaactctggacattgatgtctctccaagaaatccccttatgctctgcaaaagctttccctgcataaacttgctcatacacactcttctggaaagcggtgtgaaaacggggatccggggtgtcccgaggcctcaaaaactgatcatggtgcctcaagatggtatattgtgatggattcctcatgttcacaacaaactggatggagggatcaatgtgcatatatcatcacttccttcatcctcatcctctccacttctactgacatcatctccactttcctcctcactatcccctttgagcgtactcatctccgctcgattcctcaggctcactcacgggattcggagtgggtgcacgacgatcatggcgagtgcggggaggcatcacaagaaactaccctctattggtgcaaatcgaagaacacctcgtgcttcaccttttgggtaccacaagccaatagtagaggaatgctttaaatatcttagaatccttttcacggccactaagtgacactccttaggagcggcttgaaaccatgcacacatgcaaacactaaacatgatatccggcctagatgcggtaaggtaaagcaagctaccaatcatggaacgataaagctttaaatctaccggtttacctccctcatcaaggtcaagatgcccgttggttgccataggtgtcttgatgggcttcgcatcctccaagccaaacctcttgagtagatccttgatgtacttggtttggctcacgaacgtcccattcttgagttgcttgatttgaagtccaaggaagaagctcaactctccaatcatggacatctcaaattccctaaacatcatatcaccaaattccttgcaaaatacctcattagtagaaccgaatatgatgtcatcaacataaatttgacacaaaaagaaatcatcaccaatgatttttgtgaaaagggtggtgtcaacttttccaattttgaaatcctttgacaaaagaaaatctctcaatctttcataccaagccctaggagcttgttttaaaccataaagaacttttgagagtttataaacatggttaggatttttaggatcttcaaaaccgggaggttgttaaacaaagacaagttcggcaatttcaccatttagaaaagcacttttcacatccatttgaaatagttttatatcaaagcatgatgcaaatgtaagaaggatgcgaatagcctcaagtcttgccacaggggcaaaagtttcaccaaagtccaaaccttcaattgtgtgaaaccttgtgccaccaaccttgctttgtttctcaccaccaacccgttctcatcttgtttgatcctaaagacccactttgtcccaatgacattgtggtctctaggtctatcaaccaaagtccacaccttgtttcttgcaaagttgttgagctcttcatgcatggcattcatccaatccggatcacaaagagcttcatctacatgttttggctcaagacaagaaacaaacaagtaatgttcacaaatcgaagcgacacgagatcgagtttgaacacccttactaatgtcacccaacacttggtcaattgggtgatccttggaaagagcggtgtgtatccttggtggcataggtggatcttgtgccttctcctcctccacttcaacttgagcttgacttggcgtagcggaagtagatggctcatcttgagtggaggtggatggtttgtcttccacttcaataggcttgacatctcctattgacatgttcttcatagctctcatcaagccttcatcacctacatcatccaaattctcgtgcccttcttaggagccattagtctcatcaaattgaacatcggcggtttcttacacaatacctttgttcttgttgtagacccggtatgccttgctatttgaggcataaccatattcattaagcatagtccttgccatctcaatcaatgtacgattttttctctccactacaccattttgttgaggtgagtaggtagcggaaagttcgtgtttaataccaagatcatcacaatagtcctcgatattggtattcttaaactcggaaccattgtcacttctaattttcacaagagtgcaactaaattcattttgggccctttttgcaaactttttgaaaagctcggcaacaatagacttatcatgcaaaaagaactcccaagtatagcgagaataatcatcaacaatcacaagccaatgactattaccaccaatgctcttataggttggtgggccaaacaaaatcatatgcaagagctccaatggtctagatgtagatatgatacttttagtaggatgagaacatgcaacttgcttgccggcttgacaagcactacaaagcttatctttctcaaacttcacatctttcaagaccacaactagatcacgttttgaaagtttgctcaattgattcatgccaacatgggctagcctcctatgccaaagccaacccaatgaagtttttgcaactaacccaattacctttcctttgctattgtctccaaaagtcactttctcttgttctttccctcctacttcaaatgtggtgaacatagccctatcaccagtcatatgttgagtgcatccactatcaagcacccaatggcttccatcggtgcggtagttcaccaaatgcccaacctcacggcacttggagcaatacttaccattgctcttgacaaaacgagtggcacggtgagaaggtttcttacccttatttggaatgaatccaagtccctccttgttaaggatgcaccgttgctcactcaaaattttgtcaagagtgttcttacccttgaagcacctctccaaactcttgttgagcttggccacttgctccttaagctcattgttctcaacaacaagtgaggcatcacaaatagaaatacaagagctagagctagagttaagcttctcatgagaaatggtgagtctctcatgagaggtctttagctcctcatacaagacctctaaagaagcatgatccttctttagggccttgaacttgacaatctccttttcactataagcatgaagctcctcaaatatactcacaagttcatcataggaaacatcatcacaatcatcatcactctcactatcactaagagatgttaccttagaggagctctttggccatgagacaaagtggagcgaagagtgatggagcctccttgatggcaacaacggccatcttcttcttcttggagcttgcatcatcaccaccttcttcctcggacccggatgaggtggagctctcctcatttgagtcccattccccgatgaaagcctcgatcttcttcccttccttcttaagcttcttcatgagcttgtagcctccactcttcttcttggatgacttgtctccatcatcatccttggaagggcacttggaagcaaagtgtcccttctcaccacactcaaaacacctcaagttggagagagtcttgttgggtcttctatttcttctcctatttgagttggagtcccttcctctctccattctccttcccaagagatcattgaactttctagcaagaaggaccatctcttcctccaagtcctcattgacttcattcaccttgctcttgctcttgtcttcaacttcggcttggagagcaatgcacttcttggagggtgaggcttcctccatctccttcttcttcaacttgtacatgtcattggtgttgatcttccccaagaggcttgcgggtgtcattcttgacatgtcgcagttgatgagcatggtgacaagggtctcatacttctccggtagggctctaagcatcttttgggcaacctcaagatcggtgtagtttgccccaagccccttgagatcattcacaatgacattaagcctcccatacatgtcattcacactctcatgaggcaacatggagaatgtctcatattggatcttgaggaaatgaagcttggtatccttgtactcacttgtaccctcatggatctccgccaacttgttccaaatctcatatgcggtctcaaggttgctcactctattgaactcctcttggctcaaagagttgaacaaggcattcatggcttgggcattgagttgaaggttgcggtgatcaatctccgtcaagggtgtgtcggtgatagcaaagcctacatccacaatactccaaatatggaagctcatagcttttaggtgagtagacattttaattttccaagtggagtagtttgtgccattaaacatgggagccttccctacatggttcacctcgttcgacat

SEQ ID NO: 9224 - DNA, 201 bp, Oryza sativa
  Clone ID: PAT_MRT4530_15660C.1
gttcatctcaactttttacggtcgaaattcaagccgataatttgatgagaaatgaaggagatttccaacacatggtcttaaaggctgaatctctggaccctagctacccattccaaaaggaaacagaaatcctggtcactcttcaatctggttacgtcttcgtacagacggacaagccaatctacacccctaaccaagacg

SEQ ID NO: 9225 - DNA, 1335 bp, Oryza sativa
  Clone ID: PAT_MRT4530_15661C.1
atgcctcgtccacctgaacctgtgcacgtgctgcttcttgctgccatcgcagtgcaagtgttcgtccggtgcacagcacaagctgcgagtgatcagaagccactagtctccaggctcgccaaggattacaacacctcactctacaccatctccgtcaagaacggcgcgccgccgctcgtcgtcgacctcgccggcgcgctcgtctggtcgacgtgcccgtccacgcactccacggtgccatgccagtccgccgcgtgcgacgcggtcaaccggcagcagcctcgccgctgccggtacgtcgacggcggctggttctgggccggccgcgaaccggggtcgcgctgcgcctgcaccgcccacccgttcaatccggtcaccggcgagtgctccaccggcgatctgacgacattcaccatgtcggcgaacacgaccaacggcaccgacctgctgtacccggagtcgttcaccgccgtcggcgcgtgcgcgccggagcggctgctggcgtcgccgtcgctgccgcaggcggccgccggcgtcgcggggttctccgggacgacgccgctctcgctgccgtcgcagctcgccgcgcagcgccggttcggcagcacgttcgccctgtgcctgccggtgttcgcgacgttcggcgacacgccggtgtacctgcccaactacaacccgtacgggcccttcgactacaccaagatgctccggcgaaccccgttcctgacgaacccgaggaggaacggcggttactacctccccgtaaaacgcatctccgtgtcgtggcgcgggcccggcgacgtcccggtgtccctgcccgccggcgcgctcgacctcaacgcccgcacgggccgcggcggcgtcgtgctcagcaccacgacgccgtacgcgatcatgcgcaccgacgtgttccgcgccttcggcaaggcgttcgacacagtcgtgaccagaggaacggaaagcagaatggcgagggtggccaggcagaagcagttcgagctttgttacggcggcgcaggcgacaccatgttgtcattccctatgatgaagcggacgggcttcgacgcgccggcgatcaccctggagctggacgccggagccacgggtaactggacgatactgaacggcaactacctggtacgcgagacgtgcgttggggtcgtggagatggggccggaaggcatgccggtggacggcgagccggcggtggtgctcggcgggatgcagttggagaacatccggatggtgttcgatctggacaaacgcacgctcggcttcagcaggctattggaatgggacctgacgaattgttacagcagcgcaagctttttgtga

SEQ ID NO: 9226 - DNA, 198 bp, Oryza sativa
  Clone ID: PAT_MRT4530_15662C.1
ggcacgacctcgactattcgtgtcacgtaagagaccagtgcttctagttcttggcgttcagagttgtcaaatgtttacatatggtatgcctcatatggttcaaatatgtggaaaccaagacttaattgctacatagcaggtgggaaggtggatggtatgcagaagctctattccggttccgtgaacaaagctcttgca

SEQ ID NO: 9227 - DNA, 303 bp, Oryza sativa
  Clone ID: PAT_MRT4530_15663C.1
atgggcgtcgcggcgacggcggcgccaatgcgcgcgcgtctcctcaccgcaaagcaggagcaaaggcaaaagccgccgcgggttcacttctcgcaaactcgcgagcgcttctgctgcggctgctggtgctgtatcggcttgtgcgttggtgttgtgctcgcgtttcgggctccgatcgcgccgcggccgtcgcatcctcgcgcctcgccgcgtcccttgccggagaagcaagatggcacctgccggaggaaaacgccgcatcctagcttctggatccatccgacggcaacaacagagacatga

SEQ ID NO: 9228 - DNA, 216 bp, Oryza sativa
  Clone ID: PAT_MRT4530_15664C.1
atgtggcctgggtgttacggcaagtacgtcggtgtccacgatggtggaggcagtggtaggtcgacattggttaggtcgcagacggatccggccctccacactaaaatctggccatgcagtgacggctgctccggtgggtgtgccgatgctgtcattggcgacgacgaaggagcaatgtggcacaacgtcggtgggacggcggcagctagggcatga

SEQ ID NO: 9229 - DNA, 1404 bp, Oryza sativa
  Clone ID: PAT_MRT4530_15665C.1
aggagcgacgcactattctctcttcttcttaccaccctctcccggataagaggcgcaaccaaagcccccaccctcgcccaaaacccccacgagccgcggccatggcgaccaccaccaccaccccctcctcctctctcaccgcccctctcctccgcccgagctcgaacgcgaaccccgccccgagatctctgccgctcctcaggagccggaggtgcgctcgggccgtggcgaccgccgccgccgccgctggccacggggccgctcatcagaggagcgggatttggtcgatcagggatgatttggtggtgccgaggtcgccctacttccctgtggagtatgcgtcggggcaggaacgcgggccatcgcccatggtgatggagcggttccagagcgtcgtcagccagctcttccagcacaggattatccggtgtggtggacccgtggaggatgatatggcgaacatcatcgttgcccagctgctatatctcgatgccatcgatcctaacaaggatatcattatgtatgtgaattctcctggaggatcagtgacagctgggatggccatattcgacacgatgaagcatatcagacctgatgtttccacagtttgtattggacttgctgcaagtatgggagcttttctgcttagtgctgggacaaaagggaagcgatacagcttacctaactcaagaataatgatccatcaacctctcggaggagcccaaggacaagagactgatcttgagatccaggctaatgagatgctgcatcacaaggctaacctgaatggatacctagcataccacactgggcagcccctagataagatcaacgtagatactgaccgtgattacttcatgagcgcgaaggaggcaaaggagtatggtctaattgatggagttatcatgaatccccttaaagcccttcaaccgcttcctgcttctagttagccatggagtgctcaatctccacggagcattttttggttatcttttagaactgttattgcatccactgtttttattagcttggcaagatagttttgcgattccacaagcaaccacatcctgaggcttcaaagtttgtacaatacagatgtactactaggaggatatcttctgcgatgaatattgcaacttatttgatgtactattaggaggatatcttctgcgatgaatattgcaacttatttgataaaaaaaaaaaaaaaaccaaccgggagctggaggcagtccagctcccggtgggcgatgctgcgcgcgctcagctgcgtcttcccggagcttcttgcccggaacggcgtcaagttctgcgaggccgtgtggactatggcggcctcgcagatcttcaacgagggcgggctcgactaccttggtaacccgagcctgatccacgcgcagagca

SEQ ID NO: 9230 - DNA, 324 bp, Oryza sativa
  Clone ID: PAT_MRT4530_15666C.1
atggcgcccgtgcaggagcaggacaagcagttggtggtcgacctcgtctccacggcggtggaccagctcgccaggatgtgcagcaccggcgagccgctgcaccggcagcgtggcgcggagatgatggccgtggaggagcacgcgcggatgttcagatgtgaaatactgatggcatccatggattatcaagggacagcaatcaaatatttgatcattgcacacacccgcaagccatcaagacgatcaaacgggaaatatctggtagacgctattaaatcgcaaaaccacgaaactatggatcaccaaaaagatgcaaaagattag

SEQ ID NO: 9231 - DNA, 314 bp, Oryza sativa
  unsure (1)..(314): unsure at all n locations
  Clone ID: PAT_MRT4530_15667C.1
ccaaagtgaagatggcatggaagggtgtgcacatgctctggacacctgtgcacctgtggtgtcccncccactgagtgtgtcacaacgtgagctggccactggacccgccttggaaatgtctggggcaaaatgtggagaactggggtttgtctgcttggtgggctgctgatgctgatgatatgatgggtgaccttgaggaggaaaatgaacatgtatgaatattgcagcccctattccttttcaatatctgcttatactatgggtaaatacactctaatataataatattataataaaaaaaaaaaaaaaaaaaa

SEQ ID NO: 9232 - DNA, 1543 bp, Oryza sativa
  Clone ID: PAT_MRT4530_15668C.1
tccgtccacaatcaaaccacttccatctctcaattctcaagcacacacacaatccaacaagcttctcgaaattctcgatcgaggtggagtggtggtgtatgcgcgatggggctggatgtgggggaaatcggcgtcggcgcggcggacctgagcctggatctcaagatgttcgccgccaagagcttcggccgcgtcaggggcaaggacaccaccaccaccgccatgggtgactgcatccggaggctcgaggaggagatgggcaagatcgaggtcttccgccgcgagctccccctctgcgtccgcctcctcgccgacgtgattgatgtgatgaaggaggaggtggagaagaagggtggtgatcgtaaggaggatgaggaggacgccgccggcgacaagagcaactggatgagcaccgcgcagctctggactgggaattccggcggcccagacgccgccgccgctgatccagagaagcaggacaaggtgaggatctcgtcggaggcgaagtccaacggcggcgcgtttgtgggctctggcgcgccggctttcgcgcggccgaagcagagcttgatgaggaaggaggacatggcgtacgacgtcaggatgccggatctgtcgctgctctcgccgcctgcttccgccgccgccgccgacgaaagccgccgtcaggtcgtgggcttctcccaggccgcggcgagggctgccgccatggcggcgtctggccccgctctcagcctccagccccagcctcagccggcggcggcgcagcagcagcagcaggcgaggaagacgaggcggtgctggtcgccggacctccaccgcaagttcgtcgccgccttgcagcaactcggtggccctcaagttgccactccaaagcaaatcagggagctgatgaaggtggatggactgacaaatgacgaggtcaaaagccatcttcagaagtaccgcctgcacaaccggccgagagtgccaagctcaacaattgtgaaccaaccgattgtgctcatgcaagggctctgttacattcctcaagagcaaagcagctcccagtctggatcccctgagggtcctctccatttctcaggctcaggcatggccggtggcggctcatcggcggcgacggtcagctgcgaggaggaggatggcaggtctgagagctatggctggaaatgatccaagatgatgttgcatcagaaattttcatcacagctttggtgggttaggttaattgcggcgcggcgatgaaaaataataccagatcttcagggaggagtttgagaggagagactagtgtaggtgtttgtatacagtgagatcgagccttgagtgcttgagatgaaactgatggtgagttggttgttgtcatgtatatcgaaagagatgatactagctacagttttgcggcgagttttgccggttaaaggattcgggcagagctacagttttcgccctgagaattttacccaaaaaaaaaaaaaaaaaaaaaaaaaaaaaaaaaaaaaaaaaaaaaaatccccccgcccggtattactatagttctgat

SEQ ID NO: 9233 - DNA, 423 bp, Oryza sativa
  Clone ID: PAT_MRT4530_15669C.1
ggaaaaaggctgggggattggttatgccccccaaggggaggaaaagggttttccaaaaattttttaaacttacaaacagcttaaaactaacgggatagcccgggccccctggaaacaatttgactttaaagcaggcggatagcccccctggttcaaaacaatccaatcagagcttcgccggaaaaaaactttaagggcccgggaaaatagaaatggaaaggaaaaaataatgggggggggggcaggatgtaccgggggttgatcgtttaaaaacccaaaagccccttggggcacccgggggcagggcccttggcatttttgcaaacggccatggtcttgttgtttgggccaaagtaccccaccttgatgtcattcaaggggaccccggggcacggaatcttggcggagcaaaggaggctaacg

SEQ ID NO: 9234 - DNA, 1443 bp, Oryza sativa
  Clone ID: PAT_MRT4530_1566C.1
ggtggcattggcaagactactcttgccaagaacatcttcaatgatgatgccatccaggagaagtttgacaagaagatatggttgagtgtcacgcagaagttcaatgaacctgatctcctgaggagtgccatcattgccaccgggggtgatcaccgcagctcacatgacagatctgtgcttgagctaagccttctgaatgccatcaaggggaagaatttcattttggtgctggatgacatgtggactgaaagagcatggaatgacttcctccagataccattcagtcatggtggtcgaggtagccgagtcattgttaccacaagagatgagagaattgccaggggggtgaaagccaagtaccttcaccatgtcaacaaactaggatctgacgatgcttggtccctgctcaagaaacaggttcctcttatagatgagcctgagattgaggcactaaaggatgtcggaatggagataataggaaaatgcgatggtttaccactcgctatcaaagtgctagggggcctcttgtgcagaagagatagaaaccatggtgtttggtcagagattttgagtaattctacatggtcagttgatggaatgccccaagacctaaactatgtgttgcacctgagctatgaagatctctctcctcatttgaagcaatgcttcctgcactactcacttatccctaaaaatgttgtccttggttatgataccattattggtatgtggatcagtgaaggacttgtacttcaatgcacaaaaggattagaagaattaggagaagattactacaaggagttgatcatgagaaatcttttggagccaagtatagagtatgttgatcaatggcactgcacgatgcatgatgttgtccgctcatttgctcattatgtggctagagatgaagcattggtggttcaaggtagacaaattgatattagtaatcttcattcacagaagttctatcgattatccattcaaactgatgatgaagtagagtggaatcttctaaaagagcaaatgtcactcagaatgttaatatcagtaagtgatatcaagctaaggcctggtgattcattgggcaacttttcaggtctacggatcttgtgtataaattcatcaaattttcttcctttggttgactctctgtgccaattgaagcacctaaggtacttgtccttggcaacagatgatatatctagattgccagatgacattggcaagatgaaattcttgatgtacattgacattaatgcatgtggaaatttggtgcaacttcctaagagcattttaaagctaagacagctgaggtatctaagccttggtgacacacatataaatgcaatacctgaggggttccataatctgtcaagtattcggaaattatatggttttccagctcacatgggcactggtggtgtttcgccaaaagagaattgg

SEQ ID NO: 9235 - DNA, 1445 bp, Oryza sativa
  Clone ID: PAT_MRT4530_15670C.1
cgttgctcctgagatcgtctcgtcccacgcgtccgcccacgcgtccggccggagcttccaaggtgtttgatgtcgatggcggaggtgtgctgtgattctgcggtggtggtcggggcggaggcggaggcgagggcgagggcgcgcgccgggaggcggcggcgggcgggagttgagggggcagggaggtggaacgccacggcgacggctgcgggtgtggcggcggaggaggccgcgacgaggaagcggagggcgagtggtggtgaggccgggttggtggtggtggcgaagcggcacggggcggcgtcggtcgccgggaggaggagggagatggaggacgccgtgtcgctgcgcgaggcgttcgccgcgccggcgaacggggaggttgcggcggcgaggtgtgacttctacggggtgttcgacgggcacggctgctcgcacgtggcggacgcgtgcagggagcggatgcacgagctcgtcgcggaggagatgggcgccgggtcaccggcggcggcggcgcgcgagccggcgtcttggacggagacgatggagcggagcttcgcgaggatggacgccgaggtgatcgccggctgccgagccgagagcggcagctgccggtgcgaggggcagaagtgcgaccacgtggggtccaccgcggtggtggccgtcgtggaggagagccgcgtcgtcgtcgccaactgcggcgactcccgcgccgtgctctgccgcggcggcgcgcccgtgcagctatcctccgaccacaagcccgaccgccccgacgagctggagcggatcgaggcggccggcggccgcgtcatcttctgggagggcgcccgtgtcctcggcgtcctcgccatgtcgcgctccatcggcgacgcctacctgaagccctacgtcaccgccgtgccggaggtgacggtgaccggcaggtcggacttcgacgagtgcctcatcctcgccagcgacggcctctgggacgtcgtcagcaacgaggccgcgtgcgaggtggcgcagtcgtgcctccgccgcggcaggcagcggtggtgcgccgaggcggcggcggtgctgaccaagctggccctcgctcgccgcagctccgacaacatctctgtcgtcgtcgtcgatctccggcgaggcaacgccttgtagagagagtgtcacccagctgatgctgtagcatcagtactagtattgcagatattagctaagctaatggttctactaatctttttttttcatttcccttgtgttaaaaatcattttttttctcttctaattttctccctgaattaaccaagttcagtggagcacatagatcaggtgatggggttgtgcaactgctagttggtgtaaccagaatttcatctggataccaactgaaatgaaatgaatattaagcaagattatttgaaaaaaaaaaaaaaaaaaaaaaaaaaaaaacctcgtgc

SEQ ID NO: 9236 - DNA, 777 bp, Oryza sativa
  Clone ID: PAT_MRT4530_15671C.1
atggcgtcccgtgtggccagtggcgtgcgagatgctgtgcactcagcacaatacataatttccaaggacaagtttaaactccactattgcgggacccagggcaccatcagaaggggtacccatggaccatctggtcttccatcttctggtgatggcaaaggcaagggtgtggcaataacaggagctaatccatggtattcgggtgatgactctgatggaagcaacagcattagtgacagcgagagaacagttaccgctgatttcagaatatttgtgtgcatcctggtggttatggtgatcaggaggtggattctcgttcatccaagaaaagatgaggttgatccaactggatgggacatcgagaatcatcttcgaaatgatcagaagaccaaagataagcagtattaccgccacaaggattacaatcataaatttcgctcaaagcctgaagttcaatattttctagatactggaaaggccgcgggtgccacgcccatacaacgtacatgctgctgttctcgtctactacatgacgctcgggtgtacgaggtgttccagaactatatggtcagctacctgctcgacgtacgggcgcctagtggcgctcgacacgaagatgatggaacgatccctcgtgatccctcgttgagctaccgaggtaagtatctgcgggcgtcaaaggtgtacaacaaagaacggagcttcaaagccatagagatggccggcgtgatcgggctattcgccatagacgacagatgcctcatgctctgtgtctag

SEQ ID NO: 9237 - DNA, 764 bp, Oryza sativa
  unsure (1)..(764): unsure at all n locations
  Clone ID: PAT_MRT4530_15672C.1
tccggaattcaccgggctcgacccacgccgnntccgggacttagtaaaatttataaaataaagaaaagagaatggagggagtatatgtttaaactaatactaaaccttctaagtttctctgttggcaggtaaactgtttcgttcattgagtcattcatgatttcagtaggaaaccatattcttgggagaggtttacgattttagcttccagtggcagatgcatttgtgttgagaaatatttcatcaggtaaccatttggagatgaagtgaaaattaacctatgtagcaaaactgcacttcaacacttctatgaaaaatccagatcatcacacaatcacacatagcaaccaattgtgttttctctgttcttatcttcatatcctctttggaatgtggagttgtacaatggactaggtgagtctgtttgtctgcttaagtctttgcctcaccaagcgacaaaaaaacacatttcttttttgtaaagacaagaaattgcatattgttagccgccccaccctgtacctccatggctgttcttttttgtgcattgctcatcacgagagtacgaagcaccacttaaggcactaattccacttgtttattgctaatagcttccttatcatttttcatcaaattggtctctcctgtgtaagtgtgttttttcttcttcttaatgaaatgaagtgtggtcctcctgcgttttcaacaaaaagaaaaatcatttttcatccaaaaaaaaaaacttgtctatcatgattcatgcc

SEQ ID NO: 9238 - DNA, 505 bp, Oryza sativa
  unsure (1)..(505): unsure at all n locations
  Clone ID: PAT_MRT4530_15673C.1
gatctgcaaaatgaatcatccgatgggcaatcggatatgtngctggtgttagtcctcagtttcagccatgagctccagtctacagtattcaaatcacaattttctcgttacgataagagtggtcacttttagcaaaattggttggttctcttgtgaaccttatttcacacaagctagacaaaaaagttgcacagagaacttttctctggtaaacttgacctgtttgtttcatcttagtcgtatattaccttctgtgtttaagctggcctttnggcttttgcagtttatgaagaaatgcaaaattgagggtaatgtcatgccccaatccataaaaaccaaaaaaggtactaaaaaaactagcttttttgcttgttagtggtagtgtatctaaaagcagtgtagatacaaaactttagcttttgctccaaataatatattcctaaaatcttagtactgactacatggtccatggtttatgattttgtttgaccacggaaatagggga

SEQ ID NO: 9239 - DNA, 789 bp, Oryza sativa
  Clone ID: PAT_MRT4530_15674C.1
ccggccgggccgcaccatcgtcttcctcctcttatccgcacaggagcctcggactcggacacgatgctggcgatgtccgtccaccccgccgccacgccggccctcgcctcgcgcgcccgcatctcccggcccaagctttccgccgcctccccctgcaccacctcctcctcctccactccacgcctcgtccacctcggcagcaggaggcttccccttcgctcgctccgtggcctcgccgccgccgccgcttctggcgccgtcgaagcggaggagggagaagaggagaagcaagtcggaggtggggatgcgagcgccggcgaggaagcgcaggagtacaaggttaaggtgcctgaaaggcaggatccaatgcttgttctgaagttcatatggatggagaagaacattggcatagccctcgaccagttggttcccggctatggcagcattccgttaagcccatactacttctggccacggaaagatgcctgggaggagctaagagcaaagctggaggagaaagagtggatctctcagaaacagatgatcatccttctgaatcaggccactgatatcatcaacctttggcaacagggtggtggcagcttgtcaacctaagaggatatctcaattctcccatccttgagaaccttgtttctttttttcttgctttggttacacggatctttgttgttacatgaccctgtagatcgattcaaactgttttcggatacggttttgtttatggaaatgaattgtgattgatctctgtaaaaaaaaaaaaaaaaaaaa

SEQ ID NO: 9240 - DNA, 117 bp, Oryza sativa
  Clone ID: PAT_MRT4530_15675C.1
atgggcatgaaatgggctgttgatggtgatcagaggtcagacatggccgcatgggcgctccaagggccatcgccactggagagcaccggcaacgccaccatcaaggcagagatttag

SEQ ID NO: 9241 - DNA, 129 bp, Oryza sativa
  Clone ID: PAT_MRT4530_15676C.1
atgtcgtgtgatcaagccgacaacgttcacgaggaattatcctacgccgcgtatcttgaggcttggatgatctcgatagaccaaattgttgacaatgatggttccgatcttgtcggggcacgtactctg

SEQ ID NO: 9242 - DNA, 333 bp, Oryza sativa
  Clone ID: PAT_MRT4530_15677C.1
atggcgtcgtcgttgatggaggcgacgggcgactcggagtcggacgcggcggcggtggaccgcggcagctgccctgcggacgatggcgacgccgagtcgtgctgcgggggtgatcaggatggaggcggcggggcggcggcggctggctccgtggaggctttgtcgtgggagcgctggatgcgggagtactgcgcgggctaccagctggtggtggctgcggacgacggcaagtgcgccgcgccggcgacggaggatgatgtcgccgccgccggcggcagcgacgccgagagtgacaggctcttctgggaggcgtgcattgctcacggcttctag

SEQ ID NO: 9243 - DNA, 362 bp, Oryza sativa
  unsure (1)..(362): unsure at all n locations
  Clone ID: PAT_MRT4530_15678C.1
actggcacagcancctcgtggattgccatactctgaccgcctacaacatccaaacagagtccaccctccaccttgagctcaagctcaggggaggcatgcatatcttcgtcaagaccttgactggcaagaccatcacccttgaagccaagcctgctgacaccattgacaatgccaaggccaagacccacgacaaggaaggcataccccctgaccaacagcgtctcatcttcactagcaagcagctcgtggatggacgaaccctgggcgactacaacatccataaggagtctaccctccaccttgtgctcacgctcacgggaagcatgcacatcttcgtcaagaccttgactggcaagaccatc

SEQ ID NO: 9244 - DNA, 1829 bp, Oryza sativa
  Clone ID: PAT_MRT4530_15679C.1
atggtcatctacctaccggtcgttaagctctccaaagaacttgacatgcatcgcgtgatgctgatgcagttgcagcttaagtccaaggagaatttatcagagaggacaccagaaaaaacactaattaacagtctgaaaaacttgctaatagaaatcgacatctcttcatccaaaaataatttaaatcatagctatgaatcgggacaaacatttacccagtgcagtggcgaggccagtgacacagcgagagtgacaagtggtggcgaggcgaggaggcagctcgcggcgccggtcatggccgacgcgaacaggcgcatcgacctcgccgcgccgctcgtctccgtgcggcgccatggcggtggcgccgccggcgaggcggcgacgcggacggatggcacgcggcccggtcatcccaagagcgtccgcacccggcgcgcgacgatggtgcacgccacggcgagggacgaggagcccgcgcgcgacgccatggcggtggtcgccgtcgccgcgccggtgcgggagcgggatcaggaggcgcggttctccgacgcgctctccgtggcggacagctgcctcaccgtgaactgcagcagcgccagcggcctcagcgacgccgtcgcccagcctccgcgcggcgtcggcgtcggcggcggcgtcatgatggaccgcttcctgccggcggcgcacgccgtggctgtcctctcgccgcaatgcagctcccggaaggccagcgtcgccgcggcggccgcgcgcaacggccacggcgccgacgcgttgctgcctcctcccgagccaacgccgacgattcgaacactgtgcatcgttccgagggagaagaccgacgacgccgacgccgccgtcgacgacaacggcggcggcggcgagtgggacgcgcacagtacgcggggcgtctcgtcgaggaggtgcgggctgcttcttcccacgcggtgcatgaagagcaccttgctcctcctcaacccagcgcccgccatgagacgccgcggcggtggccggcggcgagaccgcggcgcgcccctcctctccaagatcggcaggagccaaagcttggggaacccactcgtccggagcgcgcacgacacgggcatcatgcgatcctgggaggaagtgtatatcaactccctccggcgatcaggccgcggcggccggaagggtatcggcgcgttgctgtcgccggagctggacacgacaatgccgtcggtgcgcgagctttacctggaacaaggagacggcgccgtccaccccaaggctacccacctcggcttcctcctggtgttagacagaagccacgaccaatgccacgacagccacgacgatcccaagctgctgccgcctcctcgcttcccaaggccggcgccgcccaaggtgttcgacggcgggaagaaacaaaggcgcgacgccgccggcgccggcggaggcggcggcggcggcggctacgggtggccgctgctattggaggacaaggccgcggcgagccgtgacatggtgcctccgctcccgccgctgccgtcgatgaagtcgccgtcggagtcctggctctcgcgggcgctgccgtccgtgtcgagcaaccctccggcgacctccttcctcggcatccacgtgcagcacaagaagcagtctccacctccaaggtgttcgtcccgagctccggccaagctcgtggccgacggccatgccaggccacggcaaatgcgaatacatgatctacagaaatcatagcgtaatacttctattaggagtagcattttactgtactttttatgtcctggtaattgcattgttagtgctaacttgtaattgtattgattgtg

SEQ ID NO: 9245 - DNA, 324 bp, Oryza sativa
  Clone ID: PAT_MRT4530_1567C.1
ctactccccgttgaggcgagcccaactccaccgctcaaccacgaagccaccgcacgcccccttctcaaggggtgagcaaggcgggagccggcccacggagaggactacccaagcctcgatcactcggggtagttctttcttcactccgaaggtggtgaactccaaaccactcacaaaccggcaccgggcctccttcacaatcttctcggagaggtcaccgagcaactccgacatggggtggccggtcagaccggcctcggctcggttagaccgccaccagctcggtctgaccgaatacggctccggcggctcgggattggccat

SEQ ID NO: 9246 - DNA, 1801 bp, Oryza sativa
  Clone ID: PAT_MRT4530_15680C.1
tcatgtgtgtgatagacgtagggccggcgcgtcccgtagaaagaagaggcagtgagagatgtacaaggctcccacaaaacccacgacgaacccgacggccgctccgattattccgatactgtagtcaccgtagcttgtgctgcaactatcaaacggtacaccgcagagaccttggttcccagaaaagcatgaagtcgaaaactttgataaagcaactggaatagggccagacagtaaattgtctgaaacattgaacgactctaaccgagaaagcagagcgaatttccctggaattgaaccggtcagcttgttgtgctgaaggccgatactatatagatatgtcatctcactgatattaacaggtatttcgcctgaaaaacgattgtaggagaggttcagagatgacaaatccggcagctgccatgagatgccagaagggatgggccctgaaagactgttatttgacaagtccagtctaaccagagatgtacaatgctcaagacctcgaggaaattggccttgcagtcctagactgccgagagacaaacctagaatcctgttttcgtcagggttccagcatatcacgcccataaaattgcatatggaatttgtggttccatcctgagaaaatttccatgacgatctgagtattccactaggatcgatcagcgatcgctttacactcgatcgatcaaaaaaagcagaaacctccgccgtgtccaagtcttcagtcggagcagtctccatactagcaagactaactgaagggaatgtttttttttttttttttgaacatgttaagacaaacatctattacttatcacctcaattcagagaggtttctgatactcatcagaatgtaaactgacttaactcctgtgacacacacacaaccttcttgccaacattttttccactgaatagaccaaccaacgcagcaggtgcattctccaaccctatgctcatgtcttctacatacacaatcttgccatctctgtaatgcttggccatgtcactgacaaactgtgggaacatatggaggtggtcgctctggatgaacccctgcattcttatcctcttggtacaaggcagaagatgttgtggatccctacaggatcagtcagcgcattctgggagaccatcccgcatactgcaatgcgaccatgggtcctcatgttgaggagtacaacatcaagcattggtccacctacgttctcaaagtagatgtcaataccttcagggaagtaccagcgaaacaaaaaaaactcgccctttcggtgagcagattcatagaaccagcataagctgtaaaaccagcatgccaagaagccccaaatggtaagagagggtatgtcactttgctgaatcttgctcagctgttcaggcctgtcgatcagactgtattcctcccaaccagtcatcccggagacaatgtcgcccgcgctgaatcccggatgggtggaatccaccactctcgccactccaagcccttcaataacggatccgggcttgaacggcgggatgtaggatccgtggaagtcccgcatccggccgcgcatgtaggggtcgcaggagaggtagagattcttcacgagggccgccggggcgggggccgcggccccgggcacgcgcagggcaccgtgggcgccgcgcatactgccatggatggctgctttgcgtggcagttcgcgattctctcccaggagcgtcgtggagaggcggccggccatccgctcagcatgagccgggagagcgtaagacgcttggcggagaagcggaagaacgccgtgccgttccgcat

SEQ ID NO: 9247 - DNA, 318 bp, Oryza sativa
  Clone ID: PAT_MRT4530_15681C.1
ccaccccttcgatcccgcgtggagatataccgaattcagatggacattgacttcttgcgtacatttcacatgagatgcacggagagtgtactcctgaggccgtatggtgctgaccgttgctggatagggaagagcacatgatatgatctcatgcaggatgggccacgactgtatgttggtagatttcacatgctctacttaatcttgatggttagcgtcaggtggccattgataactttaactttctcaacattgcagcgtactgtcatgcagctagggagctgccacatgtgaagcactagctctagctgcttgaca

SEQ ID NO: 9248 - DNA, 1250 bp, Oryza sativa
  Clone ID: PAT_MRT4530_15682C.1
aggacatacattgattacttatcaccccaattgaaaaaggtttctgatactcatcagaatgtaaactgacttaactcctgtgacacacacacaaccttcttgccaacattttttccactgaatagaccaaccaacgcagcaggtgcattctccaaccctatgctcatgtcttctacatacacaatcttgccatctctgtaatgctttgccatgtcactgacaaactgtgggaacatatggaggtggtcgctctggatgaacccctgcattcttatcctctttggtacaaggcagaagatgttgtggatccctacaggatcagtcagcgcattctgagagaccatcccgcatacggcaatgcgaccatgggtcctcatgttgaggagtacagcatcaagcattggaccacctacgttctcaaagtagatgtcaataccttcagggaaataccttttcaaggctgcagtcaagtcaggctcctctttatagttgaaagctgcatcaaatccaaacttgcccttcaagagctcaacctgaaacattgctgtaaaccctgaatgatgcattttctgatttgttccagcacttcccacaacatagcatccatgaagctttgcgagttgtcctacaatttgcccaactgctcctgatgcagccgaaacaaaaacaaactcgcccttcttcggtgagcagatctcatagaaaccagcataagctgtaaaaccaggcatgccaagaagccccaaatggtaagagaggggtatgtcactttgctgaatcttgctcagctgttcaggcctgtcgatcagactgtattcctcccaaccagtcatcccggagacaatgtcgcccgcgctgaatcccggatgggtggaatccaccactctcgccactccaagcccttcaataaccttcacacaaatggaaccttcaataaccagtaaagcaattctccgtgtagagggtgaaatgcacctctgattgaacggagagcaggcgaaggggaggaggaaacctacggatccgggcttgaacggcgggatgtaggatccgtggaagtcccgcatccggccgcgcatgtaggggtcgcaggagaggtagagattcttcacgaggaccgccggggcgggggcggcggcctccggcacgcgcagggccaccgtgccgccgtcgacgagcaccatgtcgtcctccctcggcggccggccggcgatgtactcgcgcagcaccaccttcctgttcctcgccat

SEQ ID NO: 9249 - DNA, 704 bp, Oryza sativa
  unsure (1)..(704): unsure at all n locations
  Clone ID: PAT_MRT4530_15683C.1
agtgccccagncaagaanggagttttgtgttctgggccggttcgaccagcgtcggatgccaacgcgataccagttcgcaaaaagcagccaggcttacgatgtggtctacgacctgctcgcccacgaaactttgacctagtaaattcgctcggcgccacggcggcctacgactatcggagcaaaacgccgtcgaggacattgtgcagcaccactgccgcgacaggacggtcgcgggcgccatgtccatcggcgacggggtgccgaggcctgcgttgagatcctcggccgcagtcaaggcaaccgcttcctctcaatggttagctacccgaacccgcccgacgtcgacgccgggattccttctcggatcgtcttcatgacgcgttggatggcgtccatgaccgtcaaggcttggacgaggggagtcaagtcaaaatttgtatggggagccacgctagagcagaacgaggttggtaagatgatctatgaggacttcttgcccttggccctcgagcgtggccgtggttgtgcctgcgccggctccggagatgattggggataatttgaagtcaatccaggacgggcttgataggttgaaatctggaaaagtatccggggagcaagctagtcatacagttagacaccgagaattagtgacgaatcgancntcctgtttactgtagtcaaaaaaaaaaaaaaaaaaaaaa

SEQ ID NO: 9250 - DNA, 153 bp, Oryza sativa
  Clone ID: PAT_MRT4530_15684C.1
ctcgacacctggtggagctgctacgcaaaggagcaccttctcatcgtgttcttctcctcgagcacgtgctggaaggagaggaaggaagttgtgatgctctgtgattctctgggaggtttcttggctccattagccgtactcggggtgatgtga

SEQ ID NO: 9251 - DNA, 594 bp, Oryza sativa
  Clone ID: PAT_MRT4530_15685C.1
caagggttcgacgtgaccatgcccggggggcggggcgaccaggcgcaggcggcggcgcgctccaacgccgacgccgaccgcgacgacgacaagatcacggtgggcgatgtcctcacggacgcgacggcgaagctggcgggggacaaggtggcgggggcagaggacgcggcgaaggttgtgcaggcggagacgtacagcgacgccgcagcgcggaccagggccggcggcgaggctcaaccaagccgacgacgacgccgatgacgacgctgagtgaaccagtcccctgtacttttttgtggtatcactgtgccggcccgtacacagctagtgcgtgtccctgtaccttttgcgtgtgtatatgctgcagtcagatgagtcaagcgtgtgatgtcacctgttgctgtggacacaaataaagaagcgagtgtggtggtgtttcccatggtttgcaccagtctcctctgatgcagtctcgttctctgtttctttttgctgagctcttcaagtatggaatgtaagcacataatcaagcctgaaaaaaaaaaaaaaaaaaaaaaaaaaaaaaaaaaaaaaaaaaaaaaaggcggacaaata

SEQ ID NO: 9252 - DNA, 1157 bp, Oryza sativa
  Clone ID: PAT_MRT4530_15686C.1
atactctcgacccgccggagcaccaccggagtaagcattaccactactactacgagctagcttgccggaggaaacagggcacggagggatagaggtagccatggcgcagccgcagccgcagagaatggaggaccagctgcaatcccaggcccagggccagggccagggccagacggaggccatcaagtacggccacgtgttcgccgtcacgggcgagctcgccggccagcccatcgcgccgcgggacgccgccgcgatgcgctccgccgaggagagcgtgccgggcgtccccgtcccgcaggatatcggcgggggctacagcgccggggtcgccatggagacggccgccgcgtacaaccaggccgtcgccgccgttcgtcccggccaggccagcgacgccgccaccaaccagggcatcgccgtcacccagacctccgtgcccggcggccgcatcatcaccgagttcgtcgccggccaggtggtggggcagtactccgtcgccgaccaggcggtggagcaggacgcgaccaagataaccgtgggcgaggcgctggaggcgacggcgctggccgcgggcgaacgtccggtggacaggacggacgtggaggccatccgcgcggcggagatggcggcgcaagggtccgacgtgaccatgcccggcggcctcgccgaccaggcgcaggcggcggcgcgctccaacgccgacgccgaccgcgacgacgacaagatcacggtgggcgatgtcctcacggacgcgacggcgaagctggcgggggacaaggtggcgggggcagaggacgcggcgaaggttgtgcaggcggagacgtacagcgacgccgcagcgcggaccagggccggcggggtgggcgccgcggtgtccacggcggcgaggctcaaccaagccgacgacgacgccgatgacgacgctgagtgaaccagtcccctgtacttttttgtggtatcactgtgccggcccgtacacagctagtgcgtgtccctgtaccttttgcgtgtgtatatgctgcagtcagatgagtcaagcgtgtgatgtcacctgttgctgtggacacaaataaagaagcgagtgtggtggtgtttcccatggttaaaaaaaaaaaaaatcataaaaaaaaaaaaaaaaggttaaacgaacgcgt

SEQ ID NO: 9253 - DNA, 394 bp, Oryza sativa
  Clone ID: PAT_MRT4530_15687C.1
ggccgcgggttttttttttttttttttcatgaaaatgtggtctaccattctattactttttagaaagagtaatcttccgtggtacatccatcgatctacatcatgccgatgagatgttatttcaccacaaatcagatagaagtaataaagtgcacaaaaggacaactgagaacattttaggaccccagccctcttgcaccgaattattcttgcactagcctgattgtctaagtttcatactttgcttttattgtatgactcacgcttattcacagaaattatgtttcactcattgaccattatgtttgccatccctgaattgggcattcttcccggccgggaatggttccgggaaatctttacccttttgtggtgtaagcttgtgtcttggctt

SEQ ID NO: 9254 - DNA, 2077 bp, Oryza sativa
  Clone ID: PAT_MRT4530_15688C.1
ctagtggggtctctctggtgcggtctccggtgccgagctccctcgccgccaccgccgagctccctcaccgcggtcgagctccttcgccgccacccaggtcagcctcgccgttgacgacactgacagcggaagccacctcacgggcgtcgactcggcgaccatcgtgttgtcggggcatgcgacgaggaagccgaggcatccaaggaggaggcggcagagtgggccgcggctgcgccgccgtctccggccggtggcgtcggcgtccctggccgagggcacgcgcgacgaggtccttgcagcggcgaatgaccggcgaggcgacgaggagcagctgcatcgctcccctgcggcatcctcaaccgccgtcgtggcatgggggccgctccgcacgggattccggccgccacttgcgcgcctgcgccaccacgagaaccctgagtcgcctccgctgctcgcgcctgcgtcggtgtcgttgccgaagccgaagtcggtggtggtgtcctctggctcggtccttagacgcggagagacggcatcaacaggagtggatggaaaatgcgacggagtggcatggatccaattttcaagaaatcgatattcaaaatcattccattcggaattctttgctttcttaaagcatcggacttctaaattctcataagggcccccaggaattttttctacagcctgttgaataattttgattgattccctcatttcaccgattcgtactaaatagcgtgctaatgaatccccttctttttgccattggactttccaatcgaattgattgtaagactcgtaaagatcaactttacgaagatcccattgtattccagaagctcgtaacatggggcccgataagccccaatttacagcttcttctccgctaataaaaccaactccctcaactcgttccaaaaaaatgggatttctatttttctttgccaaataagccagcaaacgttgacgttttcccaaaagtcttcggagacctctttccgagtgaaaaatcttttttgtgtaattccaaatgtgaagcaagtctccgtatcttattggtgaaactgaatacttgaaattcaacagaaccccagttttcttctttttcttctttaaccataaatccaaaaatttttctacctcctttctttttcatgtatttttctgcccggaagcaaaatccgtgcatgttcccaacacagagctgtatagcagtcacgaatataaagctgcatctctcaatcgatttgggcgtcggattgcgaagactctgcctcagccacccctgtgtcttcactggatgatcttgaagcttcaagtgtctccaaatatctatttggccaactctccatcttggatgcggcgatggcggacgacgacggcggcggcaactcgcgtgcgcgcaaagagcgggtgcgtgaggcaacggcggacggcggacgacggcggcgactcgtgggcgcgcaaggcaacggcggacggcgacagcggtggcgactcgcgtgcgcgcaaggcgcgggtgcgcgaggcgacggcggcggcgactcgtgaccgaaccagttcccgacgacgcgacgacgcatggccaccgggcggactggacgactccgttggcgacctcggcggcgaggaagaaggtgaagctgtgcacgccgaggaagtaggccgcatcgcgccgccgacgtggccccggaggcgaccatggcagcgccgaggaggcggcggaggtcggcgaggtggcccacgacgaacatggcggcgccgaggaggcggcggaggtcggcgcggtcggcgaggtggccaccgggctcgccgaggcagtgcgggctggaggcggccgcgcgactggaggcggcgtcgtagcaccgtagcgacatcgagctcgccgaggcggtgcgggccggggcggccgcgcgactggaggcggcggcgtgggaagctggcgttgcggcttccatttggaggcgacgacgaagaagacatggaggagcacagtgggacctacggatggccagtgaatagcaagtggagtaggctggccaagtttggctagtgagggaaggaatttggccat

SEQ ID NO: 9255 - DNA, 536 bp, Oryza sativa
  Clone ID: PAT_MRT4530_15689C.1
atcagtgttattacaaccaatctcgtctccaaaagaaccctattcactctttggataatgcgtcagccaccccatacattaagctagtgtaaaacatcactcactaattaacatccaactctaactccatatacttttatacacccgtttcagtacttagctggtgagctgaaaccttgcatctctaaaaccaaataagaatgtgtatgattcaaggaggggttatctttccctgcggagcagtttggcgctcctaaaaaactcatctaaagatccttgcttgtaaccacccaaactgcacatttgcacataacgaatatgtaccattcttattcaacgcacagcgagtgtccggcgatacttccgtagcaaccaccgtgttattagctctcgagtcaagatcttgatatgctgaaccactctctgtacaataatgaattgcaagcatgtacaagccttgtgggggagacgcctttattctattactagctgagcgggtagacggtatcacacgcctggaccacaagatgcacctt

SEQ ID NO: 9256 - DNA, 3568 bp, Oryza sativa
  Clone ID: PAT_MRT4530_1568C.1
tgcagggcagcggcaggttgagacaatgccatgtgcggcgaggaacgagcaaaagatggtgttgtcgaactcacgtccgttgtccgtctgaaacgccaagatcggccgtccgaattgcgcccgaacgaatgcatggaaggtgaggagcgtgggcacgacgtcggacttgcgacgcagtgggaatgtccatacgtagtgagagtagtcatcaagtataacgagatagtactgaaaaaccagaacagctcaacacaggcgaagtccatatatcacagtgcaaaagggagaagagaaaaggagaaacagtcgaggatgcagtgaacgggaggcgaacatgttttccaagacgacatgagttgcaattgtgaggagaactcggtttacaactaaaattaaagttattcaaaatgcgagagagcgccggccggccaggatgccccaagcgatcgtgccagaggtcgacggaggcatggaagccagaaacaagtggcgtggcagcggaacgcagcggatagagatcgccagggctgtcactgcggagaagaaccgtcttgctgcgaagatccttgatggagaaaccgagagggtcaaattcaacagagacagaattatcgcgagtaagacgacaaacagaaatcaaatttttaatcaaagatggagaaaaaagaacgtcgcgaagatagagaggggaggaagaagaagtggggacggtggccgtgcccatgcactgcacgggtaaagaggcgccgttgccgacgatgatacgagaagtagagggggcagtggaggagagcataccggagttgccaaccatgtgagtggaggccccagtgtcgaaaacccaatccgtggcgctcggcggagtcgactgtagagacaggccggtgagagcctggtagagcgccggcggaagcgtgccggccggagcctgctgcaccaccatggactgctgcggggcggcaccagggcgagagccgagaatgccaggagctgacgaggtgagagggaaccacgcgatgggccaggcctggacaacgccggtccatgggttgacccaggatgccatgggcgcactggagttgccggaggggccagagttgccggaggtgccgtcggcgcgaccagcctgcttcttgcgtttgtaggggcgaccgttgccgccagtgccgccattgctgccagtggcgccggtggcaggtggggcgggcgcgttggaggaggcgccggcggatcgcgaggcagcaagcagggcggtggtcgcggccttctgcgcgcgattggcgatccagacctcctcttggaggaggaaggaccgtgcttggaggaacgtcatgggcggccgtgccgcggagatggtggagacgcagtgggcaaacttgtcgttcagcccgctcaggaggttgacaacgagatcctgattcgtgagaggcgagccaacgtcgcgcaacgtgtctgccagtaccttgatcttgccgcagtactcagtgatggtcatgtcagcctggtggagagcgtggaacgcctgccgggtctggacagtgcgctggacgacgttgtcaagaaactgggagctgatggcgttccaggcggtgtaagcgtcgtcgtccggctggatcacagcggagaggaggtcgggggagagtgtggcgtaaagccatgagacgatgcaggtgtcgatctgcgtccactcggcgtcgtcgagcttgaggcgggcgttagtcgtgctgtcgatgtgatcgaggaggccgaacttgcggaaagcaatggtgaagaaggtgcgccaggtgccaaaggtggagtcgccgagatcaaggatcacgggaacatgggacttgatgtgaatgagttgcgccgtcgccgccgagatggccacagagcctgccgcgaaggggttgacatcgtcagaagggacagtgcttgacgccacagagaagaaagaatggagaagcagcagaagatgattaggatcgagaagagatctactaagcaattggcaactaccgaaagtgctcttgttatccactttacaaccgacataatccgaatcggaatagccgactagcttgaacttagaaccttttgggtaccacaagccaatagttgaggaattctttaaatatcttagaatccttttcacggccattaagtgacactccttgggggtggcttgaaaccgtgcacacatgcaaatactaaacatgatatccggcctagatgcggtaagataaagcaagctatcaatcacagaacgataaagctttaaatctaccggtttatctccctcgtcatggtcgaggtggctattggttgccatggagtcttgatgggctttgcatcctccaagacaaacctcttgagtaggtccttgattggtttggctcacaaaggtcccatccttgagttgattgatttgaagtccaaggaagaagctcaactctccaatcatggacatcttaaattccctagacatcatatcaccaaattccttgcaaaacacctcattagtagaaccgaatatgatatcatcaacataaatttgacacataaagaaatcatcaccaatgattttagtgaaaagagttgtgtcaactttgccaattttgaaaccatggttaggatttttaggatcttcaaaaccgggtggttgttcaacaaagacaagttcggcaatttcaccatttagaaaagcacttttcacatccatatgaaaaagctttatatcaaagcatgatgcaaatgcaagtaggatgcgaatggcttcaagccttgccacgggggcaaaggtttcaccaaaatccaaaccttcaacttgtgtgaaactttgagccaccaatcttgcctttttccttaccaccaacccgttctcatcttgcttgttcctaaaaacccactttatccttatgacattgtggtttctacgtctttcaaccaaagtacacaccttgtttcttgcaaagttgttgagctcttcatgcatagtatttatccaatccggatcaccaagggcttcatttatatgttttggctcaagacaagaaacaaaagagtaatgctcacaaatcgaagagacacgagatcgagtttgaacacccttactaatatcacccaagacttgatcaattgggtgttccttagagagagcgttgtgaattcttggtggcataggtggatcttgtgccttttcatcctccacgtcaacttgagcttggcttggcgtagcggaagtagtttgctcaacttgagtagaggtggaaggcttgtcttccacttcaacgggcttgatgtctccaatagacatgttcttcatggcgctcatcaagccctcatcacctacatcatccaaattctcgtgcccctcttcagagccattagtttcatcaaattgaacatcggcggtttcttccacaatacctttgttcttgttgtagacccggtatgccttactatttgaggcataacctagaagaaacccttcatcacaccaactttcaaatttggttagtctaacaccttttcgataaatatagcagttgcaaccaaaaactcgaaaataggcaacattaggcat

SEQ ID NO: 9257 - DNA, 365 bp, Oryza sativa
  Clone ID: PAT_MRT4530_15690C.1
gctactcctcccacctgatccaccacctgtctctctactgctcctgttatgctgatgccgatgcatcgagctctctccttacgtgtctcgccgctggggattgcctttcgattgagcggcattgatattgatgagacttgcgcatggacacccacaattacagagacggataggagacacaatgaagccagggatctgtgagaaacactatcaggctcgcctactccacctacaaagactaagccaacatggcccctttctctcgcttgtaccgctctggtttgctactccttgaaccttcttatcttttgcagttgattgagagaaataaagagagagaaagagatagagatacagacagaggt

SEQ ID NO: 9258 - DNA, 3135 bp, Oryza sativa
  Clone ID: PAT_MRT4530_15691C.1
atggagatcgactcgtcttgtttactggcaatgctgaagtttcttgatgttcttatgcaatgttcattggagggttcatgtggtaagggcctctctgttaggaaaaccgcattggacactgtatctgaatgtttacagatcctcaggtttttgagcaaagattttggcggaagtacttctttacctgagaatgcacatttgcttcgagtgctcatctcaattgtatcatgcttgcaatctgagctgaacctcacagataaacctaatggtgctggtttttcttcccacacatttggaccaataaataataagaatccaaatatctgggatatggaaatctctgcattttccatgattgaagatgcactatctaagatagcctcaagtttatcagaagatttgtggcagtccattgttgaggttttgaggaaggtgatggattttttgacagcaaggaactttatcatagagagtagcactatgtcaagattttatacctcatttcttcgttgtctgcattctgttctttcagaccccaaaggcccactttcagcacatgtaccaggtttcgttgcgaacttgcaaatatttttcatgtacgggctaaggtcatcttcaccacctgtgataactccaatggaatataaaatggatacaaaatccaatgccggacgatataaaccccctcatttacgtaaaaggggtggaaagggaaatgattcgttcgatggtcgaaattctgatagtgaatcctctcgatatgatttaagctcatcagattcagatatgagtgatagcgatggatatgcaaaaactggagatcgtttccgaagttcaaaggctagattagctgccatcctttgcatacaggatatttgtcgtgctgacccaaaattacttacttcactatggccattacttttgcccgagagtgatgttctccaacaaagaaaatatcaagctactctgatgacatgcttgattttcgatcctataataaaggtgcgtattgaggcagcatcaaccattgcttccatgctggaaggacaagcattagttttgacacaagttgccgagtacaaggagtcatcaagacggggatctttcactacgctatcttcttcacttggtcaaattcttatgcagctgcatacaggaatgttgtatttgatacagcgtgaaactcaaactactttgctttcagcattgttcaaagttctcatccttttgatatctgttacaccgtatgcccgcatgccgaagcagttgttgccaactgtaatcacagatatgcgcaggagattgttggacagacactcaaataagaatgagcactatgctttgctggaaacggatggtccttttactttacacgagtatgaacaggttaatgtcctgaattgcttggaagcagcattttcaaaagaaccacttcttcaaatgtttttgaagttctcactcaagatggatgtgcaggaaatacatgtcagtgtgagatttggagctctccaggtgttgagatcagcagttcataattatccaagctgtgcaaatatcatttgggcaaaagttcaatacattgttcttgatttattgcaaatgcaaagcttggaagaccaaagagatgctaattttgggcttcctaaagaagaatcatcaattaaaggaagatgtcttgtggctgccattaaggtaatagatgagtgtctgcgtgtttcatctggattcaagggaacagatgacctcaaagaatatagattgcaagatattcagcaaatttctgattgtaccataaacaaaactatcaaatctgcgcctcactttgagactgatgttcctggaccatcacaaaattttactttggacataactctcggaactaatcgttggattgaggtgatagaaaggcttctccctcaaggattatcacatggctctgctacggtcaggacagcatcactgacatgtttcgcgggcatgacttatgatgttttcttctccctgccagaaaacaagagggattatgtgacgtcctcatcgattcatgctgcattgagtgatacagctcctgctgtaaggtctgctgcatgtagagccattggtattgttgcatgtttccccagcatactgtcaagtcctagcctacctggcaagttcatagatgccattgagtttaacacacggaattcatcaactccagttcgtatcactgcatcatgggccttggcaaatctttgctcttctattcgttttagagcattagataccaatccctctgcaggtgtactagataaatcagccatatcattgctggttgaaattgctttgcgccttgctaaagatggtgaaaaggtaaagtcaaacgctgttagggctcttggataccttttaagatttatcagattcaataatcattctgacacagttgatgacccaagtaattccgttctctgtggagatcctgtctggcttgaaaggatggtacatgctttgatgtcctgtgtgacaacaggaaatgtaaaggttcaatggaatgtttgccatgctcttagcaacttattcatgaacgacaccttgagacttccagatatgccttgggcatcaagtgtttatagcatacttctgctactactccgtgactcaaacaattacaagataaggatgcatgcagctgttgccttagcagttccagtctcacggcttgattatggtagctcatttccagatgttgttcgaggaatcgagcatgttcttgagtcattgagttccaacagtttatcatcaccttcaaatttcaaacataaaggcaaccttgagaaacaggttacatttactgctcttcatttgtttagttttgtttcaccaaaagatgatcaaagcctgagagattttcttatcaagaaagcatcctttctagaagactggctgaagtcattgttctcattgttcaataatgttgaggaccagcctttggcaaatgaggccataaatgacgaggatggtttcagcccaaacgtggcacaaaaagctatgttgtcttctgctgtgaagtccttgctcgacatatatacaagtgaaaatcagcacactgttgctcagagatttgagcaattggcaagaagcctagaattatag

SEQ ID NO: 9259 - DNA, 425 bp, Oryza sativa
  unsure (1)..(425): unsure at all n locations
  Clone ID: PAT_MRT4530_15692C.1
ctgctgccaacctcaggcgggggagcacccctctcctccctgtcctcttctggatcccctcccttcgacctcacatctaacngacggcgagggagcggagggtgtggcgaaggaacggtcatggacccagcatttggctctgtacctgtcggcgaagtcgatgccttagcctcctttccatccttgacttgcgaaagccactgctcgcggcgcgcgtcgagcttgcactgcttcagcttcgccgacgaccggttccccctcttcttcttcgcgtcgcgcgcggcggcggcggcggccgatgcgtcgacgtggcccatctcgccggggagacccgtctacctctcaccggggcggcgcgaacaaaaaccctaaaaagcggcggggcgaggagagagagagagaggaggcgacggagcgaagaggag

SEQ ID NO: 9260 - DNA, 285 bp, Oryza sativa
  Clone ID: PAT_MRT4530_15693C.1
atggtgcgcatggctggtgtagaccgggagtggttacacagcatggcacatgcgctggcactggacgcacggacgtggctaagagaggatgttcctggcctagggttgattgacagggatgtaagcgggcccggcctgggggaaggcgggtcgttacagatcttcattaacttcagcccaaaccgctggctcacatggaaaatagggtggatggaggatgtcactggtagcaagagtttatatgccatcggtccaattcgttccagaactcgaaatggaccatag

SEQ ID NO: 9261 - DNA, 1002 bp, Oryza sativa
  Clone ID: PAT_MRT4530_15694C.1
tttttttttttttttttttttttttttttttttttttttgattcttatcatggcaggcacaaatgcatttccacagtaatactccgtatgtccttaactaactcgttactactacgcctacctcatttataggtcatcagcctacaccatgtaatggagtataatttttagagatatatatccaaggtgataattttgcgtgtgtaatgcgttccagggctttgctgggcgacttttctggctgctgtttgtagtggtttgaatactggtggtgcatcagaggattgtgcacctgttgagcccaagcgaggagaagatccgactcgctgaaggccagatgcgggcgagaagtccgggcctctcttcctcgaaggccaaccctgaatctgcacggggaatagcctcctttgcatccgtgtctctgtcagcagttgacgctgcctcgcctgagcctgtcgtgtcagtcttgttgccctctggctctcctacacctacttcggaaatctcgcctggcttcttgtcgaacagccctttgaactgcttcctcgctttcttttcagtttcctgaattgtttgtttaagtttattaagggcagctgtagcatcaggctctgaggacttgtcgacagctatcatcttctcaaaatccttctttgcatcatcaaagtcccccaataacatgtaggacatacctcggcgataaagagccttcacatgcacagggtttgcttctagcaccttgttacatgtgtcaatagattttctatactcacccatcttctggtagcaagcagctacatttagatgtagagaacttcttgaattagcaaagattttcccctcatcatcatcttgaggatgcacatggttgtactctctaagcaccttttcatacttcgccttagctagctcaaacttcccttctttaaacagtcgattacccgtggtttttattttttctgcgtcatccatgatttcttggaaggtgaaaccagtccaatc

SEQ ID NO: 9262 - DNA, 1279 bp, Oryza sativa
  Clone ID: PAT_MRT4530_15695C.1
agcacctatccaatattcacatttctttataccaaaaagggacaacacaagacaaaacgcatatctgacagcaacagcaaaggaccaaattgcgacagagagctattataaaccctggcacaacctagtatcttggacccatgctacaagaccgggatagccgcgcagcaacatattccttcctgcacccagggcagcgtccatcagcttcgaggatcttgttgtggcagaagagacacaggcaaaatttacaaggacaaggacagaagcttgagtctgtcaggtcaagatcctcgcagcatattggacatgtcaaaggcgtagagaggttggcctgctgtgcagcacccatccagccattcccgatgcttgctgggaagctgacctgcctggagatgctgggtaagctctgtggacggaatatatcatcaggcgcccaagcttttgttctctgaatgggatcttgccttccagtttgattggcaggagctgtacaaacatttggagcagctggtggcgccacatgacctgaactctggtgggaatgacaatcatcaactgtaagcgcatctgcatcagcaacagcttcccagtcatccaagaccccattctcctcttcagggccaccagtatcatcatcctcggcctcgctcacacttctcgaactggaccatacactgctgctgctgctgagattgaggccaccaccattgttgtaatgcttcctgtgcatgccgccaacgctcccagaattgtccgagctagggctgtgcacaggagagtccagatagctgctgcctaactcctgcctggcagcacccctctcctccctgtcctcctctggatcccctcccttcgacctcacatctaagcgacggcgagggagcggagggtgtggcgaaggaacggtcatggacccagcatttggctctgtacctgtcggcgaagtcgatgccttagcctcctttccatccttgactataccaatccaaaaggcaggaggatcagagtttgaacaatcttgcgaaagccactgctcgcggcgcgcgtcgagcttgcactgcttcagcttcgccgacgaccggttccccctcttcttcttcgcgtcgcgcgcggcggcggcggcggccgatgcgtcgacgtggcccatctcgccggggagacccgtctacctctcaccggggcggcgcgaacaaaaaccctaaaaagcggcggggcgaggagagagagagagaggaggcgacggagcgaagaggtgggggtggtgacgcccccctcc

SEQ ID NO: 9263 - DNA, 366 bp, Oryza sativa
  Clone ID: PAT_MRT4530_15696C.1
atgcacaccaccagcacaatagcagccaaagccaagggggcgtttccttatgtaaggccctttgaggccgcaacaagaaaaatgccacatgatgatttgttcccccgagccaccaagtgtgtgcagcacagaataattcccccgaaacgcacaaacaacagctcccacctcactccacagaaaattgacggcgcaggggcgccccaaaaggagaaacagagcaaaaacaactatatccgcgcgaaccccgccaaaagtcagttccagaaaccgcaaggcaccaccagaaatgcgaaagcgcgcagcaaaagcgcattattccgacgccacgagccaattccgcggtgcaaatgtctcataaactag

SEQ ID NO: 9264 - DNA, 983 bp, Oryza sativa
  Clone ID: PAT_MRT4530_15697C.1
cccgggctgcaggaattggcacgaggccaaaccaaatattttgaactctccggactccggccgccgccttccagaggaacgtcgcggctgccggtgccggtgccggagaagacatggccgggaagaagaaggccctaacaaatcccgcctctccctccgcctccgcctccgcttccacccctaagaaatccaccgccacctccaaggaccgctccacgccgaaaccccgcaaaaaccccaaccccaaggaggaggcaccaccgccgccgcccgccaacaacaagcgcctcaacccccaagggggatccaaccgtaagaagaaggccgatgcggggacgccctccaagaagccgaagcgccagccgccggagcccaaacctcggaagcacaagggggccaagagcgagaagccgcaccgggtttccggcgaaggggagaagcccacgcccacgaagaagaagaagaagaaggagagcagcaaggagcccaagcgcgagaagcagcaagcgtccgcgcctatgtcgactccctcgaagaagaacaaggaagccaaacgcgacacaggaggagcggggaagcccacgcccaccaagaggaagctcggcgacgtggatcccccacaggagcgaccgtccggtgaaggccaggcaagctctcccacgcccgccaagaagcggaaggacaaggcggcggcggcggaggcggttgccgaccacggcgccggcagcttcccgatggctcgggtgcggcagataatgcgggccgaggacgccaccatccgcccctccaatgaggctgtcttcctcatcaacaaggccaccgagatattcttgaagaggtttgcagacgatgcttatcgaaatgctttgaaggatcggaagaagtcaattgtgtatgataacctttattttgttccacagaaagttacagctgaagatgctttgaaggctccagttagcagccaagtgaaccaaccacaataa

SEQ ID NO: 9265 - DNA, 571 bp, Oryza sativa
  Clone ID: PAT_MRT4530_15698C.1
ccggaattgttgaggaggcgtgcttcgaccaaatcgacgagttaacaacatcgacctcttccgctgtcgccccccccccccccacaacctccgtcgttccgcgggcgctcgacaccgtggaggagcttctctggttggggagccccacgctagccgcctacgcgcgccaggagatccagttccggcaccttgtgcaggagcacgccgtcgccgccgccgttgcgaggatccgctccatcgaggccaggattaccgcccaccgcgacaccatcacggtgaaggggcaccgccttcgtgccgtccgcgccaacatggtgccaccggttcgggcccggctcgccgtcccgatgggcgccacaggaggaggtggatgctactcgagcggctgaaccgcgcagaggaggaggaggacgccatggaggagcctgaggaggagaagctggaggccatgccgcagctggccagcggcatggaagaccttagcctgttgctccgtgcattcatagccttgtactaataaaaaaaaatttggctagagcttgtgaaagaaaaaataattatttttggtttc

SEQ ID NO: 9266 - DNA, 524 bp, Oryza sativa
  Clone ID: PAT_MRT4530_15699C.1
ctatttttcagcaactgcaaatactattagttattatagttatgtcagttagtagtattagatacagggatcaattatcccttatttaattctccctaatgatccttttctgtgttttgtttactttctctctggatatatggtgtgccattcacaaagtgattgacttgctttatttcattgaggattctttccaaccttgtttaggctctggcttgtttgcccgttgattgagttggtccaagaatcaggatatatgatattcatgacttactggaaagctgttaagcaacagcactaacactggtactaagctaggcatgttcttttaccagatcagataattttcatctgtttactttctgttatgtgaaaatgatccgagatttattgctgtggagagcacacacgctggaaggaaaagatgagtatgggtgccatttttgggcttggagggtggtccttttctctgctgtacatttgttttctacaggatccctgctgacaatggtagtagcttcttg

SEQ ID NO: 9267 - DNA, 4420 bp, Oryza sativa
  Clone ID: PAT_MRT4530_1569C.1
tcatccaaagcaattgggcacaacaactacccgccgaaacatattctgtctcggcagtaagagggctacggagttttgtttcttggatgaccatgacacaagggatctaccaagcatttggcaactactggatgtgctctttctatccactttgcaaccggcataatccggatcggaatagccaacaagcttaaatttagcaccttttgggtaccacaagccaatagtagaggaatgctttaaatatcttagaatccttttcacggccactaagtgacactccttaggagcggcttgaaaccgtgcacacatgcaaacactaaacatgatatccggcctagatacggtaaggtaaagcaagctaccaatcatagaacgataaagctttaaatctaccggtttacctccctcatcaaggtcgagatgcccgttggttgccataggtgtcttaatgggcttcgcatcctccaagccaaacctcttgagtagatccttgatgtacttggtttggctcacgaacgtcccattcttgagttgcttgatttgaagtccaaggaagaagctcaactctccaatcatggacatttcaaattccctagacatcatatcaccaaattccttgcaaaatacctcattagtagaaccgaatatgatgtcatcaacataaatttgatacacaaagaaatcatcaccaatgatttttgtgaaaagagtgatgtcaacttttccaattttgaaatcctttgacaaaagaaaatctctcaatctttcataccaagccctaggagcttgtcttaaaccataaagagcttttgagagtttgtaaacatggttaggatatttagtatcatttagaaaagcacttttcacatccatttgaaatagttttatatcaaagcatgatgcaaatgcaagaaggatgcaaatagcctcaagtcttgccacgggggcaaaagtttcaccaaagtccaaaccttcaacttgtgtgaaaccttgtgccaccaatcttgccttgtttctcaccaccaacccgttctcatcttgtttgttcctaaagacccactttgtccctatgacattgtggtctctaggtctttcaaccaaagtccacaccttgtttcttgcaaagtttttgagctcttcatgcatagcattcatccaatccggatcacaaagagcttcatctacatgttttcgctcaagacaagaaacaaacgagtaatgttcacaaatcgaagtgacacgagatcgagtttgaacacccttactaatgtcacccaacacttggtcaattgggtgatccttggaaagagcggtgtgtatccttggtggcataggtggttcttgtgccttctcctcctccacttcaacttgagcttgacttggcatagcggaagtagatggctcatcttgagtggaggtggatggcttgtcttccacttcaataggcttgacatctccaattgacatgttcttcataactctcatcaagccttcatcacctacatcatccaaattctcgtgcccctcttgggagccattagtctcatcaaattgaacatcggcggtttcttccacaatacctttgttcttgttgtagacccggtatgccttgctttttgaggcataacctagaagaaacccttcatcacaccgactttcaaatttggttagtctaacaccctttcgatgaatataacatttacaaccaaaaactcgaaaataggcaatattaggcttcctcccaacaattacctcataggaagtctttttcaagacacgatgcaaataaagcctattggttgcatggcaagcggtgtttatggcttccgcccaaaaggaatcggaaacaccatattcatcaagcatagtccttgccatctcaatcaatgtacgatttttcctctccactacaccattttgttgaggtgagtaggtagcgaaaagttcatgtttaataccaagatcatcacaatagtcctcgatattggtattcttaaactcggaaccaatgttacttctaattttcacaagagtgcaactaaattcattttgggccctttttgcaaactttttgaaaaggtcggcgacaatagacttatcatgcaaaaagaacacccaagtatagcgagaataatcatcaacaatcacaagacaatgactattaccaccaatgctcttataggttgttgggtcaaacaaatccatatgcaagagctccaatggtttagatgtggacatgatactcttagtaggatgagaacatgcaacttgcttgccggcttgacaagcactacaaagcttatctttctcaaacttcacatctttcaagcccataactagatcacgttttgaaaatttgctcaattgattcatgccaacatgggctagccttctatgccaaagccaacccaaagaagtttttgcaactaaacaagttttcaaatttgcttcactagaattgaaatcaaccaaataaagatttccatatctaaaacctttgaacacacaagacttgtcaagaaggctagaaacaataacttcttgcgggaagaaagcacatgacaagctaagatcacaaatttgagcaaccgaaagcaaattgaaatttagagatttaacaagagagacattatcaattgacaaatcattggagatagcaattttacctaacccaattacctttcctttgctattgtctccaaatgtcactttctcttgttcattccttcctacctcaaatgtggtgaacatagccctatcaccggtcatgtgttgagtgcatccactatcaagcacccaatggctcccaccggtgtggtagttcaccaccgagtataggggaacccacatatctaggaacaatgctaccatcatgagccttccattgctcttgacaaaacgagtggcacggtgagaaggtttcttacccttctttggaatgaatccaagtccctccttgttaaggatgcaccgttgctcactcaaaatcttgtcaagagtgttcttacccttgaagcacctctccaacctcttgttgagcttagccacttgctccttaagctcattgttctcaacaacaagtgaggcatcacaaatagatacacaagagctagagctagagctagacatatccacaagatcatcacaagaggtagaaatgctagatgatgcaacataagcaatatggaaagtagcactatcatcaagcaaatcacaagatatgccaacatcaattagagctccatgttgagtagtggaaaggaggttgtcatgagcttccttaagcttctcatgagaaatggtgagtctctcatgagaagtctttagctcctcatacaagacctccaaagaagcatgatccttctttagggccttgaacttgacaatctccttctcactataagcatggagctcctcaaacatactcacaagctcatcataggaaacatcatcacaatcatcatcactctcactatcactaagagatgttaccttagaggagcccggatgaggcgagctctcctcatttgagtcccattcctcgatgaaggcctcaatcttcttgccttccttcttgagcttcttcatgagcttgtagcctccactcttcttcttggatgacttgtctccatcatcatccttggaagggcacttggaagcaaagtgtcccttctcaccacactcaaagcacctcaagttggagagagtcttgttgggtcttctatttcttctcctatttgagttggagccctttcctctctcctttctccttcccaagaaatcattgaacttcttggaaggtgaggcttcctccatttcctttttcttcaacttatacatgtcattggtgttgatcttccccaagaggcttgccggtgtcatccttgacatgtcggagttgatgagcatggtgacaagggtctcatacttctctggtagagccctaagcatcttttgggcaacctcaagatcggtgtagtttgccccaagccccttgagatcattcacaatgacattgagcctcccatacatgtcattcacactctcatgaggcaacatagagaatgtctcatattggatcttgaggaagtgaagcttggcatccttgtactcacttgtgccctcatggatctccgccaacttgttccaaatctcatatgcggtctcaaggttgctcactctatcaaactcctcttggctcaaagagttgaacaaagcattcatggcttgggcattgagttggaggttgcggtgatcaatctccatcaagggcgtgccggtgattgcaaagccggcaccgggcctcctccacaatcttctcggagaggtcaccgggcagggcacgccggtgagaccgccactatgtggccggtctgaccgcccctggtcaggccgaacccagtgaatgtgtttgtgt

SEQ ID NO: 9268 - DNA, 246 bp, Oryza sativa
  Clone ID: PAT_MRT4530_156C.1
atggcattctccgctgttcagcttccgcagtgcccgagacattgttcttttgatgttggcgaaacaaaggatggcgcgatctgcatcgtttacgcgcatcaattgaatgtcagcgttctgatgcacaccaagggtgatgatggtgctgctgagagatgggtgatggacagacaggtgtttgtgttagctgtccgcgacagctacgcgacatttgacaatgatgttcagccgtacatcatggcatga

SEQ ID NO: 9269 - DNA, 1170 bp, Oryza sativa
  Clone ID: PAT_MRT4530_15700C.1
atgggggccgtggcgtcaacggtggcggcgcgcttcgccttcttcccgccggccccgccgtcgtacggcgtggagcccccgccgtcgccgtcgccggcggccgcggcggaggacggggcggtggtggagctcagcggggtgccgcggcgggccggggtggaggcgcggcggctcccgacggggcggggcacggaggtggtggccatgtacgtgcgccagcccggggcgcgcctcacgctgctctactcccacggcaacgccgccgacctcggccagatgtacgagctcttcgtcgagctcagctcccacctcaacgtcaacctcatgggttacgattattccggttatgggcaatcatcagggaagccaagtgagcagaacacttattctgatatagaggctgcatataggtgtctagtagaaacttatggagccacagaggaaaacatcattctgtatggtcaatcagttggcagcggtcctactttagatttggcatcccgtttgcctcatctgagggctgttgttttacacagccctattttatctggcttaagagtgatgtatcctgtaaagcatacatactggtttgacatatacaagaatattgataaagttccattggtcaaatgtcctgttttagtaatccatggtacagctgatgaagttgtcgactgttctcatgggagggcactgtgggaactctctaaaataaagtatgagcctctgtgggtcaaaggtggaaatcattgtaatctggaactatatccagaatacatcaagcacctaaaaaagtttgtcatggccattgagaaattaccacctacaaaagatgaatcctcagggagctcaggtccttcagatccttgtgaaataggatcagaaagtatgcagagctcaagaaaaagcacggatgtaaaggataaatctaggtcaagcattgatcacaggcatagcgttgataggcgggaaaaaccaagaggaagcatagataggagagataaaagcagaaagagtatagatcatcctgataagccaagggctagtgtggatcaacctgatagaccacggagaagcatcgatcgttttggagggatgatgaggtcggtgacatccgtcaagttgtgcaatattgactgtttcaaagtaacctatgcttctgggagctga

SEQ ID NO: 9270 - DNA, 369 bp, Oryza sativa
  Clone ID: PAT_MRT4530_15701C.1
atgcgatctcatctcatcttatcacgcaatagcgttgcgccgccgccgtcccgcgcgcgcgcaacccacgcccactccgcgccgcgtgcgagtccgccgctgcatcgcactagcactgttgttgtgctgtgttgcaggctgcactctgtgccgccgccgcaaggtgccgtcgtcgagccgatcagccgatactggcttgtgttgttgcggagcggcgtggaattcgtgggccgttgctttggtgggctgtgggagccagggacagctgcggcgagagctaccgaagggacctcgccggacgaaggcagcgacgagaggtcaggcactggcaggctgcgcgcgcagccgcaggtgcccaagcaacgggac

SEQ ID NO: 9271 - DNA, 440 bp, Oryza sativa
  Clone ID: PAT_MRT4530_15702C.1
ctgcaattatgaaagataattggatttgtatgcatattaccttaaggaccacatgtcacagacgactgttaccggaccttatatttacccaatcgcctgcaatatatggataaattaattcaggtatactttatcggcattgccagacttaagaggattccgccacattataaacgtttcggtagctcttgggttggaggggagtgaatgcaccgaactcatcttctctgttatgcttgagcctcagagcccattctgttgagatgctagatgcatgtgctttggacatgacatggttaatcacctgatagggaaattgtttctccaccagcctgagctagtgcaagacttggttgtctctcactaaaaacacacctgattgcaaaaaggggcttgccgcaatgctatacttgttccttacaaactcattatataggcta

SEQ ID NO: 9272 - DNA, 297 bp, Oryza sativa
  Clone ID: PAT_MRT4530_15703C.1
gcacgaggctcatttgatgttatttttttctgccttttctttttgtttatttgtttgctcctttctgcgatcgtatagacgctgttgctgaggaggttgttgttgcaggtgaaggttccgtctaacgatctcgtgggtaaaggcaagtgtacccttgaacatgttgatcctaacttgaaaaattatcgttgatatgtgtggtcgattgagctgtgtgctccctttttgctgtgtgcttgaggtccttagtttaggcaagtcgccctggtcagttaaggacttcacttcgtgcgccat

SEQ ID NO: 9273 - DNA, 204 bp, Oryza sativa
  Clone ID: PAT_MRT4530_15704C.1
atgccttgggaatgtggagatgctaagcatctaaatggcatcttcactctcctcttgccatgtgttcagctgatgacgaatattcaggtattgacggcgttaaattggtacttaaccgccgtcaacatccatcaggttttggcagcctcagttgaaggtactcatgacatgcctccaacaccaatttcacggacaatcacttaa

SEQ ID NO: 9274 - DNA, 1359 bp, Oryza sativa
  Clone ID: PAT_MRT4530_15705C.1
atgacgacttctccacgtgatgcatatgaggtacatgactataattttgcacaagttgcatcaaagttaccattctatgatgggaagtatgattttgttgcatatattgattaggagctagcagtagacaatgaatttgatatatatgatttttctgatgctcaaatgattaaggctgctagtaataagtttacctcttctgcattattttggtggagttatgtttgtaacaaacctgaaactttggatgaattcaaaaccataatgagaaaatgctttgtgagttcttattacaaatgtactcttcgggagaaattagaacatctgaaataaggcgatagaactgttaaggactacattcatgaatttaaggtctttcagaacattcaacaaaaggaggagaatggtgtacttgataagaaagaggatgaagcacctgcggtttcggaagaaagtttgcaaggtaaattaaattgtgctgagataaatgaatgtgagtattctcaagtagagcaaccattggtggaaccaattgttgagatgcctttgtcacaagttgatttacttgttgttccttgtgataaagaagagttgtgtgataatgcttcacttatatccatgccacaactagtgaatgaacatgctatttctagtgtttctttgtgtgctgattttaagcatgttgttcacattgcaaatgaagtagaggaacatgaatttctatcttatttaaatactttgggctatgtttggtttgatgatttttgtgagctcgaaaatttgaaggagaaattatttgctaaatttgatttgccatgtccaactaatgctatttctcatatctttggcgaatataatgatagaggaatatatttggtgcatagagtttacatatgttcggatttagaaccttctgtacatgtggataaaacatgcaagctagagagaaatgttattgctaacaaaattatctcgagtttgtcttgttttgattggaagaaacaggttgttttaaatagactacgtgaggagcaccatatggaaaaaccgatgacgtttttccatgaagaaggggaggatgatgtgaccatggctactatggatacaaccattgctcacatcatggatctacaagaagacatcaagatcaagttctctaaaagctggaattcgattcggccacctgctacattgctgacttcaaatggccgccaaatatgcatacgagctccgttttgggtccacgagtacttgatagaaagctctcggagttgtctttacaacggatccaacccattgcgaaattccatcttagtgagccgcaattgaagaaacaaggtgttgcatcacctgtaatag

SEQ ID NO: 9275 - DNA, 357 bp, Oryza sativa
  Clone ID: PAT_MRT4530_15706C.1
atggcaactacagataaaaccattgctcacatcatggaagaacaagatgatatcaagatcaagtcctccaagtgctggaatcagattcggccaactgctacgctgctgacttcaaacagccgccgaatcttcatacgacctccgttttcagcccatgagtacttaatggaaagcactcggagtcctctttccattggattcggcctcatcaccaaattccatccaagtcatccacaaatgaagaaacaaggtgctgcgtcacctgtcatgggcctatgggcttgtaactttgtttgggaccccggcccaagtggggcccatgtggggaatatggttgatttgcaccggccagattaa

SEQ ID NO: 9276 - DNA, 1585 bp, Oryza sativa
  Clone ID: PAT_MRT4530_15707C.1
atggcaactacagataaaaccattgctcacatcatggaagaacaagatgatatcaagatcaagtcctccaagtgctggaatcagattcggccaactgctacgctgctgacttcaaacagccgccgaatcttcatacgacctccgttttcagcccatgagtacttaatggaaagcactcggagtcctctttccattggattcggcctcatcaccaaattccatccaagtcatccacaaatgaagaaacaaggaatatggttgatttgcaccggcaagattaacaacccacagagaggtgtatcgatcgctagggcgcaacacaataacgtcatccgctgtgtcttggttgtcatcgggacctacgaaattggaatcgtctttccgccagagttccatatttgtagttttcagaagtttctgtcggttagttttgaagttgcgtctaggggagttcagaacattcaacaaaaggaggagaatggtgtacttgataagaaagaggatgaagcacctgcggtttcggaagaaagtttgcaaggtaaattaaattgtgctgagataaatgaatgtgagtattctcaagctgagctacacgtgtccacttttcatgctatagtagagcaaccattggtggaaccaattgttgagatgcctttgtcacaagttgatttacttgttgttccttgtgataaagaagagttgtgtgataatgcttcacttatatccatgccacaactagtgaatgaacatgctatttctagtgtttctttgtgtgctgattttaagcatgttgttcacattgcaaatgaagtagaggaacatgaatttctatcttatttaaatactttgggctatgtttggtttgatgatttttgtgagctcgaaaatttgaaggagaaattatttgctaaatttgatttgccatgtccaactaatgctatttctcatatctttggcgaatataatgatagaggaatatatttggtgcatagagtttacatatgttcggatttagaaccttctgtacatgtggataaaacatgcaagctagagagaaatgttattgctaacaaaattatctcgagtttgtcttgttttgattggaagaaacaggttgttttaaatagactacgcgaggagcaccatatggaaaaaccgatgacgattttccatgaagaaggggaggatgatgtgaccatggctactacagatacaaccattgctcacatcatgaaagaacaagatgatatcaaagatcaagtcctccaagtgctggaatcagattcggcgacctgctacactactgacttcaaatggccgtcgaatctgcatacgacctccgttttcggcccatgagtacttgatggaaaactctcggagtcctctgtccaatggatctgacctcatcgccaaattccatccaagccatccgcagatgaagaaacaaggtgttgcgtcacctatcatgggcctttgggcttgtaacttcgtttgggaccccggaccaagtggggcccatgtggggaataaggttgatctgcaccggcaagatcaacaacccacggagaggtgtatcgatcgctga

SEQ ID NO: 9277 - DNA, 321 bp, Oryza sativa
  Clone ID: PAT_MRT4530_15708C.1
atggcggtcggtgagcctgccggcaacggcttcgacggcggcagcggcggtggcggtggcggtggcggtggcggtggaggctacggtggtgacttcgacgatggtcgacgagcccagcaagcggcttcaacgacggcagtggcagcggcgagcgacggcggtgacttcgacgatggtcaacgagcccggcggcggcggcggcaacagaggcaacagggaaaaacgacggtaacttcgatgacggttgatgagcccgacggcagcggcttcgatggcggcggtggcgacagaggtggttgcggccagggcagtggggattag

SEQ ID NO: 9278 - DNA, 626 bp, Oryza sativa
  Clone ID: PAT_MRT4530_15709C.1
ccaataaagcatgtgccacctgatttccatcagtgaccatggctactacagatacaaccattgctcacatcatggaagaacaagatgatatcaagatcaagtcctccaagtgctggaatcaaattcggccacctgctacactgctgaattcaaacggcccccgaatctgcgtacgacctccgttttcggcccgtgagtacttgatggaaagctctcggagtactctttccaacggatctggcctcatcgccaaattccatccaagccattcgcagattaagaaacgaggtgttgcgtcacctgtcatgggcctttgggtttgtaacttcgtttggaaccccggcccaagtggggcccatgtggggtgtgccccaatgtggtggagcacgaccttaggaccctcttggtcgttctcccacccctataagtagctaggaatagggttgatttgcactggcaagatcaataacccacggagaggtgtatcgatcgcaaaggcgcaacacaacaacgtctttcatcaactcaccaaaagatcgggccaacaacagccttgagtgtcgagtggaactaagggttcatcacgatggtacaacagctccagctgcagctgtttcaacaggaag

SEQ ID NO: 9279 - DNA, 2136 bp, Oryza sativa
  Clone ID: PAT_MRT4530_1570C.1
ccgccggggcggggcgtcgccgggcagtggagcgcggcccgcgcgcccccggtgcgctcgccggcgcacctccccccccccccccgccgcctcggtccccgccgccccgggccccgccccgtcctgccgccgcgcccgctctcgcccgccccgtccgcccgcgcggcgcgggccgtcggtcccccgccgccaccccccccccccccgccgcgcgctcccgccccgcagcgcgtcgcgcccgccccgcacctctccccctccgccgccggctcccgcgggattccgaccgcgggctcctggaaggatcacagggagaaaggcgacgagacggacgggttctacggcggcatcaggaagctccagacgagcgacgagatctcgacttggcgaaagttctggccggtcgatgtcctcaactgaatgcttcagctgctccttatatccaccctcccggccttcacgctgatgctcgtcgcgcccgccggttgccgttgtatagcccgtacgtcgagcggcagcgctgcgtgaccctgtctgaaaggctccgctcaccggctgctctgttcttactgaatttttttgtgggggggcgaaggcggcggaagcagcaacaaggagagggagcgggagcggggggtgaggataatgccgtccaaggcgaagccggagcccgcattggcggcgagggaggagggggaggaggggccggaggcggagctgaacgccgccgcgctcccgctgctcgacctgccggagcttgcgctggagcgcgtcctcgaggagctggagccgccgtcgctcgcggcgatggcgtgcgtgtgcgtcgcgctcagggaccgctgctctgcggacaccctgtgggggcgccacgtcaaccggaagtgggggcgcgtgctcggcgccgccgcgcgcaaggagtgggaggcggagctggccgcacggcggagctccggcgcgctgccgcggccggccaggcggaggagcttggcggactcgctggcctgcgcgtggcccttctcttggatcacctgtcgctggctcaagggcaacgccgtcgccgccgagcccgccgccgccacgccgtcgccactcccctcgccggcgaccgacacggtggccgcctggtaccgcgcggtggagtgcggcgagttctcgttccccgcacaggtgtacaaccgcgaggacgggcatgtcgggttcgtgctgtcgtgctacgacgcccacctccgctatgacaggcgtactgacacattcactgcaaggtacccgccacacgggcggaagccggcgaaggaggagagcggcgtgcagtggagcagggtccgctcgccgccggtgagcacgccggcgcacgacctccacgcctccggctgcctcggtgatcttcgccccggtgaccacttcgagattcagtggaggaagaacaaggatttcccttacggctggtggtatggtgtcgtgggtcaccaggagacatgcaacgccaacgagcatctgtgtcgctgccatgaggacgatatggttgtcctggagttcaagcactacgcggccggctcgcggtggaggcagacgacgtccatatgtcgtgtaagatcatgtttccttctgaatgttatcctgttcaatcttagccggtgtttgtaccgtgttagtcaaggacctcacctggtgtggcgtggcgtggcggagtcggccgggtgcgtggaaagcgtgcctctttttgctggaatttttctgcatgggtctgagggtcatgtgcctaatttctggcaagcgagaatttatgctgacgagtctgctcatctaacctggattggtgcattggtgctggacagagtcgtgcctaactctcctgtgaccacagcatctggaacggagacgcaactccgcgactgttggaacggagaactactacatggtggtaaatttttgaggggacggcgtgtggaaactgatatggcaccggccacacctggaggcagcagccaactggttgaaaacaggcggtgccaactgccaagttcccaaataactgtgagattctctagtttctacggcactacctgcccagtctcctgtagacgccgtgaggcggtgccaactgccatgtgcccaaataactgtgagcctctctag

SEQ ID NO: 9280 - DNA, 339 bp, Oryza sativa
  Clone ID: PAT_MRT4530_15710C.1
atgcgggcggcgggtggagcacggcggcagagcagcggtgggcgagcacgacagcgaagcggcgatgggcggcaggcggagcggacggcgagcgaggaggctggcacgatgacgtcgggcgtcaccgaaatgcgcgcgactatggcgtcagcaagctcgtcggctggtgcggccttcccgcggcagaccgggcacgaggtgtgggacgagagccacatgttgatgcactcctggtggaacacgtgcccgcaagccgagatctgcctcaccttctccccctcgtcgacggcgcgaaggcagaccacacacttgaacgacgccgccgtgtctgagatctag

SEQ ID NO: 9281 - DNA, 365 bp, Oryza sativa
  Clone ID: PAT_MRT4530_15711C.1
ctccactcgacaagaaagctgtgcatccactgaaacgaagcatccttgggctcacctgtaacctgttgtgctatctgactgcgatgttgttttttgcttggaacatgtggccctgtttttccgtgctgtcattctgtgacattagctaggctgctgttgattagtttttaggcaacctctaatcctatattgttatgaattgtatgactaggtcaggctatatgaccagttacttcatttcaggctgctatgttttcatagggaagtctgcttctgcatgtgctagtcgttgatctcaaaattcaggtcttacaaaagtttgaccagatgataatacccggggttttttttaaacctttgacaaa

SEQ ID NO: 9282 - DNA, 209 bp, Oryza sativa
  unsure (1)..(209): unsure at all n locations
  Clone ID: PAT_MRT4530_15712C.1
taccactttncgcgagannncagcnnacttgttgggngaanttgggtcctgggnccccccntcgaaggtcgacccacngcgtcctcccacgngtccgnccacgcgtccgaggcgacgtcgnccgtntntccgcgtcggctncggagccgacccactcccctnctccgccgccatccatctattcgngccgcaccgcccgctcaactctt

SEQ ID NO: 9283 - DNA, 778 bp, Oryza sativa
  unsure (1)..(778): unsure at all n locations
  Clone ID: PAT_MRT4530_15713C.1
cactacaacacacatggcatccatcacaatacgccccatagttttcttcacagtttgcttgcttcctccttgcctcgcgcatcgccgctcccctcagcccccagcacgctcattcacgcgccacccacgcccacctcaccctccacactgggggccaagaacgctctccctccgcctcccgccncgcgcacacgctcccccgccacccacgcgcactcgctcacccactctctcgcactcacgcgctttcgccaaacgcccattctctcgaacgcccccacactctcccgcgccacgcctcgctcgccacgcggctccnntcccaaaaagggcccctcgggggccccaccccacaaaccccttcgggaacgcatcntcccccctctcccccgcaaacttcgcttccncctcccctcaacaactcgcnaagattcnccggtntcnccccacactccgctcaccccccgcgcacgctcactncctcgcctcgcttccccccccccccaccttcctcactcctcgcaacaccccccctccaccgccaacgccggccgcccctcaaaccacctccaaaccaccttcaaacaccacccccccccccaaacttctttccaaaacccaaccccccccttaaaaaaaattttgggcgggtttgggcccgaacttctctccccctcaacgactcaaacttaatttatcttctcacttcctcccaccacgcggcgcgcaaacgcaacgccgccctcaaactctatcaacccccaccggggggggggcg

SEQ ID NO: 9284 - DNA, 438 bp, Oryza sativa
  Clone ID: PAT_MRT4530_15714C.1
atgccctcagccctcagccgtcacccgtcgcgccaggccgccagttgccgcaccagcagcccgctctgctgctgctcccgtcgtgccgccgcggcgccacctgctgtgcctaacgcccgtcggccgtcgcggcgtcgcggtggcgccagtggctgggcatgccatgtcatcgaggaatttttggatgaaattgatattggtacccttatcaatgacttcgttagaagaaattttttaggccgccggatggggaggaggtcagcggggcgaggcggcagaggaggaggtctggcggtggcgacgggggagaaggggactccccacgccagctacaactccagccagcggaagaaccgcgagttgcgccgcttcatggccctccccatgccaacgccgccacagcaagccaccaccgccagacgccccgagctcctgtga

SEQ ID NO: 9285 - DNA, 346 bp, Oryza sativa
  unsure (1)..(346): unsure at all n locations
  Clone ID: PAT_MRT4530_15715C.1
cctccctccccttgctgcagcgtgtggcagcgcccgatcggcaaggcgcacacgacagcgcaccctctccctcctccctccccttgctgtagcgagcggcgncacccggccggcaaggcgcgcacggcggcacgcctctctggcgngcgganggtcgtgggcggcaggtgagacgcggaggcggaggccaggctgggtggcgantggcggacgagcacggctgggtgaccacccgtgctactcgacctgcactggcccctgtgcgtcancgtgcgcgccgaacgccggtgcngcttgacctacgccagaagagggggataggagaaataggangctcgtagccacc

SEQ ID NO: 9286 - DNA, 1032 bp, Oryza sativa
  Clone ID: PAT_MRT4530_15716C.1
atgccacaggagagccgcggcagctccggcaaggcgccggtgacggtgacggtgacggctgcgggggcgagcagcagcggcgagtgctcgacgccgcccttcaggctaaacgtccacgctcccgagttcgtgccgaggtcgccggccgccagcccgatggccgcggccgccgccggctactactcgccgttcttgcagctgccgggcagcagcattgggctcggcgcggactggagcatcttcgccgacccagatccgaccttcttcctgccggactttggacacgccaagatcggcggcggcaatgggcagcccaagggggcaagtccggccgacattgcacagaagatcatcaagcaggtcgagtaccaattcagtgacacgaatttggtcgcaaacgatttcttgatgaagatcatgaacaaggatcctgagtgctatgttcctatgtctgtcatttcatcctggaagaaaatcaaggctatgggggtgaccaaccaactgctagtgaatgctctaagaacatcctcaaagctcgttgtgagtgacgacggtaagaaggtgcgacgagcacagccattcaccgagcgacacaaagaagaattgcagtctcgaatggtcatcgcggagaatttgcctgaggattcaaccaggaacagcctcgagaagatcttcggcatcataggaagcgtgaagaacatcaggatatgccacccgcaagagcctagctccgcgagatcttccaagtctgacgcgctaatcagtaacaagttgcacgcgcttatagagtatgagacctcgcagcaagctgatcgggcagttgataagctcaacgacgagcgcaactggagaaaggggctccgcgttcgcccggtgctacgtcgatcgcccaaatcagcgatgcgattgaagcggccggacttcgaccacctcatgatctccgacgacgatcactcgccgcaatcccaggcgtcgtcggattcgccaatggcggaccacttgcctgaccatcacgtccggaataaattttga

SEQ ID NO: 9287 - DNA, 2322 bp, Oryza sativa
  Clone ID: PAT_MRT4530_15717C.1
atggccaccggcgggctcgaccccgccgcccgcgaggccgagctcgcccacctcccgggccccaagctcgtcgaccacctctgcaccacccaccgccgggccgactacgaggcagtcgcgcgggtgctcgacgcccgggaccgcaggctcgaggccgcgctcgccgagaacgaggacctgcggaggaagtgcgacgcgctgctggtcggtcagcgccggccgcgggaggaggaggaggaggaggcggccggggagaagccgccccccggaatcatcgccgccccggaaccggcacggcgggacgaggaggaagtcgaggggtcgtcagaggaaggggaggttagaggcgtcgactttattgacctctcctcctcctcctccgacgacgaggaggagaaggaggtggaggcgggccgcggcgctggttcgagggttccgatcatcaaggaggcgcccgatgacgcggagggggacgaggacgacaccttgccgctgagccagctctggaagaggcgtcggctaggtgagcccggggctgtgaaatcggagaaaggagatgggcacaatccggtcgattctggggggaatgatccaccgaaatgtacttctgcgaggacggatgttccggaagcatcaaccggggagatggtgagtaggcctggggattcgatggtagcagctttcgtgcagggtaagggaacagtgcaaccggagaatgtgggtggggaaatgcccagggtaatgctgcattccccggcacaagttatccggagcaccttgcagaaaagaaaatttggcaagaaagatggttcatctgctattccaggggacactacttcttcccaagcaagaagtacaagccttgcacccaagagagaaggttcagctgctgttccagggtacactacgtcttcccaagcaagaaatacaggcctttcacccaagaaatgcagggattcaacgagcccagatgatgaaatgtgcaatgcacttgctgattctgtacaggttggagctggtagcacgatgccgaggggtcccggtgagcaagacaaaggaattggtgcagtgcaaagggcaacggtgctgcatgggactagtggaattggggagcaaggcggtaagcttgattctactccgactaaagttagggaatcgaacaggagagagggaggactgcagaacaaatcaatcgattcgaagtcaaatgatgcgctgaaacaccaggataaaaaagatggtagaatggtacagaaaggggatctctcagtgcagtcatgtgtgcctgctaggccaatagttgctagtgttccttcggtaactaaaaattctgaaaagggaaacagtgaaaagggagttagtcaaccaccaaagggaaatgaccaaatgaacaagatgtcaatggtggaatcatcatccaaatgtgggtatgagaaagtcggggctgatgtgcagaagtgctcacctctaccaagacaaagtgaagaaggaagtgtagcaaggggagtagtttcatttgaagagactggaatagcaacagttcatcctctgagcattcgcaatctgtcaggaccagaacttcgaaacttaaacaaaggaggtggtgaattgtcaaagaaattggtggttgaagggtcaccaaaatatggagaaaagaataatgatgctcgttcagagaaaaactcatctccattaggacagagtgaagatgtcaagatcattcgtgaaggggcttcaaatgaagagccaagggtgggaagattgtctccttcgatcctaagcaactactcaacaggtgaacaaattcattcagtgagtaagaatgctgaattatgcagtccgacagccaaaaaagctttgtttgaacctggatcttcatgtacgcctttaaagcacacggtttgtccaccttccagtggtaaaagcatctctatccaggcaaaaggggaaataaatttgttaccttcagctatgtcaaggcactgggaaaccgctgcacacatgattgcctcacttaggggaaacatggagctctctatgcaagctctctgtgctctttaccgccaaaggaagttagtaatcatgtcaactgaaggacaacaaactgggactactggactcaccaaaattgatgccgtcagggcaattaggttgttagaatttcttttggacggtaagcttaaagggcctctgaaaagaactgccaaggaactactaagccatgatgctacagggcccactttcctggagaaagtagcactaagtttctccaaagaactgttcgatatttacaagaacaagaaggatccgtacttctgttga

SEQ ID NO: 9288 - DNA, 723 bp, Oryza sativa
  Clone ID: PAT_MRT4530_15718C.1
atggcggcggcgaggctcctatccccggcggcacggctgtctctacgcgaaggggcggcgcggaccgtcgggaaggctgcgcagcggcgagacgttgtggcggcggatccggcgccgccaccgatggatctggcactcccgcggctggatccggcgtcgccaccgccggatcagggccatggccacacgggcgcggcgttggtgcgatgccgacgccggcgaaggtggcgaggcgcggcgtcggcagcaaaggcgcgggcgacggtgatagtggtggaggcgcgcggctggatggcggcgaggtggctggccgtgactgcggtcagcagcggctgcggtgatggtgaccgtgattgtgattggaggaggcatggcggtctcagacggctagccgagggcgtggcagacggccgcacctggctgcacggcagcgattggaggggtcggaggccggcttggcgcagagaggcacagccgatggcagtagtggccggcaaggcgcgagaggcgtggtataatatatctgatgttgattatatttattttcttttgctttatcccttctgtgtgctgtattcctccacaggggcagacggctaccattactttattccaattggggtaggccagatcaaacagaacgttacgaggccaacagatcgcctaaacaggctaccaaaaggaaggacagaaagagaagcacagcacaaagggacattataa

SEQ ID NO: 9289 - DNA, 672 bp, Oryza sativa
  Clone ID: PAT_MRT4530_15719C.1
atgaacctgaggcggctatgggaggtgtggggggagtgggagatccgcgtgctcgtcctgtccagcctgtccctggaggtcttactcctcttaaccggcggcctgcgcaagcgcaaagccgcttggtggctgcgcatgccgctctggctcacctacctcctcgccgactacatcgccatctacgcgctgggcaacctttccaagaagcagaagctctgcgacggctcattcgatggcgagatgcacctcctcgtcttctgggcccctttcctcatccttcatctcggggggcaggacaccatcaccgccttcgccgtggaggacaacgagctctggctgcgtcacttcctgagcctgctgtcgcaagtcgcgttagccggctccatggtcacgcagccggatccgggcccgaactacgccaaattcgtggaggagtgccagtcgaggacggagtccggactggtcgccaagatcgtcatcgtgcaggagcggcctccagatgacgaggaccatgtcgaagtcaagcgagaggagtacggcgacctggtgtacagtgcgcacaggttctttcacaccttccgccgcctcttcgtcgacctcatcctcagcttccaggaccgcatcgacagcctcgccttcttccggaggttggagatggagcaggcgtacaag

SEQ ID NO: 9290 - DNA, 381 bp, Oryza sativa
  Clone ID: PAT_MRT4530_1571C.1
atggccgtgggcggcggaggaccggcagtgggcggtggactccggggcaaagcaagcgtgggattaggaggcggcggccggtggtggtggatccggcggtggggagccgccggagacggggaagacggcggggcgggggcacctcgtcgtcgccgccatgagaagaaagtgaggggggaaggggaagggggagggggagggggctcgccggtgccgttgaccttttccggccagctggcgaggctggcggcggcgcggtggggcggtggcggtggtggcggtggtggatcgcgcgtgggatgggaggaagagggtggcggcgcgatctggaaccgggggaggaggagacgagttaagttaaaaggtctgcacgaatcttga

SEQ ID NO: 9291 - DNA, 2529 bp, Oryza sativa
  Clone ID: PAT_MRT4530_15720C.1
atggggttgtcaacactagccctcacccaggcgccagcctcgcttcgaggtttcggcggcgaagcagttcaagtcttgggccaagtacaactggtggtagccttcggcacaggtgaaaacaggcgcgaagagcaaatactgttcgatgtcgttgacatcccatacaactacaatgccatcttcggccgtgcaaccttgaacaagtttgaagccatctcccatcacaactatctcaagctcaagatgctgggcccaacaggtgtgatcgtcgccaaggggctacaaccctcgaccacatcgaagggcgacatggccgcaatcagcatggcagtacacaatgtagaggccgaaccacatgaccacgctaaacgcatgctgaagcctgtacctcatggcaaggtgattaagatgcaagtcgacgatgccgatcccgcaaagctcgtcctgttggggggcgatctaggcgaagaggaagttgaaaacatcctggaggtgttcaagaagaacattgacatcttcgcctggaaccccgacgatttgggagccgaatgccaagccaaggaaacagaagctgtgaaagatgtccgccgatcgatccacatgaatccggccgacatccccaagacagctttcatcacaccgttcagcactttctgccacctcaggatgcctttcggcctaaggaatgctggagcaacattcgccaggctggtgtacaaggtggcggtcaatgcggctcttgtccaagagacagagtcaggtcagaaactagtatacttcgtctctgaagctttgcaaggggcgaagacaagatacatcgaaatggaaaagctcgtttacgccctagtgatggcttcacgcaagcttaagcatgactttcaggctcacaaagtcactgtgccatcgcagtatcctttgggcgaagtgctgcggggcaaggaaatcacgggccgactcagcaagtgggcggcggagttatcacccttcgacctgcgttttgtcgcccgtactgccatcaagtcccaaggggtgggtgtcgcggtagtactcacttcgccagggggcgtgcccattcggtatgctgcaagactgcagttcgatacgaccaacaacacggccgaatacgaagctgtactattgggcctaagaaaggtgaaagcactgggggttcggcgtttgcttatccgaacagacaccaaactggtggctagtcatgttgacaaatcctttgaggtgaaagaagaaggaatgaagagatatctggaggccgttcggtctttggaaaagtgctttgctggcgtaacggtcgaacacttacctagaggccagaatgaggaagcagataccctggcgaaatctgccgcctgtggaggcccgcattcgccaggcatcttttttgaagtcttgtacgcaccaagtgtgcccacagaaagactggacgtcatggcaattgaccaggcagaactgggtaaagacccagaggactggcgaacaccgttcgtcaagtacctcaagaatggctggctcccggaagacgaagcagaagcgaagcgcttacagctcagagccgtaaaatacaagctagtctccggccagctgtatcgttccggggtgctccaacccttacttcgctgcatttctttcaccgaaggaaaggaaatgacgaaagagatacaccaggggctgtgcggtgcacatcaggccacaaggacggttgcttccaaagtgtttcgccagggggtgtattggccaactgtgctaaaagtttgtgtcgagcaagccaagaggtgtgaaagctgtcagcggcacggccgaagccaaactgcacctcagcacgaactgcagcctatcgcaccaatctggcctttcgccagatgggggctaggcatcattggcccattccctgtggcgcgaaatagagtgccaaaggagttcatcactaacaatggcaagcaatttgactctgacaagttcagagaaacgtgcgaagggctaaacttgaaaatcagccgaacgaacaaatggctcaagaaaaggcttgagggggcagcgaagggcaaatggccagacgaaatgttatctgttctttgggcccttcgaacgacccccacaaggccaaccaagttcagcctgttcatgctcctctacggcgatgaagcaatgaccccaactgagctaggggctaattcaccaagggtgatgttctcgggaggcgaagacgggcgcgatgtgtcactcgaactccttgaaggggtaagagtcgaagcactggaacacatgcacaaatacgccacaagcacttcagcaacttataacaaaaagattcgaccgacagagctgttgcctggccatctcgtcctaaggaagaaggtgaacccaatggaggtcgggaagcttgaatcgaagtgggaagggccatacctcatcaagcacaggtccagaacaggctcctttcgcctagcgacactgaaaggcgaagagttcgaccattcctggaacactgcttcccttaggcgtttctatgtctag

SEQ ID NO: 9292 - DNA, 2265 bp, Oryza sativa
  Clone ID: PAT_MRT4530_15721C.1
atgaacctgaggcggctatgggaggtgtggggggagtgggagatccgcgtgctcgtcctgtccagcctgtccctgcaggtcttcctcctcttcaccggcggcctgcgcaagcgcaaagccgcttggtggctgcgcatgccgctctggctcgcctacctcctcgccgactacatcgccatctacgcgctgggcaacctttccaagaagcagaagctctgcgacggctcattcgatggcgagatgcacctcctcgtcttctgggcccctttcctcatccttcatctcggggggcaggacaccatcaccgccttcgccgtggaggacaacgagctctggctgcgtcacttcctgagcctgctgtcgcaggtcgcgttagccgggtacgtctactggaagtcgcggcccagcatgcggctcatgtccccggcgataatcatgttcgtcgccggcgtcaccaagtacggcgagcggacgctggcgctcagggcggcgagcatggactgccttcgcagctccatggtcacgcagccggatccgggcccgaactacgccaaattcgtggaggagtgccagtcgaggacggagtccggactggtcgccaagatcgtcatcgtgcaggagcggcctccagatgacgaggaccatgtcgaagtcaagcgagaggagtacggcgacctggtgtacagtgcgcacaggttctttcacaccttccgccgcctcttcgtcgacctcatcctcagcttccaggaccgcatcgacagcctcgccttcttccggaggttggagatggagcaggcgtacaaggtggtggagatcgagctggtgctcatgtacgagtgcctccactccaaggcactcgtgattcatggtcttctcggccgcagcctacgcttgttcagcctcgccgcgccggtcgtgtcgctcgtgctcttcacccgcgcgttgggcgacatgcgagaaggctacaaccaggttgacatcaacatctccttcgtcctcctgggaggagccatcttcttggagacatacgcgatcctactgatcttcatctcctcctggacctacaccgacatgcgcggcagagaagcgctccggcccgtggcggcggcggtgttttggctgatcgccctattccagccggagaagaggcctaggtggtcgaacaagatatctcagtacaacctgatcagctattgtgtcaaggacaagtcccgtcggtacaagaaacccatggagtggctggagtggaggtggaacttccgcgtgaagacgatgtgggacagctggaggtacaagacgagcatcggcgtgtcggagctgctgaagagccacatcttcgaacagctcaagagcaaagcaagcagcatcagcaaggaccccaagagctaccggaaggctggcgagcaccgtggccagtgggcgctccagcgcaagggcctctaccagaagctgggctggagcgtcgactgcgagtttgacgagagcatcctcctctggcacatcgccacagacctctgcttctacgccaatcatccggcggacaaagatgatgacggatgctgcagctgctcctcgtcgtccaagtgtctccgttgcctctgcagctccagctcgggctatcctgatgccgaggctcgagggcgtgactcgaataagctggcgacgatgagcagggagatatcaaactacatgctgttcctgcttgtcatgcgcccgttcatgatgacggccagcatcgggcagatccgcttcggcgacacctgctcggaggccaagaacttcttccggcgagacgacgaggagatcggggacgaggagcggtgtgccaagaggctcacgaaggtggacacgtcgattgcagagccgcgggacgtgaagggggacaggagcaagtcggtgctcttccaggcgtgcaaactcgtgagacagctcaacgagctggagggcatcacggaggagaggaggtggaggctcattgctggcgtgtgggtggagatgctatgctacgcggccggcaagtgcagcggcaatgcccacgcgaggcagctcagccagggaggcgagatgctcaccgtggtgtggctgctcatggcgcatttcggaatgggagaccagtatagggtggagtctggccacgccagggccaagcttattgttcatcataatcatagtaccatgtaggcctgtttggtccattttctctgttcagccatccaccatggccagcagccgcaggatatgctttgagattcgaacgtacacgta

SEQ ID NO: 9293 - DNA, 1425 bp, Oryza sativa
  Clone ID: PAT_MRT4530_15722C.1
atggacatgctcatctctgcagttgcaagtgatcttgtgagccggttcatctcctacctggtccataaatctgagaagcagcacacgacaacagagcaggacctggagaggctgaagagtgttctcctaaggatctacaccatagttgaggaggcggaggcacgacaaatcaggaacagaggaatgatccttcaactcaagggtctcatggaaggtatgtttcttgggtattatgttcttgactccttccagttccagtgtgttgaagaggagggtgtagatgaagatcaccaggtcagttgcaagcgccttcggttcagtacctgcacaaggagcacttcattgttatcactcggtacagagaacacacctgtgcttaagaatgttattgaaagtttggagaccaaaatttgtgatgtgagggagcttgttgtgctgctagccagttgccctcgtcttcctcagcaaccctattgcacatatctgttcatggaaaagagtttgtttggtcgccatgtcgagaaagagcaagtaatcgactttatactacatgatgatcagaacctggctgtccttcctatcattgggcctcacagaattgggaagagaacccttgtccatcatgcttgtcaagatgaacgggttcgtggtcgcttcctgaatattgttttcttccatggtgatgatcttggaaacatttcattaatgccttcaacgaaatacttgtgcatagttgagttcagttgggatgttgatgcggaagcatggaagatctttcgatcatctatgaagaaggcagctataagtggcagtaaagtcattatcataggaagaacagatgagattgccaagtggggaacaacaccagcaatcaggttgaacagattgtcaccagaaatgtactggtactacttcaaggcactttcttttggaagcatgaaccctgacgaccatccaaagctggcttctctaggaatgcaactggcaacagaactacagggatcatttcttggtgcaaacatacttggccacatactaaggggtaatccaagtgctgaaatctggagtgggttcttgatgagcttgaggatgtcacgaaagcgcttatccatcttcgaggagcatcctcctgagaagaaccacccttctcatacagctgaagtagcgttcatgaattatcgaggttgtatgttgtatgatcttagggaggctggccatttccagagtgatattcccagattaacaccagcaggagtagagctagaaggcaaaattccttgtgatttggggtttgatgtgctggtatggagatctcaaatcccgccattctgcaactacatagctacatttttgcagccaaagccccggcgcattgtcagaaggaacaagaatcccctggcagttagtattacttatcaatcatga

SEQ ID NO: 9294 - DNA, 2484 bp, Oryza sativa
  Clone ID: PAT_MRT4530_15723C.1
atggcacccttcttctccatcctccctgctctatcattccttgctctgctcccaattgtcatgtctcgtgacaagataccactaaaatcctctctatctgttgatgattaccagaatgatgtcctacagtcagctgatggcactttctcctgcggcttcctcaccatctacagcaatgcttttgccttctcaatatggtataccaactcaaaaaacaagactgttgtctggaccgcgaaccgcggacgccctgtgcatgctaggcgctctgttgttaccctgcagaaggacggtgccatggttctcaaggactacgatggcactgtggtgtggcaatcagacagcaactcaattgatgtccagtatgctcaacttctggacactgggaatcttgtcatgaagaactcgagtggtaaggttgtatggcaaagttttgattcacccacagatactctgctaccaactcaaaaaatcactgcagctacaaagttggtctctactactggtttatatgttcctggtcactacacatttcatttcacggattcatcaatactgtcacttatgtatgatgatgctgatgttcatgaaatatattggccagatcctgaccgtggagagtatggaaataagaggaaccgttataacaatactaggatggggtttcttgatgataatggggattttgtttcaagtgatttcgctgatcagcaaccattttctgcttctgataaaggttcagggatcaagagaaggcttactctagaccatgacggtaatctccgtctctacagcttgagtaatggggaatggttggtttcctgggtcgcaatatctcaaccatgcaatattcatggtttgtgtggtccaaatggaatctgtcattactcgcctacgcctacatgttcttgtccaccaggctatgaaatgaatagtcatggtaattggagccaaggttgtaaggctatagtagacatctcctgtagtgttgcaaaagttcagtttaagtttgtgcatcttcctgatactgacttctggggatctgatcaacagcttgttaaccatgtatcttggcaggcttgtatgaacatatgcaggagtgattgtaactgtaaaggttttcagtacctaaaaggggaagggacatgctttccaaaatcattccttttcaatggaagggcatacccatcacactttgtgtcaccacgcaatatgtatcttaagatccctataagcatgaatatttcaggtatgccagtatcccaatccaatgtgcttgattcaagaaaacatagccttaattgtgatcagatggatgaaaaaactagggaactatttcccgatgtgcacaagacaagtcagggagaaacaagatggttttacttgtatgggtttgcgggtgcgatttttattcttgaagttttctttattggatttgcatggttctttgtttcaagatgggatctggatgcattagaaatacaagcagtcgagcaaggttacaaggtgatggcaagtaatttcagaagatataattataaagagttggctaaggcaactagaaagtttaaatgtgagcttggaagaggaggctcaggtattgtctacaagggaaccttggatgatggtcgagtagttgctgttaagatgctggaaaatgtaaggcaatgtgaggaagaattccaagctgagttgcgcataattgggaaaattaaccatatgaatctggtaaggatatggggattttgctcagagaactcacacaggatgctggttaccgagtatatcgagaatgggtcattagctaacatactgtttaatgaaaacattttgctagagtggagacagcgatttaatattgctgtaggtgttgccaaggggctagcctatctccaccatgagtgtctagagtgggtcatccattgtgacgtgaagccagagaatatcctgttggacggaaattttgagcctaagatcgcggactttgggttggcgaagctcctaaacagaggcgggtccaatcaaaacgtgtctcgagtgcgagggaccataggttacattgctccagagtggatcagcagcctgcaaattactgcaaaagttgatgtgtatagctatggagttgtgctgcttgagctggtgtcaggaaagcgagttctggatttggctacaagtgctaatgaggaggtgcatgtagtgctcaggaggcttgtaaagatgtttgccaataacttgagtggaaatgaaccatcttggattgcggagtttgtggattgcaggctaagtggccagttcaactacacgcaacaaagtcataggttcacagatagtgctgaaatggggctcctctcctatctttacaatacagcagttgcaattcaatcatggaaaaatcacagaatgaatattattggataccaacaggtattaaaggactttctagttgatgatattgctcagtttgagaatggaaaatatgtttga

SEQ ID NO: 9295 - DNA, 820 bp, Oryza sativa
  Clone ID: PAT_MRT4530_15724C.1
atgggattagtgagaggggcagggtgggtgccgcagctcctgcacgccactaccgtcactcccttcttgcgctgccgccgctccctccgtgtgccaacgccgccgtcgctgccccctccgtgcgccgccgtcgctcccactgcctgctgccccctccctccctctgcgcatcagcgccgctgtcagaatccagacagcattcagaggcttcctggcgaagaaggcgctggtgaagctgcaggcgctggtgcgtggcttcctcgttcgccggcaggccgccgccacgctgcagagcatgcaggcgctcatccgcgcgcaggccaccgtgcgcgcccactgcaccggcgccggcgccgccgcccacctcccgcacatccaccacgctcccttctggccccgccgctcgctgcaggagaggtgcgccaccgacgatacgaggagcgagcacggcgtagcggcgtacagccggcggctgtcgacgagcatcgagtcgtcgtcgtacgggtacgaccggagccccaagatcgtggaggtggacatcgggaggcccaagtcgcggtcgtcgtcgtcgcggcgggcgagctccccgctgctcgacgccgggtgcgcgagcggcggcgaggagtggtgcgccaactccatgtcgtcgctgctgccgtgctacctccccggcggcgccgccgcaccgccgccccgcatcgccgtcccgacgtcgcgccacttcccggactacgactggtgcacgctggagaaggcccggccggcgacggtgcagagcacgccgcgctacgcgcacgcgccgccgaagcagcggccgtag

SEQ ID NO: 9296 - DNA, 1494 bp, Oryza sativa
  Clone ID: PAT_MRT4530_15725C.1
atgggcaaggcggcgcggtggttccgcaacatgtggggaggagggaggaaggagcagaagggcgaggcgccggcgagtggggggaagaggtggagcttcgggaagtcgtcgagggactcggcggaggccgcggcggctgctgctgcggcggcggcggaggcttccgggggcaatgcggcgatcgccagggcggccgaggcggcgtggctcaggtcggtgtacgccgacacggagcgggagcagagcaagcacgccatcgccgtcgccgcggccaccgcggcggcggctgatgccgccgtggcggccgctcaggccgccgtcgccgtcgtgcggcttactagcaagggccgctcggctcccgtcctcgccgccaccgtcgccggcgacacgcgcagccttgccgccgccgccgtcagaatccagacggcattcagaggcttcctggcgaagaaggcgctgcgagcgctcaaggcgctggtgaagctgcaggcgctggtgcgcggctacctcgttcgccggcaggccgccgccacgctgcagagcatgcaggcgctcgtccgcgcccaggccactgtccgcgcccaccgcagtggcgccggcgccgccgccaatctcccgcacctccaccacgctcccttctggccccgccgctcgctggtacgccgctggctaaatctcgccgacgacatcgccatgtatatgttcgatgttgacgttgtgtgttggcgatggatgcagcaggagaggtgcgccggcgacgacacgaggagcgagcacggtgtggcggcgtacagccggcggctgtcggcgagcatcgagtcgtcgtcgtacgggtacgaccggagccccaagatcgtggaggtggacaccgggaggcccaagtcgcggtcgtcgtcgtcgcggcgggcgagctccccgctgctgctcgacgccgctgggtgcgcgagcggcggcgaggactggtgcgccaactccatgtcgtcgccgctcccgtgctacctccccggcggcgcgccgccgccccgcatcgccgtcccgacgtcgcgccacttccccgactacgactggtgcgcgctggagaaggcccggccggcgacggcgcagagcacgccgcggtacgcgcacgcgccgccgacgccgaccaagagcgtgtgcggcggcggcggcggcggcggcatccactcgtcgccgctcaactgcccgaactacatgtccaacacgcagtcgttcgaggcgaaggtgcgttcgcagagcgcgccgaagcagcggccggagaccggcggcgccggcgccggcggcggccggaagcgggtgccgctgagcgaggtggtggtggtggagtccagggcgagcttgagcggcgtgggcatgcagcgctcgtgcaaccgggtgcaggaggcgttcaacttcaagacggccgtcgtcggccgcctcgaccgctcgtcggagtccggcgagaacgaccgccacgcgttcttgcagaggaggtggtga

SEQ ID NO: 9297 - DNA, 798 bp, Oryza sativa
  Clone ID: PAT_MRT4530_15726C.1
atgccggaagaactggatatcgtcagcggcggatttggggagcgcacaaaaatcatgctggaaatgccacaggatttaccgttgactgaggattttattgccagacatatcgctgcatatgacactaatgatatgtgttatctgcatctttccctattgtcccaacaagagcaatggcaagttaaagactttgtgcaatggttggacgaacaccctgataaacaggcgaaataccaatatgacttacctcttgggcgggagtatttgaacaatattgctaaatacggagcaagtgactggtatcattggtgtataaaaaattggggaaccaaatggaacgcagagatgcttgacgatagtattttagaagagcttttctatgactttattactatttttggcttggagttttacttagccatttatagtaagcatgccaatgaacagctagtaaaacgttatcaaactgcggtgagtcattacactggcaaagagaagcaacaactaagccagctcttcgtcatttatattaatgcactggagcagaaaacgtatgattttctcggtaccgtatttatggcgctggacttgagtgatggttacaaagggcaatattttacaccgccacatatcgctcaggcgatggcagccatgacgttaatggactgtcacagcattattgagaaacgtggatttatgaaattacaagaaccgacctgcggttcaggtgtaatgattatcggaagctataatcatctacgacaagagcatttcaatcccaacagcaattgtgggtaa

SEQ ID NO: 9298 - DNA, 507 bp, Oryza sativa
  Clone ID: PAT_MRT4530_15727C.1
gacaccatataacagctataaccacgcatacacacgttcttaaactttaatacctctacaacctccttccttttttttttttttttaagaaacttttcctttatttagagaatatactacatattttccttcaaaaaaaaaatatactccttaacaaaatacctatatataacttaaagcaatgataacacttcaaaagccattctttaaacaatcttcaatgaaaatctccaattatttccatatctcttaacaccataccaccaccacctcaatcttcatcactatacattcttaaacttcacatccaattccaatgatactccatccatattttactcctacatttccttttattttactcattttattaccaccccttcctatctcatcaaaattaccattaacaacaactacccttcccaatattcaatttatccctcttactaaaatatttatctcccttattaaaatattttcaacaccatctttatatcctactatttt

SEQ ID NO: 9299 - DNA, 240 bp, Oryza sativa
  Clone ID: PAT_MRT4530_15728C.1
agggaataacctggaacttgaaaaacatgtctatgaaatacaaagaacttacatagggggtttacgctgtcaatggcgtgctaaaaatacgcacatatgttgtacgaattggatgatggaaaaagtattacataagctttatgaaagaaaaggaacgaacgaagatagtgtcgatctccaacaggtaccatgataattttttttcaaaggaaacacatagattcgacaatcaatttccag

SEQ ID NO: 9300 - DNA, 1876 bp, Oryza sativa
  Clone ID: PAT_MRT4530_15729C.1
gtgttcttggccgttagaaaatcaatctgatttgagcaaaattcatagcacaaaatgtgcttcagacttcatgatcaggtagaaaagacctgcagtaacaagtgaccgggactgcaaaagtcagaagaacggggaagaactttcactctggaaagacaacaccttccactacttactctgaaaactgtaaacttatgtaccgaaccaaagagtagacatatatgcagctcaatatatacaccaaatgaacatccccaaccttattcgtctagttacatatccgacgcacccagccccggactaacaggagtagtgcgttttgtgaattgtcctctttagcttgtcaaggataccagcagccttcctccgcgccctcgaagtgccattctgtgcgagccaggccagagagccattcaggttctcatcctcgacgacctccctaagtttcgtgcggtcgtacatacagatagagaagagcactgccaccgcattctctttgttacgtttgcattggtcatcctttatgatgtggagcatgcaaggcacgccaccagtctcgccgatctcctccaccgtctcatggtcgcttgatagcagagcaaggatagtcagcgactcatcagtgagtgactcatcgctgatcgccttcagcaccacgtcaataactccgctttttgtggctcttgatttattctcatgcaacttgcaaagactaaaaatagctgatgctgcatctttcttcgctgtcatgctcccgtgttcaagaagatcaaccagaggcctcattgcacctgactcaccaatcttcgccttattgctatcaagggcagacaaactgaagatggcagctgcagcattgctgcgggcctccatggttcctgactgtaaggcacttatgaggaatgtgattgcctttgtgtcatctccaatgattttcttgttgctctcatgaattgaaagatttagaattgttgtcactgtgtcctctagaacttcagaattgctttccagttctggattggagacagcagaaatcatttgtgagatggaatctggattctctccaatgactgctcggaatgagctattgcgcttagttagcagtcgaagatctttaatagcttgcctcttctcagatatgtttgacgaggatgagatcctgtcaaataattcactgaatgacttccgctcattgttggtaactaaatcttcctcttgattctcaagtggcgaaagagcaattccattctctgtacaccactgtgcaatcatgcttctaacaaggtgatttgggatgagaattgtattagagaggacttgctgagtctgtgggcatgtcctgtttccagcacttaaccattcttgaataaagcggcgatcatatgtctggccggacgcgagcacgacggggtcccgcatgatctccgacgagatagggcagaggaactgctccggcacggccgccgcctccgcgtgcccactcctcctcctctccgccccggccccggggcggtccttcggcggtggccccagctccgcgtctctcagcgccgcgagcgccgacgccgcctcgtcgaaggcctcctcccctccgacgccgccggctgtcacggcggccacgaggcggcgcaggcggaggcgcagcgccgccgccgtcgcctcctcgggcgccgccgccgccgcagcgggcgtcgacttggccatggggctagctgctgctgctggtggtggtggtcgcggtcgcgccgccgcgaggaacggagggcatgggcgtggtggtcgccttcgcgtcgcggggaggaggggagaaggggggaggaatggtggtggtggagaggagaagaggaagactggaagaggaaggaaggagaaaaca

SEQ ID NO: 9301 - DNA, 293 bp, Oryza sativa
  unsure (1)..(293): unsure at all n locations
  Clone ID: PAT_MRT4530_1572C.1
gctgcgtccggntccctctctgatcatctnttgtggtgatgagtgggctaaaatcgntcatgcattttggaggaaggggaggaatcttgtgcatgtcaaaatgtggtagcaatagcatgatcgatgtaggtaggctgctaatgctaatcagttaatggcttgatacttntccttttggcttgaacaactaactagctgtctgtctgtctgtttgacttgtgttaagtggattcagacatgtaatctggtccatggtttcagctgtaaaaaaaaaaaaaaaaaaaaaaaaaaaa

SEQ ID NO: 9302 - DNA, 166 bp, Oryza sativa
  Clone ID: PAT_MRT4530_15730C.1
caacttgatagggcctcgccgccattgccgcctcgctcctcgtctcgcgtgaacgccgctcggcgcttacatcatgtctttaacaatcggtgactcttcttcgtatgacataatggttgctgcaatcggcattgtattacacaagtagctattttttctatcttct

SEQ ID NO: 9303 - DNA, 311 bp, Oryza sativa
  unsure (1)..(311): unsure at all n locations
  Clone ID: PAT_MRT4530_15731C.1
cggtcatntcctccatctccggccaggctagccatggcggccggctcggcntcgctgctgctgctaatngtggtgctctgcgnggnggcnagcggaacggcgctcgcgcatcaccnacgggntgctggcnaacggnaacttcaagcgcgggccggcgccgtcncagctgcncggaacgggnntggtcggcgcttcggcaatcccttcttggcggacgtcgggtttcttggagtacatcccgtcgggaaggaagcagggggacatggtgctggtggtccccnagggnagccacgcggttgcggctcggaaac

SEQ ID NO: 9304 - DNA, 501 bp, Oryza sativa
  Clone ID: PAT_MRT4530_15732C.1
acgtcacatgcactcgtacctaacctaaaatactatacaccagaccccccttcctttttttttttttttcttttattcttctttacttttaatgcctggtttttttaaatgagagattctttcacaaattttttttttttcaattcttcatacaaaaatatcacttttaaactaattaattcttagtctttattaaaaaaatttttctttattcctatatccaaataaaaataaaattactacatttctcaacatactaataaatctaactttaaaataaaataaacctcaccatatctcaattatcacattactttcatctaatattcaaaactattcataaccaactctaattttcatacccaatttaacttatcaaaccttttaaaattcttctccatcttccattctaactaaatttccaattttaacttttaaaccaacttacttaaacaaatcattctatactcttctttatttatctactataattaacaacat

SEQ ID NO: 9305 - DNA, 584 bp, Oryza sativa
  unsure (1)..(584): unsure at all n locations
  Clone ID: PAT_MRT4530_15733C.1
ggggaaaattcccaaacaaaaacaatgggtttttttgaacaaaacccaaggggccaaacgggggaaaacccaaaaccacggggggggggccaaaaagcacaggggaaccagacccaattgggggaaaacaccaggccccaagagggggagcacccaaggccaaaagcccaagaaaagaaaaagcccaaaatgcatccaaggcaaccgcccagggaggattcggggccccccccgggagaaaaaaacgggggggggggggttacggggccgggagggggtgcttccccggccccgggcagggctgaacccgggagagggccttgccagggaccccggggggggccgtacgggggggcaaggggttctgcncttgaggacaggggggggggggtaccaccngttggggggcgccngggggggagcgcgggggttgggccgggggggctnnggggggggggggggcgngggggggggggggggggctgggggcgggggggggcnnggggnggggggggggaggngagggcggggggggggggagggagaggaagctcgccggggggggggggggggggggggcgggg

SEQ ID NO: 9306 - DNA, 413 bp, Oryza sativa
  Clone ID: PAT_MRT4530_15734C.1
ggagcccctcctcgtccgcatccgtccttgcctacggcctcccgctccccttcgtcttttccgctgtccgcctcccgtgccgcgtcatcggggccggccacgacctatggggcataaaaccccgtgccggcgggcgcccccccgcacctccgcacctcctccccccccctccccccgccctccggcgccaaacgccaaccaggcgggccgggctcctttccccagccctgcttaccttcaacattccccactgggccgccaaagcccggcaccactgcaggggaaccccaaccccccccccgataactacgaatagagccggctgtggaatgctgcagtcacgactaaacgcaacccaacaaccaccccgtaccaatgcgttaaatgcggatgccccagtgcggggtgggtga

SEQ ID NO: 9307 - DNA, 231 bp, Oryza sativa
  Clone ID: PAT_MRT4530_15735C.1
acttgggtctgcccgaggggacccactttgcccccacccgctgtggggtgggttgtgtctggggtgtagcctggaattgtggtgacatgagtgatgaaatgggggtgtgccacaatggtgtgagaataaatgaagagtgccactgggcatgccatgacactggccgtgggaccacgtgtggaaaccctgtggatggtgcatgatgaaatgctgaaaatgaaaatcccctat

SEQ ID NO: 9308 - DNA, 300 bp, Oryza sativa
  Clone ID: PAT_MRT4530_15736C.1
atgggggctctgacgctgacgtgtgggccggggcgcgttccgcgaccccaaggggaggccgagccgttcccgggcgcctgtaaggtgttcggccacggtccacgacgcggcttggtggacgagtctgtccggaacggcgacgagggtggcggcgacgagggctgcacgcaggccgccggcgatccaactggaggaggctgctcgcaggccgccggcactccattcacaaagcgaagaacaacgatacatggagcagagatgactcccgagacaaatttcgcagtagcgaagacgcattag

SEQ ID NO: 9309 - DNA, 2944 bp, Oryza sativa
  Clone ID: PAT_MRT4530_15737C.1
atggcatgcaatgaatcgatcgagagccgcatcatcctcaccgaccaatccaatttaaggttggttagcctagctttggatgagcagaagggcagcgtgatcctgtgcacaaccaagaaccaaccccaacacatggaagctgcggcaggggcaggaggagccattggaggtagtggtcgcgaggcggcggcggaggaggaggacggcggcgagcagtggctagaggaggaggcggaggcggaggcggtgtactgcgccgtggggaaggaggcggtgaaggaatggaaggcgaacctcatgtgggtgctcgccgccttcccctggaggaggaggaggagccgcatcgtcctcatccacgtccaccgcccgccttcccgggtcaatatgatgggggcatgggtcccagtaagtcagcttgcagaggaggaggtgaatgcatacaggcagctggaggaggagaggatcagcaaagtcttagatgatctcttggacatttgcaaaagtcaaaaggtcaatgcgagcaagatcatcttctcctgcgacgacatcgcgagaggcctcctccagctcgtcgatgatcatgggatcactgatcttgtcatgggagcagcatctgacaaggcctattcaaggaaaatgcgggcgccgagatctaagaaagctcggaaggtgcaactgaaggcgagcccctcttgcaagatctggtttgtctgcaaaggaaaccttatctgcactagggaggtgaacgaaggactcaatagaacaggatcatcgacaactagcacaactccgaggtcgagcacttctgattactcgaggtcgagatcctcgccacgagtgcacagcctaagcagcgagcaattcggtatgcaggatccagccgaaccgacgacatcatcagttgatcagactcctatcagggaggacaatgccatggaccgtggcactgagggttttaatcatgaagcagttgctgttgctagttcatcaacagtcccagtgtctgaaaatgtagaggctgtacagagatcagctgctgctgttgtgcagtctctgcaagaaattgaagaggactcaccaactccttcagggcatggttcggaggatgctggtgatgtgagcgatgcgtacgacaagttcaaggatgctgtgatagaagccgagaacctcaggcatgaggcatacgaggagactcgccggcgtcaaaaggtcgagcgcgacctcgccgacgcgacaagaattgcgaacgaagcggagagctcgcagcagagggaggcgaggcatcggaaggaggtggaggagaggctggcgagggagcgcgcggccatggagcaggacaggcgagagctcgacgacatactcgagcagacacgcgaggtggacgcccgcgccgccgagctcgagctccagatcacgagctccgagcggatgatgagagacctcgaggccaagctgtcggaatcgtacgacctcctccaccagctccggcgagagcgccggcgcgacgatgtgccggcggaagcaatggcgggaagcgaggctggtgaccagagactgaccttcttgcggctcggcttgccggagctggaggaggcgaccaaccatttcgacgaatctgtcaggatcggaggcggcgacggcagccgtggcagcgtgtacaggggcgacctgcgcagcatggcggtcgccgtcaagatgatcggccgtgacgtcgccgtcgacgaggtcggtttctgccgcgaggtggaagccgtcggcagggcgaggcacccgaacctcgtcacgctcgtgggcgcgtgcccggaggcccgcgccgtggtgcacgagttcgtgccgggcgggagcttggaggaccgcctcgccggcgccgcgccggcgctgccgtggcacgagctgtgcggcgtggcgcaccgggcatgctccgcgctggcgttcctccactcgacgcagccacgggcgacggtgcacggcgacgtccggccggcgaacatcctcctgggcgaggagtgctgctcgagcaagcttgccggcctcggcatgtgcaggctggtgcggagctccggcggcgtggcgctgtcaaggccggcggtgggctacgtggacccgcggcacctggcgacgggggagatgaccccggaacgcgacgtgtacgcgctgggcgtggtcctcctccggctcgtcaccgggaagccgccgttgatggcgaagcaggaggcgcgggaggccgcgggcggcagcaaggcgtggcacgaggtgttcgacgcgagctctggaggctggccgttggaggtcgccagggaggtggcgctcgtcgggctgaaatgctgcgacgtggaggaggagccagcgggagctcgccgtcccggcgaacttctggaggaggcatgcggcgtgctggaggcggcgatgagcgcggcgccggggaggtcgtggtcgtcggtgtcgtcgtcgtcggacggcggtgagggcggggcgccgtcctacttcgtgtgcccgatcttgaaggaggtgatgcgggacccgcagatcgccggagacgggttctcgtacgaggcggaggcgatcagggagtggctgcgcagcgggcgcgacacgtcgccgatgacgaacctgaagctgccccgccgcgagctcgtccccaaccatcccctccgcgacgccatccaccactggcgcctccgccgcgccatgcgaaccaactttactactggattagatagctactactactaggcccttagcacttgtaaggcccacgtttttagtgggtttttttaaacttttttacagtccacggcccgtatttccgattgtaacccccggcattttccatttcgatccatattttggaccgttctcccccagtaggcgtagtggtccaacatttttgcatccaagtccctaattaattaattatttcagtgaaaaaaaaaaaaaaaaaaaa

SEQ ID NO: 9310 - DNA, 344 bp, Oryza sativa
  Clone ID: PAT_MRT4530_15738C.1
cattccacttgctaggagacaatgctgcctggtcaagcactgggactcggtcagtgaaagaatacaacttgtcggacaggaggggctggtacactacagaggcgactacatagggtggcccttatatggaaccttggctatcaggtctatttatgatggacgggaattacaatagttgcttgaaatatagaatattaacgtgttcaattactaaggatgccatatactttgcattgatgagaggataatttaagcgattcacctttgcgttgatggtggacaacaatcaggatcctaatggagtggatggatactctactacatgatcgggaaactgaacaggt

SEQ ID NO: 9311 - DNA, 4959 bp, Oryza sativa
  Clone ID: PAT_MRT4530_15739C.1
cacgaaaaacaaatacagcttaaaatatgctggggacatcttttgtgagcttacaatatatacacaagacagcattcgggaacccatgggcaacagaaccagaggcaaacatgacagctgaatcaaataatcaacttttctagatgcggattttgtatacagagggagcttatgtcatatgttacaaaagccctgcctatgttagcatactaatcctacaggacatatcaagcatgaatgttcgctgcagcagcaatcttgcaacaaaagcttgaaacctaacctgctctagagccagtgagagttgtttttctcccggcatgttttcaaaatgaaaatgcccatgcatgtatatctatgagatgataggttctgttaaagcatgctaaaaagcaagcattgcaatgtcaggcataatctgtccagctgacaccttgctcaattctggtcactagatatggaaatcctgtgatgtttcgaaacactgacgacatgaagcaactttgttccatgaggcacccatccaacaaaatgccatctctaggtacaggctcagatgacaaccatagaaaccagcatccaggctgcttgcaaaatggaagagagaaccagcatcctcccaaacagcaggaattcagatatagaccaagcctgctctagagccagtgagagttgtttttctcccggcatgttttcaaaatgaaaatgcccatgcatgtatatctgaggcttacaacccattgtcactagaggcttggtttcataatcaatcgtctggtgttgtgaataccaacaccttcccatcaccatcccatccaccggtagagccaagtgcacatcttctgaatagacgccaccttgtccatccaagactgtccagggttctcttcttgaaccattcgacgaattcggcctcctaggcattccaaaaggcaaattatctctagacctatcaccaggacgtcccagactgtccagctgacaccttgctcaattctggtcactagatatggaaatcctgtgatgtttcgaaacactgacgacatgaaaatctggaagcatttccaaatgcctcggtcttggtccaccagtcctcatgttccttatgttatttgaagtgttccttcctggagtgttagagatcttcatggcaaggaagtccttgggaatggtatcaagatccataaaacatttcctggcctttgcatctgctatcagtaaagcccagtcctcagactgcataagagcaccggcattaccaacaacccatagagctctcctagctctagtaagagcaacattcatacggcgtatatctgccacgaaacccaccattcgacgaattcggcctcctcggcattccaaaaggcaaattatctctagacctatcaccaggacgtcccagatcatccaaatttctgtaactgccatttctcggaacagagttagaacgttcatcctcatcaggcctcatgctaaccctggaatctggaagcatttccaaatgcctcggtcttggtccaccagtcctcatgttccttatgttatttgaagtgttccttcctggagtgttagagatcttcatggcaaggaagtccttgggaatggtatcaagatccataaaacatttcctggcctttgcatctgctatcagtaaagcccagtcctcagactgcataagagcaccggcattaccaacaacccatagagctctcctagctctagtaagagcaacattcatacggcgtatatctgccacaaaacccacaccatgatttgaggcacggacacatgacataataatcacatcacgctgcactccttgaaaagcatcaactgtgtttatgtaaatgtccttcccatcctcagtactcttgcagggagctgttgtggatcaccaaccaagacacacctagctgcaccgagcgaaagtggagggaggactgctacttcactagcctgagcagcttcatcaattaccaccatatcaaagccatgactaaggcgggaaaataacttgcgaccactgcttgaaactgttgtaaaaacaatttctgcttcattggcgaaacttgcttctagactagccctagcatcttccatattgaagttgctgccaacacggaacctgctttctaatatcagcaggcgtgacatctccaccaatactttatccctgctttctactgaagcagcaagtttctgaagtagaaaatcacgactacgatctctttgagcgagcacatcagggtctactccaactgaaccctgcgatctgccagccgctgcaaccatagtaagttccctttgtagaagggctatctcctgtgataattgctgctcacggcattttagctgttgcagccacccaatcacttcatcacggcccttcattaaaagctggtcagtccttcgctcaactgaaacagcttgagcagcacgagattgtgaatcaactccaacacgggcaacatcaggacgatagaccttcatttcaccatctataaaaccacgatcaagaacgcgagcaagcagctcatctgtggcggcgtttgatggagcacatacaagcatccgtggtttggggcaaagcttgggaagagtgcggaaaaggttctgatccatactctgtaaaacttcatcaatggaccctgcagcaacagtctccgagctgttgcttgtgttaccgctaacttgcttgtaactttcaggagcaagcttcttgagcagagcagcatagtaatgttgatactgaacaagatggataacatttagcatcccccataccgtatgggtttttcctgtcccaggcggcccttgcactaatgtgaaaggccagggttcttgtttcttcacagctccgttgcttgtgccagcagctgtatgcattgcagcccaatgaatcgctgatagctgaggcccgttgaaagtacgatgcagatgatcagcaaaatttggagtgaaacaatcaggcatagcaggtggctgctcttcatacttggggaagtgctctggacttggctgaagaatagcattttgcatctgaacattgagtctgcggaatgcatgcaaggcaacatattccctttgtgttgttgctagggaaccaagactagtcagataccaggtgctccgaggttggagtttcctcaaaacattggtctcactgctagaatcaaatgaatccccaagatagaagtgaatgattgccccaatgggatcgcgtgtatcaataggcgtatggcgtctgactgtaccaacaagccgtccacactctgactcagtgtcttcatttgaaccaacattccgcctattagatctacttgattgggaagctgaaccaggcctaggaaaggacaaaactgcaacttcaccttctttgaaagtccatttatactcgtgcattggtagaacaacaacatcataccatcctctttcacgcctctccactgttttcacccgcaccataacatgtgcatcccttgatacagactcaagactctcctcataggaactatataactgagctcgacattcctcaaagagcaaaggctcgaaaactctaatgtactcctcagcggattcaaaacttttaggaacacattgaagttctgcctcctctggattgtgccagaacttgtcacttgtcacctcccgtataagtcgttcaacagaagtgtcttggtattgcatgttatttgctggagtttgttttttggaaacaagagacctcttgttgactggtttctgatctacagtattctgtcctgttacaaccgatctctgagaagaaatttgtctgccctttaactgtcttggcattggttgttgataaccatctgcaggggcttcttcagcattcattttctttggccggccttgagatcccgtctcagcatcaccattggattcagaaatttgatcgattggatctgcagaattacttcgttccgaaccaagcatttcagattgcctctgatccctgatggttggctgactttgtctttctgcagctctttcagcaataccaccaccactgcgaaaagcttccttcacagtacgtgtgacaattggtgctggaaaggatgactgtcttctgggtgttgatgtcttcattgtgccagcttgctttgcatcctcaacattaatgaacacagtttgcctggctctctttttacctagcattgcctctttgtgttcatccaacttaggtctctttgaagggttacttgcaaacttcaacgcataattggcttctacacctctaacatcctttgacttgttggacagatctgaatcatccccaagctgatttcctttgttttctaaatttttcgtgctctcaagtcctgtgggaccacgtaccactggatccttaggcacatccatcatttcggtgtcactgggctcagcggcggcctcatctttaatcatgttaccagatttgacagcagtaggttcactttcttgggaatcccttttcacttgtgtagttgcagtaccagccaactcttctttgttgctaacactactccctgcagtgtcagaagcaacatctgcatcagaccactctccttcctctctttccactgcctgagaaacctgattggaggacccaatcattttagcaacaccatcagagctatggttgattaacatagatgtagaggctatgctagcattcaaattatcttctgccttgattggctcctttgtaatttgtgaatctttgctcctcacaaaaggctgaaaacctgaaccggacggtgcgtgcttaaaggcattattgtttaatatcccctgcgactgtgttacttcctgttgcggaaataaagagggccctgctgtgggaacaggaagggtcttctgaggttgtgacacaacaactgcggcttcttcttcttcagcttctgttgggagctcattaaggtcaaataacatccttccacgagaccccat

SEQ ID NO: 9312 - DNA, 4125 bp, Oryza sativa
  Clone ID: PAT_MRT4530_1573C.1
atgtcgaacgaggtgaaccatgtagggaaggctcccatgtttaatggcacaaactattccacttggaaaattaaaatgtctactcacctcaaagctatgagcttccatatttggagtattgtggatgtaggctttgctatcaccggcacgcccttgacggagattgatcactgcatcctccaactcaatgcccaagccatgaatgctttgttcaactctttgagccaagaggagtttgatagagtgagcaaccttgagaccgcatatgagatttggaacaagttggcggagatccatgagggcacaagtgagtacaaggatgccaagcttcatttcctcaagatccaatatgagacattctccatgttgcctcatgagagtgtgaatgacatgtatgggaggctcaatgtcattatgaatgatctcaaggggcttggggcaaactacaccgatcttaaggttgcccaaaagatgcttagggctctaccagagaagtatgagacccttgtcaccatgctcatcaactccgacatgtcaagcatgacaccggcaagcctcttggggaagatcaacaccaatgacatgtacaagttgaagaagaaggagatggaggaagcctcaccttccaagaagtgcattgctctccaagccgaagttgaagacaagggcaagggcaaggtgaatgaagccaatgaggacttggaggaagatattgcccttcttgctagaaggttcaatgatctcttgggaaggagaaaggagagaagaaggggctccaactcaaataggagaagaaatagaagacccaacaagactctctccaacttgaggtgctttgagtgtggtgagaagggacactttgcttccaagtgcccttccaaggatgatgatggagacaagtcatccaagaagaagagtggaggctacaaactcatgaagaagctcaagaaggaaggcaagaagattgaagccttcatcggggaatgggactcaaatgaggagagctccgcctcatccgggtccaaggaagaaggtggtgatgatgcaagctccaagaagaagaagatggctattgttgccatcaaggaggctccatcactcttcgctccactttgtctcatggcaaagggctactctaaggtaacatctcttagtgatagtgagagtgatgatgattgtgatgatgtttcctatgatgagcttgtgagtatgtttgaggagctccatgcttataatgagaaggagattgtcaagttcaaggccctaaagaaggatcatgcttctttgaatgtcttctctagctttagctcttgtgtttctatttgtgatgcctcacttgttgttgagaacaatgagcttaaggagcaagtggccaagctcaacaagagcttggagaggtgcttcaagggtaagaacactcttgacaagattttgagtgagcaacggtgcattcttaacaaggagggacttggattcattccaaagaagggtaagaaaccttctcaccgtgccactcgttttgtcaagagtaatggaaggctcatgatggtagcattgttcctagatatgtgggttcccctatactcggtggtgaactaccgcaccggtgggagccattgggtgcttgatagtggatgcactcaacacatgaccggtgatagggctatgttcaccacatttgaagtaggagggaatgaacaagagaaagtgacatttggagacaatagcaaaggaaagcttttcaaaaagtttgtaaaaagggtccaaaatgaatttaattgcactcttgtgaaaataagaagtgacaatggttccgagtttaagaataccaatatcgaggactattgtgatgatcttggtattaaacacaaactttccgctacctactcacctcaacaaaatggtgtagtggagaggaaaaattgtacattgattgagatggcaaggactatgcttgatgaatatggtgtttctgattccttttgggcggaaaccataaacaccgcttgccatgcaaccaataggctttatttgtatcgtctcttgaaaaagacttcctatgagctaattgttgggaggaagcctaatgttgcctattttcgagtttttggttgcaagtgttatatttaccgaaagggtgctagactaaccaaatttgaaagtcggtgtgatgaagggtttcttctaggttatgcctcaaatagcaaggcataccaggtctacaacaagaacaaaggtattgtggaagaaaccgccgatgttcaatttgatgaaactaatggctcccaagaggggcacaagaatttggatgatgtaggtgatgaaggcttgatgagagctatgaagaacatgtctattggagatgtcaagcctattgaagtggaagacaagccatccacctccactcaagatgagccatctacttccgctacgccaagtcaagctcaagttgaagtggaggaggagaaggcacaggaaccacctatgccaccaaggatacacaccgctctttccaaggatcatccaattgaccaagtgttgggtgacattagtaagggtgttcaaactcgatctcgtgtcgcttcgatttgtgaacattactcgtttgtttcttgtcttgagccaaaacatatgaatgctatgcatgaagagctcaacaactttgcaagaaacaaggtgtggactttggttgaaagacctagagaccacaatgtcatagggacaaagtgggtctttaggaacaaacaagatgagaacgggttagtggtgagaaacaaggcaaggttggtggcacaaggtttcacacatgttgaaggtttggactttggtgaaacttttgcccccgtggcaagacttgaggctattcgcatccttcttgcatttgcatcatgctttgacataaaactatttcaaatggatgtgaaaagtgcttttctaaatggtgaaattgccgaacttgtctttgttgaacaaccccccggttttgaagatactaaaaatcctaaccatgtttataaactctcaaaagctctttatgctttaaaacaagctcctagggcttggtatgaaagattgagagattttcttttgtcaaaggatttcaaaattgaaaaagttgacaccacccttttcacaaaaatcattggtgatgatttctttgtgtgtcaaatttatgttgatgacatcatattcggttctactaatgaggtattttgcaaggaatttggtgatatgatatctagggaatttgagatgtccatgattggagagttgagcttctttcttggacttcaaatcaagcaactcaaggatgggacgttcgtgagccaaaccaaatacatcaaagatctactcaagaggtttggcttggaggatgcgaagcccatcaagacacctatggcaaccaacgggcatctcgaccttgatgacggaggtaaaccggtagatttaaagctttatcgttctatgattggtagcttgctttaccttacagcatctaggccggatatcatgattagtgtttgcatgtgtgcacggtttcaagccgctcctaaggagtgtcacttagtggccgtgaaaaggattctaagatatttaaatcattcctctactattggcttgtggtacccaaaaggtgctaaatttaagcttgttggcaattccgactcggattatgccggttgcaaagtggatagaaagagcacatctggtagtttccaaatgcttggtagatcccttgtgtcatggtcatccaagaaacaaaactccgtagccctctctaccgccggggcggaatatgtttcggcgggtagttgttgtgcccaattgctttggatgaaacaaacattgttggactatggcatatccttcaccaaaaccccactcctatgtgacaatgatagtgccataaagatagccaataacccggtccaacactctagaaccaagcatattgacattcgccatcacttcctaagagaccatgttgccaagtgtgacatagtcattagccacataagaaccgagaatcaactagccgatatctttaccaagcctcttgatgaaacccgcttttgcaagttgaggaatgagttaaatgtcatagacttctctaatgtggcttga

SEQ ID NO: 9313 - DNA, 276 bp, Oryza sativa
  Clone ID: PAT_MRT4530_15740C.1
atagccagcctgggaggctagccaaagttggccagtggataggcttgatggcttgcagagtcaaatagtgtttttggcttatttgcccaatttttggcttcgagagctgagtagagaggctgttggagatgctcttagtgtttgagatttcttttaagcttttaataatttcctttgttccttttagaaagtgatttttaagttgggatgtatttatcagggtgtgacatcgtcggggctactgtttacttcagataaaaaaaaaaaaaaaaaaaa

SEQ ID NO: 9314 - DNA, 765 bp, Oryza sativa
  unsure (1)..(765): unsure at all n locations
  Clone ID: PAT_MRT4530_15741C.1
ccacgcgtccgtgaagtgattgggtggctgcaacagctaaaatgccgtgagcagcaattatcacaggagatagcccttctacaaagggaacttactatggttgcagcggctggcagatcgcagggttcagttggagtagaccctgatgtgctcgctcaaagagatcgtagtcgtgattttctacttcagaaacttgctgcttcagtagaaagcagggataaagtattggtggagatgtcacgcctgctgatattagaaagcaggttccgtgttggcagcaacttcaatatggaagatgctagggctagtctagaagcaagtttcgccaatgaagcagaaattgtttttacaacagtttcaagcagtggtcgcaagttattttcccgccttagtcatggctttgatatggtggtaattgatgaagctgctcaggctagtgaagtagcagtcctccctccactttcgctcggtgcactaggtgtgtcttggttgggtgatccacaacagctccctgcaactgttatcagcaaagcagctgggactttaatgtacagcaggagtctctttgagaggttccagttgtctggttgccctaccattntgttatcggtgcagtatcggatgcatccccaagatccgtgaatttccatcaagacacttctatcaagggcgccttacagatagtggaaaggtgtttgtcaaattgcctgacgaggcatattantagagatgcattaatggcaccttacatattctatgacatct

SEQ ID NO: 9315 - DNA, 696 bp, Oryza sativa
  unsure (1)..(696): unsure at all n locations
  Clone ID: PAT_MRT4530_15742C.1
gaataaataataacttttctagatgcggattttgtatacagagggagcttatgtcatatgttacaaaagccctgcctatgttagcatactaatcctacaggacatatcaagcatgaatgttcgctgcagcagcaatcttgcaacaaaagcttgaaacctaacctgctctagagccagtgagagttgtttttctcccggcatgttttcaaaatgaaaatgcccatgcatgtatatctatgagatgataggttctgttaaagcatgctaaaaagcaagcattgcaatgtcaggcataatctgtccagctgacaccttgctcaattctggtcactagatatggaaatcctgtgatgtttcgaaacactgacgacatgaagcaactttgttccatgaggcacccatccaacaaaatgccatctctaggtacaggcacctgaggcttacaacccattgtcactagaggncttggtttcataatcaatcgtctgggtgttgtgaataccaacaccttcccatcaccatcccatccaccggtagagccaagtgcacatcttctgaatagacgccaccttgtccatccaagactgtccagggctgcacagaccaagcaaatgtacagttacagcagtgcattctttacacttctcttcttgaaccattcgacgaattcggcctcctaggcattccaaaaggcaa

SEQ ID NO: 9316 - DNA, 504 bp, Oryza sativa
  Clone ID: PAT_MRT4530_15743C.1
ccaacatctaccactacaaacaatcacacccccgcgccgtggccccgcgtcttcgtcacttcggtcgactccgaccccggctgcaacggcgcccccgccccccacaagcccgtccagagcgcccacctcgggtgcttcccaaggaggccaacaaggaggtcgccaaggacaacaacgccagccttggaactcgtgccgaggccggcattgacgccctcaaggacaagggcaacgagcacaagcacgatgcttcggccaccgccaacaaggaggctgccaagcactaagcagttcaccatgcatcctcatcgcttccacgaacgggacgcagctttcttctcatgacaaattcagacggcgtttcggacatttgcgaggcagggacatcatgaatagggttttttaattgggatttcacttcgtcgacacaataccctttaggcagattacttagtctaattcattcagacgattgataccaaaaaaaaaaaaaaaaaaaaaaaa

SEQ ID NO: 9317 - DNA, 204 bp, Oryza sativa
  Clone ID: PAT_MRT4530_15744C.1
atgatcaagagcgacgagagacaagggcggtggttaaagggacgattggggaaggcaatgacagcagttaatgatggggatgagcagatcggcagcagcggagagatgatgacaacgtacggcgatggtggaacgaattgggcgtggcgattgcggaagggagaagatgggagagaaggactgcagcggttgaaggggtggtga

SEQ ID NO: 9318 - DNA, 338 bp, Oryza sativa
  Clone ID: PAT_MRT4530_15745C.1
cgtgctggcggaggccgagggactcgagcacggtgccgagctcctcggcggagatgaggccgtccttgttgccgtcgaacacgtcgaacgcctccctcaggtccctctcctcctcctctgcttcatactcctcgtcagcggcggcggcttcctcgtcggcggcggcggtggaggggagcgggtgctgctggtggctcttgcgccgcttggggatggagtcgtagagctcgcggaactcgtggatatcgatgagcccgtcgctgttggcgtcgacgcgggccaccagggcggcggcctcggcggcggacgacacggcgatgccgaggcgcttcagggac

SEQ ID NO: 9319 - DNA, 326 bp, Oryza sativa
  Clone ID: PAT_MRT4530_15746C.1
gaaaaatctggtggcctgccggacccaccagggttcggccgaaccatcacggctcaatgccttttccaagatgacgggaaggccgcggcggctcccgtcgagcgctacgtgggcaccctcttcaccaaggcaggggatgaggtgctccacaagtacaccacacccaccgctacaccatccactccaaagggggagcgtttccgcattcaaggagtgcgaactcccggcggtgggtatgtcggcccaaaaccttctctctctccccggcccaagccggcccagtccgcccgcagcagccacgtgcgcgcgccctcggacgctgacag

SEQ ID NO: 9320 - DNA, 255 bp, Oryza sativa
  Clone ID: PAT_MRT4530_15747C.1
atgggttatgctcgaggcacatcagtccctcagcgcgattgctcggggcatatatgtctttgggcacaaccacctgcgggctatacccaggcagattcccaccccccatgggtggtgctcggggtgcatctggcctccaagcacgcccctctttgggcagtgctcggggcacatctcacctgcgcttggcgcctgagtgctagggggcacaaggaacatgtagaacgtgcaagatctacatctttaaggtgttaa

SEQ ID NO: 9321 - DNA, 356 bp, Oryza sativa
  Clone ID: PAT_MRT4530_15748C.1
gaaaactactagggggaatgatcctatttcaattgatggctacacgcacaccataccctttgtccacaacgatctccattaattgcaacaatatactccaataacacctatcacttgatcgattaaacaaattcttgtcaaattaaactagcccctaaacaccattacaactatactcagggcttagattatattatcactaatagtttaggataacacaccatctaaacaccgaacaataagcctttcctttcttccccctacaaacctccgtatccaccattacaagttgacacttactcggccttgccctcaacacttacttccatccatgatgcttccatacccttggagga

SEQ ID NO: 9322 - DNA, 436 bp, Oryza sativa
  unsure (1)..(436): unsure at all n locations
  Clone ID: PAT_MRT4530_15749C.1
gaagttttcatgtctcggcatttctgaatctgtgacgccaacaagttttgttagtgatggtcatatgatagccaaaagcttcacggtgccatatgaatgtaacttgagtcgctatgtacagtacagttcagttactatttcataaaacttttaatctctttaaaaaaaaaaaaaaaaaaaaaaaaaaaaaaaaaaaaaaaaaaaaaaaaaaaaaaaaaaaaaaaaaaaaaaaaaaaaaaaaaaaaaaaaaaaaaaaaaaaaaaaaaaaaaaaaataaaaaaaaaaaaaaaaaaangggggggccctttttgaagaaacaaattttacttaccgggtgttgaaaggtatatttttttttttggggccccaaaaataaatttaagggcccggggtttaaaaacgcggggatggaaaaaacctgggttttaccaaatta

SEQ ID NO: 9323 - DNA, 714 bp, Oryza sativa
  Clone ID: PAT_MRT4530_1574C.1
tccacgcctccgattgcctcggtgatcttcgccccggtgaccacttcgatattcagtggaggaagaacaaggatttcccttacggctggtggtatggtgtcgtgggtcaccaggagacatgcaacgccaacgagcatctgtgtcgctgccatgaggacgatatggttgtcctggagttcaagcactacgcggccggctcgcggtggaggcagacgacggtgagcaggaaggatcacagggagaaagtcgacgagacggacgggttctacggcggcatcaggaagctccagacgagcgacgagatctcgacttggcgaaagttctggccggtcgatgtcctcaactgatcaggacaatgtgaatgaaatacgcatctgatctgcctgcccgctatatgtgcatcctggtggtgttgccgttgtatagcccgtacgtcgatcggcagcgctgcgtgaccctgtctgaaaggctccgctcaccggctgctctgttcttactgaattttttttggtagcgagatgaggtgaaaaattgatggaggattcgaggatttgttcagcgcaagatccgtcggaacggaaggaacaactataggctattgatgatgatgtacagatttactcagcttgtcccgtgctgttgctggactgaatccttcagtccatatgtcgtgtaagatcatgtttccttctgaatgttatcctgttcaatctt

SEQ ID NO: 9324 - DNA, 386 bp, Oryza sativa
  Clone ID: PAT_MRT4530_15750C.1
aaacaaagcttttttcataaacacgcgttccgggccgtgcttgcatacagatacatacaggcccttcattttttttacaaccattcacacttttacactgaaaggcccaaataaaactgacaacagacgcatgcattgatcattttatttgcatgatcgtccataggcggagattggaaattgaacaacgaaatcaagaacaatttattaagccgctggtcgatcttttgtataaaatgaacattggggtttttctcacgccgtcacgctggtgcttctgaacgagctgagcgccttggggggctttccgcgcaaaaccagtttggggtaccccgccgccaaaaacgccccgatcaccggcccaacccagaagatccaggggtttt

SEQ ID NO: 9325 - DNA, 2724 bp, Oryza sativa
  Clone ID: PAT_MRT4530_15751C.1
atggcacctggatggcgttgtaagtattgtcatcaaagaaagggcggtggtggagcaactcgacttaaaattcatttggctggaaaaggaaaaggggttacgtattgcaattcagtgcctccagatgttcgcgaattcttcaggcgcgaattggacaggataaaagatgcaggtgatactcgtcagagtgagagggcaagaagggttgaagcggctggggtcaactattatgacctatcaggtgatgccgacgaggaggaacaaatggaagcagccatggaagcctcacggcaagaggcgagttttaggaggggtgtggagcaacgaggtggcacttatgagcatggcggtggcagtggatccgctcagtccgaggcacggaaaggaagaagcaacccaattgccagattcttcacaaagaagggaaggcaagctagggaggccattggtgagtcctgggcaaggttcttctacacctcgggtattcctgcaagaaatgctgataattcatattttgtcagcgccgttcgagaaacacagaagtggggtgaaaacataccttccccaagcggttcggagattcatgggaagtaccttgatgctacggagaaggacgtcaagaagcaattcgacaggttcaagcgtgattggaatgagtacggtgttactctaatgtgtgattcttggacaggaccggcgggtatggcggtcatcaactttttgatatattgcaatggaatcatgtttttccacaactccgttgatgccaccggccatagccaagatgctaacttcgtactaaaggagataagaaaggtggttcgcgaattaggcccgcaacatgtcgttcagattatcacagacaatggttctaactacaagaaggcctgcagactgttgcgccaagagtatccaacaattgtgtggcaaccttgtgtggcgcacacaattaacttgatgcttaaggaggttggaaaaatgccggaccatgaaatggtgattgagagtgcaaggaaaatttgcagatggctatacaaccattccaagctgcatgccatgatggtgtctgctataggtggtgaactggttaagtggaatgctacacggttcggcacaaactacatgttccttcagagcttccttaggaggcgagatcagttcatgcagtggatggcttcttctgggttcatgcaaagcaaattcagtggcacaatggatggcaggtatgcgcacgcatgcctatctagcatgtcttggtgggagaacttacagaccgtggtcaactcagtccagccgatgtactccttccttcgatttgctgacgaggacaagaaccccaatttgagtgaggttcttctgagatatcagttgttgagaatggaatatgacagtctctttgcgagtgaaagggataaattcgaagcatacatggaaattgtcaataggagaatgcacgacctcaccaatcaaactctaatcaatgccagtgcggcattaaaccctatgactcactaccaatactctccaagtgccagcgtcttccaagacctccgtcaggcctttgagtggatgacggacatcgatacagccgccgccgctttgcttgaggttgagatgtatcgccgtaagactggtgaatttgggagggcccttgcaagaaagatggcaactgatggaaaaacttcccctgcacaatggtggtctatgtttgcctcagacacgccgaatttgaagaggcttgcgttgcgcatggttggtcaatgttgctcttcaagtggatgtgaacggaactggagcacattcgcattcgtgcataccaagcaatcaaatgcccaagttaggaaggaggacgacgatccccttcagagactatcggacctatcattctatgaaagtaacaatcagattaaaaaatggatggataatgctcggtccaatgccaacccagaactagatgaagactcaactgaaagtgatgctcccgtgcctagtccacttgtagccaacctagtggacttgactgacctgcgcagaaccacgggagcttctactattgcagagtgggctgatgtgaatatagctgacactcatattggaaaaaggaagactcgacagccaccaaaaaaacctacatccaaaagagctaagggcacaggtccacagtctcgcaatgttgatagcgatgaagagaccgaacatagcccagactaccaagagtccaatgatagtagctcaagaactgatacagatgatggagacgatggtggtgaaggaggagaaggaaccactgaagtgccttctgggggtcaccacagccctatccaattcactggtgaggccgacttcactcacgcgactcaggaccgtgatcacggtgctccaagctctcaacgaactaccgtttcaccgagtgaccaacaacaacgacaacatcttgacataccacaggatagctacagctcattcagtgcctctagcattgaaagtggctatccaaggtatgcgtataatcgtccccaaccttctgattatccccctcctacatgggtgtacgagtggcaagagccccagtggtacgctcaattgtatgctcaatggcaaacaacagcatcatggacaggtcaaagttgggaggaatacaaggcagggttgctacagtcgcatggattgatgctcatgtccacagaggagtacaacatggcatataatcagtggaacttatag

SEQ ID NO: 9326 - DNA, 1391 bp, Oryza sativa
  unsure (1)..(1391): unsure at all n locations
  Clone ID: PAT_MRT4530_15752C.1
cggacntgacagagaacgcgcgccaccggccgtggggaagcagcgcgcggcgcggcgcgggggggagagtctcctccgccaccgccagcgtgggcagtgggactacctccttgccccgctacgcgacgcggcgacgtcgccgtcggcgtcgtcacccctccgcacggtgcactgaacgtggcgcctccacttggcgcgcgacgcgacgcgacgcggcccgccttcttcttctctactgctacttaaccaccagccgcgcgcgaagtgcggcgagcgcgcaatcgaggtcgaacacttggccggcatgaagcccaggcctaccggattcggggccgcggcggcggcggcggcggaagttttggtggggggcggatgcggtggatgggcgtggaggccgaggccgaggccggcgacggtggcctccaccgcggcgatgtcggtgagggggcctggtactacccaggcggccgcggcggcgagcgccgtgcactcggagcgccaccgcggcggggtgcacgggctgcagctccctccgctgcggctgcagttcaccgccgacctggaggcgcggatcgagaaggtgatctacgcctgccgcttcatgaccttcctcgccatccggacgcgtgggatcggctccgtcccctgcttcctcaagggctgcgtctatgtgatggatgccttcatcgagtactacctgcacggtggcggcaaggtcaccctgatgctagttgaagccattgatatgtttctggttggaacggtcatgtttgtcttcgggacagggctatacgagctgttcatcagtaacatggacattgcaaagtcatcatcctatggctctaacctctttggcttgttcaggctcccggaacggcctgagtggctcgaaatccagtcagtgaatgatctcaagactaagctggggcatgtcatcgtcatggttctactggttggcatctttgagaagagcaagagggtgaccatcacatcatgtactgacctcttctgctttgcagcatcgattttcctctcttcagcttgcctctacctgctctccaggctcagtagcaagtagaaaaataggaggtagcgacacctgaatggctggagcacaaacaggtcttgtacatatgacataggcctgttgtgtttcctatgccgtgcaacacctcatgttatgtttacataatgtaaaattagaggggagtttgcacatctcacgtactctttgtatggaatggaaactactttgtatagtggagccataagacattattgtcaccatcactgtgtaccacctggtactgcaactcactgcttcgatgataaatataaatagttactgctatggcatgttatgaattgaaaaaaaaaaaaaaagggcggcc

SEQ ID NO: 9327 - DNA, 3582 bp, Oryza sativa
  Clone ID: PAT_MRT4530_15753C.1
atgccgcactcgcgctccgattcggggtcgggttcccacggccctgacccttggcgtgggagtaagggggggaggctgttaatgctagaccagcaggaggaggagaaggggtcggggatcgagggatgcttggtgccagcatctcgcgaaatgaaggggtataacattggatggggttcggacccatctcaaatgacataccggggcaacctacagaatcagtgagccagccgctgtaaggcactgaactagtaaacattatgcaatcgtaacgtcgaggtagtgtatagcggctccgttttaaaagatgcaagttcccagaacgggatccagtgtgttgtggggcctttgctgcagcagaatttgtaatggtacatgtatatgaattggcttgggcagatgtgtggcccttacccacctgaccaactgtaagatgggttatccaaaggattcttgttttgagattgtgctatgactgccgtttttggtggaaaaatcgccatcgctgtgcccgttggttcaccgaaacagtttattccacaatggagttctgagtctgtggtcggcacaggcgacgaaacattggagaatatgaaaatggccgctgttaacaaattgattcttcctgatattctttcaagtgaagaatcaagtaagatgtttgaggacgcagatggcggcatctagaggctcaactctctccctgaattaccacattcacattacactagccgtcgccatggccattcaatgctctcccattctgatggaaagatgcgtgcatgtcgacttgaatcactaatagatcgctggagtggaggcatagagcattcagaatcttcagccaatgattctggggcactgaacgctttaatggatgatgacgttgaagatatcaccaatttgctgcactctgtgattatgaaatctgcccacacagtttttatttacgtcagataaataatgcatgagagtgtaatgaaaggttgggcgcccatctgcgcacggatggtctgcaagggtgccgtcgcatgtgttctgaacgagaatcttggttactagaagactaggttaattatgggcattcgtgaaggatcctctactcgtctaaaaatcattgactcgaataaatataaagtaccggatgatccttccatgggtgtacaatcaactgcaatgcagtatgaatttgctgatatattatcggcagattgggaaacaatttataacaaatccatgaagagtttctgagatgaagtactgtatgatcctgccatggactactgtgatgcatggcttaaaagaaaaaatgagtcgaatcttctctctacagttgttcctggagcctctgataaccaaaagatgcaagacacagatgaaatgtcaccaaaggcaatttgtgattcagatgctcctgaaagtgacatggatttccctccaggatttggaccaaatcaggaatctgctgagcattcccactctgcgtgtgttgagtatgttactgaaaaaacagatgggaggtctggatcaagtatcacgttgttttctggccccttaggacgagttcaggaacgaattcgtacgcctgttcacgcaccagaaccatccagtcctcctggaatatctgtgcatgaaacgcccagtcctgctgaaatgcctcgagatgaaatttcggatatggctgaaatggctcgagatgaaatttcagatatggctgtagatacaataccctgccctgctgatatggcggcatctggaacatcaactgttcctgaagtgacaacagacaaactgatcattccttacgtggaacatcaatcgccctctgcatctcatgcaagtatatttgaaaagttggatgcacatgaagaagctgaattggatgacagttttgatgaggtgcctcctggaacagaggctggcttagcttcattggtgattatggagaaaaacaaataccagccctcaaaatcagtagactcagtgcttgacatttatagatatactagttgggcattcttcaggcaaatactgcatgagagtgtaatgaaagagtgggcatctctcttctcaggtgctctcagcaattgttttgactcatggtatgccaggaaaaatattgtggctaaaaccatggatgatacattgagacccaaagaatatacttactacaggaagaggaaactgaggaaaaactgtgaagcatcatcatcagaaaaaccaatggatgagcagctctccagacctcttcgtgatcttgttgaatgcaaggttaatatgaaaaatatccatcgatcaagcaaggctgggatttcgcagagagtttctgttgtggagaagccctccaaaaagcgtgccaaaccttcacataatgataatattaatctgaatatccagcaggacttgaaactcctttccgacaaggtgccaaagagaaacaggtcttcccatcctaccagtaagcctcttgttagtagcaaagtgcctactgaggatagaactacatcagcaatgcctgcaaagaaaagaaagcagaaaaacttggccactgagtccaacctgaagacaaaagcagtaattttatctccagaatcacatggttgtgaagcgcctactgagaaaagaactacagctataatgcctgtaaacaaaagaaagaaaaacttgtctggtgaatccaaactgaaggcaaaaccgttaacaagtccagaatcgtatgtttgtgaagctcctattgacaatagaactacatctacaatgcctgcgaagaaaagaaagcagaaaaacttgtccaatgagtccaacctgaagaaaaaaccgttggttttatgtcctgaatcatatggttgtgcaagagcttctgtgagtggatgggaatggcgtgattgggcacgcaatgccactccatcagaaagagctcaagtgagaggctaccgagtgaggagtattctctcagctccagaaaataatgtattgaaaagttcacaagttaagggctcatctgcaagaacaaaccgggttaagctacggaatctgttagcagccgctgaaggcactgacctactaaaaattatgcaatcgaagtcaaggaagaagcggctacgttttcaaaggagtaagatccatgaatggggtctggtggctcttgagtctattgatgcagaagattttgtaattgaatatgttggtgagctgatccgccgacaggtctcggacatacgcgaggatcaatacgagaaaagtggaattggaagcagttaccttttccgtttggacgatgactatgtggttgatgctactaagcgtggtgggttagcaagattcatcaaccattcttgtgatgtgccgcggatcaatgaattaggaagtaaagtttataagtcaggaggtaactgcaattgggtgctaccccagtatgtatgtgtcatgcgtgcttgtcgattgtactgggcagaagttcactgcagaaatgttcttggatttactgacaggatggttagatggactaattcgggctatccagaggaaggccaacaacattattacattgactggattgaggatatagagtttacacggtga

SEQ ID NO: 9328 - DNA, 496 bp, Oryza sativa
  Clone ID: PAT_MRT4530_15754C.1
cccacgcgtccggcaaaagaagctttgttccagcattttgaggaagtcatttcagaagagataacaaactgtttgtgcattggatttgaagatgatattaatcaagaacgaattcgtacgcctgttcacgcaccagaaccatccagtcctcctggaatatctgtgcatgaaacgcccagtcctgctgaaatgcctcgagatgaaatttcggatatggctgaaatggctcgagatgaaatttcagatatggctgtagatacaataccctgccctgctgatatggcggcatctggaacatcaactgttcctgaagtgacaacagacaaactgatcattccttacgtggaacatcaatcgccctctgcatctcatgcaagtatatttgaaaagttggatgcacatgaagaagctgaattggatgacagttttgatgaagagcctcctggaacagaagctggcttatcttcattggtgattatggagaaaaacaaatacc

SEQ ID NO: 9329 - DNA, 1102 bp, Oryza sativa
  Clone ID: PAT_MRT4530_15755C.1
gttaagggctcatctgcaagaacaaaccgggttaagctacggaatctgttagcagccgctgaaggcactgacctactaaaaattatgcaatcgaagtcaaggaagaagcggctacgttttcaaaggagtaagatccatgaatggggtctggtggctcttgagtctattgatgcagaagattttgtaattgaatatgttggtgagctgatccgccgacaggtctcggacatacgcgaggatcaatacgagaaaagtggaattggaagcagttaccttttccgtttggacgatgactatgtggttgatgctactaagcgtggtgggttagcaagattcatcaaccattcttgtgatccaaattgctatacaaaagtaattactgtcgagggccagaagaagattgtcatttatgcaaagaggcgtatatatgctggcgaggaactgacttaaaattataaatttccactgaaggaaaaaaagattccatgccattgtggttccacagaggtgccgcgggatcaatgaattagaaagtaaagtttataagtcaggaggtaactgcaattgggtgctaccccagtatgtatgtgtcatgcgtgcttgtcgattgtactgggcaaaagttcactgcagaaatgttcttggatttactgacaggatggtaattgtgtagcaaggtatgggatcgtggaacatactgtactgcaaaaagatcacaaagttgctgagctttctggcgcagaagaatttgaacacgttatttatttaggttagatggactaattcgggctatccagaggaaggtaaagcgctcaagtgtggactgatggacttgttggttgccttagtgtgtctcctgaacgaggttcatgtttacttgctgacaaggttaatactgccccttcttgtacaggccaacaacattattacattgactggattgaggatatagagtttacacggtgatttcttcccgggggtacatttgaatgaacccctggtcattttcaattttttttgaagcatctaattagctgtaaagttaaaataaaccctataacaataacaatgaccataataatatctgtcttcaccttttgag

SEQ ID NO: 9330 - DNA, 385 bp, Oryza sativa
  Clone ID: PAT_MRT4530_15756C.1
ctcagaagcaatacacttctgaaaagggggaacaatagcaagactgagtacaactaccgtactcagcaagccacaccaacgatgcagacgtgcaaggggatacaaggacgggtttcacccccactcctcgcaaggcagcgggcagtcccctctcgtgccacggtgaatccggaagccgatcaaccggacaccccggccgacccaactccatcacgcccacccttgcctcgtgtcgagggaagatcctcaatagcggggaattttctgggagtcgtcccctcatctcagtgggcagggtcctccttttatagcttaaagggataccacatgtgccccgctttacctacccttcataagggggaccccacttcactttttgggcttt

SEQ ID NO: 9331 - DNA, 167 bp, Oryza sativa
  Clone ID: PAT_MRT4530_15757C.1
tgtttgggacgagcaggcctcagaactccattcgcttgatggaagcaactatggaggcgctggcgtcaacggtgctggtagaggcaacagcattggaggaggcgagaacaacatcaacggaggcaacaacaccaacaatgtcttatgttttaccggagcgttctcgg

SEQ ID NO: 9332 - DNA, 225 bp, Oryza sativa
  Clone ID: PAT_MRT4530_15758C.1
atgccaaccaagacttcccaccaggttttcctatttggggacaattccagatatgcaagacgcatatgcatgcaatgcttaggtgtagtgaggtggtgtgtgcttattgcaaataggttaacccttagtttatacaaactacatttttcacaaaggaaagaaatgggaatgttggtgaattttcaagtcaagccatttatatttataagccaaaaacctttgatt

SEQ ID NO: 9333 - DNA, 2112 bp, Oryza sativa
  Clone ID: PAT_MRT4530_15759C.1
atggtgcacggcgacagccgccattctcaccgccgcggtggtgcaagcggcggcgacccctggatagccagcgacgttgtggtgccgccaggcactgtgtcttctggcggcgacttcgaccatgcggcgggcgagacgggccaccgcgggcgaccggcgcttgctgacgatgcgggggcgtccgcctctagggctgctgccggtgccagtgacggcagcggccttgccggggacaacgccgacgaggtcatggagggcgccgccgtcactgccaccggtgacgacgatgaggccgatggtggctccggggcgctgttcttcggggccagccgcaagtacccggagcaatcgtgcttcatcgacgcctcgacggtgacggcgaaggacatcaacgagttggttgccaccggaaagattccggcggccgatcgggcaaggcgacctccggctgacgaggcgacccgcacccagagcccaacgagtccattatttacggtgctttcttcaccgccggccttggtcttccggtcatcccgctcgtcgcgggggtgttggagtactacggcctcgagcttccccaactcacggccaatgccgtcgtccgcttggccatctatgaaccttgacaaccaacaccaatcgcttcggagggtggcggcgcggcttagcatgcgcggcataatggaggagtttctgatgctccgcgtcatcctgctccgggaaggctgggttcattcccttacctctggcgacgacaacactgccggggcttacgaaggcccgatttcttccacaaccatgctgacgccggtctccacggccatctcggacgccgagaagctccttggcaagcccgttctgaaggagaaacaagagcagatggagcagatcggagcttgggagagggccattcgagtggcggcccggttcaaccttcggcttctggctctaccctccctgcatgaggccgaggaagtggaggttgccaaagccagagctacactccacagccaatgtgggcaccggcgcggcagccgatgggatctcctcaacctccgctggccaggaccgtggttcggtcgtgttcgtcacgacttaagagggctccggggaatctgcctggactatcgcgctcccaggttcgggggctcgctcgcgggcccggaagcggaagagacttcgacgcacaccacggttattgcgccatccgcttctggggccgagccggagctgcacctcggggccgcggctgctccagagaaaccggaggctgccattcaccccgccgctgctccggagacctcgagcggtcgagcgggtctagtggccgacccttcctctacgcgagacacacacgccggagcagacgcggtcatggtggccggagctgcggccgttgagcacgggggccgggacactacggatcttcacacggagtggctccgggtctgggacctacaagagcaggctgctgctactctcgccgaggcggaggcagccagggactcgtctcggttggcagtggcccgcgccgattctgcgcggcgacaggcggagctcgacctcacgctggttcatgcagagctggcccgggagcgcgaccgcgcggcgagattgtccgacgagctagccgccacgaaggcggccctggcctctcgcgaggaggaggtccaggcttcccagggtcgctttgagcaggctcggctcatcctggaggagcttaacgttcgtgccatttatgccgcccaggccctcgtgcgtgccttcggcagcattggggttcaaggtccgtccccgcctccggaggacagctccgtcgcagagaagctccagtgggttgagaaggcgggcaagtttgtggcgaaggcgtcagccggccacggaatatggtgctcttgggccaccacccgtatgcttcccctgctcctgcggggcaagggctgcgcgcacattggtccctccgcgcgagcggctccgagtgaagtcaccgccttgcttgcctcggcctccggagtgaactcgtccaggagggacgcggacgacttcactcaaacggtttggcctgctctcggccatgatgcggcggtgccagctatggattcggtgacgtag

SEQ ID NO: 9334 - DNA, 162 bp, Oryza sativa
  Clone ID: PAT_MRT4530_1575C.1
gtttagaatcaatagtctttatttatttagaataaagaagataggggcagaccaggtttggcagagttctctctttgattctgcaatttgctgttagtctatatggacaagtttgacatgtgttgttacagttccagtggtcaacaaacaattaggttaggt

SEQ ID NO: 9335 - DNA, 569 bp, Oryza sativa
  Clone ID: PAT_MRT4530_15760C.1
ggccgcttttttttttttttttttattaacatgaacaccccagcaaggatacatcatacaagcatttggaaggggcatatatggcctgctttggtcattgttgtgtcactgcgacatgagtcgcaatgcaattcctcatgtatcacacaactcacaatgcacaagttccatctgctacatcaaccttccctagattcaatgctattgtacattacatcgggtgaacgtaacagttatgccgtgtcaccaccacaagcattatagctcagcttacagaagatttatggtacagatgagctgaaggcattctgctttatatgggaatgtccttgcgcctgctttctccaggcttgggttcttcacgtacatattgggaggggtagagtcagcatgatcatgtactcatgttgtatttctgaaaaatggatggtctagagcttcttgggcagtaagacgctctgatggctcaaattttaaaagcccatataacaagtctgccagcaccgcccttgaatgatcagccttcctcgccactaagtcctttagccgatctagttttttgactgctc

SEQ ID NO: 9336 - DNA, 417 bp, Oryza sativa
  unsure (1)..(417): unsure at all n locations
  Clone ID: PAT_MRT4530_15761C.1
natcccngcnttntcgggantcgncccgnggggggccttaancccnaaatacccgtcnccctgttcttnacncttngggttttgnacnggccgatactnggtttaacngtcnactngagggnctatncatccccggactggactggtngggttttccnnaggccccncgntatagttntggnggcctcaaaagtccaatgctcgatnccnggtttntgggcaatnagcgttgattncgtaaaggggnctagcnggtgggggnctttttgctngtgggtgttcanagttggganatgcccggtttgnttntccncgncnatnttttnattnttngnttgagcgnccgcnaatncaagcctgcccttgtncccctccaaaaaaaaaaaaaannaaaaaaaaaaaaaaaaaaaaaaaaaa

SEQ ID NO: 9337 - DNA, 1422 bp, Oryza sativa
  Clone ID: PAT_MRT4530_15762C.1
ttttttttttttaggtcaagaattttgcacagcactgtaatatatttacttcgatgaatcagagacccgtcgtacacattttgggccagaaacacagcagatgtcagttaatactagatggcatatatacagttgacattggagggagaagaataagtgtaggtacacaaaattgcctctgtggttttttatggcagacttggaggggaaagtgatggtttggtcacttttagctctccgcaatcactgatataaacagtttttagcgggcgatcccacaacgctcgagcagtttgagctctttcatcaccaatcaactgggcaaaatcattgaagaagcggatcctttcagctggtttataggtaggaatagttgcaatgctggttataacattcattccttccaatacagttccaaagacaatgttctgtccatcaagctctgggcagggccctggtccagtggtaaccaagaattcaacattgtgataattaggattgagcttgatgtcatcatcgtcatcgttctgtccaaggcacaatgagagggtgccaggccttgcatgctttagttcaaatgctttagggtcaatagtctcagcattcctcacaagtccggtgggaggttggacctcgcccctgtcacgccgaggaccttggcggccagcaacgaagaactggccctgaaggagcttgtggacaagtgttccccggtatgcagcagaagtgcaagcagctttgaagttggcagtagtgagggggaggagtcgaccatacaaaccaaaaattacacgaccaagaggttcagaatcaggacatgtagcaagctcagctcctaaagtgcggtcagagcgaaagtagctagggcagacactgaagtccatgaagatccgatctgtgatggtggtatcaatggcagaggtggatggaatgtttgcgtcatctaaggcaggggatgatgaagcgtatagaagagaagggaggacagggaggaagatgagagaccgtctagaaattctagaggattcaataggtttatgagtattatcatggtttgttttcgagggaagaaaaaaagcatggtggttgttggggtggtggtggaggctgctcagggaaacagggtaagccatggaagaagtggccctggtatttgatgaaggcaacaccatactgttgctaactgaattcttcagttcttgtccttctgacgaaacagcagtagaaaatcactaatatccttcccaggatcccctcctcccctccgctgctctgcttgccagatggagatcgccgcccggccctccgctcgtcttggcggcggcgcaaggagcggaggagaacgagaacgagacgggagatttcttcttttacgccgcgatactcgattactccgcccttatctcaatatccccctcgtgc

SEQ ID NO: 9338 - DNA, 688 bp, Oryza sativa
  Clone ID: PAT_MRT4530_15763C.1
ggattgcagagttggagttagaaaaaggtgggcaactttaagattcagctttcgatggcaaaggagatcctcaaccgcattaagattgccagagattgtagacctctcactgttggggaggaatggttgagaatgaaattgaatctgcactgccttggcctggcatctcttgagcgtactattgctaggtcaagatctcagataacttttcttagtgaaggggacgccaacaactcttattttcttaatcagtcctgctactgtaagaaaaaaaagaatcatttctaagttaatggtggatgatcgggttgtcacttctcaggaagaaaaacatgaggtagtttttgagttctacgagcatattctaaagtcagcacgtgatagggatttcttgttggatctcccggattttgacgataaaaagtttgatattgatgccttgatgagccattcttcgacgatgagatatggtctactgttaaggcttttcacctcgacgaagcttatggtctcgatggttttacgggttgtttctacaaggtgtttgggagattatcaggtgatattctcttggcgcttgcagcgattcaacaaaggcatatttcttaattcaaattgttcaattaagcctatatcactcttttgtctgaaaaggtggatgccaaacaaaaaaaaaaccaaagacaag

SEQ ID NO: 9339 - DNA, 1128 bp, Oryza sativa
  Clone ID: PAT_MRT4530_15764C.1
atgtcgctgccggcgcggctgctgctcgcgcgggggaagaccacggcggcgcagcacgtggcggcgcggcacctggaccacaccttcgagaagctcgcggcggcgcacctgccgctcgtcgcggcggcgccgctggtggacgccctgcgcgcgtcgcccgccgagcctctcgcgctcccgggcctcgcccgccgcctcccgctccgcctccaccggcggggcgcgctccacttcctccgcctcttcccgcgggtgttcgacctccgcgccccgctcccgctctccctctcgctcaccgcgcccgccgccgagctcctcgccgtcgccgcatcccccgcggcggcggctcatgccctccaccgcctcctcgcgatgtccgcctcccgctccctcccactccgcgccgtcttccgcgtctggcgcgagctcgctctccccgacgacttcgaggtctccgtcgtcgccgaccaccccaacctgttccacctcgctcccaaccccgccgagcccaacacccacatcctacacctcgtcgccgatccggcgaccgaggagttcactccggcggtcgacaagacacggccggagaaacacgccttcaagctgcagttcccgccgggattcaggctgaccaaggaataccgtaagaaggtgaaggagtggcagcagctaccatacatctcaccatacgaggtatcaattcagaagggtgtgggaagcaagagggtgtctaagatggcgaggaagaagatggagaagagggcggtggggatcgcgcacgagttcctcagcctgaccgtggagaaaatggtggaggtggagaaattcagccagttcaggaaatggttcgggatcgaggtcaatgtccgggacgtgttcttggatcacccggggatattttacctctcggcgaaggggaagcggcacacggtgttcttgcgtgaggcgtatgatcgtggcaagctcattgagccgaatgatgtgtcggaggcgaggaggaagcttgttgagctcatgctcctccgtcgtcgtgggcttgggaatgccaattcaaatgctaacatggcttcacgtgcctgtgctggtgctaaagaagacacaagtgatttccaggaggaagagatttga

SEQ ID NO: 9340 - DNA, 153 bp, Oryza sativa
  Clone ID: PAT_MRT4530_15765C.1
tttgggggtttttaagattatacgtttttatcactattaattaacataaaccaactcttggacacagaataagccgaatgaaaagttcaacaatttacaaaaacacgtccaaagctgcgaaaccacttaacagaatgcaacccactggccaag

SEQ ID NO: 9341 - DNA, 140 bp, Oryza sativa
  Clone ID: PAT_MRT4530_15766C.1
gttcaggaaacagtccagaacggacaaaagcacatttagtgctttatcaccagctgttttgtttcaaaacattctatttttatttttgttggatactatttgtgcatgcacacaggacggttgatttactagttatgagg

SEQ ID NO: 9342 - DNA, 2836 bp, Oryza sativa
  Clone ID: PAT_MRT4530_15767C.1
atggccggatgcaggacggcggacggcacggggcaccctcctccccttcccctacggtatggtgacgttcgtggccgagtagcagggaccgacggcgagcgcatcaccagctgccttacattggggccgtccaactccggcgatgttgcggtgaaggacatgtggtgggtcccgtgccacgtcaacgccgcatctggtggtctccaagtagaacttggaggtaagttcatcgccctggaggcctggacccggtcgtccttctatgagccagtgatgaactggatcaccggaaggcggaagcaactcgagctagacccacaaacaaaagccatctttgtagaagacctctccgagctctccaccaatatctctggcccgtggttactttttggtgatttcaatcttactcgctacccctatgataaaaacaactcaaacttcgacctccacttagcaaacctcttcaacgaaaaaaatgacgatcttgcgctcttagaaatcccgctcttcgattggctctttacttggtccagtaaaagagaaatccccaccctttctagaatcgatcgtgccttcataaaccaagcttggaacctatctcacccaaacacctccctctcctccctacctcgcactacctctgaccacgtccccctaaaaatatccatttccacttcaatacccaaaactcaagttttccgtttcgacaatcaccttctctgctccccaaatttcctccccactatcctttgggcctgggtgggccaactacccactcaccaccccacagacgcggctggcaaccttgttgctaacctgaagaaatcacgtttcgccaccaagaattggatcaaagctcacaagttgaccaacgacaacatttctgactgttctttgctcatcgacttcctggactctattgaagaagctaggcccctctcgactgcggaattcaccctacgggacctcgttcaagacaagttagctgatctccatcgatgcaaagcaatctactggaagcaacgcagcaagatcaagagaatcaaagcctctgacgagaacaccaaatttttccatgcacacgcgtcacacaggttcagaaacaatggcatccactccctcctgctacaaggttcgcaggttttcgaccacgacaccaaggcagatgcgctttacgagttcttctacgaaactctgggcggctcagcaaacaccacctgggattttcatctccaagatctctaccctgagaatacagtccacaatgcgagctagcagcagatctcggaacctttcactcttcaagaagcaaagtctgcatggactgcatggataattacaatgccccaggtccagatggttttggtccaagcttctataaggcagcatggcagcaaatcaagccctacatacagaacttgttgactgaatttcacaaccactctgcccagcttgaaagacttaacagagcatacatagtcctcattcacaaacccggtaaactaaactccccatattgttatagacccatctcactgcaaaactgccatctcaaactactgtcgaaagtccttgctaactgcctacaatccgttcttggcagtctcatagactgggagcaaacaggctttatgaaaaggagaagcatctcgaaacttttctatatgcaacagaaattctccagtgttgtcacaaatgtaagctgcctacggctgtcttgaaattggattttgcaaaagcttttgactcagtgcaatggtcaagcctccaagctattctgagagctagaaatttccctaattgatggcagaagtggatccaagctctgctaatttcaagcaagtcagctgtcttgctaaatggcatccctggaagatggataaactgcactcaaggtctccgtcaaggcgacccactctcaccctacctgttcattctggttgctgatatcttgcagtagatgatcaagaattgcagtgctatcaagcacccaataattcacaacctgctaggagccaccctacaatatgcagatgatacacttattatctgcccagcagaagcctcccagctaagtgctctaaaaacaattctcaactcctttgcacaggccacgggtctctgaataaacttcagcaaaagtaccctagtcacccttcacactccaccagaagccagcaaagaattagcagacatcctccagtgcaagctagaatcttttcctcaaacttatctggggttgccactatcagctactaagctacccctcactgcctttcaaccactcatagcaaaagttaacaaatacctagcggggtggcaggcctctctcttaaactatgcaggcagggcggtcttggtgaactcagtgctagactttctaccgacctatgcaatggccgtcgggctttcctatggactggggaggaatcatgtcacggctcgaaatgcttcattgcatgggacttaatctgcatagacaaaaagcaaggtggccttggaatcaaacgccttcacacacaaaacatctgccttctcatcaagatgctttacagactgtacacctagaattcaccctggacaaattggatatggagggagcatgctgattcagccctgggcccccactggcgatccttgattgccctgtttccacttctcagatctcaaactaatttggttgtccgagatggcaggcgcaacaatttctggcacgacatttggctggatgatcagcctcttgcctcaagattccaagctctctacacacactctactaagtcaaactgcacagtgcaagccattatccaaaatggcctgctgccacccttgtccc

SEQ ID NO: 9343 - DNA, 144 bp, Oryza sativa
  Clone ID: PAT_MRT4530_15768C.1
atggagctcccttggggtgtgaaagctgaaaggaagaggaaacaaatttgtatttgtgaattggcagggaccagcagactatgcgcagttgatccttaccaggagtacaatagagtcgaagccggcacggagatgctcagataa

SEQ ID NO: 9344 - DNA, 1018 bp, Oryza sativa
  Clone ID: PAT_MRT4530_15769C.1
atggtggggaggggaatcgatccacggatcgacccgctcgcaccgggaagtccgcttgtccccgtgggatctgaccggaatccgtacgtcgatttatacggcatgacaacgaaacgacgccgccaaacatcaggtactacgtacgcgctgtgtgtgtcatctgcgggacgccgtcgttacatgatcaatgccattattatttcttccatttgcgtccgcactccctgccgcgcagcagccagagtgtttgtgttgcccggcatgcagtcatccattatccaatccgtggttaactgcccggcggcggtacaacaaaaccgttgtcatagccagctagccacttactactacgccagtcatttactccactggtacgtgccatagctgctacgcctgcactgcgatgcaaagagatcccatctccatcgatcgatcaggccaagccaagccagcccgggccctcgcggttgcgtcgcatgcgctagctgcttctgctttaatcgatcgagatccctctccaaatccaattataccaggagtagtagtaggaggaggagtatatactttgtacagtacaatgttggacgctgcagatacacggccgccaccacccttccctccaaaatcgttgctgatgtccactaatgccccgtcaccaatagagcatgccgacgatcaagctcccaacggtacagatcaagacagaactatgtgggcgtgctcctacccaagtagaccaagaaaaagcatgccgggtccaatgaggatgagctcatttgcgatagatccgcttggcatcggtgatagatctactcagaccacatacagagcttgccagagccgtagcttctccaatgtgtatgcgccttttgcaggcatgagcgtcccaagaaaggcacacacggttctagctgagctagcggtgaaattccaatgtggcctaacaaggacactcgctcgccacgttgttgtgttacacaggacatacaaggatcccttcaatgccattactactgta

SEQ ID NO: 9345 - DNA, 404 bp, Oryza sativa
  Clone ID: PAT_MRT4530_15770C.1
cgatactatggagtactcacccaggtacataacggggctactgcaggggctcatgaggcggatcccgcgaagaccacgagagcacaggcgcacaccaggagagaaaggattatggcgggcgacgatgcgcatggcgaagcacataaggaaggcgcttcgacagctaccgaggacagccgagcaaggagaggggaatggatggggaaagtctggatgcgaggtgcaacaagatggacatgagccaattgttacaaggagcgaagcattatatagaaggacgctgagttatgcgggacgctgaccagctgaatccagcaagatgcataaataatacaacgaaaaggtacacactgacacgtgaagtgcacccaggctagcaattgccctactacaacgatggaaaa

SEQ ID NO: 9346 - DNA, 326 bp, Oryza sativa
  Clone ID: PAT_MRT4530_15771C.1
tcgggaataacagcactggctatggccgcttcatgaaatataagtgcgacccgccggtgctcatgtcacatatgatgatatctgagcttatttttaacttccgaaccactatactgttaaaactcattacgggacacctccaagggtggaaagggtcctgggtgcaatgacctacatcgggagggccgcgcattgagttttaacagtttagtggttcggaagttaaaaataagctcagatttcatcatatgtgacatgtgaaacttggggggaaataaattgaaaaaaagttggcttgcatattccaaagctgatatttccggacg

SEQ ID NO: 9347 - DNA, 5910 bp, Oryza sativa
  Clone ID: PAT_MRT4530_15772C.1
catcagacgattaatccacgacgaccaggagcgctgccccgagccacacgcccacacgcactgccctcttgcacacgccattggccacagtccaaggactgctcctgttccgatggaggaggtggaagccggttggctggagggcgggatcaggtggctggcggagaccatcctggataacctggacgccgacaagctggatgaatggattcgccagattaggctcgccgctgacaccgagaagctacgggctgagatcgagaaggtggatggggtggtggctgccgtgaaggggagggcgatcgggaacaggtcgctggcccgatcgctcggccgtctcagggggttgctgtacgacgccgacgatgcggtcgacgagctcgactacttcaggctccagcagcaggtcgagggaggagttactacacggtttgaggctgaagagacggtcggagatggagcagaggacgaggacgatattccgatggacaatactgatgtaccggaggcagtggcggcaggcagcagcaagaaacggtccaaggcatgggaacactttactaccgtagagttcactgctgacgggaaggattctaaagcacggtgcaagtactgccacaaggacctatgttgcacatctaagaacgggacatcagctttgcgcaaccatctcaatgtttgcaagaggaaacgtgtaacaagtactgaccaaccggtaaatccatcaagtgccggtgagggtgcatcaaatgcaactggtaattcagttggcagaaaaaggatgagaatggatgggacttcaacacaccacgaggcagttagcacgcacccttggaacaaggctgaactttccaacaggatccaatgcatgactcatcagttagaagaggctgtaaatgaggttatgaggctatgtcgatcctcaagttcaaaccagagtcgacagggtacaccaccggccacaaatgcaacaacatcgtcttatcttccggagcccatagtgtatgggagggctgcagagatggaaaccatcaaacagctgatcatgagcaatagatctaatggcataaccgtcctgccaattgtaggcaatggagggataggaaaaaccactttggcgcaactggtctgcaaagatctggtaattaaaagtcagtttaatgttaagatatgggtgtatgtatctgataaatttgatgtagttaagattacaaggcagattttggatcatgtctccaaccagagccacgaaggaataagcaaccttgatacgcttcagcaggatcttgaggaacaaatgaaatctaagaagttcctcattgtcttagatgatgtgtgggaaatccgtacagatgactggaaaaaactactggctcctttaagacctaatgatcaggtgaattcatcacaggaagaggcaacaggtaatatgataattttgacaactcgtatacagagtattgccaaaagtcttggaacagtacaatcaattaagttagaagctctgaaagatgacgatatatggtcactatttaaagtgcatgcttttggtaatgataaacatgatagtagtccaggcttacaggttcttgggaagcaaattgctagcgagctaaaaggcaacccactggcagcaaaaactgtgggttcactattaggaacgaatcttaccatcgatcattgggatagcattataaagagtgaagaatggaaatccctgcaacaagcttatggcatcatgcaagcgctgaagttgagctatgatcatctatccaaccccttacagcaatgcgtctcttattgttctcttttccccaagggttattctttcagcaaagcacaactaatacaaatatggattgctcaaggatttgtggaagaatccagtgagaagttggagcagaaaggatggaaatatctagctgagttggtaaattcgggtttccttcagcaagttgaaagcacacggttttcatcagaatattttgttatgcacgatcttatgcatgatttagcgcaaaaggtttcacaaacagaatatgcaactatagatggctcagagtgcacagagttagccccaagtatacgccatttgtcaatagtaactgattctgcataccgcaaggagaaatatagaaacatatctcgtaatgaggtgtttgagaaaaggttgatgaaagttaagtcaaggagtaagttgaggtcactggtattaattgggcaatatgattctcatttttttaaatatttcaaagatgctttcaaggaagcacaacatctgcgactgctgcagatcactgcaacttatgctgattctgattcatttctctccagtttggtaaattctacacatctccggtatctgaaaattgtgaccgaagaatccggcagaactttgccccgatctctaaggaagtattaccatcttcaagtactagatattggctatagatttggaattccccgtatatctaatgatataaataatcttctcagcctgcggcatcttgttgcatatgatgaagtgtgttcttccattgctaacattggtaaaatgacctcacttcaggaactaggcaattttattgttcagaataatttaagtggttttgaggtgacacaattgaaatccatgaacaagcttgtacaacttagtgtgtctcagcttgaaaatgttagaactcaggaggaggcatgtggggcaaaactgaaagacaaacaacacttagaaaagctacatttgtcctggaaggatgcatggaatggatatgacagtgacgaaagctatgaagatgaatacggcagtgatatgaatatagaaacagaaggggaggaactgtcagttggtgatgccaatggtgcccaaagcttacaacatcacagtaatataagctctgaacttgcttcaagtgaggtgctcgaaggtcttgaaccacatcacggcctcaagtatctacggatatctgggtataatggatctacctccccaacttggcttccttcttcacttacctgtctgcaaacacttcatctagaaaaatgtggaaaatggcaaatacttcctttagaaaggctagggttacttgtaaagctcgtgttgatcaaaatgaggaatgcaacagaactctcaatcccttcactggaggagcttgtgttaattgcattgccaagcttgaacacatgctcctgcacttccatcaggaacttgaactccagtttaaaggttctgaaaattaagaattgccctgtactgaaggtatttcccttgtttgagatttcccagaaatttgaaatcgagcggacgtcgtcatggttgccccatcttagcaagcttaccatctataattgtcctctttcctgtgtgcacagttctctgccaccttccgcaatcagtggttatggagaatatggaaggtgtacccttccgcaatcacttgaggaactttacatccatgagtattctcaagaaactctgcagccctgcttttcagggaacctcactctcctgagaaaattacatgtactgggaaactcaaatttagtgtctctgcagctccattcctgcacagcactcgaagagttgataattcaaagctgtgagtctcttagttctctggatggcttgcaattgcttggcaatctcaggttgctgcgggcacatagatgcctcagtggtcatggagaagatggaaggtgtatccttccgcaatcacttgaggaactttacatccatgagtattctcaagaaactctgcagccctgcttttcagggaacctcactctcctgagaaaattacatgtactgggaaactcaaatttagtgtctctgcagctccattcctgcacagcactcgaagagttgataattcaaagctgtgagtctcttagttctctggatggcttgcaattgcttggcaatctcaggttgctgcgggcacatagatgcctcagtggtcatggagaagatggaaggtgtatccttccgcaatcacttgaggaactttacatccatgagtattctcaagaaactctgcagccctgcttttcagggaacctcactctcctgagaaaattacatgtactgggaaactcaaatttcgtgtctctgcagctccattcctgcacagcactcgaagagttgataattcaaagctgtgagtctcttagttctctggatggcttgcaattgcttggcaatctcaggttgctgcaggcacatagatgcctcagtggtcatggagaagatggaaggtgtatccttccgcaatcacttgaggaactttacatccatgagtattctcaagaaactctgcagccctgcttttcagggaacctcactctcctgagaaaattacatgtacttggaaactcaaatttagtgtctctgcagctccattcctgcacagcactcgaagagttgataattcaaagctgtgagtctcttagttctctggatggcttgcaattgcttggcaatctcaggttgctgcaggcacatagatgcctcagtggtcatggagaagatggaaggtgtatccttccgcaatcacttgaggaactttacatccatgagtattctcaagaaactctgcagccctgcttttcagggaacctcactctcctgagaaaattacatgtactgggaaactcaaatttagtgtctctgcagctccattcctgcacatcactcgaagagttgaaaattcaaagctgtgagtctcttagttctctggatggcttgcaattgcttggcaatctcaggttgctgcaggcacatagatgcctcagtggtcatggagaagatggaaggtgtatccttccgcaatcacttgaggaacttttcatcagtgagtattctctagaaactctgcagccctgcttcctgacgaatctcacctgcttaaaacaattagaggtatcaggcaccacaagtttaaaatctctagaactgcaatcatgcactgcactcgaacatttgaagattcaaggttgtgcgtcgcttgctacattggaggggttgcaattcctccacgccctcaggcatatgaaagtattcagatgccctggcttgcctccatatttggggagttcgtcagagcagggctatgagctatgcccacgactggaaaggctcgacatcgatgacccctctatccttaccacgtcgttctgcaagcacctcacctccctccaacgcctagagcttaactattgcggaagtgaagtggcaagactaacggatgagcaagagagagcgcttcagctcctcacgtccctgcaagagctccggtttaagtattgctacaatctcatagatcttcctgcggggctccacagccttccctccctcaagaggttggagatccggagttgcaggagcatcgcgaggctgccggagaagggcctcccaccttcgttcgaagaactggatatcatcgcttgcagtaatgagctagctcagcagtgcagaactctagcaagcactctgaaggtcaaaattaatgggggatatgtgaactgattactcggtggcttgttaggcgcacctttttccacctgcccaactggcatgggctcgttcaggcgttcaagctgctgtaaattccattgccgcaatgacgaccttcagaaccgttacacaatacaaaggacatatgatggctagatcaactgtcgcagagctagctttggttcacctgaaaacataaggccaaacgcgtggttcttttaatcagaagtatcaaaaattggttttggtttttaacgaaaagatgttagaaattggttttaatgtgccagattctgtaccagaattctgtattttgctccgtaattctgtgctacgactgatgttgtatttaactgatagcaatcgaccggcaaaaccaatccgctccaatgcattgtcac

SEQ ID NO: 9348 - DNA, 1044 bp, Oryza sativa
  Clone ID: PAT_MRT4530_15773C.1
atggcgtggccattcttgcagaggaggggcatggacacgctgaagagcctcatcaccaactcggcggcggacgtgtacctgtcgcagatgccggagaggttcgccgtcgccgacctcgggtgctcgtcggggccgaacgcgctgtgcctggcggaggacatcatcgggagcatcggccgcatctgctgccggtcgtcgcggccgccgccggagttctcggtgctcctcaacgacctcccgaccaacgacttcaacaccatcttcttcagcctgccggagttcaccgaccgtctcaaggccgccgccaagtccgacgagtggggccgccccatggtgttcctctccggcgtcccgggctccttctacggcaggctcttcccggccaagagcgttcacttcgtctgctcctgctccagcctgcactggctctcccaggttccttctgggcttcttgacgagatgaacaggccgatcaacaagggaaagatgtacatatcaagcacgagccccctggccgtgccagtggcctacctgaggcagtttcagagagacttcagcctgttcctcaagtcgcgcgcggcggaggtcttctccggcggccggatggtcctcgccatgctcggcaggcaggccgacggctatatcgacaggcgtaccaccttcctctgggagctcctctcggagtcgttcgcctccctggtcgcacaggggctggtcgaggaggacaaggtggacgcgtacaacgtgccgttctacgcgccgtcgataggggagatcgaggaggaggtgaggcgggagggatcgttcaggatggactacgtgcagacgtacgagatcaacctgagcagcagcggcgacgcgaggagggacggcaggacggtgtcgatggcgatcagggccatccaggagtccatgctcagccaccacttcggcccggagatcgtcgacgcgctcttcgccaagtacaccgagctcgtcaccgcgtccatggagagggaggaggtgaagagcgtccagattggggtcgtcctcaccaggttgtga

SEQ ID NO: 9349 - DNA, 5658 bp, Oryza sativa
  Clone ID: PAT_MRT4530_15774C.1
atggaggaggtggaagccggttggctggagggcgggatcaggtggctggcggagaccatcctggataacctggacgccgacaagctggatgaatggattcgccagattaggctcgccgctgacaccgagaagctacgggctgagatcgagaaggtggatggggtggtggctgccgtgaaggggagggcgatcgggaacaggtcgctggcccgatcgctcggccgtctcagggggttgctgtacgacgccgacgatgcggtcgacgagctcgactacttcaggctccagcagcaggtcgagggaggagttactacacggtttgaggctgaagagacggtcggagatggagcagaggacgaggacgatattccgatggacaatactgatgtaccggaggcagtggcggcaggcagcagcaagaaacggtccaaggcatgggaacactttactaccgtagagttcactgctgacgggaaggattctaaagcacggtgcaagtactgccacaaggacctatgttgcacatctaagaacgggacatcagctttgcgcaaccatctcaatgtttgcaagaggaaacgtgtaacaagtactgaccaaccggtaaatccatcaagattgcgttatattgctgacctttctaatcgcctaaccacgatcacatgctcttccagtgccggtgagggtgcatcaaatgcaactggtaattcagttggcagaaaaaggatgagaatggatgggacttcaacacaccacgaggcagttagcacgcacccttggaacaaggctgaactttccaacaggatccaatgcatgactcatcagttagaagaggctgtaaatgaggttatgaggctatgtcgatcctcaagttcaaaccagagtcgacagggtacaccaccggccacaaatgcaacaacatcgtcttatcttccggagcccatagtgtatgggagggctgcagagatggaaaccatcaaacagctgatcatgagcaatagatctaatggcataaccgtcctgccaattgtaggcaatggagggataggaaaaaccactttggcgcaactggtctgcaaagatctggtaattaaaagtcagtttaatgttaagatatgggtgtatgtatctgataaatttgatgtagttaagattacaaggcagattttggatcatgtctccaaccagagccacgaaggaataagcaaccttgatacgcttcagcaggatcttgaggaacaaatgaaatctaagaagttcctcattgtcttagatgatgtgtgggaaatccgtacagatgactggaaaaaactactggctcctttaagacctaatgatcaggtgaattcgtcacaggaagaggcaacaggtaatatgataattttgacaactcgtatacagagtattgccaaaagtcttggaacagtacaatcaattaagttagaagctctgaaagatgacgatatatggtcactatttaaagtgcatgcttttggtaatgataaacatgatagtagtccaggcttacaggttcttgggaagcaaattgctagcgagctaaaaggcaacccactggcagcaaaaactgtgggttcactattaggaacgaatcttaccatcgatcattgggatagcattataaagagtgaagaatggaaatccctgcaacaagcttatggcatcatgcaagcgctgaagttgtgctatgatcatctatccaaccccttacagcaatgcgtctcttattgttctcttttccccaagggttattctttcagcaaagcacaactaatacaaatatggattgctcaaggatttgtggaagaatccagtgagaagttggagcagaaaggatggaaatatctagctgagttggtaaattcgggtttccttcagcaagttgaaagcacacggttttcatcagaatattttgttgtgcacgatcttatgcatgatttagcgcaaaaggtttcacaaacagaatatgcaactatagatggctcagagtgcacagagttagccccaagtatacgccatttgtcaatagtaactgattctgcataccgcaaggagaaatatagaaacatatctcgtaatgaggtgtttgagaaaaggttgatgaaagttaagtcaaggagtaagttgaggtcactggtattaattgggcaatatgattctcatttttttaaatatttcaaagatgctttcaaggaagcacaacatctgcgactgctgcagatcactgcaacttatgctgattctgattcatttctctccagtttggtaaattctacacatctccggtatctgaaaattgtgactgaagaatccggcagaactttgccccgatctctaaggaagtattaccatcttcaagtactagatattggctatagatttggaattccccgtatatctaatgatataaataatcttctcagcctgcggcatcttgttgcatatgatgaagtgtgttcttccattgctaacattggtaaaatgacctcacttcaggaactaggcaattttattgttcagaataatttaagtggttttgaggtgacacaattgaaatccatgaacaagcttgtacaacttagtgtgtctcaacttgaaaatgttagaactcaggaggaggcatgtggggcaaaactgaaagacaaacaacacttagaaaagctacatttgtcctggaaggatgcatggaatggatatgacagtgacgaaagctatgaagatgaatacggcagtgatatgaatatagaaacagaaggggaggaactgtcagttggtgatgccaatggtgcccaaagcttacaacatcacagtaatataagctctgaacttgcttcaagtgaggtgctcgaaggtcttgaaccacatcacggcctcaagtatctacggatatctgggtataatggatctacctccccaacttggcttccttcttcacttacctgtctgcaaacacttcatctagaaaaatgtggaaaatggcaaatacttcctttagaaaggctagggttacttgtaaagctcgtgttgatcaaaatgaggaatgcaacagaactctcaatcccttcactggaggagcttgtgttaattgcattgccaagcttgaacacatgctcctgcacttccatcaggaacttgaactccagtttaaaggttctgaaaattaagaattgccctgtactgaaggtatttcccttgtttgagatttgccagaaatttgaaatcgagcggacgtcgtcatggttgccccatcttagcaagcttaccatctataattgtcctctttcctgtgtgcacagttctctgccaccttcatctattgtttccaaattatcgatcggtaaagtttcaacacttccaacggtgagggggtcatctagtggaacattaataattggactgcaccccgatgaagttgatgatgatgatggtttggaggattctgatcagctgaaaacgttggatgacaaagtactattattccataacctgaggttcctaactagcttggcaatatatggttgtcgaaatcttgcgactatttcaattgaaagtttaaggcaactcgtttgtttgaagagtttggaattatacggctgcccaaaacttttctcttcagatgttccaccagagcttacatgtgaatatatgtcaggagcaaatcacagcgccctcccatctctcgaatgtctctatattgaggattgtggaataacggggaagtggctgtctctgatgttgcaacatgtgcaggccctacaggaactgagtttagaggactgccagcagataacaaggctatcgataggagaggaagaaaacagtcaaccaaatcttatgtcagctatggaggatccgtcattaggatatccagatcgagacgaacttctgcgccttccgttaaatctcatctcttctctgaaaaaggtatctattacatattgctatgatttaacattctacggcagcaaggtagatttcgctggatttacctcccttgaggagttagtgatttcacgatgccccaagctggtgtcgttcttggcgcataacgacggaaatgatgaacagtcgaatggaagatggctcctaccgctatcacttggaaaacttgagattaactatgttgattccctaaaaacgctgcagctctgctttccggggaacctcacccgcctgaaaaaactagtagtgttgggaaaccaaagtttaacatctctgcagctccattcctgcacagcactccaagagttgataattcgaagctgtgagtcgcttaattctctggaaggcttgcaattgctcggcaatctcaggttgctgtgtgcacacagatgcctcagcggccatgaagaagatggaatgtgtatccttccgcaatcacttgaggaaatttacatctgcgagtactctcaagagaggctgcagctctgctttccaggaagcctcacccgcctgaaaaaactagtagtgttgggaaaccaaagtttaacatctctgcagctccattcctgcacagcactccaagagttgataattcaaagctgtgagtcgcttaattctctggaaggcttgcaatggctcggcaacctcaggttgctgcaggcacacagatgcctcagtggttatggagaaaatggaaggtgtatccttccacaatcacttgaggaactttacatcagagagtattctcaagaaacgctgcagccctgctttccagggaacctcaccagcttgaaaaaactagaagtacagggaagccaaaagttaatatctctgcagctgtattcctgcacagcactccaagagttgatgattgaaagttgtgtgtcgcttaattctctggaaggcctgcaatggctcgtcaacctcaggttgctgcgggcacacagatgcctcagtggttatggagaaaatggaaggtgtatccttccacaatcacttgagggactttacatcagagagtattctcaagaaattctacagccctgcttccagacgaatctcacttgcttaaaaagattagaggtatcaggcactggaagtttcaaatctctggagttgcaatcatgcactgcactcgaacatttgaagattgaaggttgttcatcacttgccacattagagggcttgcgattcctccacaccctcaggcatttgaaagtacacagatgtcccagattgcctccatattttgagagtttgtcaggacagggctatgagctatgcccacgactggaaaggctcgagatcaattatccctcaatccttaccacgtcgttttgcaagaacctcacctctctacaatacctagagctttgcaatcacggattggaaatggaaagactaacggacgaggaagagagagcgcttcaactcctcacttccctgcaagagctccgatttaactgttgctacaatctcgtagatcttcccacagggctccacaaccttccctccctcaagaggttggagatctggaattgcgggagcatcgcgaggccgctggaaaagggtctcccaccttcgttggaagaactggctatcgtagattgcagtaatgagctagctcagcagtgcagattgctagcaagcaagcggaagtgtgcactcaagaattgttcgcacatgcaattcagttga

SEQ ID NO: 9350 - DNA, 696 bp, Oryza sativa
  Clone ID: PAT_MRT4530_15775C.1
agcgtcgcctccctcctccaccgagcgcggattctccgccgccgccgccgggcgcgctcctctccccgcgtgcgctcctctcctttccccacatcgcgcgcgcgccaggcgcgggcccggcgccgactgctcttgctcctttccccaatcgcgcgcacgcgtcaggcgcgggcccgccgccggccgctctcgcatccccgcgccgcttctcctccaaccctctccccccggcgcttcttctccaatccacccccctccagcgcttctcctccccctcccccccaatctttgtttcatccgagctttcacttctacgaggttgtgtgttcttctatgggattctctccccggcgattctctggccgcttctcctccctcagtatatctattgggtcgagtgatggatgccacaggcgatttgtgttcttgcttcctatcttcagtccctgcatgtatcgttcaaaattgaggagtttctatcaggctgtctgctcctgctgctgcagaaacgagtgtcataagttcattcctattcccattcctattgtctactatcattgtagcagcagctatgggctatcactgaggtcagtctccataacattcccatccaaagcagcggcttatctggtttctccatatgagttctctatcaagaaatatattcccaatatatttggtacacatattcgtcat

SEQ ID NO: 9351 - DNA, 533 bp, Oryza sativa
  Clone ID: PAT_MRT4530_15776C.1
cacgacgtcacgcgctctctttatcgcgtaaaaaaacatatacacgttctaatgattgtctgaatgatcatcaatgcctgctcacgggcgacgtttaccatggcggcgctcatgcgcggccaaggaggccatctacggcgcgcacctgagctagtagcaaataatgttctaggacaggcaccgtcacccgaatgggcaggacatgccgaatcacccgtgcgtgaaagcactcacaccccacatcaccgagcaggagaggttagactgctttctgcagctcgccgtcgcgctcgacagtgggagccagtgctagccgaccattcacatgctgagacgcaattacaggtagctcgccacccgccatgtcgtgcacaacatgtacgaggggttgcctagttccctgaaacaggactggtatcgctcgtcggcgaaccaccccgcgttcgatagcttgcctatctaacacggcaactacggcgagtggtcctggcaggagagatattactgctagctttactactagcgctagatga

SEQ ID NO: 9352 - DNA, 641 bp, Oryza sativa
  Clone ID: PAT_MRT4530_15777C.1
gagcctaaaaataattaagattgcatatttttaagagagaagaaagaagagacaatttgtgatgtgaccatgtctactacagatacaaccatttctcacatcatggatgaacaagaagatatcaagatcaagtcctccaagtgctgaaatccgattcggccacctactacactgctgacttcaaacggccgccgaatctgcatacgacctccgttttcagcccatgagtacttgatggaaggctctcggaaccctctttccaacagatctagcctcgccgccaaattccatgtcgtttggccgcaatcacataaacaagctcgcgtgtcggctagaccgtccgtctgcttgtattcgaaaccctaacttatcgtgtgtattcattcctatttgtaattcagatttattttatcttgttcttacttgtttcttcgatttgcttgccggaataaggttgatctgcaccggcaagatcaacaacccacgaagagttgcgtcgatcgcaaaggcgcaacacaacgtcttgtacggttgtagttgggtcgtcaacatttctcccaaatcgtagttatcattaactcaccaaaagatcaggccaaacaactgccttgagtgtcgattggaacccagggttcatcaat

SEQ ID NO: 9353 - DNA, 327 bp, Oryza sativa
  Clone ID: PAT_MRT4530_15778C.1
atgcatggcctccagctcgccttgggtcggggcgccgccaacagctgctatgcctcatgtccccgccgtctcaagcgcgggtcgaagccgctgcctgctcccgccgtgggtacaactgtaccccaatctcctactgtaggcccgccattgcgtcgacggctgctatgccgcatgccctgccgccgcctgctctcgtcgcgtagctcgctccccacagcgggtcgaggcgccaccgtcggctgctatgccacctgcccccgccgcctcaagcgcgggtcaccgttgccacctgctcccgctcctcgccgcgggtcggaacgctactga

SEQ ID NO: 9354 - DNA, 410 bp, Oryza sativa
  unsure (1)..(410): unsure at all n locations
  Clone ID: PAT_MRT4530_15779C.1
gcggcgnatttggagagaggaganagggcncgagacaganancanacatttgttcanagcgacgtcgctttttgatccggcgacctcggctcnaaanatcattgtgaagcagaattcaccaagtgtnggattgttcncccnncaacagggaacgtgagctggggttngaccgtcgtgagacaggttcagttttttnctactgatgancgtgccgcgnatannaantcnaancttgttcgagaggaacgttgantcatccagtngggnccctcgcccttgggtnnaatatntcncgtggcgcgnaagcnatttttttttttttttttcgancggcatcgctnccngtcaggaatcnnggcnggcgaagtnggggncccggcccnncnntgncccccnttaccggtcntgng

SEQ ID NO: 9355 - DNA, 2542 bp, Oryza sativa
  Clone ID: PAT_MRT4530_1577C.1
atgaaattatcaaactttatgcagttaacttgtaactagtgtccctgttgatccaaatagaaaatatttatcatattttccaacaaaacaatggtgccctgacttagatttgatacctactgaggcggctgcctcttcctgtgcatggcgccgtgtctcccccagttcatgcccccgagtggcgcagccgtggtgaaccctgggcctgcgtccggatctgcctgcatgtccactgcagcactgccgcgtggcaggcttcctggcattttgtccctcagccccttccagtagctcgcccgctgggcccgaggccagcccactcgctttcggggtccgcccgggctggtccccggcgcgttccgcttccgcctgcatcccctcgctccctggaggttcgagaacctcggtccgggccgcatccacactagcagccgctgccaggggctagccttgtggtgtttcactgctccttccaaatccttccggtgacacgcagtttgagctccttcttgtcgccaccggagaagaacaaggccatgttccgctggatgataaggccgtcgtagctgtcccgaactttcctgtgactgtctctgatgcttcgggggacgccttgccaggtcatcttccgaccactgcctccgacctccaggctgtagctatagttcttggcttctgcatcatctcccatgaaccgtaggaaggcgatgtagacaggtgccatgcccaactggaatgcctcaaagtgcaggcaaaagtactggccgaaacagctgaaaaccgtgagcatccaggtagcattctcaacttcatgaggatttgatttgacataacggtgattgaaggtgcttccgttgtgcatgtcaaccttatgatcatctttcaagtgacttactagatactgaatgtcaccagcaacagtgcattcagatccagcatatgggcaagtatagggcctgtattggcactgtgactcatgcttcagcttgcagtaataaggatatatgcccaagcacccaaagttctgatatttgcatggaagctctagtgatgcagctaccttttccagagcaaggcatcttatgttacccaattcatgtctgcaagttgggcagcggttgtgaaccctgggcttgcatccggaacatagagtatgaccattggagcactgatgaattggaggatacatggcatttagacacacagggcattccagtagctcacgcacattgccagagaccatcgcattcggttttggtgaatgctgggtgtgatcatcaacaagttcagtaacatccagcatctcctcgttctttggaggatcgataacttcagaatgggcatcatcaagataagtaactgatgccatggacaagcctatagatatagaatccatcatggacacctcagagctagaagcaggaacatcaggttgagcccataacaacttaatatcaaaatgcacagtatctcgagctaagtgcctttctcctacttcgaaccagaagaaaacagaactgcgagaatagatagcccgcacatgttgcagcgccagtgttccattagtcctgacggccttcgcacccccctcaatgcgggtgcgaacaacagttacaccatgtccttgctccttgagtgatgagaacgaatcatactcaatcgctgtgctaattatagggaaggacaaataatccagaggattttgctcgcactggagcaagcactcctcaatagttaatctaccacttcgatgaagcaaacaacacccaagctctgctctaatagtgagatttgcaatcttgcaggtggaatggaactccaacgcattgtcagagccacgcgaacatgttaacactgtgtcgtcaggaagctcacccccgccaatctgacagtaagcaaatgacaagcgtaagctcaaagttgcatcaacaacaaaaaagaattgaatgcagagaggcttctttatttggatattacgtgcaacatgtgtgccaccagcagcaattagaatagtatccccaggcctagctgcagaaacagcagactcaagatttggatagactcctggctctattgtatttctgattggcctctcaacacgcaaccacagtcgaggatggcatgcaaggaagcgccatctgtggcaaacgagggcggtgttatacctatcaggtggagtgttgctaactctaggggtcatgaattcgcaattgcgagcacttaagcaaaccctacgaatcatcccctggagaaggtgcttagtgacatcttcatctgggattgggctgaggaagctgaagatgtgcatgaggcagccgtcgtccaggctgttgaccggcgcctcccccgacggccccgccgccgaccgctgccgcttcggaggcatctctccgaatccctctcccccccagtacggcgtgcggcgccggcggcgagcggcggcgcggtggcctgcggcgagcgcgaggtcggcaacggcagctgcacgcgcggcacgggggatatctcgccgcctcgacggatccacgattttttccgccat

SEQ ID NO: 9356 - DNA, 207 bp, Oryza sativa
  Clone ID: PAT_MRT4530_15780C.1
gggcctctattttagagtctggacgtccaaggcacgcgccacgaagcctggatccctctaagaggggcgccctctttttttttttttaagcgcaatgtataaatgccatttcttttacgcagtatgggatgacctaggagtactacagatataggacacacgcaagatcccaactaggacatgaccgatctgagagcaagcaccaac

SEQ ID NO: 9357 - DNA, 171 bp, Oryza sativa
  Clone ID: PAT_MRT4530_15781C.1
atgaccgtgtgcctccgttttcagcccacgctctccgtttcctgccgcccgacgcccaaatccctcgtggtcgcatcgccgccttgccgcttcgccttcctcgcccgcgccaggccgccgccacaccaggccggagaggcgccaggccgccgcgagtggggaggggactag

SEQ ID NO: 9358 - DNA, 654 bp, Oryza sativa
  Clone ID: PAT_MRT4530_15782C.1
cccacgcgtccgtttgacttttacttatgagacagtcagaatccacaagaagcaaggcttcgccttgctggcggtttgagaatagcacaccaacagttgggtaatatccaattggcttctcagtatttaacaatattgggtacattagcacttcaattacatgactgtggacaggccagagagatcttgaagtcatcactgacattagctaaaacactttatgacatcccaacccaaatttggatcttgtcagtatttacagagttatatcgagaattgaaagaaagggaaaatgaaatggaaaactctgagtatgaaaggaagaaagaagatgatctgcaaagaaggctttcggaagcccattctagtccatttcaccaggagctggtggagaagaccagaatccaagttcagcagctgcacaacttctcaagggagcagcaggggatgcctggcccgacaacggcgaaggccgacctcgacatccccgagtcggtagggctgtacgctgcccagccttcttctgtcaagaggctgatcgaaccgagctcggtgcgacgcagtagcaggaggcggctatcctgacaaaaatcctgacctgaagtctggggggcgtgccccatcaaaagggggcaaagggagcagcagcatgct

SEQ ID NO: 9359 - DNA, 6561 bp, Oryza sativa
  Clone ID: PAT_MRT4530_15783C.1
cctctcacttcctccgtttacttcacaatctttagattgtttaactacaaatgatcaccaacagaattcaatccgcagctaccttttgttttcctttctagtttctacccatacgataccaactcggttcttttgctacctcttaatctgtttacagagcaatctataatgcataattaactacaaataaacaaccaatggaataaatcagcacctacaacctcacacaatgtcacagctcttcttccattgctgctatatcccaagagatttggtatgtgagcatgctgctgctccattgcccccatttgatgggcacgcaccccagacatcaggtcaggatttttgtcaggatagccgcctcctgctactgcgtcccgcttacttcacgctgttctgttctcgcaggctcgactcctggaagaagaaagagtcgatctcacggagaagtctctgctgctccatctcaacggtggcgcgagagcacgcccgctgctccagcatcatgccgaagagcaaagcacgcacgtcgtcggcgcatctcgccgccgcagccttctgctccgagggctgcgccttcgagccgccgcctccctcataggcctgtctcctgcagacctggaacaagttgtgtagaccagcaatgtgttcttgattgagatagtttttggccataagttcactgaagagagtgacaatttccgcggtaacattcctagcagaaagattagcaactataccagatatcaaagaatcactgaacaacgatgtcaaccaatctggtacttggctcagttggagcaatgaaagagctatatttgctgcaatcttctgctgattactgaaggatttggatgtcaaaccaggagcagtcaaggcaactgcaaattcctccaatattaacctagaccatttagattctctgatcaccgccttctctctgcttccaaatctctcccaacctaaaatcaccgtgagacaggcaccacaattttcagcaactctactatcttgatcgaagaccattccctctgtcactgcaatcatggacttcagatactttgcagagcatcttaactcagcattaagacagctcctctgatctgaaattctgttaagcaattccaacaggcattgtgaagcaataagctttacgggagaagggccaaagtgcatgagacgacacaaatcatggcacggaatgccaagaacagaggaagactcagtgtcatctgaatattgcaggaattcctgccagtcaatgcttgcctctaagatcgcttgcaggcttcgtagagagaaaaatatcaataaaagcataagaatcaataattccccaaaggttgtctcctgattgtgttgaaataaagatgggccctttgcacaagcttcttgaactataccatccatcaacaaagccaaacaattattcaagattatggcttttgcaggctcaataagcaccttgtttgctgaatggtttaaaataaggcacaatatcccaattaatatcttccattcttgctcatttgatgtataagcaagactagaattgaaacaatccaatagcttcatggtaagagcaagccatgcatcatcatcacaggtgaatgtcattgcacttgctgaatgtaaaatgttgaatatcaataaggaacaaactgatttgatccttgatgagcacagggagaggtatatgctaccaagtgcatcaacaataccacatgacacgaactgatcagaagtacaaggaaaggacactagaatttcagtaataacattaactactgataggacctcatcttctgcactctcctttatcatctgactcaataaggataccagcaaagacgagatgcaggtttccccagaatataccagttctgcaatcaattgtatgtccaccaattgagtgctgcttgaaagcatgacagttctgtcctcacaaaaaaatttacagaaattcagcaaatgaaaggagagtggttccataagttcttcattctggaagagccattttagcgctatcagatggactcggatcagaagcaagtcccactccttgtgtgtcattgcatggaacagtgttttctcagcttctggactatgtggaatgccaaatctaaatgaaatgcctctgacaaaggcataaagatgaaccagaagagtaagcatcagagagcctgggatttcatgggggaacttcgcaccattgagaagaatgtattgctcgactgaagccagaatttgattgtcagcagccagcctttcattgtagaatgaacaaacatataatataacaagaattgcacattggcatgatgccaagttaaagtcttctgagctacattgcccaagtaaatacaacagctctgcaggatcaggtggaagataaatgcatgcatctctaattgtttccccataactgatgcccaaaactttgtcaacaattgaactgatgaccaaatatactgctgattttacatggtcagtaggaaataagcccatgaatccaaatgacaagctaaaccacgatgatgaggcaagcatctcagcaaacttaaatgatttgttatcagatgcccttgataaaataatttggaaaatctgaaggatgccggacaatgtttcttcatcattaccatcaacaatagcactttcaagccaaggaagtaaatatgtttcacaggtttcaatgatgctatcctcaagagacttcttgcgaagaatctgatctttattcccttcaaggcagaagataagtgcttcttttagaaggaggagggaatgtggtatgaggaacaaacaatcatactcgtgagagaatgtcaaagagattgcatgttttgatgcttctacaatgaatgatggcagtttttggatgtcatcagcagatggtaacttcagaatctctacaagcattgagcaaaccagagcaaaggtttcagaactcatgccaagttcaccatttccatgtcttctcaaaattgctgacaaagtacaggctatctgttcttcttgggacagcgacaaaatgccagaacaattaattatgctaatacaaacaagtcgtaaaacttgagattggactgggtgaaatggtatctctgaaacatagtgaagaacaggaagtaaagtagaaactgcaatggcaagcttttccttgaatctctcctctgaattggctaaaatggatagtactttaatagaggaaatgaccagtggatcattatttcctgataacctgagaacctcaaatacataatcagcaacattctgatctatcaatgttttcagaacaaatatatttgcatcagatgacaggaaatggaagatcaattccaatgtccctgtttgcacttctatattagtagatagcagagatcctttgacagcttcagcaaacagaattacgagagaatcatttagtggcacattatcttctgcttcagcagaattaattaaactcggatcactaagcagtaaaatgtcaaaggcccccttctttgctaaagtaaggagcaatgcaatacagttcaggcgaacatcatcattttgggttttgagtaggacttcaagagaaaattgaagcaagcttcttccaatcgctgaaagatccacattgtcattatcacatatgtcatcccatggggtggcgtttaacagtgagagtttgtatagtacaaagagtatctctccacgaatttcatcactgtaccagaacaagttaaggatgctgtcagataaggttattcgcaaggcgaggaaagtgtcaatatgcaatggtattaaccttggtagccggagattgttgacaaggtttaagtaaagagattgtttatctccaatgtaagttgcagcatctttggtagaatttagcaggatccccaaacagtgtagcgtgtggaggtgcttgacgagggagccggaggagagggcgcgggcgacgcgggcgacgaggtcggaggcggcgggggagcccacggcggcggcgaggtcggcggcgaggtcggacgcctgggcggcgagcgcggcgtcgcggcgggaggcggcaccggcgagcgcctcggcgaggggcgcggcgaggaggcgcgggtgcgcggcgcggagcggggcgaggaaggccgggtcggcgagcgccagggagagggcggcgagcgcgtgggagacgtggtgggccggcgcggaggcggccgaggagagcagcgccgcggcgcaggagaggcagacgcggccccccgccgaggtcggcagcgagtgcgacgcgcggtggcccgcgccgcacgcccgcgccgccgccgccggcgtgtcctcgccgtcggattccatgcggcggaagtacgccgttggcacttggcagtttgagaaggacttgagaacgagtgccgcacacaatttttgtgattcgccaatgtaactggcatgacggtagacattggcagctgcacccgagctcggttcgatcagcctcttgacagaagaaggctgggcagcgtacagccctaccgactcggggatgtcgaggtcggccttcgccgttgtcgggccaggcatcccctgctgctcccttgagaagttgtgcagctgctgaacttggattctggtcttctccacctgaaagggagcttcgtgcgtcaatctaggcagctcctggtgaaatggactagaatgggcttccgaaagccttctttgcagatcatcttctttcttcctttcatactcagagttttccatttcattttccctttctttcaattctcgatataactctgtaaatactgacaagatccaaatttgggttgggatgtcataaagtgttttagctaatgtcagtgatgacttcaagatctctctggcctgtccacagtcatgtaattgaagtgctaatgtacccaatattgttaaatactgagaaaccaattggatattacccaactgttggtgtgctattctcaaaccaccagcaaggcgaagccttgcttcttgtggattctgctgtctcataagtaaaagtccataaacaaaaattatacaggtcttctctctcacgccaacaaatgagtccatggttctataagcaggaccaaccaattctagtgcctgtgaagttgattctgcatcacccatgcaaatgtaggatactgatgcatatacttggcacatagattgcattgatctgctatccgtcagccttgctgcttcaaggaaatggaaagcggcctcatcaaagcagccgacagagtgtgcatattgtccccttagcatttcgattgtgttttcacaacctcggagaattgttgggaaacgagtaaaccagtttatcatctgagctaaagcctcttgggcttcaacgaattctgatctcgtgagttccacagcaactttattttccaaaaattggagtaaaagcatcaaatacaggccagctgtccatattgtagagtgttccaaatttgcctctgtcacaccatccacaatcccaagcttcgagagttccccacgaatgagctccagtcctgaatgaattctctttccgcactccttaaatattccttttggccggctcaccatgacaaccatgagatccaccagcacaaacaccgcagcccgtgggagccactccccatgcatcggcggcggtgccaacagcaacttatccccgtaatccaacacatcattcagtttgtcatagccacacaatgtttgcagctgatacttgagctgcctctgcttgtgcgttagcgccgacctctccctctccttcaaccctggttgcgctagcgttctctccaccgtgccgagctcagcagcaagctcctgaacccgctggcctttctgcatctcgtccttcgcggcagtgtctagccgctccacatgctgcgaggcagccttgtagtcacatgtcctcaacaggtagaaggtctgaagcagctctgtgtagaagaacaacccagtccactgctccttctggtcggcggggagtgcttcccagaggccggaggcgcgcgtgacggcggcctcaacggcggcgttgtcctcccagcagaggaggtggacgtggaggccggtggcggcgaagaagagctcgagctgggggctcccgagctccgcggcggcggaggcgccggcggacagcgtggagagcgcggaggcggcgtccccatctacggcgagcgcggaggcgagctgcgtctggaagttgcaggtccagaggagggccgggccacgggcgaggaggcccgacgcggaggcggaggcgaggagccccaggccgcggcggagcacgttcttctgcgaggggacggcgccgaggacgccgtaggcggtggcgaggagggagtgggcgaggagcttgagccggggcggagccgaggggaagcggggagaggaggcggagggcgcgctcgaggtgggacttggaggcggcgagccccccggagcgggagcgcagaagaagggccgcgagcacgcagacgcgcacgggcctcggcgagcgggaggagcggagcggccgccgccgaagcggaggaggcgggcggaggatggggccagagccgcctc

SEQ ID NO: 9360 - DNA, 536 bp, Oryza sativa
  unsure (1)..(536): unsure at all n locations
  Clone ID: PAT_MRT4530_15784C.1
tcgatttataatggcgaattgtgatctatgcgtttaagttgtaagtttcattgcactccagttggatattatgtgaatgcaatacacaagacctattggcttttacagtgttagttgcagtatttgattatatttggatcgaatatttctttaaaagttccacttatctttggtttaggacaaaactaacttcacctgcttccaacatgagcagattttgagattctagcatttccctgcaatcagttcttgcgacaagagccaggatctgaccagcaaataaaggattttgcttgcacaagatttaaagctgaatatcccgtttttcagaaggtaagaactatccgatgaacctgcttgcttgctggaagcttccaattatttattaattagtgaatcctcagtttgagtccctcattattggtacttagagcttaaaacactatctgtatcctttttttttaacaggaaacagtagagagaaccctacttgaactaattttaantaaataatacatatgaatctacaagatcaa

SEQ ID NO: 9361 - DNA, 518 bp, Oryza sativa
  Clone ID: PAT_MRT4530_15785C.1
aaatgggccgctcggcacaacagggcccaagcacaattgggcctgtgctgagggcagtcgggccagcacagcatgattggcacttcgtgccgtgccgtgccaacccacgggctacacatcaggctcaggcatggcccactagcactcgggtcgtgccgtgttggcccaaaggcacgatagcctcgtgccggcccactgtgccgagggagtagcctaggcacggcccggctatcgggccaggccaacataggcacgaccccagtcgggccatgccgtgtttgggccgggccaaattgccgtgccttgggcgggccctccctccactggctggccaaggcggcggccggcgccggggacatgacgtggagcggtccgacggcgaagacgtcgcgcatgttgcgcgcgatgtggtcgagcgcggcgcgctccactcgaacagcctgggcacggacaggtaggcgaggaagctgcacgcgctcgccgtgcggaagctgagcgccgggacgccgagctcctcg

SEQ ID NO: 9362 - DNA, 166 bp, Oryza sativa
  unsure (1)..(166): unsure at all n locations
  Clone ID: PAT_MRT4530_15786C.1
tgatctgtgcggcaaggtgtgttggctgactgtgcaacacacaacacaccggacgtgctgtgtggtggaancactgcggacatgctcgggcaatgcgatccatgttattttactacaacaagnggctctccaatattcaggattttaaaaaaaaaaaaaaaaaaaa

SEQ ID NO: 9363 - DNA, 249 bp, Oryza sativa
  Clone ID: PAT_MRT4530_15787C.1
aatcttagtaattgaatagacaataatcgggagtatccaagatccgttgtattagattatgtcctatccaagtactaggttgagtttttttttgaacggaggaagtatgtagtataaatattttggcattttccgtgtaaaaaaaagatgcgctagcaatttgtacattggtttgaaagtgcatcattgtgcttatggtgttcttattttctatatctaatttcagtttcttataaaaaaaaaaaaaaa

SEQ ID NO: 9364 - DNA, 374 bp, Oryza sativa
  Clone ID: PAT_MRT4530_15788C.1
ttttgtgtttacttcaaactagtattgtacatcttaaaattactataaatttcacggtacaatagcaagtggttatctgatacttcaaactagtattgtacatcttaaaattagaattctatgaagttccgctccagtatcgcgatagaaaacgaccctagttatgttgtcgcacagaccagttggctgcatcttaccacaaagagagttactttggtactactgctgaagcttggacaacacaacacgagctatatatatatagggtaaattttgataccttttggcacctatacggagtcaaggtactaccacatattaacagcttaacactacaatctgggatatttaccggtaactttttagtaccataa

SEQ ID NO: 9365 - DNA, 337 bp, Oryza sativa
  Clone ID: PAT_MRT4530_15789C.1
gatagaaacacccaattgaacatgctattacatacatggtctatccaatggccacctgatattattgacgtcaagcagtgtctaacagagtttctttaacaatggtccataggagtacactacatttttgcacatattgatcgcgcactacaactgctgactctgaccttggtaagaacctgtcctaatactgtttttccctaccgatttacacaaatgctggtgcactcttgctgtgactgatgcatgtaaactatgataccataccaaagatggcctgagaccaaacaatttaaagctagatacaagattgaccaaaaaccgatggtgtctacac

SEQ ID NO: 9366 - DNA, 231 bp, Oryza sativa
  unsure (1)..(231): unsure at all n locations
  Clone ID: PAT_MRT4530_1578C.1
attggtggccccgggtcctggggtgctgcggctgatcggcgcgcgcgcgcggggggtccttagcaggctcggggccggcgtgcgtgcgggagctggcgccgtggaccggccgccgggcggcgcagcagttggccagcggcgcgctgcgcggtgccctgggctnctgcgggggttgccgcggcgccacatgctggttcggctgcgcttgctgctgccgccgctgccctggct

SEQ ID NO: 9367 - DNA, 270 bp, Oryza sativa
  Clone ID: PAT_MRT4530_15790C.1
cgcctttgtcctttttttttttttttttttttttttttggcattcacaggcacactcacttaggcaagggccaagattgatcgatcgagggacaggcgcctgctttagccatggagcagggtgttttaattttacacaatacgaaggatgcaaaaatgtgcttcaccattaaaccaactttttgtatttaatggcaggtctcaaataagatgaactctgttttgtcctaccaaacaaaatattttcttgaaaaaaaccggaaggtctccc

SEQ ID NO: 9368 - DNA, 2109 bp, Oryza sativa
  Clone ID: PAT_MRT4530_15791C.1
gcctgtaaatttaactacattcctggagatggcttcaacgttacaatttgtcaatttatatgtttcaaaatggtgtatgcagctaacagtttggaaggggtaatctgaaccaggttttcagcatatacccaatgaagtaaccaccggacctctatacctgtgctttggcgcaaacattcccatctaaattttgctgggaatcctgtctctaaggaatgcctctatatcttttatagatttcaaaccttcttgtttatcagcaagaaactttgagaactccagaacttttccccctctaccattttctggggaggtactgaaaaaaggggatgatgttggtgccagtgcccatacggatgagagcacttcattgggtttgtccaactgctccaaaattttgaagtctccttttgctgagtacttgaagaccatttccaaagatttacaggggatgctgaaattcagatgaggtattgtgctcccaccaccatgcttagcattgcttgttattagccccaccattcggccaagcgaatcaagaagaacaccgccacttgcccctgggtgaactgctgctgttgtctgatcgaggtccaagaaggccatgtccaaccacatatacagatgagcctgctgttggacaaacaaattctggtctaatggcacataattcaattggagttttttccatttgaagcaaggcaacatcaagtggaccgtgacaagaacaactgaggatatagcttctgtgagtgaaggtgaaacgtcatactgattaagattgttggctgaattagggacaaacctcctatgcttatctgcaacgcatgattccttatatttacaatctgaacttttgtcatcaactaattcacttgggggatggccaattctttccagcttgtcactgttccatgcattgcagattgcatcccaggtaattacaagctgaacttctgtgctgctgcctctctgtcttaatggcttcatcagcatccccacaaggcaagagtttttgtcaaacactggagcaccttccataccaggaagacagtggacatcagccatcagcaatgagctcctggcagtgcctggagggaggcaatttgcaacaacaccaactgatatactattgaagaaatggacaggtgataatatgccaaatggagatcccattatcagcaaggagtcccctcgttgttgcatcagtgaaacattgatacatcttgtattacttgaatttaagtttgaaactcctagaatagcaattcttgtggcagacttggccaacattggtggctctgttgactcagcataagcatttttcctgttacactcaagggaatatctggcatcattatcaacctgcttctggttgacatcagccaatgaccagcagacatcccacgatgaacttcgaatcaatgaaccttcatgttgcagtaaggataatacagaatcagcagatgcttggacatcaacaacattcctaacgaacagtccaaacttgccaaagttcttatcatttttcatagggcagtgtactaacagtccaacagtagaatcttgctgagagaagtaaagtatggcaagtaatcgagctgaaagccaccgtggagctccagtcttcccgcctccaatgttccttgattcctcatgctcaacgagcacatcaagatgagcctctggtaccaacctcggttgcaattcctggctggggctattgcgctgctcctcgaccaagaacggctcgacgagcgacgcggaggtaagcgcgacgccccctgcgtggccgtgagccgcgcagatgcgatcgagaagtggcggcggctccgccagtgatcccggcggcaggagtagcgccgacgcggagagcgtggttgaccccgactggtggaggtggaaggcgtgccgccgcatcttgacggccttggggtccgggccgacgattcgcgccatggccgagaagccgcgcgcggctgcggcaacctcgcgcggcgccatggctggtcggagtaggggacgatgatccgcgagacgccccgaggcagcgcaggaagaccaagaactcacgcttcgtttcagggaaggaggatgttgccctcgtgc

SEQ ID NO: 9369 - DNA, 605 bp, Oryza sativa
  unsure (1)..(605): unsure at all n locations
  Clone ID: PAT_MRT4530_15792C.1
taaatttatataaagtcaccggttaaacataaagaaatctcaagcacttccaccttaattaaacacccgttgatgttacaaacatgctagttacatatgcttgctctatagttaaggtgacatactgagtttcaacaaacagtctaatgggcccctataaattggtaacaagatacccaaatgaactaaaggagtagaattaaaattacctattgaagaaatggacaggtgataatatgccaaatggagatcccattatcagcaaggagtcccctcgttgttgcatcagtgaaacattgatacatcttgtattctgatcattgaccaagattactaagtacaactcaaacagcagtataagttgcacctccgaggtgnctcccgcgatcatgaattgaaatgacaagcttagcctcacacttgaatttaagtttgaaactcttagaatagcaattcttgtggcagacttggccaacattggtggctctgttgactcagcataagcatttttcctgttacactcaagggaatactccggcatcattatcaacctgcttctggttgacatcagccaatgaccagcagacatcccctcgtgccgaatt

SEQ ID NO: 9370 - DNA, 563 bp, Oryza sativa
  Clone ID: PAT_MRT4530_15793C.1
acccagctctatacgactactataggaagctgtaccctgcagaccggtcccggattcgggtcgccacgcgtccgcatacttgttctttgctgcgggaaaactggcctcaccttcatgtccttcgcatatcccgcacagtcacttcttgcagctctgggatcgattcaatttggtgtccaatattgcatttgcttactttgggttgaacaagaccatttcagtgaaagtcatggtagcaacaacatttattgtatttggcaatatcttcctagtttcctttggtaatcatcaatctccaggtatgagttaatccatacatcattagtcattctgtctgtatatagccctaaaataagtttgatttcaaatttcagttggttcttccattgttatttaattggcaattcagttgcacgtatttgaagattcaaacctttgaccaacaattaggctgattatatatttatcaaacccttggaaatacccctttagcaaacaaaaatagacataataatagaaagtggtaccatcatatttctacatgtctactccaatgtactttc

SEQ ID NO: 9371 - DNA, 303 bp, Oryza sativa
  Clone ID: PAT_MRT4530_15794C.1
atggtcatctcggcggccgagacttcctcctctaggccggatccatcttggacagaggcggatccggccatctcgtcggcggcggcgcgtggtgaagccggcagcggcggcgctagggttggcggcggcggcgatgtgcctgtggactcgggcggcgctctggtggaatcgtttttttcacgaatgaggaacgggaatggggcgaagttcctggctcaagaactccggaagttccgggctactcatcaatgcccggaagttctagtgttcatcaccaggaggttccgagccctgtcaatttaa

SEQ ID NO: 9372 - DNA, 237 bp, Oryza sativa
  Clone ID: PAT_MRT4530_15795C.1
ctgcaggaattcggcacgagggccgaagagaagctcttctacttgccgttccggcctcctctcctaactccttcgctgggcgaccacttccccgggtgcgcgttgtccggtaacacacttgtgccgccgccgtctgaggccgttccaccatacggagcaccggcgccccttctctctttctctctgctgttgcacgggaagaagaagagaaggaagaagaagacgggaggaagaaga

SEQ ID NO: 9373 - DNA, 177 bp, Oryza sativa
  Clone ID: PAT_MRT4530_15796C.1
atgcgcaacaacgggcccgccgccgactgcagagccgtgcgccaccacaaacggcgcggcgctctcgtggcccgagccggccgccaccactgccggggtaggccaaccatgccacccaccgatgctctcacgtgctcggtgacctcagccaaagccgctgcagcacagcaggtccaa

SEQ ID NO: 9374 - DNA, 267 bp, Oryza sativa
  Clone ID: PAT_MRT4530_15797C.1
tgccaggaaggccgccacccaccatccaccaagcgtgccaagccatggtctcaacaatacttctttcttcaaagggatgatgcttgcaaatcgtgtcgatgcaaaaaggctacaggtcaagaaacaaagagatgcaaattgtgccactaaaaatctatttggcgggcaaacggacgatatagcaagcactgaaactgcctactcagcacatcaggtgtcaatgcaaagtgtgcgcactaaaaaattttttgccgggtcggccgaaag

SEQ ID NO: 9375 - DNA, 300 bp, Oryza sativa
  Clone ID: PAT_MRT4530_15798C.1
atgctgacggtgctggcgcaggttgcagagcgggaggggaggtacctggcgcagatcaaaatacagcagcacgccaagccatccattggaaccagaggcatcaggaaactacatacaggaatgggtattcctatatcggagggaagccattactgttgcagccatgtgagaattgctggcacattcagggattcagattctcatgttggtagctcagttgaacgtgtgggtctgtatttcttgattgagctacaggatctgcaatgccaacctcgtgtcctcgtcagagagtgtttctga

SEQ ID NO: 9376 - DNA, 351 bp, Oryza sativa
  Clone ID: PAT_MRT4530_15799C.1
cccactcgtccgcccacgcgtccggaaaagtatccgtgataatcaatcccaccacgaggaagaccatcaccgagtttggttgctcggaggagttgcttactcaggtaggatagttgcttgggaagcatgcctactccgggcagacagaatccgagggaggctttgaatgctacgcgccggcgagggagaacatcctgaatagctcgtagccggtggtgggagggaagcagtactacaccgtagcggtgctgaccaggacgagcagacggacactagggcagcgagcactagatgtttacggggaccgtgaacgacagaagactgggcatatgggaggcacaagccggctac

SEQ ID NO: 9377 - DNA, 321 bp, Oryza sativa
  Clone ID: PAT_MRT4530_1579C.1
atggaggccacattgataatagtgctcaacttcctacttactggtgcaatcgtctttaagggtgtcgacagtgaactaggattaattaaaattgtgctccacaatggtcatgagactttctacttttctcttgaatggagcaagctcgtggctgagtttccaatagcaagctcgagaaaaggctcgaggctcgaacgaaccgagcccaagcttaattccaagctcgatgtcaaattaggctcgagtctgttccgagctcaagcctacatagggaagttcgctcaagcttggctcgttgacagccctatacatgcggactga

SEQ ID NO: 9378 - DNA, 148 bp, Oryza sativa
  Clone ID: PAT_MRT4530_157C.1
gttggttggagctcgagctgactgctgacgtgcttgcctattttgcggatatcactatcttatcgtcctcctaatcacggcaaaaccacacaccggaggacggatatttaataaccggaacagaggggatagctaagaagacagaggg

SEQ ID NO: 9379 - DNA, 150 bp, Oryza sativa
  Clone ID: PAT_MRT4530_15800C.1
atggatgagatgagagtgggacgagcagccgtggccgcggctgcggagtcgcttttggaggctacgtcggcgagccgtgctctcgactctgtcaaagacccccgcatctccccgaggttcatcttctccacactcctagcactagagtag

SEQ ID NO: 9380 - DNA, 516 bp, Oryza sativa
  Clone ID: PAT_MRT4530_15801C.1
gcatggcaacaattataataatcccctatatatattataccatgagtctttccttctcctggggaaccatgaatctattacagttatcttggtaattaaaaggttgctgatgttaagtagaccaagcactgaccttgataataattctctggtgctattctttagtgctgtgaccttgggcaaatcaccttatttccctgagcctcagcttcctcatttggaagatgagtatgataatgcctatgtcacaaggttgttttgttgctcgaatggtgctcaggataaaaaagcactttggaaactgaagtactacacaaactgaaggtattattattgctaataacagttgttattctaataacagttgttattctgttatccctgcaaggcataaaaagggatgaatattatgttatccattttacaggtgagaaaatacagttgtagaggtccagaggattataatgttggaaaatatcataagcttcagaatcaggtggacttgaatcccattta

SEQ ID NO: 9381 - DNA, 468 bp, Oryza sativa
  Clone ID: PAT_MRT4530_15802C.1
atggactacccaagtgggcagcgagagcgtgttcgccggctcggcagccagcgcagcaagcgttggtggcgaggttgcggctacggccgctgcagcggcgaaatccacaccgccgctcaccaggcgcactgtggacggtggcgctcgtcggggccgcagcggaggcagcgccgagacggaggcagcttgatgaagcctggaggcggagggcggaggcgcgcgatggaggcgaaggccgagcgcgatggatggggtgggaatggatttgaggtggcgctggtagtggtgaggttatatgatgatcaatttgagaaattttgtattctattatatgatgatcaatttgagaaggagaagcaaggagctggaagcttggtgggctttttgcagccccgagatatccatcaacaatcctgggctggcaagctacggaggtttccatcaacaatccgctttttccttaggtag

SEQ ID NO: 9382 - DNA, 401 bp, Oryza sativa
  Clone ID: PAT_MRT4530_15803C.1
caaaatccgcggaaaaagaagaacgaccaaaacccccacacagaaacagcaaaaagaacaacatagacaaagagggcccccacaccgaggcaatattaaagataaggaaaagagccaacaaaagaaaccctgcacgaaagaaaagaaacccaacagccgcaaaaaaagccggtgagagcataacgggcaaatccagggaagggaggaatactttaggagaggaggcaccacgcacctcagggagaaggcttaaaacatcacaaattacatcaccacagaccaacggcacacggcctggcgcccatcacaaaaaagcgcgtcctgcgtgctgtgaaggcactcaggcgcggggctcaaggactaaagggatcagcaaagatcgccgaacagtaaagttgtaa

SEQ ID NO: 9383 - DNA, 213 bp, Oryza sativa
  Clone ID: PAT_MRT4530_15804C.1
atggagatggatgcacagatcaatccaatcctccacgtcgtaggccacctccaggatttgccgcatccactccatggcttgggcgtcccccacatgatggatcaccttcaacaagcgatcagagttaattctgatgatcttcctctccaagggtacccggattataagggatatcgcatcctctgggtattggcaacacccctggagggttag

SEQ ID NO: 9384 - DNA, 450 bp, Oryza sativa
  Clone ID: PAT_MRT4530_15805C.1
atggacatggacacggacatggtcatgggcatggacattcccatgaccatgatcatggtggttctgaccatgaccatcaccaccatgaagatcaagagcatggccatgtacatcaccacgaagatggccatgagcatcggtgtgatgattggaggggctatcatctggtacaagcccgagtggaagattattgatctcatctgcaccctcatcttctccgtgatcgtactcttcaccacaatcaagatgctgcgcaacatccttgaggtcctgatggagagcacgccccgcgagatcgatgccaccagccttgagaatggcctccgcgacatggacggtgtggttgcagcacatgagctgcacatctgggccataacggtggggaaggttctcctggcgtgccatgtgacaatcactcaggacgcagacgctgatcaaatgctgaacaag

SEQ ID NO: 9385 - DNA, 963 bp, Oryza sativa
  Clone ID: PAT_MRT4530_15806C.1
ttacttatcatccggcggaacttggcacctgacgcggggctgcatcggctttcgatctccggcgaaggggtaagtcctacgttccaccggtccgctgcctttcccccatatgcgccgccgcattctttccccaaccgcgccggcgccgcagcctccccccgcccagcatccattcctctgggtcgtctcctcaacagccgcgtttctcttccccgtatccctttctctgcacacttcgatgccgccccatccccttccactgcattgccggcgtctcctctccctgactcccctaccgtcccccttccgccatcgcctgtcggtgaggcggcacctccccggcccgcgcggcccgccagagcagagggagcaggaggaccggagctcaacagagtcggcgaccaccagatcttgagctcgagcttgtcccttcctttcgttgctctgctgcacacgattaattatgctcagcgcggaagcaacaatgagaacgacgatgacgcccctctgtgcagcggcggcgacacatcccagctcccgtacggcggtgacagagagttgaggacccgctaccgcccttccagtattctcgcccttcatcttcgccatctcccgctgttcgtccgtgcaacattgaggatcggaggtcggaagcaaggtcgagaggcggaggagaagcgccggtggggcggcacgacggcgagcatcgccaaggcctcccgctcgcggccaccggcgtcgagggcatgaagggagtggcagcggcaaggtgttgtcggcgctgtctcctccgcgccagccgcctccgaccctggccgcatccgacgcggccgccctcatcggccatccagcattgccccctccacctccgctccacgggttgtcgtcgaggtcgtcgtagagagccgccgccgccgtcgccagcctctgcgtgctcaccgtcgtgcgggaagagcgatccat

SEQ ID NO: 9386 - DNA, 1883 bp, Oryza sativa
  Clone ID: PAT_MRT4530_15807C.1
cccactccccatctccaacgcacgcacgcgccatcaccaccacctcgacgccggcggcgacgaccacggcgacggcaacggcggcggcggcagagaagccctcctcatccccaagatggacagccataactcagcacctccccagattgctgaagtgagaatggacatctcatcatctacttctgtagcagctgggaacaaagtttgcagaggtgctgcttgtgacttttctgattccagtaatagctcaaaagatgcaagggagagaatggcgtcaatgaggaagctcattattgctgtgatcctttgcatcatattcatggcggtcgaagtggttggaggtatcaaagcaaacagtttggcaatcttgactgatgcagcccatctcctttcggatgttgcggcctttgccatatctttgttctctctttgggcagctggatgggaagctacaccacagcagtcatatgggtttttccgtatagaaattcttggtgccctggtttctattcagctcatatggctccttgctggtattcttgtctatgaagctattgtaaggctcattaatgaaagtggtgaggtccagggctccctcatgtttgctgtctcagcatttggcttatttgttaacatcataatggctgtcttgcttggtcatgaccatggacatggacacggacatggtcatgggcatggacattcccatgaccatgatcatggtggttctgaccatgaccatcaccaccatgaagatcaagagcatggccatgtacatcaccacgaagatggccatggtaattcaattaccgtcaatctccatcaccatccaggcactggacaccaccaccatgatgctgaggaaccattgctcaagagtgatgctggttgtgacagcacccaatctggtgccaaggatgccaagaaggctcgtcgtaatatcaatgtacacagtgcttatctgcatgtgcttggggattcaatccagagcatcggtgtgatgattggaggggctatcatctggtacaagcccgagtggaagattattgatctcatctgcaccctcatcttctccgtgatcgtactcttcaccacaatcaagatgctgcgcaacatccttgaggtcctgatggagagcacgccccgcgagatcgatgccaccagccttgagaatggcctccgcgacatggacggtgtggttgcagtacatgagctgcacatctgggccataacggtggggaaggttctcctggcgtgccatgtgacaatcactcaggacgcagacgctgatcaaatgctggacaaggtgattgggtacatcaagtctgagtacaacatcagccatgtgaccattcagattgagcgcgagtaggcttgaccgcttgagacaggtaggtagtgttgatgatagaacggatcatcttcatctcatctcatgggaccaacttatcaggaacctgtttcactggttttatgcagttactgttagctctgcagtgcaaatcagatcagcagagtccaacaattcctgcaggttcatctgaatgttagcttctgatgctgtttattactataagtacgtgttattagtactatcttagtcaattaggtgagttgatgttaatcagtttcgtagtcggttgtattcacatgggtgcagttttcagacaagttttcaggcacctgtgagtacgtcaacctgccttctgcgtctgtagtctagcgcccagccgtactagtttttatgtaaatctgcactggcatgggaaataataaccaagtttcgtttggccttataaagaaaaaattaaaacttttttgtttcttacattgcaaacctactacttgtgctaaataattcgtgtgcgtttgctggagtgggt

SEQ ID NO: 9387 - DNA, 360 bp, Oryza sativa
  Clone ID: PAT_MRT4530_15808C.1
catattcgtttatatgccagatatggaaacgaatatagatagcttgaatacggaaacaaatatgaattatctcgaatacgaataagaatcgaatatgatcggacatgaatacggcaacaaaattttcgaatatccgaattattatccatatctgatggaaacttcgatatcatactcgtactcgtattcgagagaaaatatacatatttgtatctatatccgacctattcgagaattatccgatccgaaaggtatccggttttctttttcttcggagcggacggaaactatctactccatttttatccctatgggtgaacgaatatagagtttgtctgcgttatttatgtaggcgtggag

SEQ ID NO: 9388 - DNA, 3002 bp, Oryza sativa
  Clone ID: PAT_MRT4530_15809C.1
tctttttcctcctcctccagatccaccctccgccgccctcatttcgcagccgcgggtttggattaccgtgaaatgagctttcttctcctctctgaaaaggtcagtttggtggtggaaagattggattttgattcccccgattcgcttcccctccggaaagattcaaccttgtcagctctccatccctcaacgaggcagtactaggagctatcaatcagctatggcggaggcggtggatgggggcagctgggaggacatgctgaggaggatcctcccgccggggtcccccatcccggaggcgccgccgaatctcgattactccatagccctagagtacgacggcccaccggtggcctatgacctacctagggtggaccccgtcgagatccccacggcggagccggtgtccggcccgcagaggcttgggaacggaggagggttgccggttgtggagcccatcccgctcccagtgtcccggattgcccggtgcgccgagcccgtgtcggcgcaggtcggcggcggcagctcggattcggtcaattcggtactgcagaatgaggagtttgacgatgatgatgatgattcccgctcgttgtcgcatgattcagcgcagagctcgccggggccgcaggataggagccgccggacgcaggaggggaggagaggcgccacggtgacgttcgggttcacgccggacagcaagtgtgagagcaaggagttcgaggagatgtccgagcagtacgtggtggtgaccaagaaggagaagaggaggagggcgtgctatcggtgtgggaagaggaaatgggagagcaaggaagcgtgcatcgtgtgcgatgcgaggtactgcggctactgtgtgctgaggatgatggggtcgatgccggaagggcgcaagtgcgtcacttgcattggccagccaattgatgagtccaagcggtcaaagctagggaagaactcaaggacactctcaaggttacttagccccttggaagtaaggcaaatattgaaagccgagaaggagtgccaagcaaaccagcttcggccggagcaacttattgtgaatggttgtccactggggccagatgagctgacagacctgcttagttgctcccggccacctcagaagctgaagcctggaaagtattggtatgacaaggagtcaggtttatggggaaaggaaggagaaaaaccggaaagaattattagttctaacctcagctttactgggaagcttcaggctaacgccagtaacggaaatacccaagtttatataaatggaagggaaataacaaagattgagctgaaaattctaaaggttgcaaatgttcaatgtcctcgtgatactcatttttgggtttatgatgatggtcgctatgaggaagaaggacagaacaacatcaaaggaaaaatctgggagtcggctttgacacgttttgcatgcgcattattttcacttccggtgcctcctgggaactctaatgaaacgagagatgaagttcactattctgcaagaactgttcctgattatttggaccagaaaagaatccaaaagctgctgcttcttggaccagatggtgctggtacaagcacaatttttaaacaggctaagtacttgtacgggacaagattcacccaagaagaacttgaaaacatcaaactgattatccaaagcaatatgttcaagtaccttggaattttgcttgagggtcgtgaacgctttgaggaagaagctttatctagatcaaattgcacaatttcagaggatgaagaaacccaacaagatgaaaataaagcaaatggttcaaattcctgtatatactcgataaatccaaggctgaagaaattctcagattggcttttggatatcatagcgatgggcgatctagatgctttcttccctgccgcaacgcgagaatacgctccatttgttgatgagatgtggaaggatcctgccatacaagcaacaccggccggaaaggacgaattgcatttccttcctgatgttgctgagtacttcttgagcagggccattgaggtatcgagcaatgagtatgaaccttcagagaaagatgtgatctttgctgaaggtgtaacacaagggaatgggttggctttcattgaattcgcccttgatgatcgcagtcccatgtctgagccttacattgagaaccctgaagcacattcccagcctcttaccaaatatcagttgattagagtaagtgccaagggcatgaatgatggctgcaagtgggtggaaatgtttgaggatgtccgcatggtgatattctctgtagccctcagtgactatgaccaagtgggacctcctgtatatggcagcagtcggcctctcttgaacaagatgatgcaaagcaaagagttatttgaggctacgattcggcaaccatgcttctgcgatactcctttcgtcctggtactcaacaagtatgacctctttgaggagaagatcaaccgcgcacctctaacgacctgcgagtggttcaacgacttctccccggtgcggacacaccacaacaaccagtcgctcgcccagcaggcgtactactacgtagcggtgaagttcaaggacctgtactacgagcacacgggccggaagctcttcgtgtggcaggcgcgtgcccgtgaccgccagacggtcgacgaggcgttcaagtacgtgagggagatcctccggtgggaggatgagaaagaggagaacttgtatggcggcggggaagactcgttctacagcaccacggaaatgagctcctctcctttcatccgagcagaatgaattcgcattggctgctgaaatcgaattctttgcaacccggcgaaagagtgcccggttcctttcgccgaattggtacagaaaacattggatatggttgtatattgattttacaggttatcctgatcgaaattgttgctgttcatcacctgaagagaataggatccgttggtcctgttgttgcgctagcctgtactaatttttttcgaaacaa

SEQ ID NO: 9389 - DNA, 534 bp, Oryza sativa
  Clone ID: PAT_MRT4530_1580C.1
atggcttgggcagcggcgaagcagtggagggctggaggcaccgctggagccatggagctggagaccggcaatgtgcagggctggcggccgttcccggtgacggaggcaactggatctatgcgccgccgcgctgttgctcccgaggacgggaggcgatggatccgcacgccgccgtccttcccacccgcacctgaccgctccagaggacagaggctgccggatccgcacgccgccgtcgcttccgaggatggggggcggcggatctgtgcgccgccgtccttgcccctacactctccccttcccaacgatgcggggtatggaggtggagcagtggcgacacaaggatgggcaacggagaacagggagaggacggacgacgtcggtggtgacgagtggagggcgggcgacaacgaaggcgactgggggagtcctgtgccggcaccagcactgaccgcagggcgcgaggcgtgggtggggcgatggccacgcagtggggaggatctgaaggacctccaggtgacagagcttaaataa

SEQ ID NO: 9390 - DNA, 654 bp, Oryza sativa
  Clone ID: PAT_MRT4530_15810C.1
ttaagtttcaatggtgtgctcatctatcaggacacgggacgtagcttcttctcgtttgggcacccaacaagcaaggataccatcgatcatctcaattaagctataatggccatcttcaccgcgcactggcgaaaggcggagctcgtggcaccggcgaggccaaccccgcacgagcacaaggtcctctccgacattgacacccagcgtggactgcagttctacaccgccggagtcgagttcttccgtcgccgccatcacgctgcggccgtcttctccggtggtgacgacgacaatagcggtgacctggtgggtatcatcagagcagcgctggcggaggcgctggtgagcttctacccactggccggccgcctccgggagctccccgtcgtcgcaggtggaggaggaggaggaggtaagctggttgtggagtgcacggcggaaggggtggttttcgtggaggccgacgccgacgtgcggttgcaggagctcgtccacggccagccgctgggccctccgtacccgtgcgtggaggagctcctctgcagcaacctcgtcggcgaacctgacgtcgtccttggcaagccactgctcttcctgccggtcgttcggggctgttagtacgtacttcatacaccgggtcccacgttcctccat

SEQ ID NO: 9391 - DNA, 639 bp, Oryza sativa
  Clone ID: PAT_MRT4530_15811C.1
gtaataagacatcgtctggtccccggtttgtgtacccctttacgtcaaatagttttggggcatttatcacctcacaggccgcatggtgcctactacagcaaacaagtgctcagcccatgcagtggagtttcgtagaggcaaccagtatagcatagtgctcatacccccttctgccaaccagttacgtttcaattagatacatacaaaccaagtcatccaccacaagtgttcccaacagctcagctggtagcacaaacaagtctcaactaccagcgcacattagtattgttcaagcgatttgtccaacaagctacatctgccaagcaaattttaggggtgtctaacgtgtgtagatcaagacttcaagctcaaagcccaaaactctggttggaacacattcaaacttggccatccaatatggtgggctatgctaccctaactatctatagtgctcccagggacgcatgtgccaccttgttcgtgtgagtgtctggtacttgaatgtgtaacaatataatagttcgtatgtttcaaaatcaagtcatacatcatcatgtgtcgactgttcgaaacttagggtcatataaatcatccatcaaaatcatcttacctattgaaatcgcaaaaaaaaaaaaaaaa

SEQ ID NO: 9392 - DNA, 984 bp, Oryza sativa
  Clone ID: PAT_MRT4530_15812C.1
atgtgcctacagctggccgattcatcaatccgttacccagcagggatagcggaggatgtgtcggtcaagatacgggatttctttgtcccggttgatttcgtggtgctagacatggacacggagaaggagacgccactcatcctggggcgttcgtttcttagcactgcacaagccaacattgacgtgggaacgggaagtatccatttccatatcaacggtatggaagagaagtttgagtttcagccaaggaccaaaaaatgctccatggtcagaattaaatacgggccaaacccgcaaaacatccaagaggtcaaagtggagccacccaagacggtcagcctggtgaagttcatgcaaaatttcctaaaaaggaaacaacgtttcccaggaaccgttattggaaggtgccggattttgaattttgaggaaattctttcagagcaaaccaaaataaaattttcagtgaaaatttcttgtgccatgaccacactgaccgttggaatccaacaaccaaaaatggggccgatagcaaagggactaggggtcatcaatggccagattgcttatatctcggccgttcgtccctgtattgatgagagttatctagtacaagggcatattcttaaacatagagtacatggatctttgatatactttttccctggttgtacaaatgaaaccccattgcctaatgcggggtatcatttgtacaactaccatgaactaaccattaccctgcgtaccataaaagaatctcgtgcaggtggaacatacagggagacacgcaatatgatgtatgaggcaggttgggagccaactggggatgcgtccggatggacccaagctccacaccaaagcatccgagtttcaagctgggcaagtgcctgtgaggaccggtggcgtgcaactcatcacatacagtggggagacatgagcaatcagccccctagatcaagtggtatacctccatctccaggtgaatga

SEQ ID NO: 9393 - DNA, 472 bp, Oryza sativa
  Clone ID: PAT_MRT4530_15813C.1
agaaacggagggagcagtaaataccccatttactcctgatatgatatgatggagtatattacaattacatacatgcaacccaaaaccaaaaccaaaaccagcacaacattcactaatcttgtgcatgtttgcaacgaatccaatgttaacgcacgcaccggctgtcatatcatataactataactgtatatataaacaaataaattcaatgttcatgaaccccggttgtcatctactccaaaccaaattaaaatgcagcttaattccctgctcgtctaacaaaaagccatcacttcatttcctacggagtagtgcccacacgccaggaacccccctctgccaacttcactagttctagtaactccgattggttgatgatgcagactcaacccttgctactttgccggctcaacaggatcccacgttacttgctttaacctttagggcacaggacaagcttgacatgatctgc

SEQ ID NO: 9394 - DNA, 718 bp, Oryza sativa
  Clone ID: PAT_MRT4530_15814C.1
ctcgttctccactgctcattaggacagccagtttgcgagaactctgagaaaagaacagcaaaagccactgcaagagaagcgcacgagcgctgagagtatctcagatccatggagatggaggctgccacgccggtgccgaggagtgacggcaggaagctggcgaggtgcccgaggctgcagatggacgccaagacggtcactgccatcgagcagtccacgggcgcggccatcgccgacgccgctgcggctggcgccgagggcgccggcggcgggatgcgcgtcaagatcgtgctgagcaagcagcagctgaagcaggtggccgcggccgtcgccggagggggcgccttcgcgctgccgccggcgctggagcagctcgtgagcgtgctcaagcggcagcacgcgaagaagcaggtggcagcggctgctgatgtggtcgtcggaaggcgccgctgccggtggtcgccggcgttgcagagcatcccggaggagtgctttagctaggtacccacgtctacgaatgtgtagtcgattcgcaacatgtatagcttcggtgatcagtccctcctttttttggcgatattcccttccttcctactaggctgcaaccgatcgatctagttgggccaaagttagtgcccaatggttgcatcccaactttgaaatgtcatgtattttaatctggcatttggacccaaataaaaaaaaaaaaaaaaaaaaa

SEQ ID NO: 9395 - DNA, 813 bp, Oryza sativa
  Clone ID: PAT_MRT4530_15815C.1
atgaaaaggagaaaaagaagagaaaaaaaaaaggacagcgagctagcagcccagcagcagcagcagcagccagcaggcctggccttggggccttggccggtccatacaagcaagacagcagcagcagcagtaaagtgcagtagaagcactgcggcagcagcagcgctacagtaccatcgcgcacgagagggagagccggatgacggtgggcgggggttggagtggaggcagctcggggcggcggcgagtgaggccagaggcagcttggggtggcgggacagcgatgtgcagagaaggagggacggcggtgggattgaggcgggtagaggccctatgtctcgccgccaacgaccactgtctcaacggcactacagtagctcgccgaagacaaccaccgtctcaacacggccaatgctctcctcgatctggatgtgcagcaccttccatgttggccaccgtctgcttcgtgttgcgggcaatgagcgtgcgagagagagagagggatttgcgagagaagcaaccgaggcagcggcggcggccgggcccgtgccgggcgggggcggcggcggcggcggcgaccgggccgtgccgagctggggcggcagcggccgagcccatgtcggggaggggcggccgcggcctcggccgggccgtgcccatgccgggaaggggcggcggccgggcccatgccgggaaggggcggcggcggctgggcccgtgctgcgcgggggcggtggcggcggccgcggccgcgccgtgccgagctggggcggcggcggccgggcccgtgccggagcgacggcggcccggcgc

SEQ ID NO: 9396 - DNA, 177 bp, Oryza sativa
  Clone ID: PAT_MRT4530_15816C.1
agctggcacgcctgcaggtgctggtacgctatagagcggtcgacctacgcgttcgtgcattggcgaaatcactcatgaaggaccttactgagaactactgaggagggaccttgaacatgtggagacatgagctgatagccctcgcgcatctgattggcttttggcctgaccatacac

SEQ ID NO: 9397 - DNA, 699 bp, Oryza sativa
  Clone ID: PAT_MRT4530_15817C.1
atgtacagctgctcgtgcgccgacgtcctcctgcggcggcagctggcgacccgcgacgacggtgtgggcggaggtggccacggcggcggggtgcgcggaggcggctgcgggttcttgccgccgtcagagctgacaatggcgcaggacgccggggcagcggcggcgcaggacctctccggagcaagccagttcctggctgggcttccgaggcagatgcattcggttaccgtgggacgggacgtcgaggcaggcggcgacggcgaggaaggggagcgccagcgcgcacagccgcggcagcgccgccgccatctccggcggccgccccgccgtcgaggaggatggccaagccacggcctcgtttcgttccggggtggcgcgagaggtggccggtgggggttggtgactcggtgcggtggcgcgtgccggcccgcgccgcggtggggaggggaagggttagcgagtcgctcgttcgctcgctcgccgtgcgccccccgtgtcggtgtcggtgtcggcgccgggcaggcagctgttttcggggggggctacgggtgggttgggcggtcgccgcgtcgcgcggtgatcctcctgcttcgggccttcaacgcgaagccggcgagcttgggcgagtacttcttttgcctgggccagaacagcactgcgacggaaattcggcccatgcttgatgggctgggactggac

SEQ ID NO: 9398 - DNA, 732 bp, Oryza sativa
  Clone ID: PAT_MRT4530_15818C.1
atggtgccaaaggctggaggtgggtgcagacagtgtatatgcaaggagaaatatgaggatcagagccttatgtttgattttgtgatgcgtcttcggtcagactttgaaactattagggatcctcagacaagagcacttgttggtactggccatcgccacagcagctctaatgggaagctctatgttctcgatcacttgagtcttccaccttcatcttttggctcctccaccactagttctgcagccatgggttatgcatcttctgcaacttttccacaatggcatcatagattggggcatctttgtgggttccgcctttcaactttaattcatcaggatgttctaggtcatgtctctattgatactacttttgattgtacgggttgtaaacttggaaaacagatacaactaccgtaccctattagtaattctaggactagttgtccgtttgaccttgttcattctgatgtatgggaccctgccccatttgcttctaagggtggacacaaatactatgtcatatttatagatgattattcgagatacacttggatttactatgtcgtatttttcattctgattcaggaggggagtacctctcagctgcttttcgacaacttctttcttccgagtgtactcttcctcagttctcttgccctggtgcccatcctcaaaatggtgttgctgagcgcaagcaccggcatatcattgagactgcccacactctattga

SEQ ID NO: 9399 - DNA, 730 bp, Oryza sativa
  Clone ID: PAT_MRT4530_15819C.1
ttttgttgaaacaggacacagggatacagataaaagtaaaataaaatatagaatagaacaaatatagattccacgaaagaatgtacagatccatatcgtagttataatacttttgccaaatttgtcaatttgtaacttatcatatagatactatccagatacagattaacatgataacatctcggcacactagataaatattggaagttatagttttcactttttggtcatcctaactgcaaatttgaagagctagcataaggtaaactttacccgtacataaatatgatggccctgtatggtcgagaaggttgagtatggatttcagaagtcagaactactccaatctatctcatttcatccatttccgggacagagtctatgaccaaatatacctaattgacagacataatagactgatatatactcatcttaatgctgattgctgtcaggtcaagccgcaaaatttctaatatgcagctgatgattactgaactagttatgcctgcatgccactgtaatccttatttacagtagtgcgagattttgttaatacggtgacagtgtgacacctatcagtatgggaccatttgccatactctgttgctttatcgaatttgttacaggtgaaaagttttgtaccaccacagaggtgcaccatctgttacccatcccccacaagaaaagcttgcaacttgttgccatcctgatcctgtacccagcctcgtgc

SEQ ID NO: 9400 - DNA, 1131 bp, Oryza sativa
  unsure (1)..(1131): unsure at all n locations
  Clone ID: PAT_MRT4530_1581C.1
atggcgttccgacgaacactagcacgcggcatatgggcggggaagaacgcgaacgccgccgccgcttgtccggcggctgcggctccaaaacctccggcgcggcggccgttgccggcggttgacgactgcccgacgctcgcgtacctgcggcccagaccgggaaccatccggtacaccacggcgtccgttccgcttcccgcccattgcttccccgccctccccgtcggcgaccagctgttcaaccggctccgcctcgacgggctggtcccgcctacgacggccgtgacgcggccaccggaggaggagggggtgggcgtgacggtggaggaggcgaggaaggtggcgcgtgcggcggagatggaggtcgcgcgggcgaggctgaggtccaacgcccagagcgtcgtgtccgggtcggaattcgccgcgctctgcgtcgacattgccggcggcgccgagggaggacgcaggctcgcccgcgcgctcgacgactccggcgtcgtcatcgtcctcggcgacgccgtcttcctccgccccgacatgatagcgaaagcgatcgggagcatgataccggcgacggcacacgcgacgcgagctgcagcaagcgtcgtcgaagtgcggaagaaacgggaggaggaggaggagctgcgggcgatggaggaggagaaggcgggcatcgacgcggcggcggcggcgcaggtgcggcgggagctgtggtgcgggctgggcctcctggcggcgcagacgctggggttcatgcggctcacgtccggggagctctcgtgggacgtcatggagcccgtctgcttctacgtcacgtcgctctacttcatgtccggatacgccttcttcatgcgcacctccacggagccgtccttcgagggcttctaccgcagccgcctcgcgtccaggcagcgacgcctcatgcgggcgcgcagcttcgacgtcgcccggtacgaggcgctgaaggagcaggtgggaggaggagcacggtacggcgtcgcggcgcgcgacgccatcgtgttgaggcagcagcacgtcacgcacgttcattagcagcagcagcagggtgtttttttttttttggggtggctaattaggtgtgacgtcnagcgccggcgtaattgccagcta

SEQ ID NO: 9401 - DNA, 219 bp, Oryza sativa
  Clone ID: PAT_MRT4530_15820C.1
atgaaggtggaagactcaagtgatcgagaacatagagcttcccaggagaactactatggcgatggccagtaccaacgagtgctcttgtctgacgatcctgcacgaagcaagaggatgcaagctgagacacatctgatgtcatatgaaaagaggctcctgagtctaacacccatgactgagaagtacctggtgcaggggccaaagaagctgatccattag

SEQ ID NO: 9402 - DNA, 3765 bp, Oryza sativa
  Clone ID: PAT_MRT4530_15821C.1
atgcatgttggacaactgattagtattatattgggatctattgaaaactggggtcttcgtgataaggtttttagtgttgtattggatgatgagtttgttgatgattcagttgcttcaaatgtcgaatcccatctccagaaatggaactcccactgcgcaaaccagagcttgtttgtggtacgatatggaactcatttacttgatcaggttattcaagtggggctggatgaacttgacaaaatcgtggagaagtcaatgaattgttctgagagcacggagggcctcacctcttcagaagtaaaatatgcaaactacaactatgcagcatcagggaaagactggagctgtgcacgtcgtatttgtgataccttggaggattttcatcggtatatggacataatgcacaattttccctgtcccgtggacctctttgagaaggtgtggcaagtcaaatgtaatttgcaacgcaaagttgataaccccagggatgatgcatttgctactgtggtaaagaagatgcaagagaagttcaagaaatgctggaaactttgttgcttacatttctatatggccatgatcgttgatccttcatatcgtctggaaaacatcaaacttcatgttgacctgcacactgacacagattatattcgttgtatggatgatatattgctcaggctctttgatgaatattctggcaaggtggaagattctaactgtactaaggagactagaaatgaaatcaatgtgagcagagatgatgatcggttgaaatattaccgtcgttatggatatccaatttgtgagcgaccgatgactgagcttgatcagtacttgcaagagccatgcctctctggagcagcggcagcccagtgcagcagtgcagtagcagcgtttcaagtgcagcagcagctcagcctttcagattgcaaccatggcatcagatccacttgggaatgtcattcttttgcctttggatataaaactcaatggacaaaattaccgtcgtatggtgtggcctctcacttgaatgatgatccacctcatgagaaggaagatgagaagaaaattgcagcttggcgacgtaatgatgagcgtgtgatggccttcttgtgcatgagcgctgaggtccccattagaatgaattttattgatctttcttctgctaagaagatgtgggagtatcttcaacaacgctattcgagatacacttggatttacttcatgaaacaccgttcacaacttttatccatataccaatcctttattcgcatgatccatactcagttttctgctactattcgtatttttcgttctgattcaggaggggagtacctctcagctgcttttcgacaacttctttcttccgagggtactcttcctcagctctcttgccctggtgcccatcctcaaaatggtgttgctgagcgcaagcaccggcatatcattgagactgcacgcactctattgattgcatcatttgtaccttctcatttttgggctgaagctgtttccactgctgtttatctcatcaatattcagccatcatctcgccttcaaggaaagtgtccaggagaggttctatttggatcttccccatgctatgatcatcttcgtgtttttggttgtacttgctatgttcttttggcatctcgagagcgcaccaagttgtcagctcaatcagttgagtgtgtttttcttggctatagtattgaacataaagggtatcgttgttatgacccctcttctcgtcgtattcgcatatctcgagatgtcactttcattgaggatcgtccatatttctactctaaaatctcgtcctcctcatctcctcaggagtccatttcttttctccatcttccacctattccttctcaagacctaactaccatcagtgagacaccttctccatcttccattccttcaccctctttggatataccatcatccactctaacaccaaggtcagagatgtcaccttttcctttccactatagtcgtcgacctcgaactccacatgagtctcagcctccctcttgtcttccttcagatgttccaactagtaccattaatgctcaatctgatgatccacccgttgctccgctcattgatgatccacttgtgtcatcaccacagtctgctacaccacgatatggtcttcgagatcgcagcaagataatgcctcatcctcgctatatgtgtgcagcaattgatggtgttcaggagcctagtacatatcaagaggctgctgccattcctgagtggcaattggctatgacagaggagcttgctgccttagagcgaacaagaacctgggatattgttcctcttccttgtcatgccattccaattacttgcaagtgggtgtttaaggtgaagactcgctctgatggctctattgagcgctacaaagctcgcttagttgctcgcggttttcagcaagaacatggtcgcgattatgatgagactttcgctccggttgctcacatgaccactgttcgtactcttgtagccgtggcagctgctcgttcctggaccatatctcagatggatgtgaagaatgcttttcttcatggtgacctaaaggaggaggtttacatgaaaccgcctcctggtgttgatgcccctgcaaattatgtttttcgtctcaatcgtgctctttatggtttaaagcaagcacctcgtgcttggtttgagcgttttagctccgttgtttgtgctgctggattctctccaagtgatcatgatccggctttattcattcatgtttctgaccatggacggactctattgttgctttatgttgatgacatgctaatcacaggggatgacttagagtatattgcttttgtgaagcaatgtctaagtgagcaattcatgatgtctgatttaggccctcttagctactttttggggatagaggtcactaatacagaggatggctactacctttctcagcatcgatatattgatgatcttataacacgctctggtcttactgataccaagactgccactactccaatggagctacatgttcaacttcgttctactgaaggtgttttgcttgaggatccctctcgatatcgtcaaattgttggaagccttgtttatctcactataaccagaccagatattgctcacattgttcatgtgcttagtcagtttgtcagtgcacctacctctgttcattatagccatttgcttcgtgtgctccgttacttgagagggactgcatctcgacaactattctatgcacgctcgagtcagcttcacctccatgcatattctgactcaacctgggcgagtgatccaatggatcgtcgatcaattactggatattgtattttccttggtacttctctcattgcttggaagtccaagaagcaaactgctgtgtcaagatccagtactgaatctgaacttcgcgcacttgctactaccacttctgagattgtttggcttcgttggttattatctgatcttggtgtagaatgcaaggatccaacacctcttctttgtgataacacaggagctatacaaattgccaatgatcctgtaaagcatgagttaactaagcatattggagtggatgcatcattcacacgctctcattgtcagcagtcaacaatttctcttcgatatgtgccatctgaacttcaagttgctgacttctttaccaaggctcaaactagagagcaacaccgtctttacattctcaaactcaatgtgatagatcctccaaatcattctccaaatccaccttga

SEQ ID NO: 9403 - DNA, 4608 bp, Oryza sativa
  Clone ID: PAT_MRT4530_15822C.1
atggcatcagatccacttgggaatgtcattcttttgcctttggatataaaactcaatggacaaaattaccgtgagtgggcttcctctgctcgtatgcaactcaggtcgtatggtgtggcctctcacttgaatgatgatccacctcatgagaaggaagatgagaagaaaattgcagcttggcggcgtaatgatgagcgtgtgatggccttcttgtgcatgagcgctgaggtccccattagaatgaattttattgatctttcttctgctaagaagatgtgggagtatcttcaacaacgctatcaacagagcagtgcagctctccgcttttctcttcgcaagagcttgcaaagccttgaacagggcgacatgaccattgaggagtttcataatgccttcacctcattgtctagacaattggattctatggtgccaaaggctggaggtgggtgcagacagtgtatatgcaaggagaaatatgaggagcagagccttatgtttgattttgtgatgcgtcttcggttagactttgaacctattagggtgcagcttcttggtcggtctactcttcctaccatggctgaggctctcgcagacttaattgccgaggaaactcgtctacagtcacttcccaacgccacaacaccgcaacacactgtccttgcttcttcattgatgggaacctccttgtctggtgatcatgctttccagcatgggtccttagcaacttcttccactcagattgtttgctcccactgcaagaggtctggtcaccgtgttgagaaatgcttcaagctacatcctgaattgttggctgagtttagggccaagcgtggtgcatctcgccgtgcccctagtacttcagttacacttgctgctcccgctgtgactgcagcttcagttagtgcaacttcaaccaatcagccctacatgaatgcttatcaacctaatggatcagcttctttggcccctgcaccaggtacttctcagtcatgggtgttagactcaggagcctcttttcatatgacatcagatgtgtctcagcttgcatcctgtcaaccagttatcaatggtacatgtgttcagacagctaatggcacatcctgtttagttactcaccagggcactctttccacttcacaactcactgtaccaaatgtttctcttgtgccacaactttccatcaatctcatttctgttggacaactcacagacatgaactattttgtgggttttgataatacctcttgcttcgtgcaggatcgtcagacaagagcactcgttggtactggccatcgccatagtagttctcctgggaagctctatgttctcgatcacttgagtcttccaccttcatcttttggctccaccaccactagttccacagccttgggttatgcatcttctacaacttttccacaatggcatcatagattggggcatctttgtgggtcccgcctttcaactttaattcgtcagggtgttctaggtcatgtctctattgatactacttttgattgtacgggttgtaaacttggaaaacagatacaacttccttaccctattagtaattctaggactagttgtccttttgaccttgttcattctgatgtatggggccctgccccatttgcttctaagggtggacacaaatattatgtcatatttatagatgattattcgagatacacttggatttacttcatgaaacaccgttcacaacttttatccatataccaatcctttattcgcatgatccatactcagttttctgctactattcgtatttttcgttctgattcaggaggggagtacctctcagctgcttttcgacaacttctttcttccgagggtactcttcctcagctctcttgccctggtgcccatcctcaaaatggtgttgctgagcgcaagcaccggcatatcattgagactgcacgcactctattgattgcatcatttgtaccttctcatttttgggctgaagctgtttccactgctgtttatctcatcaatattcagccatcatctcgccttcaaggaaagtgtccaggagaggttctatttggatcttccccatgctatgatcatcttcgtgtttttggttgtacttgctatgttcttttggcatctcgagagcgcaccaagttgtcagctcaatcagttgagtgtgtttttcttggctatagtattgaacataaagggtatcgttgttatgacccctcttctcgtcgtattcgcatatctcgagatgtcactttcattgaggatcgtccatatttctactctaaaatctcgtcctcctcatctcctcaggagtccatttcttttctccatcttccacctattccttctcaagacctaactaccatcagtgagacaccttctccatcttccattccttcaccctctttggatataccatcatccactctaacaccaaggtcagagatgtcaccttttcctttccactatagtcgtcgacctcgaactccacatgagtctcagcctccctcttgtcttccttcagatgttccaactagtaccattaatgctcaatctgatgatccacccgttgctccgctcattgatgatccacttgtgtcatcaccacagtctgctacaccacgatatggtcttcgagatcgcagcaagataatgcctcatcctcgctatatgtgtgcagcaattgatggtgttcaggagcctagtacatatcaagaggctgctgccattcctgagtggcaattggctatgacagaggagcttgctgccttagagcgaacaagaacctgggatattgttcctcttccttgtcatgccattccaattacttgcaagtgggtgtttaaggtgaagactcgctctgatggctctattgagcgctacaaagctcgcttagttgctcgcggttttcagcaagaacatggtcgcgattatgatgagactttcgctccggttgctcacatgaccactgttcgtactcttgtggccgtggcagctgctcgttcctggaccatatctcagatggatgtgaagaatgcttttcttcatggtgacctaaaggaggaggtttacatgaaaccgcctcctggtgttgatgcccctgcaaattatgtttttcgtctcaatcgtgctctttatggtttaaagcaagcacctcgtgcttggtttgagcgttttagctccgttgtttgtgctgctggattctctccaagtgatcatgatccggctttattcattcatgtttctgaccatggacggactctattgttgctttatgttgatgacatgctaatcacaggggatgacttagagtatattgcttttgtgaagcaatgtctaagtgagcaattcatgatgtctgatttaggccctcttagctactttttggggatagaggtcactaatacagaggatggctactacctttctcagcatcgatatattgatgatcttataacacgctctggtcttactgataccaagactgccactactccaatggagctacatgttcaacttcgttctactgaaggtgttttgcttgaggatccctctcgatatcgtcaaattgttggaagccttgtttatctcactataaccagaccagatattgctcacattgttcatgtgcttagtcagtttgtcagtgcacctacctctgttcattatagccatttgcttcgtgtgctccgttacttgagagggactgcatctcgacaactattctatgcacgctcgagtcagcttcacctccatgcatattctgactcaacctgggcgagtgatccaatggatcgtcgatcaattactggatattgtattttccttggtacttctctcattgcttggaagtccaagaagcaaactgctgtgtcaagatccagtactgaatctgaacttcgcgcacttgctactaccacttctgagattgtttggcttcgttggttattatctgatcttggtgtagaatgcaaggatccaacacctcttctttgtgataacacaggagctatacaaattgccaatgatcctgtaaagcatgagttaactaagcatattggagtggatgcatcattcacacgctctcattgtcagcagtcaacaatttctcttcgatatgtgccatctgaacttcaagttgctgacttctttaccaaggctcaaactagagagcaacaccgtctttacattctcaaactcaattgctctcctggaatacaccgtactgattttagcacaattcacaaagttcagaaacttaagatcgtcgagaaggccgagttcatgtgggatgtgcccaccaaactggttctgtggcaagtggagcttcctgagtggtgcagtgacctgtttccccatgaggtgagcgctccagaggggtcttttgttatgagtgacttgaatgagaggagcacttggcgatctgagctgttggaggcagtgtttgcagttggagctttgagcatggaggcatcggtggtgcttggggcgttagatagcaaagcagctgcaagaagaaagcttactgcccaggatgcacctgttgtgcatttgcagggtcctagctccattgaacccaggatgatcaagagacaatgggtataa

SEQ ID NO: 9404 - DNA, 359 bp, Oryza sativa
  unsure (1)..(359): unsure at all n locations
  Clone ID: PAT_MRT4530_15823C.1
nnnnnntttttttaaacaatcaaatcagtagtccacatgtagatcagaggggcatttgttgcagcatcaccacgatccagcatcaatatttaatttatgtccattcgtttgcaattacacactgtcacaccatgaacttctgggaactagtggtaggcacaccacagaggcccatcagaccctcttatttcaagcacatacatcatcaacaaattcacacacacagatggttctgcgtcactcccctgagagacacacacgcgaattaattaactcagtatgcaagcacacaactatatttacaactcagaggtgctggctgtaagctcatgatgcaccaatttattctttagaataca

SEQ ID NO: 9405 - DNA, 788 bp, Oryza sativa
  Clone ID: PAT_MRT4530_15824C.1
gaaaaagtaatcacataacatattttgatttggacgaaataatccaacttgtcttgcatttcagttttgacatcaataaaatagggcagctatgactattaaaattgagcaaactagagctgaaagaaaagtgatactagatacaaatcctatgtgcgcttcgtctccacagggtatgcgccatgtagctttctccacaggtgcagcatcaagatctttaagcaaccatgagcaggattcaggaacagtatccttctttctgtaacgtagaagcagatctggggctaccaaactcaaccgtcgcataaccactggcatcaagaggtgggtatctagcatggagaggcaggtctattacaaggttacagttcatcgatgcaagtggtgcgagatcaacatggatttccacagatgaccggttggatagagccgaaggcagttccaggttggtgtctccgaaaacacccatatcaagatatacttcccgctcaccaaattgttgtagctcaaatgggtcagccaacacaccatccgggagtttctctacccccaccggctcggcttcagggttttcctgcttgccttccatcccatctgcacagttagctccctcctcctgtttgcctagacggcgatgagaaccttcaccaaccagttccgagtgcaattctgtaagcatgggtgcatcaagatcaccatcaagtcctttgcatgagtcagcagaatcagatgtttcagtcaagtcacgatgttgagcaagctggccgcctgcagcccgggggatccac

SEQ ID NO: 9406 - DNA, 668 bp, Oryza sativa
  unsure (1)..(668): unsure at all n locations
  Clone ID: PAT_MRT4530_15825C.1
nnnnnnnnnnnnnnnnnnnnnnnnnnnnnnnnnnnnnnnnnnnnnnnnnnnnnnnnnnnnnnnnnnnnnnnnnnnnnnnnnnnnnnnnnnnnnnnnnnnnnnnnnnnnnnnnnnnnnnnnnnnnnnnnagcaagcagcagccaagaagcacacccggagcgagcgacggcggcgcggtagtagtagcagattcgggtgatgatggattcgattgcggttacttctggaggctgccgcggacgccgggcttgggcttggaggaggaggcggcggcctcaccggcggcggcggccggcccgcccgccgtggaggttgttgagcttgtcgggctcgaaggggagcttggggtggcgcgcctcgtggtggatctgcatggacttgatgtcgggggcggtggtcttgcagagagggcactcgagcttggcgtggccgcccttgtcctgccccagccggtccttctgcccggccttcccgccgcccctgttcgtcgtcgccgcgtcgatcttcgccgcgatctccttcgccgtgtgcttcttcggcttcgccttccccgtcatctccgcgcccccccgccgccgccgccgccccctcctgtctctctccgctctcgccgccgccgccgccgattctcgctaacccgtgggcggacgcgtgggcggacgcgaaga

SEQ ID NO: 9407 - DNA, 1607 bp, Oryza sativa
  Clone ID: PAT_MRT4530_15826C.1
atggcgtcgccgacgtcctccgcctccgcgccggcgagccaccacctgcgcctctggtggcgccgccgcggccgcggcggcgccgtcggggccaccttcaccgtcgcgctcctcgccgccgcgctgctcctcgccctctccttgtacgcctcctccctgccccgcgcgcctaccacgccctcctcctcctctaacctcgtcggcctcaccctcgtccgccgcgccaaggagaagggcgcggtgtgcttggatgggagcgcgccggggtaccatctgcagagaggctccggcactggatctcaaaactggctccttcacttggagggcggaggctggtgccggaatctgaggtcatgtgcttcacgtcaaaaatcggtgttgggttcatcgcaatacatggaatgccagattgagtttgctgggatcttgagtaatgacaaatttcaaaacccagatttttacaattggaataaagttaagataaggtattgtgatggggcatcattttctggaaacgtcaagaacgaattgcaggtattgttaatcattgcagaatggcacaaaattctttttccggggccagcgtatctgggaggcagtaatgagcgaacttctactaaagggactcaggcatgccaaacaggatgctctgctggtgggctagccactttcattcactgcgataatttccgtacactgctaccaaaggattctagggttaagtgtcttgcggatggtggatttttcctcgatgtagaggacatttctgggcaaaggaccatgcgagcattctacaacgatgttgtccgtcttcaggatctgcgtggaaggtttccccattgtggtccaaacatggatctgggccagtgcttcttcccaagtgaagttgtaaaggacatcatcaccccagtatttgttcttaatccagcgtatgatgcttggcaggtgcaacatgtgttgagtccagtagcatctgaccctcaacattcatggctagaatgcagactggatattagcaagtgtgattcgaaccaacttgaaattctccaaggttttaggaaaaagttacatgatactataagtgaacttaagcacaaaaaggactggggcttttttatcgactcatgctttatacactgtcagtcgttgaactccttgacttggcattctccatcttctcttagagtcaacaacaagaccattgcagaggcggttggagattggttctttgacagaagagaggtgaaggaaattgattgtgaatatccctgcaacccgacttgccacaacttggtttttgccaagcctttcaaggcatgatgaagttctaaacacgtttctctttttgccatgatattgtaaaacaggaaattttatatcaatcatcggtcatcatgtaatcttcagactcgtcgggtgtttgacacccaaaatcatacatctgagatagttagactggccgaattttttttccacgcaatttatgtaggattataagtagtttattcaaaagtagaattgtatgtgctgtacttcacaacttgttttctataaaataaacaaaaagtgtatttcttgtaaaaaaaaaaaaaaaaaaaaaaaaaaaa

SEQ ID NO: 9408 - DNA, 275 bp, Oryza sativa
  Clone ID: PAT_MRT4530_15827C.1
atgacggttgtgacggttggaatggtcagtaatatcctccaaccgtcattggggcttcatctcaaccgtgcagccaaaacctggatccaacggaggcgagggaggttcggccgaaccaggggccggcccaactagcccacctttcggctggcggcctcctctgttgctcctttatgtagacttgtgaattttggcccaatgtgtcgtgttatttctgagttcttagcccatccatacatattctcgacaccgtccgattgatttatcgtctaagt

SEQ ID NO: 9409 - DNA, 468 bp, Oryza sativa
  unsure (1)..(468): unsure at all n locations
  Clone ID: PAT_MRT4530_15829C.1
atggccgcttgtgcctcactcaccgccatcttcgtcgcctcctccgccgactcgccgctccatcccctcccttcgagctacaccaccctgcacttacctaccactcgtggcaaccgcacggagaagacgcanagcagccccccatctcctccacccttttgtcgaaagcggctcgcccgcaaaacgattaccctagtgcataaggcaaacgagaaattttggaaaaccggtgtattttggaacaagccgttgtttacaaccaccatcggattgccccggttaaacggctataaaccctatagaggacacaaggaattttctaaaataattccgtggaaccctcctcgcaagaaaatacctaggtgcagttcctctccctctctttatccaacccttactaatcttgaggacgagattattcttaagggggttgtgtgccaaagatctcgattaaatcttatctcctaa

SEQ ID NO: 9410 - DNA, 1492 bp, Oryza sativa
  Clone ID: PAT_MRT4530_1582C.1
gccgccgggattccgccccgggccgctccacccgcatccccgcgcgccgctccccgcgctcccccctcttcttcggccgcatctctgatccgtccagttgacccaaagctagagtctttcttgcttctcctgagtcctgacttcttgatccacctattgttcttcgatttcttgcttcttgattcgtcgccgctgctgctgctggaggcagaaagggagcacaagatcgagcaatccaagctgcaattagaggaagaggaagaggaagaggaagaggaggaggatgctgagaagggcggggaaaggggaggttgcagatgggttctaccagattcgctcggattgcacccacaaggtccccgagaccaagttcaagatcaaggttgggaaaacgttgagcgttcggaaatggcatgctgcgtttacgcgtgaaggccgtttggatattgcttcggttctgaaccggatacagaaagggggtgtccatcctacaatcaggggagaggtctgggagtttttacttggctgttttgatcctgggagcacttttgatgagcgcgagcagattagggagaaaagaagaatacaatatgccatatggaagcaagaatgcaaagatatggactcccatgttggtagcggtaaaattatcacagccccaattataactgaggatggaaaacctattaaggatcctttggttttgctcgaagctacttcagaccagcacacaatgcaaggtagttcatccagcagcaggaacgaaaatgaggtggacaagtccgaaaattgtgtggtggtcaggggagaggtctgggagtttttacttggctgttttgatcctgggagcacttttgatgagcgcgagcagattagggagaaaagaagcctcaacattgtaacagacgatctatgtagaatacaatatgccatatggaagcaagaatgcaaagatatggactcccatgttggtagcggtaaaattatcacagccccaattataactgaggatggaaaacctattaaggatcctttggttttgctcgaagctacttcagaccagcacacaatgcaaggccttgatgtgctgcgcactgatcgatccatggtgttttatgagaacaaagaaaatctttcgaagttatgggatattcttgctgtatatgcttggatcgacaaagaaattggctattgtcaaggaatgagtgatttatgctcaccgatgatagtgctgctcaacgacgaagcagatgcattttggtgctttgagagattaatgcgtagactgcgaggaaatttcagatgcacacagcaatctgttggggtggagaaccagcttcagcaccttgcgtctatcattcaagtgcttgacccaaaattacatgaccacctagaaacacttggtgggggtgattatctctttgcattccgcatgttcatggtattgtttcggcgtgaattatcatttggggactcactatacctttgggag

SEQ ID NO: 9411 - DNA, 744 bp, Oryza sativa
  Clone ID: PAT_MRT4530_15831C.1
atggcggccaaaacactccctcccctagccagatttgaccagtcgaagtcactggctaatggtgggccccacgtgcttttgccacctgctgcttctctctctgcttcttctctctcgtatccgttgtcgccgttcgttagtgcccgccggcccagtgtcaatgcaggcgccgccgaccctaccggccgtcgccttccctgccagccgtcgtcgcccctgcaggccgccatcgccttccttcttcggcgtcggccatcggcgcagctcgacaacgaggacgacggggcggctcgacggctctcaaacaacaccggggcagagctcgtcatggccgacgccgctgtgccccttgcggccgctgacttcgagcaggtggaccagtttacgtgcggcgggttctcgttgacgatggcgatgaatcacctcctcgccgggggagagtcggtttgcgccatcgacagcgaggaagggagggcacgacggtcgggatggagggcatggcggcgagggaggccagcgagaattagatcccgtcgtcgcctcatgcgcctgtcgtcgtcgtctggcgctggccatcgtcgcgtgaaacggtggcaccgccgccggctccccatccacccgccccctcgcctcaagccgccgcctcctcatccgccggttgggaagagggccaccggcgccgggtgggtggaggtggggaaggggaaaggtgtgactgtagaggaagagaggggaagaaggtag

SEQ ID NO: 9412 - DNA, 923 bp, Oryza sativa
  Clone ID: PAT_MRT4530_15832C.1
atgtcgacgtcaagtcacgtcccccccactcgtgagccgcgcggcgccaaatcacgccacgccgcgccgaggcccgatgaggagtcggccgccatgcagctgcagccgcgccgcgcgcgggcagagcacaagttgccgaacggcacaccacgcgacgccgaaccagccaaccaaccggaccccaaaacacagagcgggcgccgcgccgttgtcaggtcaggccagttgcattgcagccgcagcgcgcggtcgcggtccgcaaaactccgcaccgcacctttcgtgccgctcgaggcgctgacccgcgactgatgcgacgacgaccatgtttgccaatactcggcatccgtttggacgttagcccggttttccgggcactgcacatcaccaaaactgtactggcagagtccaagacggtgtacttgctcgtggtggtggacactggacagggagcagttgtggtaggggtaacatggcgaggacgaggacctgacattttccggcgactgatctgtcttctcgttcccagccatggaccgcaacgcacggattggggtctccgtctcggtattcctttcgctcgcctgcctgccttgccgccctccgccaccacagcctgtgaccaccaccaccaccactgccatccctttccgtcggtacgtgctgtatgtacgtgcgacgccgacggttgccacaggcgtccctgtcgcccaccgtggctggactggaccatctccgtctccgtctcgctgtacgaacgtatccgtgtggctggtagctgggcacatcggggctgttaacagcggccgggtcaacaacgacggggcggggcgggggcggccgccggggaggacgaggcgcttggacagcttgaggtcgtcctccaccgcccttgcgaagtcctcatccatcgccgccgccat

SEQ ID NO: 9413 - DNA, 363 bp, Oryza sativa
  Clone ID: PAT_MRT4530_15833C.1
atgggccgcgccagcgggcttgatgcggatctgctgcccccaccgttaggagtgcggatgaagcgcctcgagggaaatctggtgcccctgcccttgagagcgacgacggcgcacagatccgccacccccaccctcaggatagatgccggcacttggatccgatggcctcgggatggcaggattagcttcgggcgggatggcgacgatgatgatggcggtggcggtgaggacgactgtggccttaggcagcgggaacgagccgcgccaacagtgaggacgatggcgtctgcgatgatgatgacagtggtggctgcgacgatgatggcttcgggagctagggtttgggatgaatccgggagctag

SEQ ID NO: 9414 - DNA, 425 bp, Oryza sativa
  Clone ID: PAT_MRT4530_15834C.1
gcatgtgatggaacactgtaaaaagcttaatcctctctatgttgtcttaaatccaaagcatttttacagttaagagggggagttcctggctagaaaaaaaagctaggcagcctgaagagttacagctacagcatacaacatcaaggcagtaagcatacagagccatgtacaccaacaattagcgtgcagagccaacaaaagatcatctaaaaatacaccaggcaccagctttgcgatgtgatacaaaacaatccaacaaaatacagtcgaaatgcatgtccagctaacagtccaacgatggatccagaatatttttcccaagctaattcatggaaattctctatgatagaacaaattagtcatgccaagtcgattaggtagttcagcccgttgaagatcccatcaaatagagcctagtgcacact

SEQ ID NO: 9415 - DNA, 789 bp, Oryza sativa
  Clone ID: PAT_MRT4530_15835C.1
atggttgccggacttgggctcgcggcggagctccgcggcggcggaagggggagagaggagtggagtggccaaggcgatgtcccagggaggcttctagggacacggggagggggcgcgatttggaggacgaacgcacaaactaccatgtctcagtgctgtttaggagtcgctagaggatgcagacgagaggatttggaccaggagctcaccgacgagcgggaacggcgtcggcaaacggatggcgtcgcggcgagacagtcgcgacggcggggcggcacgacaccgagagggcgcggccggggaacaagaggggagtggtggcgcccggagctcctcgtcatgtgcccacgcacgcaccggttcctccggtgctcggcggcggacggcgacgatgagatcaggtcgagcggcgacaaggcggtgacggtggttcggcggcaatggcgcgtggaggaatgtcggtttgggagggggaaccgacatagagcggtcgagcgctcggccggcggtcacgggcgatgcaagagcggcggacgccgaggatgcaaggagcggcgaaggcggtggatcgggcggctgaaatcgaaccacgggagcgcaggctggcgcggtcaaggtgggggcggcgagctggcgtgcggcgtcagcggggaaagggatttgagggaaggcgttggagtgtcaacctttgtaaggacgacgctcgatctcctgaatttggcgctgcagctcgacctcagcgatgaggtagcacagcatgagctcgacaacgaggcggcgatgggttag

SEQ ID NO: 9416 - DNA, 1917 bp, Oryza sativa
  Clone ID: PAT_MRT4530_15836C.1
atggcgcgcggcgcggcagcggcgacgcgatggacgggctcgggggatggcaggcagcgttataattcaggtaatcagaaggtgcttgcaaatggtgccacagacagagataccaacgatttggcaatgcaaacacaagttcctactcaaactagagagggaccaactttcacacagctactactcggagaggaagattttgaccttcctccatatgttccagacgaagctgaagagaacaatcagttctatcatcaaacaatgaatgagttcctaaacatgaaccaattgggaaacaatgggacaagaactactcagttggaacctcaggagcaaatgatgatgtttggctctagttctggtataggttcacagctttcaggttctcaagcaatagaagtagttgatgttgtaggaggtctaacttcaccatggggtacccagctacatgagggtcatcttgcacatctaatgtcatatatccgtgcatttcgtgacctagagcaacaaacctctcccaaccttgtcatgcagcaatctattggtccaacctatggacatatcaacacactgaacaacaggaactctgagttccatttcctgcttgaacaagcaaagaatccagagaacaatgtcatgcgactaatcaacatcaggagccatgtacctgctttcagtgctgatccatttggaagccgtttcatacaacataagcttgagagagcaacaccaacagagttacttatggtgtataaagagattgttcctcataccttcatgttggctattgatgtttttgccaactacgtgatccagaagcttcttgggtatggacctaccttgtgcggaagggaactcatcggtaaactaattggtcatgtggtagccctgagccttcacatgtatggatgtcgagtgactaggtccacatgtgtctatgacatgtgggtccagtggcaaaaagttaaatgtggcaaatggctaaatatctcaggttatttcaaagcttttgaagtaagtgatatggatcagaggatagaaatggccaacgagagggtgctggagtggtgtgatgatctagaaatactgaaagagctcatctctgaaattgtggaaggcgtcctcgagctggttgtagaccaatttgggaactacgttgtgcagtatgttgtggagcatggaggggagtcggtgcgagcgatgatagttatgaggttgaagggattaatggttatgttgagctgccaaaagtacggatcgaatgtgatggagaagtgcctgacaattggtagaatccatgaccgtctcatcatcgcagctgacatcgtcggtgccagcgaggaccaaatccttatggtgatggtgaacgagcatggaaactatgtgatacagaagatgttggagacggcagcggcggagtgggtggtggacttgatagtcatcgtcgtcaaccgcaacttcttcaggctcatccactacgtccatggcaggcacgtcctcgcccacctccagatccttcttgccgctcgcgaacacaaccatagaatagagaacaaaattaactcaatcataagatcaagaacaaaatcaatatccatgaacatattcaaagaggaggccactgtcgctactgctatcaacatcattgagcgggccatacccatgctcccagcagtggatccagctgccctcttgggcgtggcggaggatcggaccacccccatgcgtgcggcggcagatccagccgctcctgagagaagaagaggaggggacaacaggacgagctgtcagcaaggaagggggaagagccatcgtcttccaagcaagtgcaagcgcaggctccatccgcgtgtggtgtgggagaggtggaaggaggaggaggaggaggaggaggcgcgggcggtggtggaggcgtga

SEQ ID NO: 9417 - DNA, 1134 bp, Oryza sativa
  Clone ID: PAT_MRT4530_15837C.1
ctacccgttgcagcaaccgtcggactcgactcccccaacggcgtagctgtcgggctcgacctccccgctgctactgccaccaaactcgacccccacatcgcgttgtgccgcgtcaccagtggcaccctcaggcaccgctgtctgatctccatcgacgaccaccacatctcgcctccgtctgcgctcctccagccggccgatcttgcctccatatgtgccgtcgcaaaggtctcttgcttgagaagggaggatatcaagatcttgctggcgtaagaaaccgatgttgatgaacaggtcatgcttcactgcccaattctccgacgagcccctcatcactccggcggccacgaggcgagagcacgccgccgccccggcctcgccagcgccgaaaggcgtcaacgtgccggcgtggccccgcccggccgaccttctcccctttgcccccgccaccatcaccggcccaccgcccgcggccgacccagcggctccggcggcggcggcgccgcccgcccttgtccgccacccaccgccggtccgccgcctcctagaccctctctctaaacccgatcccccacttccccctccccaggccccagcgccaccttcccatgggacgggaggcggggcatgatgcgtgtccccggcgccggagagcaagcatgccatccagtgcagcgccgcgttgaatcgattgacagtttcttctctgtttctctcgatcctcatgtgcttgccctttcccgctgtggcgaggctgtgtgcgcgcacgcgcgtctcgccgacgaggttgacggcgaagtacacggtgctcggcctcagcccaaggcattcccgcgtggacgctgccaccgtgccggacgtgtccacgagcaccgccacgtcgccgatgttgtccgccttcacccacgtctcgccgcactcgtccagcacgcgcaccacgaacccctcctcgaccacgaccacgggctggagcagctccaccatcccataccgcgtattggcgtagagctgcccgcggtggacggacacgtcgaccatggcgggcatgctcgtcggcttcacggacttctcgacctccatggccccctccttcctgttgtccttgttgctgtcgtcttcctcgtcctccagcat

SEQ ID NO: 9418 - DNA, 1160 bp, Oryza sativa
  Clone ID: PAT_MRT4530_15838C.1
gagagagccaaccgcacactacttgaatccaatccaatcgaatcaaattactagcctctcttccacgccacgcacacgcacccaatcccctatcgatcgagagacatggcctccaccaccgccaccgccgccggcaacggcagcggcagcatcctccccacccacaccaccacggcgccacccttcagagcccataaggacgccgacctggaatccacgacgcggcggcgccggcgacgctgcctgtgctgctgcctgctcgtcacccttgtggtgctcctcgtccttgccatcaccctcctggtcctcttcctcacggtgctccgcgtccgcgaccccaccacccacctcgtctccacccgcctcaccggcctctccccgcgcctctccttcccggccacgtcggtccagctcaacgtcacgctgctcatcaccgtggcggtgcacaaccccaacccggcctccttcacctacgccacggggggccacaccgacctcacctacaggggcgcacacgtcggcgacgccgagatcgacccgggccgaatcccgagccgtggggacgccaacgtcaccatggcgctcaccctgcaggccgaccgcttcgccggcgacctcacgcagctcgtctccgacgtgatgggcgggtcggtggcgctggacgcgagcactcggatccccgggagggtggccatcctgggcgtgttcaagcgccacgcggtggcgtactcggattgccatttcgtgttcggcgtcacggagatggccgtgcgtagccagcagtgcagcgaccgcaccaagctctgattgatcatgtgattccaacttaatttgcaagtttccaagcacgcaacgtaaggtgggcatgccacatcgcgacgtgggacaagacgagaagccatattttgttgttttgtttacaccacgcaactgctactagaagtacatagagtattactatattctacacgggtggcacattagttcgttattacagatagtataagatcaggaattcaggattcaggacttccgattttcttcagtatttcttgatgggtgttgggattgattcgattcatgtatataacacggtgtgtcagttttgacatatacgtacatatacagtatttcactcgtatttcctattctcatgttac

SEQ ID NO: 9419 - DNA, 539 bp, Oryza sativa
  unsure (1)..(539): unsure at all n locations
  Clone ID: PAT_MRT4530_15839C.1
ggggatgtataatagattgacttggtgggagcaaatggaccatgggaancagcttactcgcacagaaaatttctgagccgtggttcctttggtgcctatacttgataggcctcggcacacgacagattatcaacatcctatggctcgttgcctcaacaccgttggcagttgttgtgctggttgttgcaagaagctaccgaacatgcacaaggtccggatctttggaatcaatgctggcaactaggcggcagcatcccacggtttgttatcactgaccactgccttcatttgagtggcacggaaacagtataccctagttctgaatggataaccagagtgagtagtttttaagagctgttagtagatgacatgtaatccttgtacagagctaaaggccactggaaatgatgttgttcagcatctagtgaacacacttctttaggctcgttatccccccaaaaagaaactttattttgctgttaatgttgttatatatgtactcttgttcaagtgtaaaaaaanaaaaaanaaaaaaaaan

SEQ ID NO: 9420 - DNA, 516 bp, Oryza sativa
  unsure (1)..(516): unsure at all n locations
  Clone ID: PAT_MRT4530_1583C.1
gggtgtccatcctacaatcaggggagaggtctgggagtttttacttggctgtgtggagcctgggagcacttttgatgagcgcgcgtagacagacgagaaaagaagaatacaatatgccatatggaagcaagaatgcaaagatatggactcccatgttggtagcggtaaaattatcacagccccaattataactgaggatggaaaacctattaaggatcctttggttttgctcgaagctacttcagaccagcacacaatgcaaggtagttcatccagcagcaggaacgaaaatgaggtggacaagtccgaaaattgtgtggtggataaacaaattatcgaatggaagcttttgctacatcaaattggccttgtgtgctgcgcactgatcgatccatggtgttntatgagaacaaagaaaatctttcgaagttatgggatattcttgctgtatatgcttggatcgacatanaaattggctattgtcaaggaatgagtgatttatgctcaccgatgata

SEQ ID NO: 9421 - DNA, 296 bp, Oryza sativa
  Clone ID: PAT_MRT4530_15840C.1
gaagaaaaataaatatcaccaacaacgttttccaagattttgtttagatgctgctgctgatgcgatgcgtccggtagcggatgatgggtcacgctgccgcgctcagatcaaaccagcaaatcaatcattagggacacgttggggtgctgcgttgcacaagagtccgtctatggttggcttagctctctttactcacaaacaaaagaagaaaaacctgcgagagcacgatcacaagaacaccgaccgcgaggggttgacgacgatgtgcctgagcgggttggtgacgtcgccgccgc

SEQ ID NO: 9422 - DNA, 2101 bp, Oryza sativa
  Clone ID: PAT_MRT4530_15841C.1
gcacgaggctcaaaggctcaaagactttattaggtgatcaactccacagcaacaactcccaggctccgcagttcctttggatgattttatctgcaaagagttcaactcttcgctaagatgggctcacctgtgcaaagattagagaggaggagcccttcttgagctcagaggtgcagtgcaggcttgcagcggagttgttcacttgtaggctccttcccgcgccggctcaatgtatcatagccgctccaagagataggatcagttcttggctaatgcctaatgatcttgacgaatttgcatcggcagcgactctgttagaatgctcagaatggatggcacggatttgtcttccccaaggtgcaatgttcagcatctacagaatgccgaagaactgaaggatcagaatagcaccaataagaggctgccccggactacagagctcccatgctctttgatacaagaggtccaacaccttgagaagcgactaaatgatcaatttgctatgcggcgtgctttggagaaagcattaggttataagccttgtgccattcattcatccaatgagagctgcattccaaagcctactgaggaactaataaaggagattgctgtgctggagctagaggtcatatgcttggagcaacatctcctagcactctaccggaaggcctttgatcaacaaatttgcagcgtgtcttcttcctgtgacatggaaatcaacaagcagtcagcaaggtcattctcaggtatactcacaggatcttcagaactggatttctcaaccccaaggaaacaccaactcctgcagtccagtggcatggtcatggcacgcaagtctacaccgacaactctcactagcgaaaccagaacttcacattacaatgacaagactggtatcggacgcagccattcctcgctcctgcagcgttccatttgttcagccagagtatctccttcagcaaacaatcttgctagggctctcaaaccatgccatactttgcctctatcctttgtcgaggagggcaagtgcatggatcctggtattgtgagcctggcggatatcctagggaccaggatagcagatcatgttcctcaaacaccgaacaaaatatctgaggacatgatcaaatgcattgcttcgatatacataaggattagggacttcaatgccgtgcaacatcccttcttcccctcaccatgctcatcattttcatcagcgagcgggctctcttccaaatacactggggatatatggagcccaagatgtaggaaagagggctatattgaggcctggcaagacgatgcgttaggaactggcgaatcaagatacttcagtcaacaatatgattctgtgattgaggtgtctgctctttgcaagggggcccagaggtctgctgatgttaaagacatgctacacaaatacaagtctcttgtacagctgctagaaagtgctgatctcaacggaatgaaaaatgaagaaaaaattgctttctggatcaatgtgcacaatgccatgatgatgcatttatcttacctcatcagtggccagagagtaaacccggagttgatagagtaccatatcctatgctgccgagtgcactctcctacacagtggctgagactactcctgtacccgaaatggaagtccaaggagaaggaagacctgcaggggttcgccgtcgacaggccggagccgctggtgcacttcgcgctgtcgtcggggagccactccgacccggtggtgcggttgtaccggccggagcgcctcctccagcagctggaggcggcgagggacgagttcgtccgcgccaacgtcggcgtccgcggggggcggcgcgggcgcgggcgccgggtgctcctcctcctcccgaagctcctcgagccgtactcgagggacgccggcctcggtgcgcacgacctcctccgcgcggtggagtcctgcctcccggagccgctccggccggcggcgcagcaggcggcgcggtcgcgcggcggcggcggcggcgtcgagtggaggccccacaacccggccttccgctacctgctcgcgcgggagctcgtgggcccacccgcgccaacggcccacctatcctccacgtaa

SEQ ID NO: 9423 - DNA, 771 bp, Oryza sativa
  Clone ID: PAT_MRT4530_15842C.1
atggcgaccaccaccaccaccaccatctcctcctccctcataacccctccggccgcggccctccaccaccgcagcagctcctgccggtgcccctcccgcctcaccgtcggggccgcgcggtggtgggcgaggcgccggcagccggcggtggtggtgcgggtggtcgcctcctcgtcggtgctcgaggcgcccgaggaggtggcggcgcggaagctctacgtcgggaacatccccaggaccgtcaccaacgacgagctcgccgccatgttcgccgaccacggcaccgtcgagcgcgccgaggttatgtttgacaaatacactggccggagtaggcgcttcgggtttgtcacgatgagcacaccggaggaggctaatgctgcaattgagagcctgaatgaaactgacatgcgtactgatttatttcttctttatcaggaggtcggtggtagaaaaattaaggttaatgtgacggagagcttcttgcctaacattgatcggtctgcaccagaaccagagcctgtatttgtggacagtcagtacaaggtttacgttggtaatcttgcaaagagcgtgaccacagagatgcttaaaaacttcttctctgaaaagggagaggttctcagtgccaccgtgtcccggattccaggaactgcaaagtccaagggatatggttttgtcaccttttcttcagaggaagaagttcaggctgcagtttctactttcaacaatgcggaattggaaggacaacccatccgtgtgaataaagcatag

SEQ ID NO: 9424 - DNA, 1185 bp, Oryza sativa
  Clone ID: PAT_MRT4530_15843C.1
aacctttcctgaaaacaatgtcactgagatgactgccaagtatacattccaatccaactgaacaaatatgttacacaactaattaaacaaaaaaacatgctggtacggtggtaaataatatatgcttcatatgaacaccaataaaatttcttcacatatgctgttatcgtacaaaatttgtttagttgcaaagtgaaattgcattggaaggtctttccactttgttgcaaatatctagccttaaagtttccctcagtctacaggtgttcacaaagttacttcagcctcagaggtacccactttgccatcaaccagtctggaaatatctgctagatgcctatgctttattcacacggatgggttgtccttccaattccgcattgttgaaagtagaaactgcagcctgaacttcttcctctgaagaaaaggtgacaaaaccatatcccttggactttgcagttcctggaatccgggacacggtggcactgagaacctctcccttttcagagaagaagtttttaagcatctctgtggtcacgctctttgcaagattaccaacgtaaaccttgtactgactgtccacaaatacaggctctggttctggtgcagaccgatcaatgttaggcaagaagctctccgtcacattaaccttaatttttctaccaccgacctcctgatcaagaagaaataaatcagtaagcatttcagtttcattcaggctctcaattgcagcattagcctcctccggtgtgctcatcgtgacaaacccgaagcgcctactccggccagtgtatttgtcaaacataaccatagccagttgatttgagtaatttatagcttctactcggcgcgctcgacggtgccgtggtcggcgaacatggcggcgagctcgtcgttggtgcacggcctggggatgttcccgacgtagagctttcgcgccgccacacttctcgggcgcctcgagcaccgacgaggaggcgagcacccgcaccaccaccgccggctgccggcgcctcgcccaccaccgcgcggccccgacggtgaggcgggaggggcaccggcaggagctgctgcggtggtggaggcccgcggccggaggggttatgagggaggaggagatggtggtggtggtggtggtccccattggtggagaggtaggtaccgcgcgccgcgtgcctgcagccc

SEQ ID NO: 9425 - DNA, 201 bp, Oryza sativa
  Clone ID: PAT_MRT4530_15844C.1
atggagacgaagatttttatacaggttcgggcccctgaattgtcagtcgacaacagggtagccttcctcctcgagttcgtgcccggcgagatcagagatagcgctttcgtctctcctgacgaccttggaagaactgttatcgagctcaagatccgacaaggccttatcggctctgggcatcctcagctgaagttcccttag

SEQ ID NO: 9426 - DNA, 777 bp, Oryza sativa
  Clone ID: PAT_MRT4530_15845C.1
cttccgcttccccctctcgaggctctcgcctctcccccgtggccaacccacacaccgcgggttggaggaggaggaggaggaggtaggggaaatccccgtcggccgtcggctcggcgccgaatcgatccggtgacttaggcttcttctgctgggctcttccatgaagcaaatgaagtttataatgcacatactaatgttcagtatattatactgagaatcaactttattctcagctgtatatacactagtatgccagccattggtagctacttgaaaggatggtgaaacgcatatgattacccatgatgagcatgtgtgttccctttttttattagtgctaagctggaaatcaataaatccaagatattcatggagcatgctacctgtgatgatgtgcatgagcatgctataaatgtatcacatggagaaactgcatcaacatcaaccagtcatcaagatttgcacagtgattcagatgattcacatcaggatgataggccttcaacaagcacacaaaccccatcaccacagtcttcagcatcaacttcgcccactgcatataacaccagaaatttatcctttcctagaagagatagtatgtatggtcatggaagaagtatttggaattctggtttgtggatctcgtttgaactggtcatatatgtagtacagattgtagctgctattttcgtccttgtcttttcaagagacgaacatccgtatgcccctttatttgcctggattattgttacacaattggctgcattgcagcattcc

SEQ ID NO: 9427 - DNA, 216 bp, Oryza sativa
  Clone ID: PAT_MRT4530_15846C.1
tgacaatgacacatccagacagcctgccatgatgcctggtttgcctgctgcgttgctgacagccctggtgtttgtggtggaagtgacatgcatcgcaacatgttcacgaataatcctggacactgttttgagcagtcccatagctctttttatttggattatgtaagtacgtattcatagaatctatatgttgaaatctcaaaaaaaaaaaaaaaa

SEQ ID NO: 9428 - DNA, 340 bp, Oryza sativa
  Clone ID: PAT_MRT4530_15847C.1
cggccgaattcccggtcacccaccctcgtaatatttctctcctacctttctctttcgggggggtttttaaaaatcagggggctctccctctcggcttatacacgagcgcttaaaccctctccacctttctatacggctcctaactcttatttctcctctatctaacgattgttctcgtcgccctacatctccactcgccatgggcaagattaagatccgaatcaacggtttccgaaggatcgggaggctcttggccacggtggccctccaaaacgaggatgcctagctcgtctccgtcaacgaccccttcatcacccccgactacatgacctacatgttc

SEQ ID NO: 9429 - DNA, 423 bp, Oryza sativa
  Clone ID: PAT_MRT4530_15848C.1
atgatgaatcaccagctgggtttcgtcgtcacgcttctttcggtcagcgcgactgtcctcccggttggcgtcggtgtggcccacgcccaagtcagctatgtcccactcgtcgggctcgtcggtgtcctcgccggcgcaagcctcatcatcgccggcgtcaaatccaacgcgacggcggccgccggcaatccgtcagtattcagcctcccggccgccggtgcaatagcttcctcctacctgcgccgccgccgtgacctctccgtggtaggcctcctcaccgcggcgtctgcagttacggcgcacgtccccggcgtcggcggcggcgggccggccgtcgccttcgtcctcttcttgatgctcctgctcggcgtcgccatggtcatgcttaggaatccatggcggcctccactgacacagacgtga

SEQ ID NO: 9430 - DNA, 702 bp, Oryza sativa
  Clone ID: PAT_MRT4530_15849C.1
ctatggtggtttgctcatcgcagtcacagtcgtcaccttttttaaaacttcaaactgaccaacagttcattatcctccatcaccgcatcaccatctcatatagcaatcattcacaaaggggatggcaagaatttatcatacaacaatatcatatcattcacaaaaggggcacactggctgacagttcgtcgtcctccatgatgaaccagctacaggagatgcaggtggaggcgccgcgctcgcagccaccggggaggcagcggagggtctcgaagaggcactccactgcgaggtgtccggtgggtggggatggaggaggcggtatctgcgcatccccggcctcgtggaggtcggatccggcggctagcgcggtcggtggtggaggtgagggaggcatcggtggcgttggcggccgggaggcggggggaggcgcgaggtggacggtgggtggggatggaggaggcggtacttggtgtacagatctgcgtgcccccggcctcgtggaggccggatcctgtggctagcgtggtcggtgacggaggtgagggaggcgtcgatggcgttggcggccgggaggcggggggaggtgccgccggtgccgccttcgccttcgacccgcgcccccgccggtgccgcctccccctccggcccgcgcacgccggtgccgcctctccctccgacccgcgtgcccgcgtgcacctg

SEQ ID NO: 9431 - DNA, 438 bp, Oryza sativa
  Clone ID: PAT_MRT4530_1584C.1
cggacgcgtgggcggacgcgtgggcggacgcgtgggcccaaaccaactttaactcttcttcttctcttcttcgccccaatctctgatccgtccagttgacccaaagctagagtctttcttgcttctcctgagtcctgacttcttgatccaccgattgttcttcgatttcttgcttcttgattcgtcgccgctgctgctgctggaggcagaaagggagcacaagatcgagcaatccaagctgcaattagaggaggaggaagaggaagaggaggaggatgctgagaagggcggggaaaggggaggttgcaaatgggttctaccaaattcgcttggattgcacccacaaggtccccgagaccaatttcaagaacaaggttgggaaaacgtttagcgttcggaaattgcatgctgcgtttacccttgaaggcccgttggata

SEQ ID NO: 9432 - DNA, 104 bp, Oryza sativa
  Clone ID: PAT_MRT4530_15850C.1
cgagcctgcataccactctcattagctatggctaccatagctctctgtcggctatccatatacttgtgtgctgttatcctataccgtggctctatggcccagct

SEQ ID NO: 9433 - DNA, 630 bp, Oryza sativa
  Clone ID: PAT_MRT4530_15851C.1
cataagcacttgatgtctcatggatctacttcccattaatttccttttcatctgaattcccacagtgggagaagcaaccacagattacactgttaacacttcttccaggatgaagacccaggattctgctaaagatcagccataggaccgtgaacacgtctctgaacttgagggtcccattacttttgtgttttcattcccagaatgtgcagaacccttattatcctcccctaacaatgtgctagatagatcctatttgtcaagtctcccagaatttatagagtaatttcaaatccactattttatttgatccttttaataaccctgggaagagtgagaacagggatgaggaaagtgaatttatagaggagaaaagaggcttttggtggttctatgactcatcacatctcagaagtctaggtactctgactccaagtccaacactcttctatgtttactgagcctctttcaagtaagagtctagtgaagatcaagtgtgatcatgggtatgaaaactgttagcagttcccagatgtgagacacactacttccctttgtcctcaatctctgaccagccagtggtgcctgcacatctggaatgtaagctggcagaaggaaggactgatcaag

SEQ ID NO: 9434 - DNA, 813 bp, Oryza sativa
  unsure (1)..(813): unsure at all n locations
  Clone ID: PAT_MRT4530_15852C.1
ttgggggccccataaaaaaaattataccttgcaagcccggggaagtaaaattgggttctttaaaacgggcgcccctttttttttttttttttttttttttttttttttttttttttttttttttttttttttttttttttttttttttttttttttttttttttttttttttttttttttttttttttttttttggacaagtaaaatacaccacatttttttagataatggataaaaatctgacctttatatcaacagttagatatacacaaccaagaagaatacaccacatagctgcaatatcaggcactcctacaagaaatccagtcatgtcatggatacacatccgagtaaagtagattaagatttagatcaaaagtttgcccatgactcacagaacacacaatgcattaggattgacacactacagaagagatgagtcatgttgacaatctttttatccagatacacatcggcttcatccagtccggacgactggccgtgccgccttagatagaaatcagcagagtgtaagaaacaccaaagcttctgctcgagaactagtatctgagtatatagagcacctagctagtttgtttatgatggcaggtaacaacaaatgtggctgtccatatcttcttttggataatcatctttgcttcttagagtgatgaactcacgaacatgaactgaaaaaaaaaagcaaaaaggggctctgttttagggaggatgaggtatnctttgcttctgaagcaaacttttcttcagctataaataccataccatggaccattcccatatcaccatcacaaa

SEQ ID NO: 9435 - DNA, 783 bp, Oryza sativa
  Clone ID: PAT_MRT4530_15853C.1
gcacacgcttccctttccggcccatctggtttccggtccggccttccgggtcgacccacgcgtccggatcattagcaatccattccgatccatcaaatttctcttgagaccgtagagagagagagaggcgccaaccatggccggcatcatccacaagatcgaggagaagctccacatgggcggaggcgagcacaagaaggaagacgagcacaagaaggagggggagcaccacaagaaggacggggagcacaaggaaggcgtggtggagaagatcaaggacaagatcaccggcgaccacggcgacggcggcgagcacaaggagaagaaggacaagaagaagaagaaggagaagaagcacggcgaggagggccaccaccacgacggccacagcagcagcagcagcgacagcgactgagccgccgcgcccccacaccggcgccgtgcgtgcgtgcatgcaggtgatgctgcagatgattggaggagttcgtagcaggattaattagtatctgtgcaatacgtgatgcagtgatctgtctcatgcatgtatctgtgcttgattgcaagaaaaaaaaaaggcatggtttgcctttgtgatgtactgataataatggctgcacggtgccttgtaataagaacgctaattatgatgaaattgatgtgtattatcctggcgtcaaaagggtgcttcagattgggtcctatcggcgcccttgatgctccaactgatctgcctcatccgggcctcaatttcagacattatgaatatcgtgatctgagaggtcg

SEQ ID NO: 9436 - DNA, 122 bp, Oryza sativa
  Clone ID: PAT_MRT4530_15854C.1
gggacaagcaagaaggatatatattcatccatttttaaaactactacaagagggcggggggaacccaaaatcaggggggatttgggaaaattttacaagcaacaagggagtttgggagaacg

SEQ ID NO: 9437 - DNA, 443 bp, Oryza sativa
  Clone ID: PAT_MRT4530_15855C.1
attcccggtcaccaccagctcgcacctgcagcggaggcatcccaccattagcaaacacccacaggacgaacaccacccccccccccccccccaatcgaaatcctcaccgcgagcggcgcggggagagctggaaaagcgcgaagtcgagcggggcgtcgggctccatcgcggccgccgccgccggcgaggtcggatctggtggatcccctcaccaagaaccccaagctctcctcctcctcctcctcttggggacagccccaagaaaccccggaaaggcggcgagccggcgccaatgcagctcccgcgggacagagatcgccgcggcccgcccggatctagccgccgctcgcccccccgattccggtaagcgtgcgctcgcgcgaggagagagaaagagagagagtgagctagagagagaggaagagtggaagactggaagatga

SEQ ID NO: 9438 - DNA, 258 bp, Oryza sativa
  unsure (1)..(258): unsure at all n locations
  Clone ID: PAT_MRT4530_15856C.1
gatttctctccgaattccgagctccgacgcctccgcgtgcccgattccccaacgggtcaacccctaaaaccctagatttccatcccgatttcgaccaccggtgctcgaanttcccccgnaattttggcgttgccactttccccctttcgatggcggcgngggcctgnggttcgnggcgggtgggttagaggttgncgacggtatgatttngggcgcgggacnagnggggaaggncggagcattnagcagcaanaagtt

SEQ ID NO: 9439 - DNA, 402 bp, Oryza sativa
  Clone ID: PAT_MRT4530_15857C.1
atggcgtcacctccaactcaggggtcgttggatgtgccccccccctccaacagcgatggtgatggcggtccgactacggcgagcagtggccctccctttgaccctgcctcccttgctgggaaccatattggtccaggatgctcagcacgaacacaggagactgccggtagtgcggccaactatatcagcgcgctgccgctgcctgtctatatcagctcatcagactccatcactccacagcaggagccagccagccaagccgggtacaccgaggccctgcactgcgcgcgcgcctggcctgctataccgatcgacggcccgacgggccccggcgacgccgcgccccccgctgcggcccttccctggattgtcaaggagaccacgattgcttgtgagagttga

SEQ ID NO: 9440 - DNA, 240 bp, Oryza sativa
  unsure (1)..(240): unsure at all n locations
  Clone ID: PAT_MRT4530_15858C.1
atggagggaggccggcgcgtggcggctacttcagcgacggcaccggcagggtgntcagcgaggaggagcgcgccgccgagagcgtctacatacagaagatggagagggagaagctggagaaggagaggaggaagncggacanggacaaggccgatgcagcgaagagggcgnncgccgncaaaggngttaagaaggacggtnaagctcgnccaacctgatccgctggttnacagtgaaact

SEQ ID NO: 9441 - DNA, 226 bp, Oryza sativa
  Clone ID: PAT_MRT4530_15859C.1
gggcgaactttttaaatgaggatggccctttataaatatatttcacttgcaaaaaacaacaactgaatcagaaagctcccaaccaagtccataaacccttcagcccccactttttttcatcatcaatcttacactattccaacacgtataaatacagcaagcttaaaaagaaaaaaaaaaacactgccggaaaaacaacttaatttttttataaagcttacaaaaa

SEQ ID NO: 9442 - DNA, 495 bp, Oryza sativa
  Clone ID: PAT_MRT4530_1585C.1
atggaggttggcaataaagaaaatcagaaccgcagaaacgcgaccaacaacatggtcctgatagagagagaaatgacaacggcgacctccgatggaagacgaggacccactctgtgcaccgaggagagtgctgccgcggccgtcaaactttcctccggccgccgccttggcctcttcgctggcgtcgccggctggacagctaggggagagaatgacaagcgggacaaaatggtccttttcaagggaattaaacagtcaactaacggaatgggtatgaacaagatcaaaaacaaaattcaaggctgccggcacatcgtgccgggccgacccaacatgccggtggaggggcccaggcacggcccggtggtcggaccgggccagcacgggcccgacctccatcgggccgtgccgtgcttgggccgggccaaaatgccgtgccatgggccgggccgtcgggcctcgggccttttggccatctacaggactatcccataa

SEQ ID NO: 9443 - DNA, 445 bp, Oryza sativa
  Clone ID: PAT_MRT4530_15860C.1
cccacccttccgaaccaaagggaccaggaccaaattccaaatggttccttgcttcccaaaggtaatggggggcaaggtctactttatacctaagtccttggctgtggcctttcctttagtcaaccagggattcctttaccagcaccttaatttaaaaaggcttttgaaggcataatcaatcttaagttgaaccttgataggctgccggcagcatcaattagaatccaatggttgggttattttaaccaatctgtattaacctaaaacccacctaaaccattaatttttctggtgaagccacctaatagtgaatccttttaattggtttggaatattaccaataaaaacctggctgggccttataattaaaggcccatgacctttgtcctgtgtagaaggttattaattggagatgtggacctttggaaccagctgacctaaggat

SEQ ID NO: 9444 - DNA, 465 bp, Oryza sativa
  Clone ID: PAT_MRT4530_15861C.1
atgacgaacatggggatgatatcgcccgtcagaggtgacgaaaatgttggtggtggagacgagacgaccggcggtgaagacgataaggccaatcaacactggaagaatcatgcagccatggaagtgaagaaaccagtcggcggcagacgtagacagcttgcattgaagacgatgacgcctattagcgtcggcagcggcgaaggcaagccggtcagtgaagacgtagatgcccaacaacggcggtacaataggccagcggtgcaggtggagacatcagtcggtggcggcgaagttaaaccggcggtgaagacgccagccgtgcaagcgaagacattagtcggcggcgatgaaggcaagccggtcgttgaagacgtagatgcccaacaacggtggcataataggctagccgtgcaggcggtgacaccagtcgacggcggcgaaggcaagccggcggtgaagatgtag

SEQ ID NO: 9445 - DNA, 2722 bp, Oryza sativa
  Clone ID: PAT_MRT4530_15862C.1
gagacataacctgatcgtcagatcaatacacacccggcggattcaaatcccaaaacaggagtctcgtgcgctacccccttttattattgccgaattcatgttccgatagttggcgcgccaggtaggggttgtgtcgagttatctatcaagaagcgcgatggaatcaactttacgagtcgccggcttcgtcttcacttcgggagctgcaacttatcatccggagatatcgtctctgattcaatcaagcaagccatacaccgctgatgacatacatgcattaaaaatcttggattacaaaccaggtttatcgttttaaattctttcgtaaattagattaattcacagattactaattattgtttgatctgttattgtttatgcatgtatgtcggctgctgtcgtcgccgccggctggcttctttgcgtccatggttggtgtactccgccaccattgctgatggcgacattgtcttcaccaaccggctgcctccatcgccgccgactggtgtcctcgcctatacggttggttggtcataccaccgctgataggcatcttcatcatcaccaccggcctgtctccgtcgccgccgactggtgtcctcgcctatacggttggtcggtcacaccaccgttcatgggcgtccacgtcttcaccgaccgccttgcctttgccgcccccaactagtgtctccgcctacacggctggcctattatgccgtcgttgttgggcgtctaagacttcaccaccagcccgccttcgttgccgccgacgggtgtcctcgcctatacggttggcggattccgccgccgttgacgggcctcgtcatctacaccaccggcttgcttccgcctctgccgactggtgttttcattgccattgatggacgactttgttcccggtgcgcgggggctatgactagtcgggcagagtgtttaaacgtgaggagtcatccgctcggggaaatcaaaattaacaataggagaaatacatatttataaacatttttaaatacttgaattttccttgagtattaggatttatggctttaagcttatctcttatgctccaggaatggatcagtcagaacatcaccaccggcttgccgtcgtcaccgccgactggtgtcttcgcctatacggttggttggtcacaccaccgttattaggtgtctacatcttcaccgccggcttgccttcgccgccgtcgactggtgtcaccgcctgcacggctagcctattatgccaccgttgttgggcatctacgtcttcaacgaccggcttgccttcatcgccgccgactaatgtcttcgcttgcacggctggcctattataccgccgttgttgggcgtctacgtcttcaccgaccggcttgccttcgtcgccgccgactggtgttttcgcctatacggttggttggtcacaccaccgttgttgggcgtctacgtcttcaccgccggtttaacttcgccgccaccgactgatgtctccacctgcaccgctggcctattgtaccgccgttgttgggcatctacgtcttcactgaccggcttgccttcgccgctgccgactgatgtttttgcctatacgattggttggtcacatcaccgttgttgggcgtctacgtcttcatcgccggcttgcctttgccgccgccgactgatgtctcttcctgcacggctggtctattatgccgccgttgttgggcgtctacgtcttcaccgaccggccgcctcgtccgccgccgactagcgtttccgcctgcacggccggcttgttatgccgccgttgtaggacgtctacatcatcaccaaccggccgcctcatatgacgccaactgatgctatcttcttcacggctagctatgtcgccgtcaccgctaataggcgtcatcgtcttcaatgcaagctgtctacgtctgccgccgactggtttcttcacttccatggctgcatgattcttccagtgttgattggccttatcgtcttcaccgccggtcgtctcgtctcctgccaactagtgccctcgcctccacggctacgcgtctccgccgttgctaatgggtgactacgtctttgcctccggttgcttccgacattcccgacttgttatttcgccttcacggctgacctactatgcaaacgctgatgagcgtcttcgtcagtatcatcggctactacaccgctattgactagatcaccgtcatcgtcatcttcatcaacatcctgtcaagccacttcatcatagcttactctactactattgataggcaacttcgtcatcatattcgatcatctctgttgctgctaatcgtcattaccgtcggttgcgttttctatcgctgactattttcttcatcttcatgattgatggatttcgccattgccattgatgagcgtctacgtcttcaccaccggcttgcctccgccgccgcccatgatgtcttcgctttcacggctggcttattatgcctctactgatgggcgtctttgtcttcttcaccaggtgcctcttgtctgctatcgattggtttcttcgcctccatgtctatgcgacttcatcaccttcgatgggtgtcattttcaagttgaattttgttctagatacatgcaacatgcactcgtagtcctgagattattttctatgctcgaagactggaccaatcattattccccataagggctatcaactgaatacttgcgccagtcgggattcaatttttata

SEQ ID NO: 9446 - DNA, 1432 bp, Oryza sativa
  Clone ID: PAT_MRT4530_15863C.1
cccacatccatttctccagcgacccatccatccatcgcctcctctttccctcccacctccacacgtcccctcctcttccccaatatggcacgccaccgccgccgtcaacctccgccatcagcagcagcagcagcggtctcccattcccattctttgctcccacgcgaggctgcgcggagaacagctgcacaggtggggtgggggtgcagaccgagctgaggagtagccggagttggtggtgagagacgcgggtggggcgcggccatggcggggagggtggtgcggagctgcgtgcagacggggctcaaggcggtgaactccgtgctggggctcgccgggatggccgtcatcctctacgcgctctggatgctccgcgcatggtacagggacgtcgccgacctccactaccgcctcccggtcccatggtttatctacacttttattggcctgggagtctttatgtgcttgttgacttgctctggagcaatcaccactgacgtatttctgaatagcaactgggaggaggatttccctgatgacccatctggaaagtttgaagaattcaaggattttataagatcaaattttgagatttgtgaatggataggcctctcggttgtcgctgcccaggtgttgtcaatcgttcttggaatggtacttagggctcttggacctgaccgtgaaagtgactatgatagcgacgacgacccctctgtgcctgcaaggctgcctttactaagaaaccagtaccaacatggcataaactattctgaacataccttacctcaaagtagtgattcatggagtttgcggattttagataaggctaacaaatgaaaattttctgacgatgaacctttggatggagctatcaccatgcttcggcctgaaggtttagctcgacatgaggaaatgatacccttcttttttttttctaggtagcaatattgaatggcttcttttgattgcctaaacatgcacaactatttgagtagcatgcaactgacccttacagccccttgatgttatgggaagaatgttgtattttacagtgcttcagaaacagatgatggcgtgattccgtcactgacaaaaacacagttgaatgttttgtagtcaaaaaaaaaaaaaaaaaaaaaaaaaaaaaaaaaaaaaaaaaaaaaaaaaaaaaaaaaaaaaaaaaaaaaaaaaaaaaaaaaaaaaaaaaaaaaaaaaaaggggcggcccgttttaaaaggacccaagtttacttccccttccttccaacgtaaaactttttttttggggccccctaaattaaattaagtggccgtgtttttaaaacgtggggactggaaaaaccctgggtttccccaatttaatgcttttgaaaaaaatccccttttggccggttggtgtaataccaaaaaggcccgaccctatcgcctttcca

SEQ ID NO: 9447 - DNA, 1850 bp, Oryza sativa
  Clone ID: PAT_MRT4530_15864C.1
tagtggatccccgggctgcaggaatcgacgagctctcctcctcgcgacttgtcggcggcgacggcgacggcgacctcggcggcgcacggcctcgctccctccaccgccgcctccttccttcgccgccgcaccgcgcgtccccgctccatctccgatctccgcgggcggagctcccgggcgcggaggaggctgcgccgcgcgcgcggggaaggcgcacgagtgctattttcattctgagaggaaattgcacggttaatctgaatagattggtcagtggttgtctgcattctacatatgatccagatggtttggagatattcagtgtaatcaacaatgcagacacggaaaaagggtgctacgaaaaatgcacttggggatcctgccagtactaaaactagtaggcaacccagaagagcagctcaggcggcagcttctgaaaagaaagtgaatgatcttattacttcttctgccaagaagaagaagtctgttggagccccttcaaagaaaaaccgagcttctaaaggtggaaggaagttgatatccgcatgtgatgcagctaattctgaaaatgaagtttctcaggtggtctctggtataccacacgatcagaagcagtcagatgacaatgttgatgggaggccatgcaattccatattttcccctgcatatcaccttcagaaagaatgtggtgcgagtaacttcgccaaaggcttagaacataaaggtgatacattgggttcggttagctcagtagaagaaaggacaacacatgctcaaggtagaaaagaagttaccaccagcagatctgaatccactagccatgcagttaagacttgtgttgggagcgatcaccatacactaaatgcacaatcagctttctgtaacacaccgcttgaagaggatgaattcagtgaactcggaaacctttcttcagaagtgtcagcaatatatcttgccatgcagcagtccaagttggagtgcattgatgaacatagtcaagattcaatctcaacagaaggttatgttgatcctgaggacactgaggaatatgatgattttgatccatatgcttttatcaaggatttgcctgatttatcactagtggtccccaagtttcgccctgtcctactccccaagcaaactcggagttgtcctacaactaccctggtacttgatctggatgaaacacttgtgcattcaactcttgaaccatgcgaggatgctgacttcgcatttccagtttattttaacttcagagaacacacaatatatgtccgatgccgtccctatctcaaagagttcttggagagggttgccaatttgtttgagacaatcattttcactgcaagtcaaagcatttatgcagaacagcttctcaatgttcttgatcctaaaagaaagttgttccgtcatcgtgtttaccgtgattcctgtgtttatgtggagggaaactacttaaaggatctaacagttcttggacgtgacttaactcgtataatgattgttgacaactctccacaggcttttggattccagttagacaatggcattcctattgaaagctggtttgatgatcccaatgatcaggagctgttgaaactgctcccattcttggaaagcctggttggcgttgaggatgttcgaccatatatagccaggaagttcaacctccgtgagaaggtggtaatttcgataaatgcagaagggctggtatggtgattgaagctgtcactttgctaggtgtctccagtaacttgctaattgttgtgacatatagtttccttactactttcagggtctcttaaagattatccgaaagttcactacctccagcaaaaaaaaaaaaaaaa

SEQ ID NO: 9448 - DNA, 327 bp, Oryza sativa
  Clone ID: PAT_MRT4530_15865C.1
ctctcacaaatcaggcgacggcgagtctttctcccacaaatccggcgagggcgacgacgattgtgggcttctgctgtggcgtggcgactgctatcgtcgagcattcctcatcccgtcccctcgagcgctccaaaatccggtaaatgcaatgacgatttggtggattccgcgatgccatcgacgacggcgtcggcgctcgaacaacctggtggtgctggagccggtggtggggttccaccggccgttgcggcacccggccgtgctctcctagcacatgaccatggcgcaggtcgccgacaccgtcgcgctccacccctggctcctcga

SEQ ID NO: 9449 - DNA, 402 bp, Oryza sativa
  Clone ID: PAT_MRT4530_15866C.1
atggccatggttgaggcggtggcgagtgagaagctcggcggcgccggctccaggaggaggcggcggacaacggcggctagggcggacacggcggccccctccccttcttttcatgctgatcttggtggttggacggttagcatcttcctcctcaagctgagatttgggaggggtcgttaccggcggggtcccggatgcgacgacagtgggaagtcgaaccctgtgcatggcggtgctctaggacaggcggctgcgtcaggaccgaagtggttttcggcggcgtcgtggataggaggtgaggcgggcagctccgaagctcggcggtcaggcataaaccggtgcggcgcagcaggtgtgcggcggcgcgcttgggccgagagaaaggagaacgaagggagttag

SEQ ID NO: 9450 - DNA, 315 bp, Oryza sativa
  Clone ID: PAT_MRT4530_15867C.1
atgcatgtcttcttagactaccgctgccatggaaggagggtagcgggatctagctacaacgaggacaatgggcacaacccaaaatggttgccgtgcatcgtcaatccccaattcctcttctcctcgacagccaagtcaacacgacaaatcgctcgatgcaccgccgctgtgcttgccaatgctttcctcgctgccgtggctcgccggcgagacgcgcaatctggggcaagcacatgtggtggcgaggtgagggcgatggagcgtgcgcggggggcgtggaaggaggtggagctcctggacgagcggcgtgactag

SEQ ID NO: 9451 - DNA, 360 bp, Oryza sativa
  Clone ID: PAT_MRT4530_15868C.1
atgacattggtcggcgcaggcgctggtggccacacggcacgcgcggtcgcggggcgcactggccgtcacatcgcctggggcgccatcgactcgacccccgacgagcagcgggggatcgattcgatcaccagctttgccagtcgtggctacagtgacgacggcgatatcagcggtcactattacaagaccgttggatcaaaagtggagcgggcaagcggaggaaccggtgacggcctccacaagcaagcagaggaagacggcggcagcggcgccctccacaataggcaaagcatcctccttgtgtcacctctagcactagtcctccaccttcccgagggcctctccttcgctggcagctga

SEQ ID NO: 9452 - DNA, 195 bp, Oryza sativa
  Clone ID: PAT_MRT4530_15869C.1
atgtggggtgcaccccaacttggtggagaacgaccctacggccccgttggaatagggttgatctgcaccggcaagatcaacaaccctctgagagggatgccacctgagcgtgatgtagagttctgtattgatcttgttcctgcgattgaagtagaggttggtaactgctccggtgcttactatgcccccacctcg

SEQ ID NO: 9453 - DNA, 2393 bp, Oryza sativa
  Clone ID: PAT_MRT4530_1586C.1
caaagctagagtctttcttgcttctcctgagtcctgacttcttgatccaccgattgttcttcgatttcttgcttcttgattcgtcgccgctgctgctgctggaggcagaaagggagcacaagatcgagcaatccaagctgcaattagaggaggaggaagaggaagaggaggaggatgctgagaagggcggggaaaggggaggttgcgcctgggttccgcctcactccctcctccggtcgccgtcgccgccggcgagctctcctcctcctcctccggtacacagctcagctctagagaaacctcttcccctgttcccccctctcctctcgtcgaagcctcctccgctatctccccggtagggctcccgccgacgctctctcctcgtcgccggatattcccatcctatcccctcctcgctcttgctccctctacgtgtgtggcacggcggcgcaccggatcggcgctgggagctaaccccccaccccccggcgaagatgccgcaggtaatggtggtcgcgcggaacttcatggacatggtggccgcgctgccggccgccaagctcgacatgctctacgactccgccttcatctgcgaggccgtgctcaggtcgctcccgccgctcgcgaagaagtacgcgctgcagatgctgtacgtgtcggcgccggtggccgctgcggccatggaggagtgggtgctcgacgagtacgccgccaagcacagggtcgccatcgataggctgctccaactgagggtatttgtcgaggtgcgcgatcgaagaaaggaggtgagctacaagatgaaccagaagttccagggcaacatgcaaaagtatttggttgatggtggaagtttaccaagggaacctataccatcgagtgtcactgcaaggttgcctacattggcagaattagagtcttttgctcttgagcagtgggaggtcaggatgacaaaagcttatgtttgcatatcgtactgtttgaatgctaccaatgttcactcccctagtaaaggaactcattcttttctctatgggaaaatagtgcttcttgctgcaattgatcaactcatctcaagtcgagagagggacaagtttcagctcatccatgatgagaacttttcagcgaggtcttctgagttcaaggtccatcttatttcctcccttgcttttggcatttacctagatggtgaagctccaagattaactgagaacgggttccagtttctgctgatggagacaaatgctcaactttggtacatcatgagagaatacatctcatcagcagaggaacgtggtgtggaccccacggagttgatatcatttctattggaacttagttttcatacattaggagaggcttatagcttgaatactctgaccgatgtccaaagaaatgctattagggatctggcggagttgggactggtcaaacttcagcagggttttgtagttgtggagacaaatttccggatgtatgcgtactcaacttccagattacattgtgaaattctgcgccttttttcaagagtggagtatcaacttccaaacctaattgtgggatctattacaaaagaaagtctttatggtgcttttgagaatgggattaccgctgaacagataatttcattccttcagcagaatgctcatcctcgtgttgctgacaagatacctgcagtcccagagaacgttacagatcagattaggttgtgggaaacggatcgtaacagggttgatatgaccctatcgcatttatatgaagattttccaagcaaggatatgtttgatcaatgctgtgattatgcaagagatcatgggtgcttgctgtgggaggatgcgaagaagatgagattaattgtacgagtggagttccattcagaaatgcctcgagtatataaacgcgggttacataaggagtctcacgcctctcaccccaccccacccactcctccgacgagagtagacgagcagagcaaaagccggccgccgggcatggggaagaagaagaagaacaagaacaagaagaacaagaagtcgtcggctcctcaggcgcgcggccgcggcaaaaactccgaccgccgctccttcacgcgcggaatgctgcagtccatcaacaacatgacggtcatgcgcgccacgcctcgcgaccccttcgtcgtcgctactgtgacgggtcgttgcgacggcgaccccatcgacgtcggcaaccccgacatcgccgccgccgccaccgccgcggccgaccccgtcgtcgccgccgcccccgtcgtcgctcctgctgctgctggtggtccttgggacgaggaggaggtggagccggcgccggcaactaccgacctacgtgctgctgccaccaccggaggcgaggcgaccgagaccgagaccgccgccgtctga

SEQ ID NO: 9454 - DNA, 432 bp, Oryza sativa
  Clone ID: PAT_MRT4530_15870C.1
gtaattgctcctcttgttgactttgttggaaacaccattcaattcccaccaacttacagacctgtaaagtatggttttgctggtcttcctcaagctaatggagaagtcagtccaagtcttcttgcaagttattataacattgaatcaaacacttgtcaaactgattccagtactatgtcagtctttgaagctcttgctcaaagttactccccaactgatttaacttctttccaaaccaagttcagcattcctcaacaagctgtcgcaaaggttgttggaccaaactctggaaacttttgcaagagtaacccaaataactgtgttgaagctggtcttgatgttcaatggattattgctgttgctcaaggttgtcctctttggttctggtctattagtggaaacggtgatatctttctttgaaggattcttgct

SEQ ID NO: 9455 - DNA, 115 bp, Oryza sativa
  Clone ID: PAT_MRT4530_15871C.1
tttaggaggacgaaaataaaagggggtttaatttatgtttacaaaagaattacagcttgtatcatactttaaccattgaatagattaacataacatcaggcaaaaaagctcaaaa

SEQ ID NO: 9456 - DNA, 224 bp, Oryza sativa
  Clone ID: PAT_MRT4530_15872C.1
ttctgggtttcgcaccatttggttccaaaccgtccttataaacggataatgtaacaacacgccgcccaccattgcgtcgagcggtgcttctggccttcgcgcatcatgtccagaactacagatgctgcaaaaccaccttcgctgacagttctagcaaccccatcctcacaattcataacatagtccagcttagccccaactgcaatcaatgccaacatgattcc

SEQ ID NO: 9457 - DNA, 249 bp, Oryza sativa
  Clone ID: PAT_MRT4530_15873C.1
atggggctcgccggatctggcctcgggaggtggcgacggcagtggctcgacgacggcaacgacaacgacagtgggacctccgtttacccacttccactacctcgttggatttggctaaagctcgataactgtggcgaggaagctcgacggtggcaacggttgaagatcaggaggggaccggctcattgggaccacctgacaatttctgacgagcgtcttggagtccgtgttacagctggctacaaatct

SEQ ID NO: 9458 - DNA, 426 bp, Oryza sativa
  Clone ID: PAT_MRT4530_15874C.1
cccacgcgtccgctgtaataccgcaccgtccgtgctgagaatcgatccggtgcctacacagacgcgcctctggtgaccgatctggataggagcctgggcaccgccggggatccctggaattcttgccaggaatcgacagccgctctgctgccggagatgaagatgacatggacgctgtcccagacggcgaggatgcacacgacggacagatggagcagctcgacctcggcgtgtgggtcgcggacctggctcttgacctggatgtccgacgtgatgaggacctgtcagttgaggggcagaggcatgaactccacgactgtaaggacgacgaggaagtggacgatatccaggctaacggtagtaaactgcgtgattacacaaaaggcgtggagaacaacattcgccaaattgagcttgattctatac

SEQ ID NO: 9459 - DNA, 142 bp, Oryza sativa
  Clone ID: PAT_MRT4530_15875C.1
atgggagaatgggagctgggagggcggccgactttggcgcacacgacgggagggaggtggccggcgactcccgtgcggcgtgaggggcggtggccgtgccgtcacctcggctgcatgggcggcggccgtccctgtcctcgcg

SEQ ID NO: 9460 - DNA, 666 bp, Oryza sativa
  Clone ID: PAT_MRT4530_15876C.1
atggaggagcgaggggcggacgtgtcgaacacttgtcgcgactctttcggtaggagcacgacgacagtgggaatcacagcggtagggatacggctttgcaggcctgttctcagtgggggggcatggtatcaacagggaagcgggagggctggcacggaaggtataggtggcacgcttggtcgggcgtccgctcgtagtgttgcatcgtgccagtcatctcgcgcgggcgtcaaggacggcggcattccggacgtcgggcaggtcagctttgcaggttcggcgttggctttgcatacgctagtcactagctttgcagagggaggcagctgcagtcggtctcgttgctttgggcataggggcggcgtcggttggtggaggagcgcggcgaggtcagcggcggtcgcggcagggcctcgggcggcgcggcgtcagtatttcaggcctggtcggggttgtcatgccgttgcgtcgccgcgggcagagagagggagagaccggcggcattggatcagtgtcgatgggcggcggcttcgggtcggtcacggcgggctgcgagctcagcgcctaggagcacagagcattgggcagggaggcaccagacttggcttagctttgccagcgggaatcgcaggcagaggtggtttggagcttgtctgggaagcttaa

SEQ ID NO: 9461 - DNA, 749 bp, Oryza sativa
  Clone ID: PAT_MRT4530_15877C.1
gtcttgtcgagccgagtcgagccaatctctcttcggggttttctcctctaggctccactctccgatccccacgtatggcggcggcggcggcatctgcggcggcggcgacggccgcggaggacggggcgcggctgctgcggctggaggagcaggcggggcacggcggcggcggcgcgtgggagtacctctgcctcgcccgcaggctccgcgcgcgccgcccggagcccgtcctccgcctcggcctcgccctcctcaacgactcctccgcccgctcccgcctcgcctcagaacagtggacgctgtatgagcaggtggcagtggctgccatggattgccagcgtctcgatgtggcaaaggattgtattggagtgctttccaagcagtttcctggcagcatgcgggttggtcgattggaagccctgctgtttgaagcaaagggtgaatggactgatgctgaaagggcctatgcgcttatccttgaaaacaatccgttcgatcagattgtccacaagagaaaaattgctattgcaaaagcacagggtgacatggcattagctgttgagtatctcaacaagtatttggaactatttatggcagatcatgatgcttggagagaacttgctgaaacatatgttgccttacaaatgtataaacaagctgccttttgttatgaggagctaatattggcccaaccaaccgttccactttatcatctagcttatgccgaggttctgtatacaatgggtggt

SEQ ID NO: 9462 - DNA, 894 bp, Oryza sativa
  Clone ID: PAT_MRT4530_15878C.1
ttagaatttaggaattgagcaccgctgctcccttgcactactattaccttcttgagactgatcctgctgaactggctccgactgagtagcttgctcgatattaacttcattgcttgcattagtctctgaattgatctcaccaccgatgttcatctgttgcgattgttcttgagatgtcagacctgattcaccaacttggagtggcttgatacgctgcctctggctactaccctgtgcctcctggaaaacagtcattcttctcttacggttgtccatcctagtcttcttatcttccaatcgaattgctttgtcaactagctgctgaaaatcagcatagtcatgagagatcaacgtaactgacagttcatccttcaggccttccaagaacatctcctgccttttctcgtcagtacgcacatcttctagagcataacgtgctagacggttgaactcatgaagatactctatcacggtacgatccttttgcttcaatgccctgaactcatgcttcttcaaagcaaccactcctgcaggtatgtgtgtcttcttgaatccttcggtaaactcttcccaagtgattggttgtccttccgctctgttcatccgaaagtgatcccaccattctgaagcagatccttgcaactgatgtgaagcgaatacaactttctcctgatcagtgcactgcttcttagaaaaggtaggtggcctcacacgaaggaaatcagctagcttgctccggggtagtggagcattgttgtacccttggttgagctggttatgcatctgctgcatcatcatgttcattaactgagtctgttgagcaagaacttgagtaagagttgggttcccttcattgttattgttcccacttccactggcgcgaatgttcaccat

SEQ ID NO: 9463 - DNA, 1101 bp, Oryza sativa
  Clone ID: PAT_MRT4530_15879C.1
atggtgaacactcatgctagtggaagtggaaacaataacaatgaagagaacccaacccttgctcaagttctggctcaacagactcagttaataaacatgatgatgcagcagatgcagaaccatctcaaccaagggaacaacaatgctccaccgccccagaacaagttagctgatttcctttgtgtgaagccgcctaccttttctagcactatcaacctagtggaagcaggtgattggctacacactattgagaagaagttggaattgctccagtgcacagatcaagagaaagttgtgttcgcttcacatcagttgcatggatatgcttcagaatggtgggatcacttccggatgaacagagcagaaggacaaccaatcacttgggaagagtttaccgaaggattgaagaagacacacatacctgcaggagttgttgctttgaagaagcgtgagttcaggacattgaagcaaaaggatcgtaccgtgactaagtttctttatgagttcaaccgtctagcacgttatgctccagaagatgtctgtactgacgaggaaaggcaggagaagatcttggaaggcctgaaggatgaactgtcagttacgttgatctctcatgactatgctgattttcatgagctggttgacaaagcaattcaactggaagataagaagaacaggatggacaaccgtaagagaagaatgactgttttccaggaggcacagggcagtagccagaggcagcatatcaagccatcccaagttggtgaatcaagtctaacatctcaagaacaatcgcaacagttgaacatcggtggtgagatcaattcagagactaatgcaagcaatgaagttaacatcaagcaagctactctatcggagccagttcagcaggatcagtctcaagaaaataacagtagtggaagggagcagcaagtatgtttcaactgttatgagccaggtcacttcgcaagaaagtgtccgaagccgaagcatcagcagccgcaaggtcaagtcaacaacattgtcgtcacaggagccaatgcagtgccagttgcgtcctcaagtgttacagctcagccaccagtttcaaagcagcagtag

SEQ ID NO: 9464 - DNA, 241 bp, Oryza sativa
  Clone ID: PAT_MRT4530_1587C.1
cgagcgagcggtctagctgctagcttgcgctatggtggatgtgctatattgacccctaataccacagtccagatcgctgtagtgcttcgaaagggttttgacagcgatgaagaaacgatatgcactgagtgtttcaacctgaagacggacaacatgctgtggaaagctactgatgaacatgctgaacagcgtgacctccaaggccattaccaactgggatcatatagagttgaagagaaac

SEQ ID NO: 9465 - DNA, 621 bp, Oryza sativa
  Clone ID: PAT_MRT4530_15880C.1
atggagaggcatggcacaattaggacgctcatgattgaaagtgcagcggacgaccatctttgtcatctcatggtcatggcttttatggctcgtggtcatagttttaagttatcggtgtttaaccagttggcccacctgttagtcttctcccctcttcctcgtcaagcaatatctaacaatggtgaggtgggtctcagccgccacacccccagccccttcctcacttttcctagctcaaccttggcatgcaaccctaatgatggcaaggcgagacatgaacacaaggaagatcatggagatgagcactggctcaagggggctgcgtccaagattaagtggtcagagcagaagatcgagttctcagaagcagaccaccccaagactaccgttactccagtgcgatatccgatcgtggttgagcccactattcagaatatcaaggtcgcacgggttctcatcgacggcggcaactccatcaacttactcttcgccagtaccttagacgcgatggggatcccacgaagcgagttgacacccactgatcaaccctttcatggaatcactcccgagtcgccgtccaagccattgggcaagatcacgctacccgtgactttcagctaa

SEQ ID NO: 9466 - DNA, 1253 bp, Oryza sativa
  Clone ID: PAT_MRT4530_15881C.1
gtaaggcaaagagataaaaatggaatcaagaaagctgtataaaggttacacaaatcctttagtatgatgataaagtcactcctataaaacggtttataaaggttccatttctacaaaaagaacttcacacatgagctctgaacgaataacaacaaggaccccaaaaattagtttcacaaggtgcacacaacatcccggtctattgtcgacagatgaatttataccgatctgtcatactgatacagaaaatagaggctctgtaagcttatgttgtctgctttctgtatgtgtcctttgctgtaccaaacaaacatctgtcgttccctccgtttgatgctcaagaaatattcagcgatctgactcttcatggtttccaagctgacggtggaggtgggggagttggaaacatcggaggaactgcagagaagatggtgttcttatcgattccacttttgacgtgaatgttagttagggaaatcaaggctgccaccaggccagcatttgctgcaagagtaggctccgtgtaattgtagtttgtacggacatctttgaagccatcatgcctatcagggccagcaaccagtgctccaataaggatattaggatttggcttcttagtctccctccatttaaagcctcctttgcatccatatttgacaccattatgagggattgatgcacctctgtgatgagcgcgcttggggtacttgtttccaaaacccacaacgtagctcatcttcagtgggttcttacctaggacataatcgagctgtgaccttgcaaatttgcggaggacttctgtagtgtagaaagtaggtccacaataccacccaggtgtatctgcagcatccaggtaatcgctgtatagagaggcaaggaaagccgcattgacaacatactgaagtggctgaggccttccgtggttgagctgtatcattcctcctttggtaaagttgaatgaattgtacatcggcagatacgagcacataacattgtctgtttggttgtgaaatgttctcagtatttcttcgtaaggatatccaggacttaggaaaagccgcaacctgctcagaagaacctgagctcctggaagcttgtcatcccaggtaaaaactccataattcggactatcgagccagtatgctccagcatgctttgccatccccggagctgttgcaaccgataggtatgtattgttccctgtggcaaagctcgtcccggctccaccccacacaaactcatccccctcgtgc

SEQ ID NO: 9467 - DNA, 816 bp, Oryza sativa
  Clone ID: PAT_MRT4530_15882C.1
tctgatttcaactgggctaaaggttaactatcataaatcatgtatgattcccttaaatgttccatctgctaaggctgaatcacttgcgggtctctttggatgttccattggttatctacccttcaccaatctaggcgtacctttgggaactaccagaccaaaagtgatggaatttgcacctttgattcatagaattgagaggagataatttgctactacaacatttctttcttatggagacaggttgactctggtaaattcagtcctttcttccctacccacatattatatgttttctttatctattccacaaccagttatagatgcaattgataaatctaggagacactgcttgtggagaggttcagatttcaactcaaccaaaaaatctctgttttttcggagcttagtcggtcaacctaaggaaaaaggtgggttaggagtcattgatctgagaatgcataataatgctctcttaatgaagaatttgcattagttttataatagatatcttttgccttgggttaaacttatatgggagaaatattatgttggcaaaacccctcatgctgtcatacctatgggatctttttggtggagagatgttctgtaatttgttgatgtgttcagagaaattgctaaatgtagtgtcagagatgggaaaacatgtctgttctgggatgatttttcgaatgatgatcttagggtactagagcatgttcttttgcaatcagtagaaaggatacagtctttgtagttgctcaaaaagatatatcacacaactttgtgcttccgatgtcagagcaggcttaccat

SEQ ID NO: 9468 - DNA, 512 bp, Oryza sativa
  Clone ID: PAT_MRT4530_15883C.1
ggagaaaaaaggggaaaaaaaaccccaaaaaaccccacaaaggcgcaaaaaaaacggcaaaaaaaaaggggggaaaaaggggggaaaaggggggggaaagggggccccccccccccccaccccccaaaaccccccgggggaccaagcagggaaaaaactccaaaacaaccgggcccccttcgggcccccccccggcggggggcccctggggggccccttaaggccccgaaaactgggggaaaaaaaaaagccccccaaaggcccgccaccggggggcaaacaggatttccccagaattaggggggccccctgaccgcagaccccccccggggatgcccccaaaaacccccccaaaacccccccccggggccaaaacgacccctaaaaaaacccttaaaaaggccccttcaagggggggaaaccctggggacccaaaaaatccccggaaccatggggggccaccagggaaaaaccaccgggccattaaaggatgggtaaaggaaggccccccc

SEQ ID NO: 9469 - DNA, 209 bp, Oryza sativa
  unsure (1)..(209): unsure at all n locations
  Clone ID: PAT_MRT4530_15884C.1
actaaagggaataccttcggctcaccgatgctgcccgcggcggcggccgtgtggatgtggcccgcagcggcgacggcgcgccgttgctgcccgcgacggcgacggctgcgccgatgcaggccgcgacggtgtcggtggtagtggatgtgtcttgcaactggggcgtgngatgcggctcaggatgatctccatcttcttcaacctctctc

SEQ ID NO: 9470 - DNA, 1674 bp, Oryza sativa
  Clone ID: PAT_MRT4530_15885C.1
ctacgccaagagagtcccggccatcacagtgacagcttctccctggatccggactctcctgttctcgccgtccagctccaagtacaatgttccactccttggcgaagcctgaaacgccgtaagtttttgtttccccagctttccaccccagtaaggtgccagaacacaatgtgcgcttccacacacaggatcctcatctatcccaaattttgggcagaagaatcgtgaaaagaagtcataatcagatccagcaggtgctggtcccgtaacaataactcctctaccatcacattttttaatttcattaatgttagggataatatcagcaacctcttttccggaagaaagttccaccaactcctcatttaatattagcatccttaaaagattagcaattctttctcttagggaaataatcgtagcggtagcattgccatggttcatgacctccattttaatgatgaggtcaccggcggttgatgatttccaaacactgacgactcgggcgccattcagagtctccggaatcgacagcgtctccgcggaatcgtactccacgagatcgatcatggggaaatccagctcgatgaacagcttctcctcacccgggacgccgccatcgttcgccggaggcggcggagcaggaaccttcttggcggtcaggatgccggacctcgtcacgaactcgaccatggcggcggcggcgtgctgctgcttcgcgaggacggtggtgaagaggaagtgggcggatgccagcgtcgcgtggccgcagagattcacctgaagacaacgacgacgacgcgtgcggatgaacacaggggagacgagtaagaggaaacctagggttggggggaagggggaggcgacctcggcgacgggggtgaaccagcggaggcggaaccgcggggcggcgtcggcggcggcggcggaggaggaggggtcgcggatgaggaaggcggtctcggagaggttgaactcggctgcgacggactgcatccaccgctcgtccgccgccgccgcggcatcctccccttccaggaggcatacggcggcggggttgcccttgaacggctcggccgcgaacgcgtccacctcggcaccagaaaccttgaagtcagaaggagctacctcaacattgaaagccttgatcttcccatcgtcaacaaaggctgaccacctgtgggaacggcggccaagcaaagcagcagagaggtctacttccaaatccaagcttttgtggaaactcccatcaaaatcaccataaaattcaatagcatcttttgcctgtagcttttctgcccatccattcagggcataagggtcattcacagagacacagataacagagtcaaccccttttgctttcaacttgtcaatgttatttttataactagggacgtgtgcctgtgaacagactcctgtgtatgcaccaggcaggccgaagatgaccactttcttcccatggaagatgtccttgagaggggtggtggagaagttggtggcgacgccctcgtcccaggagcgggccttctgcagcgacacgccgggcgccgccgagacgatgtcggagccggagcccaccgacgcgagccccctggaagcccacctcgccgccgccgccgccgcggagccgcctaccgtcgccttcctcagcagcgccgacgccatcgccgc

SEQ ID NO: 9471 - DNA, 119 bp, Oryza sativa
  Clone ID: PAT_MRT4530_15886C.1
tcccattttcgtcccttgaccgcaaaaccgggtacgacccgtcccccaacttacgaaaatcaggcaaacaaggtccctccgcggttttggctgatgtggcgcctacgtggcttgtttga

SEQ ID NO: 9472 - DNA, 571 bp, Oryza sativa
  Clone ID: PAT_MRT4530_15887C.1
gttcaaagtatactctatattatttttttttttgggagcaaaaacacaaaagggcaaccacacagtaacacaaactagataaaagggccacacaaaactaactttataacgaacgaaagacgaagaggggagcccccaccagaaccaaaataacttggccatgagggccccaccgctcagttcctccagtgcccgacggagttgccgccgccgcgaatgaagaaaacaccggcggaaccggcgcccccgccacggccgccaccgtatccgccggcaccgccgcacccgccttcacggcgctggccgcagccaccgccgccgccaccaccggagccgccgccgacaccgcagcctccgcctacgccgctctgggcgtaggcgcctacgcctccgcctccggaacggagagactgggcctcgatgacggtgatgttgcggccggcgagctccttgccgttcatcccctccatggcgtagagcatggcctggtcgctcgagaacgggaggaacccgaacccgagcgacctccccgtttcccgaccgttgaggatcttggactggaggatctcgc

SEQ ID NO: 9473 - DNA, 252 bp, Oryza sativa
  Clone ID: PAT_MRT4530_15888C.1
atggatggaaatttacactcccattgccctcaggacgagaaacatggttctccgggaacaactttggatgcattggtgaaggaggtgacgcacaacgaggtgaagatccatatagatcaggagaccagactgactgtgctgacgataaattggcaccttgggtggatgttgcagtggacaaaaagtctacactactcagtcttcgaggactctgtacagggcttgaaaatccactgcttggagcacttttag

SEQ ID NO: 9474 - DNA, 272 bp, Oryza sativa
  Clone ID: PAT_MRT4530_15889C.1
aagtgtgttttgattattattgtccacgattgaaccacaattttggttaatttttgagataacttgttcttaattttccgagggaacacaataattggttttaatatttggacataattggcgaagatgggttgctgactctgtgacccatcagaccggtgtatgttgtgcggtctgaccagccggctctttgtcggtttcggtttcgggttgttcatttgaatacttgtgattaattcatgtttataacttaaaaaaaaaaaaaaaaaaaa

SEQ ID NO: 9475 - DNA, 866 bp, Oryza sativa
  unsure (1)..(866): unsure at all n locations
  Clone ID: PAT_MRT4530_1588C.1
gattggaccccaagtgtctgggaggctgctgggcttgacgggcantggcccagttccctgggncaagaggccccggngtgtttcatttgggcaaaaccactggaatggaatgctatgnctctggngatagatatgaattcgcccnttgtctgtcatacgccgcctttgctgttctcgcccctgccctgccctgcgtgctntgcttgactgcgcctgctgcgctgngcttggccggccggctggctcgggatagcntacctgtcttggctacaaaggtgactgcggcttggggtgtggggggatatatntggatggaggggtgtgtnttgcggtgtgtgtgtgggctgctaggatgggaatggcgtgtgtgtggttgggggcgtggtgggtggtgtgtggtgcgtttgtggttggcttggnctggggtgtggggcgtgaccatggatactatacctggtgagtgatgttggcaagggaaatatagatgtgtgatgcgtgtgctagtgagaatgatggcgcgtgtgcactatggtgtgtatggatatgggatgccgctgaggtgtgtgaggtgaataatggtggtgtgggttgagtgtgctgtgattgaggattttgggaggaatgctgctgcagggaaaatgatgggctgggacctgtgttgaatgagtggactgtttggggtttgggaacaagtgcacaggaatggagccgggtgccaggagtgtggaagcctgctggctgtgtggtgcagcgtggtgatgaatggncaaaaggtanttcngaattcagatgatttatgttctgaatctcaaattttcacagtaattngatagtacngagtngnacatnacacattaaaaaaaaaa

SEQ ID NO: 9476 - DNA, 2483 bp, Oryza sativa
  Clone ID: PAT_MRT4530_15890C.1
atgcggtggtggaagcgctcggtctccccttccccgtccccgtcctcttcgtccgcgtccgcgtccacgcccgcgtccccggcgcgggcctcgacctcccgcgttggcggcggtgtccccagccgccgccgggatgtggtggggtttggttggggtggggggagtgatccgcagccgcggttgaccaggcagaggcggctgcggcacgtcgacgacatcgaggtcggggtctcggcgctcgggctggattcctccccctcgcccgccgcgccctcgtcgtgcccctccagtagggattcggtggggttcggcctcctgaccgcgagctccacgccgatctcgaggaccgcgagtaacatggaggtggcgccgccgaggtcgtcgtcgtctcccgtgctgctgccgcacccgctgcccctgcccgatgagggggactcgccctgccgcggctccgggagatccctcccgtcgcccaagctattcgaaggagactgcaacgggtcggccgtggagtcgaacttgctcggggtttccgagatcgggagcgacagagcatcgttgtttccgagcatttctgagccaaattgggattgctgctttgccagccatctaagaagagtgatggctaaaacggtgcaaaaaaaccctgagcatggtgacttgcgatcaaatggcacaaatgggattaactgtggacaacggaggaaggcatttaaagagaaattacaggataagagctcagctgaaacattgacattcagattgaacatacccgctaaaagtgctccaagcagtggattttcaagccctgtacagagtcctcgaagactgagtagtgtagactttttgtccactgcaacatccacccaaggtgccaatttatcgtcagcacagtcagtctggtctcctgatctatatggatcttcacctcgttgtgcgtcacctgaaaaaattatgggtagtcaggagcgatctcctcgctccagtccattgagaagccctgttctaagatcaaaaaacccaagtgcacctccttcaccaatgcatccaaagttgttcccggagaaccatgtttctcgtcctgagggcaatgggagtgtaaatttccatccattacccctcccacccgcctctgtaagcccaaagcagacgaattttagtcaccagccagttccaaaagttgatgcaccctcaatggctggtcagtggcaaaaaggaaagctcattggcagtggaacatttggatgtgtatatgaggccgccaatagacacactggagctctgtgtgccatgaaagaggtcaacataattcccgatgatgctaaatcagctgagtctctcaagcaattggagcaggaaataaaatttcttagtcaattcaagcatgaaaacatagtgcagtactacggcagtgaatatattgaagatcgattctacatatacctggaatatgttcaccctggttcaattaataaatatgttaatcaacattgtggagcaatgacagaatcagtaatccgcagcttcacccgccatatacttaaaggccttgcctttttacatagtcagaagattatgcatagagatatcaaaggagcaaatttgcttgttgatgtgaatggtgtagtcaaattggctgactttggaatggctaagcatagtgcttcatactccttatggtgcttggcagcagtggctgggggcaagagggtagagtgccgaggacggagggagagtcaaacaaggagtgaaaaggctgacagtgacccaggcttttctgtggctatggtgctggtggtggcaacgatgaatgaaagcaagggagagcttggaagccaggcagagggacaagtagtggaggaagggaagttgagtactgcagctcctaatctttcactgaagggaactccatactggatggctcctgaggttgttcaggctacacttgtcaaagatgtagggtatgatcttgctgtggatatctggagcctaggttgcacaattattgagatgttcacaggaaagcctccttggagtggtcttgaagggcctgctgcaatgtttaaggtgttgcataaagatccgtcaattccagacagtttatccccggaggggaaggaatttctgagatgctgcttcagaagaaatccagctgagagaccaacagcaagcaagttgctggagcatccatttgtccacaattcgaataacttcaaccagcacagtgctttacattctcccactggacttaaatccaccgataccggtcacaatgcaagagacaaaaagtcctgtaagattgtttcatgcatgagggggaaaaatatgattacaactggtgaaacaagcagtgctagatctcccggttcattatctaatcgggtggcagtaggcttgacagccctgccaaatttggaaactcgtagcttatcccctacgccgatgagtttgaggtccagtcctggctctgcggcccatacacc

SEQ ID NO: 9477 - DNA, 312 bp, Oryza sativa
  Clone ID: PAT_MRT4530_15891C.1
atggccaattttagggttgccagttttccaaatgcccctcttagatttacacttaataatttatcattggagaaatcgcccaccaccaccactccccgtctccccctcctcgtctcccacggctccgatccggcgcgcctcgccgatccacgcggtggcgagttcgccgaaaccatgccgagctcgccgaaggtcttctcctcggtgaccacctcccaccgcgccacgctcctctccaccccggccttctccgccgcctgcctcctcttcgaccttgcgggcttcctcaccgccgcactctctatctcctag

SEQ ID NO: 9478 - DNA, 610 bp, Oryza sativa
  unsure (1)..(610): unsure at all n locations
  Clone ID: PAT_MRT4530_15892C.1
aactaaccagcatttttccccagttcttcggatctggacaggcaggagcaggaggcgatggtttcccagaatgagagtccgacgccccttccctgtcgccggcgttcgtccttccccgctggtactcccgttccgctcagccacggcttcgacctccaccgccaccgccgggcctccacccccggcatcagcttcctctacgtcgccccatggagctccaccgccactggttagccccgtatgccgtcacccatttcctcctattcctccgctctaggtggcgatggtcgccgccgccgccccacgtgcttccagtgcaggcggaagcggaaggcagcgggctcatccagcgtgcggatgggcgacgatgtggatcgtggccgtggatagggagcccttcttcaactcgacgtcggngaggaacgacggtcgaggaggatggcttcgccgttgctgttgtccacgtcgatctgctcctcatccccttcctctccagtaatatgtggatcgagggtggtgggacatcccctccggcggcgaatcanggtggccttccgcagcattttctgatgaagggtgggagcggatctggaggtcccataccagttct

SEQ ID NO: 9479 - DNA, 192 bp, Oryza sativa
  Clone ID: PAT_MRT4530_15893C.1
atggcggtcgacggcgacgcggtgaggcggcgcccgcctcagccaccgccgcgctccggcggctctaggcgggacgcctccacgggcttcgcagaatccgcgctccgcgtccccggcagcaatgtgcggaactccagaatccaccctgcttttgaagctcaatcagttcttcatgtctacatctacacttag

SEQ ID NO: 9480 - DNA, 1516 bp, Oryza sativa
  unsure (1)..(1516): unsure at all n locations
  Clone ID: PAT_MRT4530_15894C.1
gcacgaggccacgccgccacctctccacgctctctctctcgcgcgcgcaaatggcgtcgtcgaccagcctcgccgcgctgccctcgcagctcgcctcccccgcccgccgcgccgccctctcccggtccgctaccgcgcggccgcgccaccaccaccaccccctcctccgcgcaccgcccaaaggctgcaggctggtggtgacctgcaacgcgcagacggcggtcccgaccagcattgcgcagggcacgcccgtcaggccgaccagcatcctggtggtcggcgccaccgggacgctgggacggcaggtggtcaggcgggcgctggacgagggctacgacgtgcgctgcctcgtcaggccccgcccggcgccggccgatttcctccgcgactggggcgccactgtggtcaatgccgatctcagcaagccagagaccattcccgcgacgcttgttggtattcataccgtcatcgattgtgctacagggcgtcccgaagagcccattcggacggtagattgggaaggaaaggttgctctaatacaatgtgctaaggccatgggaattcaaaagtatgtgttctactctattcataactgtgacaagcacccggaggttcccttgatggaaatcaagcattgtacagagaagtttattcaggatgccggtctggattatctcatcatccgtttgtgtggtttcatgcagggcctaattgggcaatatgctgtgcccatactagaagagaagtcagtatggggaactgatgctcctacccggattgcttacatggatacccaggacgttgctcgactgacgtttattgccatgcggaatgagaaggctagcaagaagctcttaacttttgccggaccacgtgcctggacaactcaagaggtgattacactgtgtgagcggttggctggccaagatgccaacgttactactgtccctgttgcagtgttgagatttactcgtcagttgacacggttcttccagtggacaaatgatgtggctgacagactggcattctcagaggtcctctccagtgacacaattttctcagttccaatgaatgatacataccagcttcttggggtagattcaaaggatattctcaccttagagaagtatttgcaagattacttcactaacattttaaaaaaattgaaggatctcaaggcacagtccaagcaaactgacatattcttttgacaagaaggatatctacaaacctatggatatattttctgatgcagatctgtgcttcaaaacacagatgagtgaatacaaattttcttgtatatctgttgttgtggtatgtgcaagaagtgcatgctattaggttatgtctacagaatcccaactattgaactatcaggtcatgtatataggatctcaactattcaactatcaaagacctggagtttgtgtagatcagacctaaattcatgaattcacagtcagcttctgcttttcttttaaaaaaaaaaaaaaaaaaaaaaaaanaaaaaaaaaaa

SEQ ID NO: 9481 - DNA, 536 bp, Oryza sativa
  Clone ID: PAT_MRT4530_15895C.1
atggctgcccttatgatagggacattattgagggcatactatgtcctttacatatatgggctcttaacgggccaacaagcttggcccgacccatggcgaaagggcccccaggcgcatggctgcccactgggccttcttcgtccagggcctatcttggcgacgccaatatgcttcgtcaaatgcccttcgccgtatacccttcgcccttgtggcctttcggacggcgaagctcgaagccaggcccttgatcttcgcccaggtctggccgaaggtcctcgtggtgggcgagggggcggggtggccggtggcggcaacgacgttgtcgacgggaaggaggaggaggggaagggaaggtgcccgctccggccggccgcgggcgcgtgcggcaagcagctgcggcagctgctgaagttcgatgagctcgcctcctctttcgcggagctcattgttgggtcctgccgccaagatacagccgtcgagcttgcgcccgccccgctcgcgccgagctcaccgacccctccccgcaagcgcggccg

SEQ ID NO: 9482 - DNA, 215 bp, Oryza sativa
  unsure (1)..(215): unsure at all n locations
  Clone ID: PAT_MRT4530_15896C.1
ataattaattcacaacaccatatttcattgatcaagttcanaacctncacagagatacagactacctntacagatctgaccctctctccaatactcgacatccatccacgcggtccacacgaatacgtacatctatacggtacacgtacgtacatctactgcaccgggtacacacacgcacactctnctgcagagacgcgcatcgtcgtcaacct

SEQ ID NO: 9483 - DNA, 436 bp, Oryza sativa
  Clone ID: PAT_MRT4530_15897C.1
tttgttttttttttttttagggatatttacaacatcagcatagtttcattaaatttataattgattatattttcataatatatttgttttggaccaaaaaatattactatttttttctataaagctagtcaaacttagagtaaaaagtcagaacgtctcccaaccaagttggagtaacaaaaaaaaaatgtacggtactctttcacactttgagatatcacagaagcgggacatgtccaaagctagctatgccggcggcggagtgctcgacgccgacgtttgctccggggagctcgcatacggtttcgaacaacgccctcaccggccgggggtcggagatccggtagccgccgcagcgctcggagctcgcctgccttatccccttccctcgccacagtatcctgtgacaccatgccggcccgcgctgctgctgttt

SEQ ID NO: 9484 - DNA, 2127 bp, Oryza sativa
  Clone ID: PAT_MRT4530_15898C.1
atggatttgcccaagcgagttcttccgcatggttccccgcgaggaagtcccatggcgacgaggcgaagggacgcggaggcggacgagaacgtgagggcgtggagcgagaatccggggcgtctcggtgccgtggcggagtggaccgcgtctctggagaggaagaaggtgctgggtgagaggaacggcggaggcgacgggagcggggaggccgcgtcgccgccgcagttcttctcccaggcgaagcccgcgacgagcccgccgtcgctctcctgccgcggcgaggggccgtacgacccgaagacgaactacaccacgccgcggccggagttcctgcgctacaaccccgagaagcgccgcgagatcctcctccggctggagcgcgaggcggaggacgagtcgtccagtgccacctcggccacccccacccccaccccctcggagtgcgtgtcctccgggtcgtcggtgagaggcggcgaagccgaactcgaccgcgccgacgccaaggaggaggagattgagattccgtctcctcgtggtctcgaccgcgccgacgccgaggaggaggagattgagattccgtctcctcgtggtgggtgggcacggcggctgcttcttctgctcgtcgccgcggcctgctcttgctgctacatctattgtatgagctcctctccctttcctacctcacaaatggggctcgattttgctggaacaactgggagcgtgcatgatgctagcgctcatcaagtaggttctctggagttgcgagcaccaactgagatgatgggttcacatcatgtgtttgaagaagctacagatcaaactgtgcccaacggcagtgaaaatgcagcccaactgtatggccccatgggtggttctcgtaaaaacttcatggcgattgctgcgatgggtttggcagattcatgcccaaatgttccattcggagaatttacatgccaaattggggacagagccgtggaggatgtgcagaattccaaggaagattttcaactgagtgaattgatggttgcaacctctgagaatgccgagcaattgggtgaagttgtaagcctgaatgaaaatgtcactgcagattccattggttcaacctacaccgctgatatggtggagggagagtcagggttagttcatcaggaggaggcaggggaggatcactcgcaacactcccagcagttggcctccatggagaagacaatagaacaagaaaacaacgaggtagggtatgatggagagggcctggaaaatgacagattggatcaggcaaccgagctattggagtatgagaatccagctgcagctgcaaaggcaatagtagctatggtaaaatcactgtggccttcaataaaacttcacttgatggagatcttggcgtgcttttctgttgcagcatttgcaattgcagctgctatgctcaagtgtttccagaggtctcctaagggtgcatcagtgtcaacacgtaggcttgaacaatcccctttagctccaaatccaagattgccagtgctcccttcaccacaatctgtgctacaacctgtgcaactgacagttcccaaagtagaaccgcctgtcaatttgaagatccctacactatcacctttgcacaagcctgacctatttgccagcttcagggaacaggtgccattgccagagcccataccagtgtcatctgtcaacctcaataatgctgtgcaatttccactgcccaagcagattgattccgggaatcgtcctcagaaagttcaccaagatgatgctggcagtgctaggattccagacagctattctgttggccgtagagacattgacagctcgagacctccagtggtggcattgcttggggagttctcacttgtggatgcaagtagctcaagaggaagctcccggaaaggatcaaatgaacatgctggggatgttgcagttcaggaaccatcagtaactctgagaaaagatgtggtgaagatgcagaaggaaactacagcaattaaaagccctagtgctcgaaaaacgaaaaaggaggaaaatgctgcaaaggtggagaagaaggatgttaccacgccaactccattgagacgctcaaatcgtctccttaaccgggtgacttctccttga

SEQ ID NO: 9485 - DNA, 608 bp, Oryza sativa
  Clone ID: PAT_MRT4530_15899C.1
catgctttaattaacagtacagtagaaaggaggagtagatttttgggagcattggcctgaataattgtaccactacaccataaagggacacaaaagatgtacagggaaaaaacagcactgttactgtgcaaatgtgtgtagtgtaaggccactgggcgcactggcagcagcgagaggcccagagaaacatccaacgcgagtcaagcgtgtagttgggagtagtagaattccgtagggccaaggcgcacaggcaaaacgcgcacacgcgcttttgacctttttcgctttccgctgtgttgtcctggtccggttgggtggttgggttggtgccgccccgtgatcccgctccgcacccgcgcctccctcgcttcgctctccgcaaccttggcgtggcgtctcgccgtctcccatgccctggcgggaaagacgacggtgtgaggtgatgaggtgaaatggcaggtctgaccctccgttccttctgtggctggtcccctactgcaggggccttcccgtcctttcgtcctgccggcacagcgtcactacgcgtgaggaggctgtgtggccccatctctgcatgaacgactgcactctcttcctggtcatatgtc

SEQ ID NO: 9486 - DNA, 414 bp, Oryza sativa
  unsure (1)..(414): unsure at all n locations
  Clone ID: PAT_MRT4530_1589C.1
tcgcgatctagaacggcctgacatgccagaggcactcatggacatcatnnnaaggctacatgcatacttcatctgctcatcatcagcccacgagccttgcggttgctgagacgctgacatcgaggccgacgggtacacaaatgtcatcccatacggactgatattgtagctagcacaagttttgcgctgatatctggcctatatataggcacatggcttaagtcattaatacgcaggcccttattttctatatcgagatagttgaacgctcatcctatggtgttaatcgtgaatcttccagaatacctcatggcatgtgtgggtgtgcatggtatatgttagaagctgacatggtatattgttgcttgctttgtctttcccttaatctatacccagcaaggaaggtgcccctgg

SEQ ID NO: 9487 - DNA, 663 bp, Oryza sativa
  Clone ID: PAT_MRT4530_158C.1
atccaatcaaatccaatcgaatcgcctctccgtcctccgcggcggcgggccgccatgccgctgcctgacgatgacccactcctcctccttcctccgcctccccgccacctcctcgccgcacccgccgcccgcggatgatgcttccgcggcctacgccgtcgtcgtcctcaaccagcgcctgccccgcttcgcccccctcctctgggaccgcgcgcggctgcgggtgtgcgccgacgggggtgccaaccgggtgttcgatggaattgccggagcttgctgcccgccgaggacccggaccaggtccgcattgaggtacaagcccgattgttgatccaaggggatttggactccattaggcccgaagtgaagggattttattcccatctctgggtgccgaaatagttgatgaatcacatgatcaggacaccactgacctgcataaatgtgtatcatttatcaccagaaatccacctggctctgaagagtctaatctgtatattcttgttcttggtgcacttggaggaaggttcgatcatgagatggggaacatcaacgtgttatatcgcttctcaaacatcaggattgtcctcctgtctgatgactgctccatctttctgctcccaaagacgcacagccacgagatccatatcgagcgatcaatcg

SEQ ID NO: 9488 - DNA, 251 bp, Oryza sativa
  Clone ID: PAT_MRT4530_15900C.1
atgtctttcgtgattattttcacacttctcaccataataaaagatgctataactggtaataagttgtttagctcctggtttggaatggtatattcctggtttggagatagatctgtacagccgggtatggttgttcaggatggttgggcctgagcagcatgggtgtgctgtttagtgttgattaaaattgatgattaattactctactgttttataattctcaaatgtttgctaaatgctgcttttgcaaa

SEQ ID NO: 9489 - DNA, 219 bp, Oryza sativa
  Clone ID: PAT_MRT4530_15901C.1
cggcgcgtcgtgcctcggcctgcgcctgcgcctgcgcctggtacgagcgccacacaataagtatgatgaagaacgaatgagtgggggagtttggtaaagtgagtgaaagcgactacagcctattggtcggagctcgttaccgtacttgttgatcagtacggtgaggatatttcttagctgatgttttagtttacaatctaatatggatctgatttatga

SEQ ID NO: 9490 - DNA, 1056 bp, Oryza sativa
  Clone ID: PAT_MRT4530_15902C.1
atggcggtgcgcccgggtcgcgaagcagcaccagggcaagcgcggccgaccgcgcaagtacgccgtcacggacgtgccgctggccgtcgtgccaccctcgccgccaaaggctgcggccgccgccggcgccagcgccgcccagtctccggcgacgcccacgctgccgccgggcttctcgtcgggcctggccgcgtacggaggcgccgcggcgagccagccggcgccacgtcaggctccgccggcatccgggcgcgtgctacctcacaagaagaggggccggccgccgggctccggcaacaaacagcagcagcggcctcagcacaagaaggcagcagctccagtagttgctggaagtttctttctgaggatgaacccaactggaagttcgtgggttgtgttcagttgttctactgtattcaggatcactgcttcaagtttcctaatgcatggctactcttagaatcctgtgttgctatttcttcaagaattataccaaagattgtgaaacatttggaaggatctagtgtgattggattgaagcctagcgtcatcacagtgcaagttggagaggatgtagtgtccagggtgatgtcctttactaagaatggatgggctgtttgtgttctctcagctaatggtgctgtatccaacatgacactgcgtcaagcaggttcttctggtgcaacaacagtaaattatgagggccattttgagattctttctttgtctggctcatatctgctgtcagaaagtgttggcctgagcagtcgagctgggggacttagtgtttcacttgctggtcctgacggacgtgttttaggtggcggagtagcaggacctctgaatgcagctacacctgttcaggtggtcattggaagctttctggctgatgtgaagaaggggcacaaacaggccatgccgagtggggctccgtatccaggtccttcagctaaagtcattggtggttctgatgaggggattggggtttgtagctattggacctcaagagatcaactttattactgcaagaaaatcgaagaaacaagaacaagataa

SEQ ID NO: 9491 - DNA, 262 bp, Oryza sativa
  Clone ID: PAT_MRT4530_15903C.1
tcattgccaccaccgtgatgaacgaggcgcaggacaccctccgccttcaatacgggagctgggaggcggagctaagaaagaagctcgacgccgcccaggggtgggctgtcttgtcccatgggcccaaatcaacttcctggaccaccccagtgccccacgcggtcgcgacgaagtcggcctctcccgctgctcttgccccttctcggccggcgccgcggttctttcaagatctaggttcgaaagaggctgtgtttgtgctcag

SEQ ID NO: 9492 - DNA, 1095 bp, Oryza sativa
  Clone ID: PAT_MRT4530_15904C.1
atggtcaggcaaagcaccaggtccccaacctggttgatagtactccctctgttggatggaaggatccacgggagcaaatggacgaacaccttgtgtgcgacatcaccgattcaccattcaacggcaagcactggagtcctcgccatccgattccagcttccaccatggcttccccttggaattcctcgtcagctcatcgatcccatcctcgtcaccgtcctcctcgaacaccacctcttcgtcgtcgtcgtcgtacctccattccagcctcttgagcacgtccctgtcccgccacttgccggacacagacggcgccgccttcctggccttaccggcgatcacctctgcccagctgaacccaacgtcagcccacctcgccggcccggactccccgccgacgaccacggaccggacgcccttctccctcgcgaggcgcagcagaggagcgagctcgtcgcgggccgagaccagcatcaggcaccgaacggaccctccgtcgagcacctcgtgggcgcgctcaaggagggagacggacggggtcggggagagctcgacggcgacgcgggccctgcggaggtcgtcggcgggggagcaggggtcggcggcggcggtgagctcgcgggcggccttctcgtacttggagagcttgagggagagcgcggcggcgaggcgcacgcgtcggtcgccgcgggaggagtcgatccgcgcgaggcgcttggcgtgctcgcgggcgtggatcgcgtcgaagtggcggagcagcgtgtcgcgggcgcggaagcggcggccgcagacgcggcagaggtgcacggcggccgcggcggcggacggagacggggcagggaggcggtggccggggtggacgaaggcggcggagaggcggacccggccgaaggaggtggcggcgaggtggagccgcacggcggcgtcgtagagggggagggtggaggggggccgggaggcggccaaatcccagaggacggcccccggggtggcgggggcgcgggttgccggcgtggtggaggtggagagagagcgcgacggtcggaggaggaggctaaggatcgtgtgttcctccacccggagactgggctttga

SEQ ID NO: 9493 - DNA, 188 bp, Oryza sativa
  Clone ID: PAT_MRT4530_15905C.1
aaggacaatttaaatgatgaaacatttgcaagtcctaaacagtttattgaatgcttggattatattcatttttaggaaaattagaacctttatttttaaattaagaggacaaaaagacttccgatttttttttgcaattcacatatagcaggccagtctttactataacctttacttttcagctttac

SEQ ID NO: 9494 - DNA, 1045 bp, Oryza sativa
  Clone ID: PAT_MRT4530_15906C.1
atggagttgatgttcttgttgactcgtgacttagtcgtgaggagcctggcctaccatccccaaattccccaattcccccacccgatcgccgccgccgccgccgccgccacccgcgccgcgcgcttcctttaccgaatacccgccgcccccgtcgtcgccgccgccgccgccatcaccaccgtcgaggacgagatgaccgtcaccaccgtcgtcgaggagacgaacaaccccgccgccaccgccgtcaaggtcgaggagaaaaccgccgccgccaccaccaccaccaccaccaccacccaggtcgacaagaagacgaccagtggggaggaggagaagccgaagcccgtcgtcacctaccgctatatctgtgagaatatccatcgtctcgatcgaaacgatccttttttcttcacctggggcatgaggaatgaaactgcctatgccattatcacctatggcattctaatggctttcgctgttgctcacctcctcggccgtgtggttggcatggccgtcatagttattgctgtgctatataccaccggcatgtttgctcatgccatcgccgagcatcgccagcacacgggcagtgacacggccgcagatgccctgctcaccaagaagctaaccacagagcagatgcagcgcgaggaattgcggcgcctccccttcatcgtcctcggcgcgtattcactctttgtgtttggttgcacggcatggctggtcttcactgagatgggcagcataagcacggccacggtgatcatcgttttggcggaggtctcaattgggacgtgcttcatctcatacctgtggagtatattgctctctgtgggtttgctccacgatacctttgtctctcatgataccatcgtcttcaaggctggttcatattcaattgcgctctacttccttgcttttctgcttatcgccatgtttgagagcaaacttcttggcttgtccgtgcttttactcataccaatggcgatggctgggttcctcggctatctcgtcgcggtgtactcacactacaagtcactgagag

SEQ ID NO: 9495 - DNA, 299 bp, Oryza sativa
  Clone ID: PAT_MRT4530_15907C.1
atgtcggccgatgatttggaagaaattgatataggaccaggtttcacccccactcctcgcaaggcggcgggcagtctcctctcatgcctaggtgaatcaaaaagccgcataggccatcgcagggcccatccgaacttcatcacgctcacccttgcttggatatcacgatttgccttgctcttcggctggaggaacctcagcgactatctcaaagtacaccggagcgtcgggagagcccgaaggaaggggggcgccgacatgcgggcccacatgtcatcgacacggaggaggcgtgtcac

SEQ ID NO: 9496 - DNA, 567 bp, Oryza sativa
  Clone ID: PAT_MRT4530_15908C.1
atggagttgatcaaaagaaccagcgaccgcggctggggagatctgttcgggggagttgacaatgagatggtggccagcggccctgagtcccggcggcagaggtggagtacagacggacggcgaggcggcactgaaggaatagtgatcgctggtgacgacgacgcacgctacgacggcggctgctcggcggcagaggtgtagtatggacggacggcgaggcgacacagagggaatggtgatcgctggtgtctggtgacgacgacgcacgctacgacggcggctgcgagcggagaagggtagtcggcgatgaggggctcgaccccgccgcaactcctcccgagcggcacgaagggcggcggcgtgagaggggcggcggagcagcggcagcaggcgtgagaggggcggcggagcggcagcggcaggcatgataggggcggcggtgtgggcgtggcggcaggggcgggccgtttttagggcacgggtgcgggcgtgagaggaggcgctggtggggtcgtgagagggggaggcgcggggtgcggtgtcagtacgtctagattggttcaccat

SEQ ID NO: 9497 - DNA, 2806 bp, Oryza sativa
  Clone ID: PAT_MRT4530_15909C.1
cgaggctccacctctcctcttccttcccctcgccgccgccgccttctcgtcgacgcagccatgtcggcggcgcagcagcagaagcacgaggtggaccgggcgacggtggccggagccgtggccgcgctgttcaagtggatgcgcgcgcgcgcggcggaggctccaccgaacctcctcgccgacgagcgcgacgacctcctgctcctccagctctccctccgccgcatcccgccctcaccgacgaccaagccgcgcctccttccgctcccccaccccgtcatcgtccccggcgagtcggcctccatctgcgtcatctccgacgaccgccccaagtcccgctccccggccgcctccgacctgctcgacgcgtccaggtcccaccacctccccgtctccgaggtcatcccgctctccgccctccgcaccgactaccgcccgtacgagtcccgccgccgcctcgccgcctcccacgacctcttcatcgccgaccgcgccgtcctcccgctgctcccgcgcgtcctcggcaaggccttctactccaccaagaaggcccccgtcgccgtcgacttcgcccgcaccgggtggctggagcaggtccgcaaggtgatgaactcgacttttctctacctgcggacgggcacctgctctgggatcaaggttgggaggctggacatgaaggaagaggacaccgtggagaatgtgatggcggcggtggaggcggccgtggagaatgtgcccaagaagtgggcgaatgtgaggtctctccatttgaaggctgtggattcagttgcattaccaatttaccaggctgtgccggagttgggcatgaagatcgaggtccggtttgcacaattggagggagaagtcggttccggggaggttatcgatgcttcggaagctggagctgcactgaagggtgtcggcaagaagaaggcgaagaaggcattgaaacatgtggaagaagagaatgctggtgaggaagctgcacaggagagtggcaagaggaagaggggtaagaagcaactagctgaggatttgatggagcaagacatccaagatgtgagtgagaaaaggaagaaggtgaaggagggcacccctgctgccgaaacgccgaagattagcaagaagggtaaggagaagagcaagcgtgcattggacaaggagggggaggatgcaagtgtggaggaagccagtaacaagaaaaagaagggcaagaaagaggtggtgagtgatgttggggagaagaacagcaaggtgaagaaatcaaatggtgataaggagaagagaaggaccagattaaggattgcagatgccaaacggccgcaggaagaacatgtgtttgggtatattgattggatcccagaacatcatggattccagttctctccttgttataaaagatcattacctgccaccgaaagatacatccgtggagaggctcccttgctgtctgtcagtaattctacagaagaccagaccccaaatggactatctgaagccattgttgtcagaaaaggcttgtccagtatttgtcaaaggtttcccagttttttgcatgacttcagattgggacaacagttggcattccatttgcgagaactgtgcagtgctgttgcaagtgaaattcatgctaaactagctaggttcttacatcgtttctggacaacattacagggatcttctaaagatataggatggctaaaaagaacaaaaacattgccttgttcagttgatggactttttagtaatcacagtccactttacttcgtcaatacgaaaagaatcttttcgaagatggggcttacttgccatattgcaaggattcatagtgaggcatcagtggagaaaaatgcacgggaactgaaattatacattgaagagctgtactggggttctggtaaacaggtgttgctcctgggccatagcaaaggtggagttgatgcggctgcggcgctttcgttgtactggtctgaactcaagggcaaggttgccggactggcattggttcagagcccatatggtggcaccccaatagcttccgacatccttcgcaaaggccagattgctgataaggagacaaggaggatcatggaactgataatatgcaaactcatcaagggtgatataagggccttggaggatctcacatatgacaagagaagggacttcatctccaagcacaagctccccgtggacgaactgccgatcatctccttccacaccgaggccagcaccgccccgacgatgctcgtgacattgtcgcgcgtcgcccaagccgagctcctcccatggctcccattgccgcggttcctgtcgtcatcggagtacgccgaatcgttgctcgcctctctgaagctccccgtggtcgtgccggcctcggcggccatggccgtcagcgcgctccacctgaggctgcgctacggcgagaggagcgacggcctggtgacgcggcgggacgccgaggtgcccgggtcggtggtggtgaggccggagaggaggctggaccatgcgtggatggtgcactccacgctgagaaaggatcatgccgaggctgatgccactcagatgtgtgaagccctgatggccatgctcgttgagattgggaggaagaaatgctgctgatcataatcttacagtttcttggttaaattcaagtttgaacttgagtttaaaccaaacttaggatccaatgccataatcatagatgatgttacaaggcagtttacaaatacagaatgatttccactttgaaggaccaatataaaatgctctttatttccccccgaaaaaaaaaaaaaaaaaaaaa

SEQ ID NO: 9498 - DNA, 5371 bp, Oryza sativa
  Clone ID: PAT_MRT4530_1590C.1
ttgtggaggagaaggaggaagcgccaaagaggaaggattaggagtatcacgacgacgatgatatacaaaagcttgggtgctctccaacatttggactcgagaatccaatgcacccactctagtgtgcaatctccccatggaagcattcaagtctccaacatcggtgcgcaagccacgaacatcctcatgcaatgcttcatgcctggtagacaagcgttgaatgctttcacttaaggtattaatagccccaagtaccgggttgaagtattcattgggttgcattccaaagtaagcatagtgaggatgaaagaagcatttggatcatacccatgaggaggaggaggtgctgggcttgagctagctccagggtgagaagagggcaccgtcctaggagcacggggagctctaggctgaaggcggggcttgtactgcttgtgcttcttcaaattttgcccagcagccccaagcttgttcttgaatcaacctcatgatgtaaggggcataatagattccctgagtgaatgtcctcttgaagatagcaatctctggcatcatgagagacacaatgtcgaactgacggccctgaatgattgcatcgatgacgtgccaagccacccccctaatgtcatcattgttgccaaggcgagggaggatagtggctctcataatccttttaaccacactggggatagtcctcaagccggcaaccttcccatgtgtgtaccgcactccatcttcatagaactgagagagatagtctatggagagcggattgtgagtgtgctcctcatgcaaatcatctccaaagtccaagcgaatgttgaggagctgccggaattgccttcgagagatagaacactggagggtgtcggacatccacttcatctcactctagtctccagccacccacatcttctggaaagcggtgtgaaaatggggatccggggtgtcccgaggcctcaagaactgatcatgatgccttaagatggtatactgcgatggattcctcatgttcaccacaaactggatggagggatcaatgttcatctcatcactttgttcatcctcatcctctccacttccactgacatcatctccacttgcctcctcactagccccctcaacattggcctcaacctcttcatcactttgagcgtaatcctctccgctcgattcctcaggctcactcatgggatccagagtgggcgcacgacaaccatggcgagtgcggggaggcatcatgggcccacctcggccggtcagaccggccctatgtggccggtcagaccgccgcacctggccggtcagaccgcgcatatagcgccggtcagactgccaggcccccaactttgttttgaaaattttctcaaattccttctcaatctcattttggggataaatctcattttggccaaaactaagaatctagtttccgccgaaacatattccgcctcggcggtagagagggcaacggagttttgtttcttggatgaccatgacacaagggatataccaagcatttggcaactaacggatgtgctctttctatccactttgcaaccggcataatccgagtcggaatagccaacaagcttaaatttagcaccttttgggtaccacaagccaatagtagagaaatgctttaaatatcttagaatccttttcacggccactaagtgacactccttaggagcggcttgaaaccgtgcacacatgcaaacactaaacatgatatccggcctagatgcggtaaggtaaagcaagctaccaatcatggaacgataaagctttaaatctaccggtttacctccctcatcaaggtcgagatgcccgttggttgccataggtgtcttgatgggtttcgcatcctccaagccaaacctcttgagtagatccttgatgtacttggtttggctcacgaacgtcccatccttgagttgcttgatttgaagtccaaggaagaagctcaactctccaatcatggacatctcaaatcccctagacatcaaatcaccaaattacttgcaaaatacctcattagtaaaaccaaatatgatgtcatcaacataaatttgacacacaaagaaatcatcaccaatgatttttgtgaaaagggtggtgtcaacttttccaattttgaaatcctttgacaaaagaaaatctttcaatctttcataccaagccctaggagcttgttttaaaccataaagagcttttgagagtttataaacatggttaggatttttaggatcttcaaaaccgggaggttgttcaacaaagacaagttcggcaatttcaccatttagaaaagcacttttcacatccatttgaaatagttttatatcaaagcatgatgcaaatgcaagaaggatgcgaatagcctcaagtcttgccacgggggcaaaagtttcaccgaagtccaaaccttcaacttgtgtgaaaccttgtgccaccaaccttgcattgtttcacaccaccaacccgttctcatcttgtttgttcctaaagacccactttctccctatgacattgtgatctctaggtcttttaaccaatgtccacaccttgtttcttgcaaagttgttgagctcttcatgcatagcatttatccaatccgaatcacaaagagcttcatctacatgttttggctcaaggcaagaaacaaacgagtaatattcacaaatcgaagcgacacgagatcgagtttgaacacccttactaatgtcacccaacacttggtcaattgggtgatccttggaaagagcggtgtgtatcctttgtggcataggtggatcttgtgccttctcctcctccacttcaacttgagcttgacttggcgtagcggaagtagatggctcatcttgagtgaaggtggatggtttgtcttccactttaataggcttgacatctctaatagacatgttcttcatagctctcatcaagccttcatcacctacatcatccaaattctcgtgcccctcttgggagccattagtctcatcaaaatgaacattggcggtttcttccacaatacctttgttcttgttgtagacccggtatgccttactatttgaggcataacctagaagaaacccttcatcacaccgacttgcaaatttggttagtctaacaccctttcgataaatataacacttgcaaccaaaaactcgaaaataggcaacatttggcttcctcccaacaattagctcataggaagtctttttcaagagatgatgcaaataaagcctattggttgcatagcaagcggtgtttatggcttccgcccaaaaggaatcggaaacaccatattcatcaagcatagtccttgccatctcaatcaatgtacgatttttcctctccacaccaatgctcttataggttgttgggccaaacaaatccatatgcaaaagctccaatggtctagatgtggacatgatactcttagtaggatgagaacatgcaacttgcttgccggcttgacaagcactacaaagcttatctttctcaaacttcacatctttcaagcccacaactagatcacgttttgaaagtttactcaattgattcatgctaacatgagctagcctcctatgccaaagccaacccaatgaagtttttacaactaacccaattacctttcctttgctattgtctccaaaagtcactttctcttgttcattccctcctacttcaaatgtggtgaacatagccctatcaccggtcatgtgttgagtgcatccactatcaagcacccaatggctcccaccggtgcggtagttcaccactgagtataggggaacccacatatctagcaacaatgctaccatcatgagccttcccttgaagcacctctccaaactcttgtctcattagccacttgctccttaagctcattattctcaacaacaagtgaggcatcgcaaatagaaacacaagagctagagctagagctaggcatatccacaagatcatcacaagaggtaggaatgctagatgatgcaacatgagcaatatggcaagtagcactatcatcaagcaaatcacaagatatgccaacatcaatgtgagctccatgttgagtagtggaaaggaggttgtcatgagcttccttaagcttctcatgagaaatggtgagtctctcatgagaggtctttagctcctcatacaagacatccaaagaagcatgatccttctttagagccttgaacttgacaatctccttctcattataagcttggagctcctcaaacatactcacaaactcatcataggaaacatcatcacaatcatcatcaccctcactatcactaagagatgttaccttagaggagcccttgagcaaagagtgtggagcctccttgatggcaacaacggccatcttcttcttcttggagctttacatcatcaccaccttcttcctcggacccggatgaggcggagctctcctcatttgagtcccattccccgatgaaggcctcaatcttcttgccttccttcttgagcttcttcatgagcttgtagcctccactcttcttcttggatgacttgtctccatcatcatccttggaagggcacttggaagcaaagtgtcccttctcaccacactcaaagcacctcaagttggagaaagtcttgttgggtcttctatttcttctcctatttgagttggagccccttcctctctccttgcccttgcccttgtcttcaacttcggcttggagagcaatgcacttcttggaaggtgaggcttcctccatctccttcttcttcaacttgtacatgtcattggtgttgatcttccccaagaggcttgcgggtgtcatccttgacatgtcggagttgatgagcatggtgaaaagggtctcataattctccggtagagccctaagcatcttttgggcaacctcaaaatcggtgtagtttgccccaagccccttgagatcattcacaataacattgagcctcccatacatgtcattcacgctctcatgaggcaacatggagaatgtctcatattagatcttgagaaaatgaagcttggcattcttgtactcgcttgtgccctcatggatctccgccaacttgttccaaatctcatatgcggtctcaaggttgctcactctatcaaactcctcttggctcaaagagttgaacaaggcattcatgcttgggcattgagttggaggttgcggtgatcaatctccgtcaagggtgtgccggtgatagcaaagccggcgccgggcctcctccacaatcttctcggagagatcaccaggcaactcctccacaagccgtctaggaggcggcaacctccaagagtaacaagcaatgacccggcgtggagatgatcaatcaagtgccacactagctc

SEQ ID NO: 9499 - DNA, 364 bp, Oryza sativa
  Clone ID: PAT_MRT4530_15910C.1
cgctgtctttaatctcgccggatgcggattcgaggaggaaggctaccctgttgtcgactacgagtcagcacttcagaccgccaacatcgcctccgcgttcaacggtgcaccgccgtcgccgttgttcgtccagccgtgcgccgccgtcgctccggtcgtcgtcgtcgctcgggaaggccgccgtcgtgatcgccaagccgtcgccgacctcgtccacccctccgtcgttgccgtaggtcgccggagcaccgccgtcatcgtcaagccgaagtgctgccgcaccgtcgttcgccggcgagcatgcaccgtccgagccgtcgccggtgatgacgtcaccgctgacgtcatcatcgtcatgtcgtga

SEQ ID NO: 9500 - DNA, 886 bp, Oryza sativa
  Clone ID: PAT_MRT4530_15911C.1
ttatttttgaaaaggaaaaggggattattgcgtcagcggctagggttcacggtggaccgggtgcacggcggcggtctacgggaacgaacggccgagatcactctaaccaaatcggacggccgagatcgatctagtccacggcggttcacgacatgacgatgatgacgtcagcggtgacgtcatcaccggcgacggctcggacggtgcatgctcgccggcgaacgacggtgcggcagcactaacgaagggcacctacgggttgtgggcgacgcggcgaactgatcaccggtgaccaaagaagaagcggtggcgaccttcggcttgacgatgacggcggtgctccggcgacctacggcaacgacggaggggtggacgaggtcggcgacggcttggcgatcacgacggcggccttcccgagcgacgacgacgaccggagcgacggcggcgcacggctggacgaacaacggcgacggcggtgcaccgttgaacgcggaggcgatgctacaggcggcggcgagctaaggcgagggtggcgacggagggctagcggcggcagtagaggcccacgacgaccggcaacggcgaaggaaggtttagggttcggggagaaagacgaatccgattcgagatcgaatccacagatttccaaacggaattagccaatgattccaaaagggaaaagatagaatggatcgcggggatcattttccctctatcaatttcaccggagatggaaagacacggtgggcccctacctgtcagcgggcgagggcgcgtgcgcgggcggtggctcggctgcgggccgacctgggccgggagagagagagagggtttgggccgactttcggcccaaagccaaaagaggattttaaaaacttttttcaat

SEQ ID NO: 9501 - DNA, 249 bp, Oryza sativa
  Clone ID: PAT_MRT4530_15912C.1
atgatgtactataggagagctttgaagcttcaagcgttccttgacatggcttctgaatctggtcaaataggaagaacccgccgcgccaccccgggctcgacccccctcggggggagccacgtgggtttgggggcggcccaaccccaagctgggagggggcagccgccgcaacactctgggctcgacccctctcggggagagccacgtgagtttgagggcggcctcctccctctagctgggagggggtag

SEQ ID NO: 9502 - DNA, 210 bp, Oryza sativa
  Clone ID: PAT_MRT4530_15913C.1
atggacacgcaccgcatggacgcatggtcccccaaccccgaccgcgtccgatcgttcggcgtcccttcgcacacgacctggctacgccggccgttgctgcgcgcgcctgcgcgccggtgcgtctctcgtgtggagaggggccgcggccgctgcgacgtgcggcacgggcggctttttctccgcaacgggtgggcgtggacggggttgggt

SEQ ID NO: 9503 - DNA, 1621 bp, Oryza sativa
  Clone ID: PAT_MRT4530_15914C.1
atgggccctctcctcaggaagctcgattcgcttccggtggctcccgaaatccggctgcctgagccactgaaggacggaatcgagctcctcaaggaagatctagaagaaatcggtgccgccctcgtggagcagtccatggtagattccccaagccacagggcaagatactggatggatgaggtgcgtgacctctcctaccacatcgaggactgcatcgacaccatgttttcgatgcgctgcggcggcgacgacggcaagcccagatccgttcgccgccacaaggttggccgtgtgaaggttgacggtttctccaagacgcagaagccgtgcacgaggctcgccaggatcgcggagctcagggctctggtgcgggaggccagcgagcgccacgaaaggtaccagcttggtgacggccgcgcctcgagctcgagctcgagctctcaccgcgtgttcactgcgcacggccaggttcctgcgccgtgcagaaatctggttggcatggacgaaccgaagacgaagctcaccaatatgctcaccgacgaagcagagctgcatatgaaagtggtatgcattcttggatcagccggtattggtaagaccacgcttgctgaacaagtataccgtaaacttagatggcaattcgattgccatgcttttgtgcgggcatcacgaaaacctgacatgaggaggcttcttggggccatcctctctcaagttcagctgcgtatacggatatctgataccagcacggtgcagagccttattgataatctctgggagtatctacagaaaaagaggtattttattgtaattgatgaattatatgaaacagcaacatgggatatcattaccagtgcttttccagaggataataattgcagtaggataatgactacggctggaattgaaggtgtagctctcgaatgctgcagttatcattctgtcaatattttcaagatgatacctcttggccttgatgattctgcaaaattattctttaatagagtttttggatcagagcaacaatgtccttatgaattgaatgaagtttcatataggattacagcaaaatgtggtggattgccactagcagtcattattatagccggtcttttagcaagcctgccgtgcaaaacagagctgtggtacaatatagatggatgtttatgttccagtgtgactacagatattgatttggatgagatactgaaggaaatcataagtcttggctacgacaatcttccacattatttgaagacatgtctgttgtatcttagtttatattcggagggtttcataatttggacggctgacttactgaagcaatggatatctgaaggtttcatcgctgtaatagatggagaagacatagaggaagtcgctgagagctatttctataaccttgttaacaggggaatgatccaaagtgtgaaaactaagtacaataatcaggtgttgtgtactgtgcaccacactgtatttgatcttattattcacaagtccaaagaagagaaatttatctccgcaatagattactctcaaactatgccaggaaattctttagaggctcgtcgattgtcattccactttagcaataccagatatgcaactgaagttgcag

SEQ ID NO: 9504 - DNA, 781 bp, Oryza sativa
  Clone ID: PAT_MRT4530_15915C.1
gttttcccagtcacgacgttttaaaacgacggcccgtgagcacgcttaatacgactccactatagggcgaattgggtaccgggccccccctagcacagcaccggtggcagtagcaaagtagcagcctcatcactcatcagtgagcgcagttcgagtcgccggtacagatggctccgtctcgtcgcatggtcgcgtccgccttcctcctcctggccatcctcgtcgccacagagatggggacgaccaaggtggcggaggcgaggcactgcctgtcgcagagccacaggttcaagggcatgtgcgtgagcagcaacaactgcgccaacgtgtgcaggacggagagcttccccgacggcgagtgcaagtcgcacggcctcgagcgcaagtgcttctgcaagaaggtctgctagtgcatgctagccccgctgtctctgcagtcgcattgctcgtcggctgtgtatctgcagagattgtagtcgcgtgttctcctttgtctgttgttcatgacgagcttctgttcttggcttacaggctagttgagttgctttcgattatccttgcttagaataagtaataagtacgcgctggatacatgctccagcttagttagttgttgggtatttgcaagctgctgtcatgtaaggttccacatttcagcattaatgaattggcatacgtgatgaaaaaaaaaaaaaaaaaaaaaaaaataaaaaaaaaaaaaaaaaaaaaaaaaaaaaaatagttccctctgccgattcctcagcccgggggatccactagt

SEQ ID NO: 9505 - DNA, 1917 bp, Oryza sativa
  Clone ID: PAT_MRT4530_15916C.1
atggatgcgatgatcggcgatcccatgtcagcgacatcggtggaggcggtgttcgagaagcagccatcgccggaattcagggagctggtgacgccacgggccatggccgtggcggtggtgctcagcgtcgtcatctgcttcgtcggcatgaggatccagatgacggccgggatagtgccggcactcaacatgcctgccagcatcctcagcttcttcctcctcaagtggctcatcaggctgctacagagttgtggctttcccatgctgccattcacacgccaggaaaatatgttcctcctgacttgcatcatcacctgcctcaacctggccctcacaagtggttttgcgaccaatatcattggaatgacttctacggtggccagatcacttgctgatgatccagatccaagagatattatggaccatgtaccaatcggaaaatggatagtatacctattccttgttggtatgacgggagtgttaataaatgtgccatttaaccaggtcatgattattgactacaaattactatttccaacaggaacagttatagctcagcttattaatagctttcatacccctgaaggagcttacgtagcaaagttctactttgatttctctgcgacatatattggtctgggaatgatttgtccacatatagtaaattttggattattttttggggccatcatctcttggggatttctatatcctttccttgaaactaaacgtgggcaatggtatcaaactgacagccctacaagtttgaatggacaaaatggatacaaggtgttcatcagtgtgacactgatcattactgatgggatgataaactttctaacactcatcactacagcatcaattaacttctatcaattaaggaaagagcatgatttagggcttgccaactatttcaagaaacacccaagcctcaactatgatgatcgcaagaggattgaggtgttcttggctaaccggatcccaatccctgtgccagtggcagcctatatcacatgtgcagccatcagcacgattgcaatcccagccatgttcaaccagatcaaattctaccatctggccgtgctttacatggtcatcccagtcgtgaccttctgcaacacctatgcgacagggctcaccgactggtcggtggcaccaacctatgctaagtttaccaccttcgtctttgcagcatggatcgccaagcctggcgctgtcgtggccagcctccttgcgagcggggtgatcgtggcggcactccacatctcgtcgcaagcgatgcaggacctcaagtcgggccacatgacgctaacgtcgccacgcgccatggtcaccggacagatcttcggcgtggccgttggctccatcctctgcccatgcgtcttccttgccttccagtccacaacgaagcccaacgcaccggtgggttcaaagcagtccgattacccatgccctttcgcgggtctataccgcgccatcggggtgatcggcactggaggggtgaaagagctgccaaagcactgcatgacattctgtgtcgttgccttctgcgtgacggtcatcattgacgctgtcgtgctggtctctcagaagaggggttggagcatccacaggtacatccccagcatgacggtgattgcgctgccgtttttcgctggctcctacttcaccatcgatatgtgcgtggggagccttttgctgcttgcctggacaagaatgaatgcaaaaagtgcagagatgctgtcatcggccgttgcggcaggcttgatatgtggagaagggctgttcacactgccatcagcgttgctcaacatgttcaaggtgcaaccaccgatgtgcatgaagttcctatccggtggcgaagaagttgaggcagcggactcattcttgaacaatttgggaacatccagaacatga

SEQ ID NO: 9506 - DNA, 522 bp, Oryza sativa
  Clone ID: PAT_MRT4530_15917C.1
gattatttgaaggtaatgaatatttgactaaaattttttacatttgcgaaatctggaactatgtctgaaactgtatctgcgttgctttgtaatttgtgtcctctctttgtttgtgcatgtcaaaacctaaggcaatatacttccgacctcttaatcttgtgggcctactatttccttgtttaaccgttagaaatttagaatttgctagtccatgttgatttaacacctatgtaagtcgaattcccaatcctagcttaattttgaactacaagctattctgtgtgcaatcccactgttcatcagagttttaaattgatgtaatgtactgttctgtcaattgttgcaaagatgtcactagtttccaaaatgctaagaaatcgagttaattatgagtaaatttaaggaaaccccatgctttttacttgttggagttgcataaaacctgggttaatgccacaagtcataatacttggggttttatgcaacttcgaccataaaacatatgatttactaaaattcact

SEQ ID NO: 9507 - DNA, 347 bp, Oryza sativa
  Clone ID: PAT_MRT4530_15918C.1
acaatcgtccggaacatttctggctcaagaggataagatgagggctataatgtagcgttccaaggcataatatgaaggcaccatggaacagatgcggaactgtatagacatttagcatagaacagatagggagttttatacaagcgtgacagaatagcatcatgccgtataccaaaacaaactaaagaaaacacagacatgctgaccaaaacaagactaatcacagacagacctgctaaactgttgcgtgctaatcacagagggtactgaaaaaaccatgccatttgattgcaaatcgatgaaatgtttaaatgccaatacgttggtgcggctgctactgtataaat

SEQ ID NO: 9508 - DNA, 2348 bp, Oryza sativa
  Clone ID: PAT_MRT4530_15919C.1
ttaggggtagaagcgacgaaggtgttcgatgttccacgggttaggcagctctgtgccgtcgcccgtggccagccgaacggagcctggctgggggacgccgatcactcgatacggaccctcccacattggtgagagcttgctcaatccagcacacgtttggacgcggcgtaggacgaggtcgtcgacgcagagtgatcgggcccggacgtggcgctgatggtagcgccgcaggctctgctggtagcgcgcggctcggagggccgcgcgccgccttcgctcttccaagtagtcgaggtcatctctgcgaagctgatcttgatcagcctcgcagtacatggtggcccgaggggacctcagggtgagctcggatgggagaaccgcttccgcgccgtagacgaggaagaaaggcgtttccccggttgctcggcttggcgtggttcggttcgcccagagcactgctggcaactcctcgatccacgaatcgccgtgcttcttgaggatgttgaaggtcttggttttaaggcctctgaggatttccgcattggcgcgctccacttggccgttgcttctggggtgggcaggtgaggcgaagcaaagcttgatgcccatgtcttcgcagtaatcgccgaaaagttcactagtgaattgggtgccgttatccgtaataatacggttaggcactccaaaccgggctgtgatgcccttaatgaatttaagtgcggagtgcttatcgatcttgacgaccggataagcctcgggccacttagtgaacttgtcgatcgcgacatacagatactcaaacccgcccggggcccgccggaccaggtcgaccgcatcattgagagctatcggccaatagaaaccttgtcgaaaggctttgccaaccaaggtgcgcgaggcggagtgggatccgcattcgccttcatggatatcggcaagaagctcgacgccttgttcccgaggaatgcacttcaggaggattccgttagccgcgcgccgatagagggtcccttctaccagcacgtagcgtttggagatgtgctggacgcgttcactcccttcgcggtcctcgggtagagtcttatctgtgaggtatgcttggatctcagcgatccaagcaatcaatctaagggagctgggagcgctcccctcgggtcccgaggcctggactccgacgggcatcgggggcctgtcaggcgcgtccgtctcccctaaggggtcgggtcgcgccgacggctgggcaagcctttcttcaaaggcgcccggtggggtctgggctcgcgacgaagcgagccgtgagagttcgtcggcaaccgtgttatcccgtctgggcacgtgccgaagctctatcccgtcaaaatggcgctccatacgccgtacttggcgcacgtaagcgtccatctgcgggtcagagcaccggtactccttacagacctggttaacgaccagctgggagtcgcctaacaccaggaggcggcggatccccagtccagctgccaccctgagtcccgcaacgagtccctcgtactctgccatgttattggtcgcccgaaagtcaaggcgaaccaaatatctgaggacgtctccgttcggcgaggtcaacatgacccccgcaccggcgccctgaagagacagcgagccgtcgaactgcatcacccagtgggcggtgtcaggcagctgcgaggggcccgagctggcctcggggactgagacgggctcgggagctggggtccactctgccacaaaatcggcgagggcctggctcttgatagcgtggcgtggttcaaagtgcaaatcaaactcagaaagttcgattgcccatttcaccgcccgtccagtaccctccttgccaacgctgtgcccggctcctcgtttctcgcgcccactatcttgccccctcgtttctcgcgcccacgtttccactaatcccattcgccagtttgcggtgcatgaggtggatatgcggctgtggcagtcgagatggaacatatctcttgaagaggccgctcattattgacagtcgagttaccgttgccggagtgcgtgatttgcgaccgttgggtttctgcccaactgtggagaccggtcccacctgtcaccaggcttttggaagtggcgtcacgcccgaccgcttcccttgaggagggcgatcgccctggcataacgccgggggctactgtcggtgacatgggaccgggagtatcatgacttagatacttgaggcagacacgatcacccacgtggcctaacccccccggggggggtcgggcccgagggtgatacggccgcccttctctttgtctccccgaggggtcggaccgctcccgtctcggccccgagggctgggg

SEQ ID NO: 9509 - DNA, 414 bp, Oryza sativa
  Clone ID: PAT_MRT4530_1591C.1
atggaggaccaccgtggcgagggcaatgatggcggcattcacatgatctctgatgatcgcctaaaacaccctattgataaattgagaacaacacagattttgccaccaatccagctgagaattcaggatggagggagggcacatcaggatggtgttgatcatgatgaggctgaagaggaggaagaggggcctaagctggagcacgacaagcatgagagacactgcatggctggttccgccgcaacttccaatctcgggtcagaaggccgagggggcaaaaggccgaagattttggtcgtctgctcaccccaagcgccctctccacctcatccagtggggggcggtggctcagcgggtggtggatggcaacgaatctgccggcgacgagaggagacgaggagatggacacgatga

SEQ ID NO: 9510 - DNA, 5619 bp, Oryza sativa
  Clone ID: PAT_MRT4530_15920C.1
atggccgaacgagcaaaagcgcacaacctctctccgagcgctagcggtgacgacagcgagcagaacccgcgtcgtcgagctcgtactccgccgcccccctctcgccgaagtcttaggcgggaggaggcgctcgagggggtcgaaagatccgcgacttcaccgcccacgagcgatggagaaggacggcgagacggggagcgtcgtctcctcgtctacggtgatggcagcacgccccagggcgtgctccaggctgcgggcgcgctcctgcgtcacccgcccgtcgtccctgatccagagactccaactcgacgttggctagatgacgtggccaacttggtcatgacggcgcagcagcgtttaggcgccggcgggcggtcctccgccaccaaggccactggtgctgctactgccggctccgtgtcgtcgaggcggagggcgcggcgagcggcggccgttgcccgccgttcgtccgccattccctcgtcaatgcctccgacccaagaagatgtgcgtgaggggccggatgcccgcctcaatatcgagcgccggcgcaatgatcgtcgtgctgcccacgcatcggagggcgcttcctcgtccggagcgccacttcggtccggacacggaggccagccccccgtgtccccggttggcggtgccggctgtcgagcctttgtggcgagccttcgaaacgtccgttggcccccaaggttccggcccaccatcaccgaaaaatacgacggaagcgtcaaccccgccgagtttctccagatctacacgactgggatcaaggccgccgggggtgacgacagggtcatggcgaatttcttccccatggccctgagaggacaggcgcggggttggctaatgaacttgccacccgcgtcggtccactcttgggaggatttgtgccagcagttcaccatgaacttccagggcacatatccgcgcccaggtgaagaagcggacttgcacgcggtacagcgaagggacgatgagtctcttcgctcgtacattcagcggttttgtcaagtccgcaacaccataccatgtatccctgcacacgcggtgatctacgcgttcaggggggacgtgcggcacaaccgcatgctcgagaagatcgcctccaaggagccccagaccactgcggagctttttcagctcgcggaccgtgtggctcgcaaggaggaggcatggacctggaactccaccggttccggtgtggcagcttcagccgcccccggatccgccgctcggtcagggcggcgggacaggaggaggaagaagaggtcggcccattccgacgacgagggtcacgtcctcgccgtcgagggcgcttcgcgggccacccgaaaggggaggcctgcgagtgacaaagagaaggaggccggcgctcccagcagggagcgcccgaccggcaagtggtgcaccgtgcacaacacctccctccacgacctcgcggactgccgcgcggtcaaaagtttggctgagcggacgaggaagtgggaggaggagaggaggcaggagcgccgtgagggcaagtccccagcggctccctctggcaaccggcgaagtgaggccaagcagaaggcccccgccgaggacattgacgatggcgacgatgacctagggttccaggagcctggggccaccatcgccaccgtcgatgggggagcatgcgctcacgtttctcgccggagcctcaaggccatgaagcgagagcttctggccgcggcccctacccatgaggcgatgcggcgggcgcggtggtcggaggttgccctcaccttcgaccagaccgaccacccgccgtgcgttgcccggggaggacagatcgcgatggtggtttcccccaccgtttgcaacgtgaagttggggcgtgtcctcatagacgggggagcagccctcaacatcctttcccccacagcctttgacgccatcaaggccccggggatggtgctccggccgtcccagccgattatcggtgtgacgccggggcacacttggccgctaggtcatatcgacctcccggtcaccttcggtggatccgccaacttccgcacggagcgggtgaacttcgatgtggcggacctcagtctgccctacaacgcggtcctggggaggcccgcgttggtgaagttcatggcggcggtccactacgcttacctccagatgaagatgccgggccccggtggccccatctctgtccatggcgacctcaaagtcgcgcttgcttgtatggagcagcgcgcggaccacctcgccgccgcgtccaagcccgagggtggcgacgagaggctcggcacctccgtccccgccgccccgaggcagcggatgatcacgtgcgacgaggtcccggaagacgcgctcgtctccttcctgcgagcaaacgctgacgtcttcgcatggagaccggcggacatgcccggggtccccagggaggtgattgagcaccgtctcgccgtacggccgggcgcaaggccggtccgtcagaaagtgcggcggcaggccccggaacgtcaagccttcatccgtgaggaggtggcgcgacttctggaggccggattcatccgagaggttatccatccggagtggttggcgaacccggtcgtcgttcccaaggcgaacggcaagcttcggatgtgcatcgactacaccgaccttaacaaggcatgtcctaaggatccttaccccctaccacgcatagatcagattgtcgactccaccgcagggtgcgaccttttgtgttttctagatgcatactctggttatcatcagattcgcatggctagggaggatgaggaaaaaactgcattcattacccccataggaacttattgttatatgacaatgcctttcgggttaaagaatgcaggtcctacttttcaacgtactactcgaatttctttgggtagccaaataggacgtaacgttgaggcctatgttgatgacttggttgtgaaaacacgcaaccaagagaccttactctcggatctagcggaaactttcgaaagtctccgcaccgcccgcataaagctgaaccccgacaagtgcgtgttcggcgtgcctgcgggcaagcttctcgggttcttggtctctgctcgaggcattgaggccaaccccgagaaggtggtcagtgcggcgttggtcgtggagcgcgacgaggacgaccctcgctccgcgcatccccaccctgtgtcgactcgacccgggagagagcagggaggagaggcccccgagccgaacggtggcccaaggcccccgacgaccggagctggccctccgcccgcttgtccgacggtgccaggcgcccccgacccccaggatggccacggggccactgcgggaaggccgcgcctgtcgccctccgaccccgaggtcgtcggcacagaagccgagtgcgccccgcgaggcctctcggacgaagagcgccctggagatgtggcccctagtgaagaagatcggccccgccgaaaggtgcagcggcccgtctacttcgttagcgaggccctccgggacgctaagacccgataccctcaggcccagaagatgctttacgctattctgatggcttcgaggaagttacgccattattttcaggcgcatcgggtcacggtagttacgtcttaccccctcggccaaatcttgcataaccgagagggtactggacgggtggtgaaatgggcaatcgaactctctgagttcgatttgcgctttgaaccacgccacgcagtcaagagccaggccctcgccgactttgtggcagagtggaccccggcccctgagcccatctccgtccccgaggccagctcgggcccctcgcagctgcctcacaccgcctattgggtgatgcagttcgacggctccctgtctcttcagggagccggtgcgggggtcacgttgacctcgccgagcggagatgtcctcaaatacctggtccgcctcgactttcgggcaaccaacaatatggcagagtacgagggactccttgcgggactcagagtggcggctggactggggatccgccgcctcctggtgttaggcgattctcagttggtcgttaaccaggtctccaaggagtaccagtgctttgacccgcagatggatgcttacgtgcgccatgtgcggcgtatggagcgccattttgacgggatagagcttcggcacgtgcccagacgggataacacggtcgccgacgaactctcaaggctcgcctcctcgcgagcccagaccccaccgggcgcctttgaagaaaggcttgcccagccgtcggcgcgacccgaccccctaggggagacggacgcgcctgaacggcccccgaggcccgtcggagtccaggcctcgggacccgaggggagcgctcccagctcccttagattgattgcttggatcgctgagatccaggcgtacctcgcagataagactctacccgaggaccgcgaagggagtgaacgcgtccagcgcatctccaagcgctacgtactggtgggagggaccctctatcggcgcgcggctaacggagtcctcctgaagtgcattcctcgggaacaaggcgtcgagcttcttgccgatatccatgaaggcgagtgcggagcccactctgcctcacgcaccttggttggcaaggcctttcgccagggtttctattggtcgacggctctcaacgatgcggtcgacctggtccggcggtgcagggcgtgccagttccacgccaagcaaacccatcagccggcccaggccctgcagacaatacctctttcatggccgtttgctgtctgggggctcgatatcctgggtccgtttagacgggccccgggcaggtttgagtatctgtatgtcgctatcgacaagttcactaagtggcccgaggcttatccggtcatcaaaatcgataagcactccacacttaaattcatcaagggcatcacagcccggtttggggtgcctaaccgtattattacggataacggcacccaattcactagtgaactcttcggtgactactgcgaagacatgggcatcaagctctgcttcgcctcccccgcccaccccagaagcaatggccaagtggagcgcgccaacacggaaatcctcaagggcctcaaaaccaagaccttcaacatcctcaagaagcacggcgactcgtggatcgaggagttgccagcggtgctctgggcgaaccgaaccacgccaagccgagcaaccagggaaacgcctttcttcctcgtctacggcgcggaggcggttctcccatccgagctcaccctgaggtcccctcgggccaccatgtactgcgaggctgatcaagatcagcttcgtagagatgacctcgactacttggaagagcgaaggcggcgcgcggccctccgagccgcgcgctaccagcagagcctgcggcgctaccatcagcgccacgtccgggcccgatcactctgcgtcgacgacctcgtcctacgccgcgtccaaacgcgtgctggactgagcaagctctcaccaatgtgggagggtccgtatcgagtgatcggcgtcccccggccgggctccgttcggctggccacgggcgacggcacagagctgcctaacccgtggaacatcaaacaccttcgtcgtttctacccctag

SEQ ID NO: 9511 - DNA, 455 bp, Oryza sativa
  Clone ID: PAT_MRT4530_15921C.1
cctccatatatgaattcatattccctcactatttatgttcatactcaaatccagtactatcctctgttttccagaaaaaaaaaaaaagagacaggataagggacgaactatccatccatggttccatgccatgtgatccaccttccgcaacgcctggtgtccatcatcacaaattcgctgaagcaaatcaaacacccgaacttgtttggcaaaaatcaaatatcaagcaaacatttgcacttgctagttggataatccgagccaccgttgatgcttcagattgtatgcatatggagccatggaggttaaggttttcaagaatctgaaccaatgctcgacaaatgtgattacaaacagtgatcactggaggagatgaaagcacttgacagagtaaagtcttgaatttaaaatcctcataatcagtctgaactgaaggcagcactacgagcaatcac

SEQ ID NO: 9512 - DNA, 2018 bp, Oryza sativa
  Clone ID: PAT_MRT4530_15922C.1
gtggtcagcgcggcgttggttgtggagcgcgacgaggacaaccctcaccccgcgcatccccaccctgtgtcgactcgacccgggagagagcaggcaggagaggcccccgagtcgaacggcggcccgaggcccccgacggccggagttggccctccgcccgcttgtccgacggtgccaggcacccccgacccccaggatggccccggggccactgcgggaaggccgcgcctgtcaccctccgaccccgaggtcgtcggcacagaagccgagtgcgccccgcgcggcctctcggacgaagagcgccctagagatgcggcccctagcgaagaggatcggccccgccgaaaggcgcatcgagtcacggtggttacgtcttaccccctcggccaaatcttgcataatcgagagggtactggacgggtggtgaaatgggcaatcgaattctctgagttcgatttgcactttgaaccacgccacgcgatcaagagccaggccctcgccgactttgtggcagagtggaccccggcccctgagcccatctccgtccccgaggccagctcgggcccctcgcagctgcctcacaccgcctactgggtgatgcagttcgacggctccctatctcttcagggcgccggtgcgggggtcatgttgacctcgccaaacggagacgtcctcagatacctggtccgcctcgattttcgggcgaccaacaatatggcggagtacgagggactccttgcgggactcagagtggcagctggactggggatccgccgcctcctggtgttaggcgactcccagttggtcgtcaaccaggtctccaaggagtaccagtgctctgacccgcagatggacgcttacgtgcgccaggttcggcgtatggagcgccattttgacgggatagagcttcggcacgtgcccaggcgggataacgcggtcgccgacgaactctcaaggctcgcttcctcgcgagcccagaccccaccgggcgcctttgaagaaaggcttgcccagccgtcggcgcgacccgaccccctaggggagacggacacgcctgaacggcccccgaggcccgtcggagtccaggcctcgggacccgaggggagcgttcccggctcccctagattgattgcttggatcgctgaggtccaggcatacctcacagataagactctacccgaggaccgcgaagggagtgaacgcgtccagcgcatctccaagcgctacgtgctggtggaagggaccctctatcggcgcgcggctaacggagtcctcctgaagtgcattcctcgggaacaaggcgtcgagcttcttgccgatatccatgaaggcgagtgcggagcccactccgcctcacgcaccttggttggcaaggcctttcgccagggtttctattggccgacggctctcaacgatgcggttgacctggtccggcggtgcagggcgtgccagttccacgccaagcaaacccatcagccagcccaggccctgcagaccatacctctttcatggccgtttgctgtctgggggctcgatatcctgggtccgtttaggcgggccccgggcggtttcgagtatctgtatgtcgctgtcgacaagttcactaagtggcccgaggcttacccggtcatcaagatcgataagcactccgcgcttaaattcatcaggggcattactgctcggtttggggtgcctaatcgtatcattacggataacggcacccagttcactagtgaactcttcggtgactactgcgaagatatgggcatcaagctctgcttcgcctctcccgcccaccccagaagcaatggccaagtggagcgcgccaacgcagaaatcctcaagggcctcaaaaccaaaaccttcaatatcctcaatatggaggagttgccagcggtgctctgggcgaaccgaaccacgccaagccgagcaaccggggaaacgcctttcttcctcgtctacggcgcggaggcggttctcccatccgagctcaccctgaagtcccctcgggccaccat

SEQ ID NO: 9513 - DNA, 390 bp, Oryza sativa
  Clone ID: PAT_MRT4530_15923C.1
gaggttgtgagaaactgagaaccaaccaacaaggtataccctctatccttggatatacgttgtatgctgacacagtatacctgtgcgtatacggatatttcctgtatatattaagaaaatctatcacgagatagaaacggagtccacagatggagggagttctactcggacaagactgggtcgttaccatatcgtgaggggtccgatatctccgagtcccacttggagatcaactgatccgcggtataaaagggaccccccgggcaggacctaagacatcgaatctcactgccaacacatacaccacagcctacgaagccggagcctacaggagccaagtcgccgggtgatctagtcgaaccaacttgactacgatctcgtcggtatcat

SEQ ID NO: 9514 - DNA, 4176 bp, Oryza sativa
  Clone ID: PAT_MRT4530_15924C.1
atggcgcctccgtcgtgggtgatcctgagctgcgagccgcgggtgtgcggcggcggcgacgaccccgtcctgccgcagggagccgacgtcgccctctccctcgccgcgccgccgcgcgtcgcggtgctctcggtgtcccggcgcgtctcgccggccgaggtggacccctgcgccaggtgcaagtcccccttcgtcctcgcgctcgacccctccgcggggctcgtcctcctcgtcgcgccgccgccaccgtcccccgacgactccggcgacctgcggtcctggaccgaccgcgacggcaacgagcgcacgttccgcgtcagcctcatcccgcgcccgctctacttcgtctgcgacgtcgccgccgccaccgcctcccacgtccccgacccggagcgcctcatcttcaacaacgacctcggtgtcatcgccgcgccaggaggaggccgggggaactacatggtcgtcgagctccagaccatcgtcggcgatgacgaggccaccctgctctgcttctcgtccgtgaccggcgagtgggaggagaaggacgtcggcaacccactgccgagctggatctggaccttctatgacatcatctgtcacgacggcaagctctggtgggtggacaccgcggcgggcctcctcttgtgcgatccgttcgccgatgagccggacatgaagtacgttccactggaggacaaggaggacgacctccaatctgaagacgaagacgatgacgatggctgcggctactgcgccgagagagtgctcgccaccggccgcatcgtgcagctgatcgacggcaagttcaggtgtgtggaggtgagctctccaagccacggcgccgctcccgaggtctccatgcgcacgctggttaatccagagaccgcggagtgggcgcctgagtacacggtgagcttcgccgacatctgggccagcgagagctacaaggcgaccgagctgccggagaaggcccctcaactcaggaacgcgttcgtccaccccatgaacccggacgtgctgtacttcttcctgaagaagcatatcttgggcgtcgacgtgcgcgcgaggaaggtcgtggagtacgaggcccgcgactcttctgaaagcgttcttccatggaaactcccacccgcgctctccgcaggtgggcccagcagtcatcacccggtcaaagctccagtttcattgagaagatggaaaagggagagagtggcggagcgggaggtggtcggcaaccaggggcggtacggcaatggattagaatcatcgacggtgtgcaaggtttctgatgtccatggcgtgacgccgtgcagcggcggttggtggggcactctgtgcaagtcgagttcagcccccgacacccagttggagaagctcaagtgcctggtggagcggtcggcgaggcacctcaagatcttcttccttgtcgtcgaccactacataagcctgacgagaggcgagttcgtctggcgcttcctcgtcggcgccgagcagtccactgtcaaacacctctacatccacctacgcagcagttcggcgagggacaggatcaccttctccttccactatctgaatccgctccttcagagccacacgctccgcgagatcaacttctccgctcgattgttctattggtggagtgtgaagatctcgagattggttctcctacaacgcaatcgcctccgctcctaccactacggcggcagccctagctcgttctacattcctgccggcgccggtaggctcaccggcctttacatctgtagtgccctgcctatcctctccaacatcactgccctcaccatctgcggaaattccctgaagcgcagcgcgctcgcttatccggtccgtgaccgggcgcagcgtgtgaccggtcacagaccgcgagcagaacccgcgtcgtcgagctcgtactccgccgccccctctcgccgaagtcttaggcgggaggaggcgctcgagggggtcgaaagatccgcgacttcgccgtccacgagcgatggagaaggacggcgagacggggagcgtcgtctcctcatctacggtgatggcacgacgccccagggcgcgctccaggctgcgggcgcgctcctgcgtcacccgcccgtcgtccctgatccagagactccaactcgacgttggctagatgacgtggccaacttggtcatgacggcgcagcagcgtttaggcgccggcgggcggtcctccgccaccaaggccactggtgctgctactgccggctccgtatcgtcgaggcggagggcgcggcgagcggcggccgttgcccgccgttcgtccgccattccctcgtcaatgcctccgacccaagaagatgtgcgtgaggggccggatgcccgcctcaatatcgagcgccggcgcaatgatcgccgtgctgcccacgcatcggagggcgcttcctcgtccggagcgccacttcggtccgggcacggaggccagccccccgtgtccccggttggcggtgccggctgtcgagcctttgtggcgagccttcggaacgtccgttggcccccaaggttccggcccaccatcaccgaaatatacgacggaagcgtcaaccccgccgagtttctccagatctacatgactgggatcgaggccgccaggggtgacgacagggtcatggcgaatttcttccccatggccctgagaggacaggcgcggggttggctaatgaacttgccacccgcgtcggtccactcttgggaggatttgtgccagcagttcaccatgaacttccagggcacatatccgcgcccagtccgcaacaccataccatgtatccctgcacacgcggtgatctacgcgttcagggggggcgtgcggcacaaccgcatgctcgagaagatcgcctccaaggagccccagaccactgcggagctttttcagctcgcggaccgtgtggctcgcaaggaggaggcatggacctggaactccaccggttccggtgtggcagcttcagccgcccccggatccgccgctcggtcagggcggcgggacgggaggaggaagaagaggtcggcccattccgacgacgagggtcacgtcctcgccatcgagggcgcttcgcgggccacccgaaaggggaggcctgcgagcgacaaaaagaaggaggccggcgctcccagcagggagcgcccgaccggcaagtggtgcaccgtgcacaacacctccctccacgacctcgtggactgccgcgcggtcaaaagtttggctgagcgaacgaggaagtgggaggaggagaggaggcaggagcgccgtgagggcaaggccccagcggctccctctggcaaccggcgaagtgaggccaagcagaaggcccccgccgaggacattgacgatggcgacgatgacctagggttccaggagcctggggccaccatcgccaccgtcgatgggggagcatgcgctcacgtttctcgccggagcctcaaggccatgaagcgagagcttctggccgcggcccctacccatgaggcgatgcggcgggcgcggtggtcggaggttgccctcaccttcgaccagaccgaccacccgccgtgcgttgcccggggaggacagatcgcgatggtggtttcccccaccgtttgcaacgtgaagttggggcgtgtcctcatagacgggggagcagccctcaacatcctttcccccacagcctttgacgccatcaaggccccggggatggtgctccggccgtcccagccgattatcggtgtgacgccggggcacacttggccgctaggtcatatcgacctcccggtcaccttcggtggatccgccaacttccgcacggagcgggtgaacttcgatgtggcggacctcagtctgccctacaacgcggtcctggggaggcccgcgttggtgaagttcatggcggcggtccactacgcctacctccagatgaagatgccgggccccgttggccccatctctgtccatggcgacctcaaagtcgcgcttgcttgtatggagcagcgcgcggaccacctcgccgccgcgtccaagcccgagggtggcgacgagaggctcggcacctccgtccccgccgccccgaggcagcggatggccacgtgcgacgaggtcccggtcaaggaggttgccctgggcgacggcccgtccaagaccacacgaatcggtggtctgctggacggcaaatag

SEQ ID NO: 9515 - DNA, 657 bp, Oryza sativa
  unsure (1)..(657): unsure at all n locations
  Clone ID: PAT_MRT4530_15925C.1
gatcaaactgactggcacgcccgcatctcatcaacctttggacctgcactggagctaagcagatctcccaggccgtcggcctccttgatcctacaccgccgtcttcatgcactgacaataatcggcgacggagagatcgccttgggtcatggagtggaactcgtgatgcagatagatcgcgcgaagctcctttgtggcttgaaagagggtgtcgatggagatccacaagtcccaagccgattgatcgggcttcatggcgaggtcgaggacgtcgtctgcgacagaaccgaaaagccagctgcggaggcagcaatcgggctgttcccaagcagcgtcngggtttgcgggaggagcagcgtcaagatgatcgaggagaccaaatttccacacatcgagcggaagaagcccttcacttgttgtagttggggtacgaagctcgagagaaattggacatgggacttgacggcgacagtcgcatacgggttgatgaacaccggggcgacggtagaggtggaagacgacgccgtagaggagtcggtgncagcgaaggtagccgagnaagtgnacatggtgaggaaggaggggcgcancagccaggnaggcggcagcgctcggtggacgcagcgaccagaggaagcggcgctagagcagtactag

SEQ ID NO: 9516 - DNA, 5694 bp, Oryza sativa
  Clone ID: PAT_MRT4530_15926C.1
atggccgaacgggcaggggcgcacagcctctctccgaacgctagcggtgacgacggggagcagaacccgcgccgtcgggctcgcaccccaccgtccccctctcgccgaaatcttgggcggggggaggcgctcggggaggccggaggatccgcgacttcgccgcccgcgggcgacgggggaggacggcgagacggggcgcgtcgccgcctcgtctacggcaatggcggcacgccccagggtgcgctccaggctgcgggcgcgctcctgcgtcacccgcccgtcgtccccgatccagagactccagctcggcgttggctggatgatgtggccgacttggtcatgacggcgcagcagcgcctaggcgccggcgggcggtcctccgccaccgagacctctggcgctcccgccgccggctccacgtcgtcgaggcggagggcgcggcgagcggcggccgttacccgccgttcgtccgccattccctcgtcgacgcctccgacccaaggagatatgcgtggggggccggatgcccgcctcgatatcgagcgccggcgcgacgctcgtcacgccgcccacgcaatggagggcgcttcctcgtccggagcgccacttcggtccgggcacgggggccggccccccgtgtccccggttggcggtgccggctgtcgagcctttgtggcgagccttcggaacgtccgttggcccccaaggttccggcccaccgtcaccgaaaaatacgacggaagcgtcaaccccgccgagtttctccagatctacacgaccgggatcgaggccgccgggggcgacgacagggtcatggcgaatttcttccccatggccctgaagggtcaggcgcggggttggctaatgaacttgccacccgcgtcggtccactcttgggaggatttgtgccagcagttcaccacgaacttccagggcatatatccgcgcccaggtgaagaagcggacttgcatgcggtacagcgaagggacgatgagtctcttcgctcgtacattcagcggttttgtcaagtccgcaacaccataccgtgcatccccgcacacgcggtgatctacgcgttcagggggggcgtgcggcacaaccgcatgctcgagaagatcgcctccaaggagccccagaccaccgcgcagctttttgagctcgcggaccgtgtggctcgcaaggaggaggcctggacctggaactcctccggctctggtgtgacagctccggccgcccccgggtccgccactcggtcagagcggcggaacaggaggaggaagaaggggccggcccgttccgacgacgagggtcatgtcctcgccgtcgagggcgcttcgtgggccccccgaaaggggaggcctgcgagcgacaaaaagaaggaggccggcgctcccagcagggagcgcccgaccggcaagtggtgtaccgtgcacaacacctccctccacgacctcgcggactgccgcgcggtcaaaagcttggctgagcggacgaggaagtgggaggaggagaagaggcaggagcgccgtgagggcaagaccccggcggctcccgccggcaaccggcgaggtgaggccaagcagaaggccaccgccgaggacatcaacgatggcgacgatgacctggggttccaggagcctgaggccaccgtcgccaccgtcgatgggggagcgtgcgctcacgcttctcgccggagcctcaaggccatgaagcgagagcttctggccgcggcccctacccatgaggcgacgcggcgggcgcggtggtcggaggttgccctcaccttcgaccagaccgaccacccgccgtgcgttgcccggggaggacagatcgcgatggtggtttcccccaccgtttgcaatgtgaagttggggcgtgtcctcatagacgggggtgcagccctcaacatcctttcccccgcagcctttgacgccatcaaggccccggggatggtgctccggccgtcccagccgatcatcggtgtgacgccggggcacacctggccgctgggtcatatcgacctcccggtcaccttcggtggttccgccaacttccgcacggagcgggtggacttcgatgtggcggacctcagtctgccctacaacgcggtcctggggaggcccgcgttggtgaagttcatggcggcggtccactacgcatatctccagatgaagatgccgggccccggtggccccatcaccgtccatggcgacctcaaagtcgcgcttgcttgtatggagcagcgcgcggaccacctcgccgcggcgtccaagcccgcgggtggcgacgagaggctcaccacctccgtcccggccgccccaaggcagcggatggtcacgtgcgacgaggttccggaagacgcgctcgtctccttcctgcgggcaaacgccgacgtcttcgcctggagaccggcggacatgcccggggtccccagggaggtgattgagcaccgtctcgccgtacggccgggcgcaaggccggtccggcagaaagtgcggcggcaggccccggaacgtcaagccttcatccgtgaggaggtggcgcgacttctggaggccggattcatccgtgaggtcatccatccggagtggctggcgaacccggtcgtcgttcccaaggcgaacggcaagcttcggatgtgcatcgactacaccgaccttaacaaggcacgtcctaaggacccttaccccctgccacgcatagatcagattgtcgactccactgcggggtgcgaccttttgtgttttctagatgcatactctggttatcatcagattcgcatggctagggaggatgaggaaaaaactgcattcattacccccatagaaacttattgttatacgacaatgcctttcgggttaaagaatgcaggtcctacttttcaacgtactactcgaatttctttgggtagccagataggacgcaatgttgaggcctatgttgatgacttggttgtgaagacgcgcaaccaagagaccttactctcagatctagcggaaactttcgaaagtctccgctccgcccgcataaagctgaaccccaataagtgcgtgttcggcgtgcctgcgggcaagcttctcggcaagcttagggatgtgcagtgcgtcaccggctgcatggccgccctaagtcggttcatatcgaggctgggagagaaggcactgcccctatttaagctcctcaaatgctccgggccgtttacctggacggaggaggctgagcgggccctcactcagttgaaggcgtacctcagttctcccccagtcctggtcgccccggagccagatgagccgttgctactctacctggcggcaaccccgcaggtggtcagcgcggcgttggtcgtggagcgcgacgaggacaaccctcactccgcgcatccccaccctgcgtcgactcgacccgggagagagcaggcaggagaggcccccgagccgaacggcggcccgaggcccccgacggccggagctggccctccgcctgcttgtccgacggtgccaggcgcccccgacccccaggatggccccggggccactgcgggaaggccgcgcctgtcgccctctgaccccgaggtcgtcggcacagaagccgagtgcgccccgcgtggcctctcggacgaagagcgccctggagatgcggcccctggcgaagaggatcggccccgccgaaaggcgcatcgggtcacggtggtcacgtcttaccccctcggccaaatcttgcataaccgagagggtactggacgggtggtgaaatgggcaatcgaactctctgaattcgatttgcgctttgaaccacgccacgcgatcaagagccaggccctcgccgactttgtggcggagtggaccccagctcccgagcccgtctccgcccccgaggccagctcgggcccctcgcagctgcctcacaccgcctacttggtgatgcagttcgacggctccctgtctcttcagggcgccggtgcgggggtcatgttgacctcgccgagcggagacgtcctcagatacctggtccgccttgactttcgggcgaccaacaatatggctgagtacgagggactccttgcgggactcagagtggcagctggactggggatccgccgcctcctggtgttaggcgactcccagttggtcgttaaccaggtctgtaaggagtaccggtgctctgacccgcagatggacgcttacgtgcgccaggtgcggcgtatggagcgccacttcgacgggatagaacttcggcacgtgcccagacgggataacgcggtcgccgacgaactctcaaggctcgcttcctcgcgagcccagaccccaccgggcgcctttgaagaaaggctcgcccagccgtcggcgcgacccgaccccctaggggagacggacgcgcctgaacggcccccgaggcccgtcggagtccaggcctcgggatccgaggggagcgctcccagctcccctagattgattgcttggatcactgagatccaggcgtacctcgcagataagactctacccgaggaccgcgaagggagtgaacgcgtccggcgcatctccaagcgctacgtgctggtggaagggaccctctatcggcgtgcggctaacggagtcctcctgaagtgcattcctcgggaacaaggcgtcgagtttctcgccgatgtccatgaaggcgagtgcggagcccactccgcctcacgcacctcggatggcaaggcctttcgccagggtttctattggccgacggctctcaacgatgcggtcgacctggtccggcggtgcagggcgtgccagttccacgccaggcaaacccatcagccggcccaggccctgcagaccatacctctttcgtggccgtttgctgtctgggggctcgatatcctgggtccgttcaggcgggccccgggcgggttcgagtatctgtatgtcgctgtcgacaagttcactaagtggcccgaggcttatccggtcatcaagatcgataagcactccgcgcttaaattcatcaggggcatcactgctcggtttggggtgcctaaccgtatcattacggataacggcacccagttcactagtgagctcttcggtgactactgcgaagacatgggcatcaagctctgcttcgcctcccccgcccaccccagaagcaatggccaagtggagcgcgccaacgcggaaatcctcaagggcctcaaaaccaagaccttcaacatccccaagaagcacggcgactcgtggatcgaggagctgccagcggtgctctgggcgaaccgaaccacgccaagccgagcaaccggggaaacgcctttcttcctcgtctacggcgcggaggcggtcctcccatctgagctcaccctgaggtcccctcgggtcaccatgtattgcgaggctgatcaagatcagcttcgccgagacgacctcgactatttggaagagcgaaggcggcgcgcggccctccgagccgcgcgctaccagcagatcctgcggcgctaccatcagcgccacgtccgggcccgatcactctgcgtcgacgacctcgtcctacgccgcgtccaaacgcgtgctggactgagcaagctctcaccaatgtgggagggtccgtatcgagtgatcggcgtcccccggccgggctccgttcggctcgccacgggcgacggcacagagctgcctaacccgtggaacatcgagcaccttcgtcgcttctacccctag

SEQ ID NO: 9517 - DNA, 1959 bp, Oryza sativa
  Clone ID: PAT_MRT4530_15927C.1
atggccgccctaagtcggttcatatcgaggctgggagagaaggcgctacccctatttaaactcgtcaaacgctccgggccgtttatctggacggaggaggctgaacgggccctcactcagttgaaggcgtacctcagttctcccccagtcctggtcgccccggagccagatgagccgttgctactctacctggcgggaaccccgcaggtggtcagcgcggcgttggtcatggagcgcgacgaggacgaccctcgcttcgcgcatccccaccctgtgtcgactcgacccgggagagagcagggaggagaggcccccgagccgaacggtggcccaaggcccccgacggccggagctggccctccgcccgcttgtccgaaggtgccaggcgcccccgacccccaggatggccacggggccactgcgggaaggccgcgcctgtcgccctctgaccccgaggtcatcggcacagaagccgagtgcgccccgcgcggcctctcggagcgtgacgaggacgatcctcgctctgcgcgtccccaccctgtgtcgattcgacccgggagagagcagggaggagaggcccccgagccgaacggtggcctaaggcccccgacggccggagctggccctccgcccgcttgtccgacggtgctaggcgcccccgacccccaggatggccccggggccactgcaggaaggccgcgcctgtcgccctccgaccccgaggtcgtcggcacagaagctgagtgcgccccgcgcggcctctcggacgaagagcgccctggaaatgcggcccctagtgaagaagatcggccccgccgaaaggcgcatcaggtcacggtggttacgtcctaccccctcggccaaatcttgcataaccgagagggtactggacgggtggtgaaatgggcaatcgaactctctgagttcgatttgcactttgaaccacgccacgcagtcaagagccaggccctcgccgactttgtggcagagtggacaccggctcccgagcccgtctccatccccgaggccagctcgggcccttcgcagctgcctcacaccgcctattgggtgatgcagttcgacggctccctgtctcttcagggcgccggtgcgggggtcacgttgacctcgccgagcggagatgtcctcagatacctggtccgcctcgactttcgggcgaccaacaatatggcagagtacgagggactccttgcgggactcagagtggcagctggactggggatccgccgcctcctggtgttaggcgactcccagttggtcgttaaccaggtctgtaaggagtaccagtgctctgacccgcagatggacgcttacgtgcgccaggtgcggcgtatggagcgccatttcgatgagatagagcttcggcacgtgcccagacgggataacgcggtcgccgacgaactctcaaggctcgcttcctcgcgagcccagaccccaccgggcgcctttgaagaaaggcttgcccagccgtcggcgcgacccgaccccctaggggggacggacgcgcctgaacggcccccgaggcccgtcggagtccaggcctcggggcccgaggggagcgctcccagctcccctagattgattgcttggatcactgagatccaggcgtacctcgcagataagactctacccgaggaccgcgaagggagtgaacgcgtccggcgcatctccaagcgctacgtgctggtggaagggaccctctatcggcgcgcggctaacggagtcctcctgaagtgcattcctcgggaacaaggcgtcgagcttctcgccgatgtccatgaaggcgagtgcggagcccactccgcctcacgcaccttggttggcaaggcctttcgccagggtttctattggccgacggctctcaacgatgcggtcgacctggtccggcggtgcagggcgtgccagttccacgccaggcaaacccatcagccggcctag

SEQ ID NO: 9518 - DNA, 1207 bp, Oryza sativa
  Clone ID: PAT_MRT4530_15928C.1
attcgggaaagagagaagggaagggcctcttcgtcggcggcgaccgcgagcttccgcttccgacatagcatcgccgctcgccggatcggagagcgaggggagcacgccgtgcgcgaggagggcagcgggggcgcgcgggggatacggttggaggcgcttcagctacggccggccgaggacctgcggcgagttggttcctcttcagctctcgtgctcttctgcatcaagtaattagaatgcaagaagaacatggaaatgaaggaatcttgaatatcatcatttcgcctctgcaaagtttcagagatattaatgattaaattggtgttagctgaaagtaagaggaacgagcacctaagaactataggaatgggaggcatcaggaaaatcatcagaccaaatctccaataccagagctacaagaaacagaagcttgaacattttcttcagagtactagagtatatatagacctatgcagtgcagggctgtgaaggataaatgaattgaatctggtagatggtgcacaataggacactgaagtgaatgatcacatatattggccaagaaacatgtacaagtcactgtacaacatctgcagggatgtgatcttctgggtacatcagaaagctgattgacataatgaagagtaagcagagaacagtgccgccacttgggatcttttgagaggactggattctgatgaataaacatgctggatgtcaatgagcaaaagattggatcagcttggactgaacacgtactattttctgactgctagtctttggagagtccctgatcatgacagcctgcggaatgcatcaaagtccaccttaatgcatactgtatgcatcagttcatcaggttatgacttatagtcagctcttcagccatgcgcaacggcatcaaataactcgaatgcaggaagaacaaggaaatgaagaaatcgtgaagggcatcatgcaacctctgcaaagtttaagagatattaataaactcaaatattcttgtttcaattttggtgagaggcgtatatataggtactacctttctgttcggactaagttacaatgtgcaaatagatgctaatttatgtacttgtccatttggttgatgttatgtcactattgagatctcatatggaacataacatcaaccaaatgagatctcaatagtgacagttcattttgcatatcagcacttagcagctac

SEQ ID NO: 9519 - DNA, 594 bp, Oryza sativa
  Clone ID: PAT_MRT4530_15929C.1
ctttgtttttttttttttttttttttttttttttttttttttggtttttttttttttttttttttttttttttagcaccacaaacataagcttgccccttatcactaatctgaatttctgatacaatatgagaggacttggacagggcttaaaggggggggggggccctcagggaatgccccaacatctgcttgctgatcattaaaaggaggggggcctgcctaccagaacagcccaaaggcctactagggccttccttttacctttttatcttcaagctttcctctgcaaggggaattgcaagctgccaaaaatccctctaccggggggggggagacttccatttatagcgatggccagatgctaagccctccgtttatcccagcctggtttcccccaataagcctcaaccgtccaagagatatgctggcctgtgtaattcagccctaagctcaaaagggcttaatcggtttatggggacattttaccatttctcaggaaacgttgcccttagagcccttttgccttcaccgccgttttacgaattccttgggacccgggttgacttgggggaccccccccaaggggcttggg

SEQ ID NO: 9520 - DNA, 389 bp, Oryza sativa
  Clone ID: PAT_MRT4530_1592C.1
accacgaagccaccgcacgcccccttcgtcaaggggtgggtaaggcgggagccggcccacggagaggactacccaagcctcaatcactagggtagttcttccttcactccgaaggtggtgaactccaaaccactcacaaaccggcgccgggcctcctccacaatcttctcggagaggtcaccgggcaactcctccacaagccgtctaggaggtggcaacctccaatagtaacaagcataatatatggatgattgaacagtttgtttcattaattggagtcttgcaatcacttctaaaatgataaatcatttagctaagtcatttcataagtcctatatatatatagctagagccgggtcgtcacctcccgtgccgcccctagggaggac

SEQ ID NO: 9521 - DNA, 5181 bp, Oryza sativa
  Clone ID: PAT_MRT4530_15930C.1
atggccgaacgagcaaaagcgcacaacctctctccgagcgctagcggtgacgacagcgagcagaacccgcgtcgtcgagcttgtactccgccgcccccctctcgccgaagtcttaggcgggaggaggcgctcgagggggtcgaaagatccgcgacttcgccgcccatgagtgatggagaaggacggcgagacggggagcgtcgtctcctcgtctacggtgatggcagcacgccccagggcgcgctccaggctgcgggcgcgctcctgcgtcacccgcccgtcgtccctgatcaagagactccaactcgacgttggctagatgacgtggccaacttggtcatgacggcgcagcagcgtttaggcgccggcgggcggtcctccgccaccaaggccactggcgctgctactgccggctccgtgtcgtcgaggcggagggcgcggcgagcggcggccgttgcccgccgttcgtccgccattccctcgtcaatgcctccgacccaagaagatgtgcgtgaggggccggatgcccgcctcaatatcgagcgccggcgcaatgatcgccgtgctgcccacgcatcggagggcgcttcctcgtccggagcgccacttcggtccgggcacggaggccagccccccgtgtccccggttggcggtgccggctgtcgagactttgtggcgagccttcagaacgtccgttggcccccaaggttccggcccaccatcaccgaaaaatacgacggaagcgtcaaccccgccgagtttctccagatctacacgactgggatcgaggccgccgggggtgacgacagggtcatggcgaatttcttccccatggccctgagaggacaggcgcggggttggctaatgaacttgccacccgcgtcggtccactcttgggaggatttgtgccagcagttcaccatgaacttccagggcacatatccgcgcccaggtgaagaagcggacttgcacgcggtacagcgaggggacgatgagtctcttcgctcgtatattcagcggttttgtcaagtccgcaacaccataccatgtatccctgcacacgcggtgatctacgcgttcagggggggcgtgcggcacaaccgcatgctcgagaagatcgcctccaaggagccccagaccactgcggagctttttcagctcgcagaccgtgtggctcgcaaggaggaggcatggacctggaactccaccggttccggtgtggcagcttcagccgcccccggatctgccgctcggtcagggcggcgggacaggaggaggaagaagaggtcggcccattccgacgacgagggtcacgtcctcgccgtcgagggcgcttcgcgggccacccgaaaggggaggcctgcgagcgacaaaaagaaggaggccggcgctcccagcagggagcgcccgaccggcaagtggtgcaccgtgcacaacacctccctccacgacctcgcggactgccgcgcggtcaaaagtttggctgagcggacgaggaagtgggaggaggagaggaggcaggagcgccgtgagggcaaggccccagcggctccctctggcaaccggcgaagagcctggggccaccatcgccaccgtcgatggggagcatgcgctcacgtttctcgccggagcctcaaggccatgaagcgagagcttctggccgcggcccctacccatgaggcgatgcggcgtgcgtggtggtcggaggttgccctcaccttcgaccagaccgaccacccgccgtgcgttgcccggggaggacagatcgcgatggtggtttcccccaccgtttgcaacgtgaagttggggcgtgtccttatagacgggagagcagccctcaacatcctttcccccacagcctttgacgccatcaaggccccggggatggtgctccggccgtcccagccgattatcggtgtgacgccggggcacacttggccgctaggtcatatcgacctcccggtcaccttcggtggatccgccaacttccgcacggagcgggtgaacttcgatgtggcggacctcagtctgccctacaacgcggtcctggggaggcccgcgttggtgaagttcatggcggcggtccactacgcctacctccagatgaagatgccgggccccggtggccccatctctgtccatggcgacctcaaagtcgcgcttgcttgtatggagcagcgcgcggaccacctcgccgccgcgtccaagcccgagggtggcgacgagaggctcggcacctccgtccccgccgccccgaggcagcggatgatcacgtgcgacgaggtcccggtcaaggaggttgccctgggcgacggcccgtccaagaccacacgaatcggtggtcctacttttcaacgtactactcgaatttctttgggtagccaaataggacgtaatgttgaggcctatgttgatgacttggttgtgaaaacacgcaaccaagagaccttactctcggatctagcggaaactttcgaaagtctccgcaccgcccgcataaagctgaaccccgacaagtgcgtgttcggtgtgcctgcgggcaagcttctcgggttcttggtctctgcccgaggcattgaggccaaccccgagaaggtacgagctatagagcggatgcgcccccccagcaagcttagggatgtgcaatgtgtcactggctgtatggccgccctaagtcgattcatatcgaggctgggagagaaagcgctacccctatttaagctcctcaaacgctccgggccgtttatctggacggaggaggctgaacgggccctcactcagttgaaggcgtacctcagttctcccccagtcctggtcgccccggagccagatgagccgttgctactttacctggcggcaaccccgcaggtggtcagcgcggcgttggtcgtggagcgtgacgaggacgaccctcgctccgcgcatccccaccctgtgtcgactcgacccgggagagagcagggaggagaggcccccgagccgaacggtggcccaaggcccccgacggccggagctggccctccgcccgcttgtccgaaggtgccaggcgcccccgacccccgggatggccacggggccactgcgggaaggccgcgcctgtcgccttctgaccccgaggtcgtcagcacagaagccgagtgcgccccgcgcggcctctcggagcgtgacgaggacgaccctcgctccgcgcatccccaccctgtgtcgactcgacccgggagagagcagggaggagaggcccccgagccgaacggtggcccaaggcccccgacgaccggagctggccctccgcccgcttgtccgacggtgccaggcgcccccgacccccaggatggccccggggccactgcgggaaggccgcgcctgtcgccctccgaccccgaggtcgtcggcacagaagccgagtgcgccccgcgaggcctctcggacgaagagcgccctggagatgcggcccctagtgaagaagatcggccccgccgaaaggtgcagcggcccgtctacttcgttagcgaggccctccgggacgctaagacccgataccctcaggcccagaagatgctttacgctattctgatggcttcgaggaagttgcgccattattttcaggcgcatcgggtcacggtggttacgtcttaccccctcggccaaatcttgtataaccgagagggtactggacgggtggtgaaatgggcaatcgaactctctgagttcgatttgcgctttgaaccacgccacgcagtcaagagccaggccctcgccgactttgtggcagagtggaccccggccgctgagcccatctccgtccccgaggccagctcgggcccctcgcagctgcctcacaccgcctattgggtgatgcagttcgacggctccctgtctcttcagggcgccggtgcgggggtcacgttgacctcgccgagcggagatgtcctcaaatacctggtccgcctcgactttcgggcaaccaacaatatggcagagtacgagggactccttgcgggactcagagtggcggctggactggggatccgccgcctcctggtgttaggcgactctcagttggtcgttaaccaggtctccaaggagtaccagtgctctgacccgcagatggatgcttacgtgcgccgtgtgcggcgtatggagcgccattttgacgggatagagcttcggcacgtgcccagacgggataacacggtcgccgacgaactctcaaggctcgcctcctcgcgagcccagaccccaccgggcgcctttgaagaaaggcttgcccagccgtcggcgcgacccgacctcctaggggagacggacgcgcctgaacggcccccgaggcccgtcggagtccaggcctcgggacccgaggggagcgatcccagctcccttagattgattgcttggatcgctgagatccaggcgtacctcgcagataagactctacccgaggaccgcgaagggagtgaacgcgtccagcgcatctccaagcgctacgtactggtggaagggaccctctatcggcgcgcggctaacggagtcctcctaaagtgcattcctcgggaacaaggcgtcgagcttcttgccgatatccatgaaggcgagtgcggagcccactctgcctcacgcaccttggttggcaaggcctttcgccagggtttctattggccgacggctctcaacgatgcggtcgacctggtccggcggtgcagggcgtgccagttccacgccaagcaaacccatcagccggcccaggccctacagacaatacctctttcatggccgtttgctgtccgggggctcgatatcctgggtccgtttagatgggccccgggcgggttcgagtatctgtatgtcgctatcgacaagttcactaagtggcccgaggcttatccggtcatcaagatcgataagcactccgcacttaaattcatcaagggcatcacagcccggtttggggtgcctaaccgtattattacggataacggcacccaattcactagtgaactcttcggtgactactgcgaagacatgggcatcaagctctgcttcgcctcccctgcccaccccagaagcaatggccaagtggagcgcgccaacgcggaaatcctcaagggcctcaaaaccaagaccttcaacatcctcaagaagcacggcgactcgtggatcgaggagttgccagcggtgctctag

SEQ ID NO: 9522 - DNA, 981 bp, Oryza sativa
  Clone ID: PAT_MRT4530_15931C.1
atggattggatgcctcctccgaagcccacctcgccgcgctcccctcccctcctctgggactgggccgacgccgccgtgccgggctcctcctccggcgaggtatccgccgccgccgccgccgccgcggctcatccgggaaggcggcggaaggagaagcgaggcagggcggaggaaggaggaggtggtggtggggaggtgaggtgccaggtggaagggtgcggggtggagctcgtcggcgtcaaggactaccaccggaagcaccgcgtgtgcgaggcccactccaagttcccccgcgtcgtcgtcgccggccaggagcgccgcttctgccagcagtgcagccggttccatgcgctctcggagtttgatcagaagaagaggagctgcaggagacgcctgtatgaccacaacgctcgtcggcggaagccccagaccgacgtgttctcctatgcatcggcaaggccgccgtcgtcattattatttgatgataaccgacaaataagttttgtctggaacaaagctccactcagccatgtaaggcctttcgcaatttctccatgggaaagctcatctgaagttgggacaactgatggacatatttatttggataaatctcacatatccaaatctctcccagcatttaacaccgacatagatgagctcttaccaatgaaaggtccggacgcatctttaactgcttcaaaatttgatggagcaccggatcttcagcgtgctctctctcttctgtcatctagttcttgtggattacctgatcctgtacagcaagcatctcgcgtcatccaattcacaggcgccagccaaaacaaccgggaacttcctccacttaatggagggaattctgcttcagcatcatgtgccaatgtacaaactatagcacaaccggctcagctggttcgttttaccatgaatgctagcagcaatgcttgtcagtccaatttcttcggtttaaaccagataaactaa

SEQ ID NO: 9523 - DNA, 333 bp, Oryza sativa
  Clone ID: PAT_MRT4530_15932C.1
atggactctagaaccactgagaccgaagagagcagagttgaaaaccttggagtttcactccttccgcagttgccaagataccaggaggactcaggagtcgaagccggcatggagatgctcagaaagcgacagcacacggagccagacttgctgagcgaacacgtagccaaggaggatgtggttccccgtctcaagctcctgagcgcaaaaggggaattgctcgccaagccagaagtaaccgtgcgtgaacctcagaggtgctggggcacgacaaagaggagatctagagccaaggaggccaccgagcggctaccgatccattggtcaacctag

SEQ ID NO: 9524 - DNA, 424 bp, Oryza sativa
  unsure (1)..(424): unsure at all n locations
  Clone ID: PAT_MRT4530_15933C.1
gccgccttcctcgatccagagccgagacaacctagccatctcctcgattcaatcgtgctctgccccgcacggttccatggctgttcttcttcatatgtgttcgtccaaggatttcctggccggcgccgttcgagaggggagtagtctctgtccggggcgggctggcttgatttctgccggcggcggtggttttggctgtctcccggctctcctccggtagaacaacggccggcaagccggcgatgattagtcagctgttcttcccccatcgcttcctcagatccagacacgtctccttcctcgattcaaactctctctgcctatgtgtcgctgccgcgtcttcccaatctaaccctggtgaactgcatcttcatagagtttttntttatcacatggaatggagcaagcgtttttgctttcatag

SEQ ID NO: 9525 - DNA, 350 bp, Oryza sativa
  Clone ID: PAT_MRT4530_15934C.1
tttttttttttttttttttttttttttttttttttttttttttttttttttttttttttttttttttttttttttttttttttttttttttttttttttttttttattttgtttttttttttaaaatttttgttttttttcaaaacaatattttttttttgggaaataaaaagattacttttataccgaaaccaacccattttaagccctttttttccgatccaaacaaaaattgtttcgttcaaaaaaaaaaaaaaccttttgtgttttttccaaaatcgaaaacttggtccgccccaaaaattccggaaccttacctgctggcgccccaacttttcctatggggaatt

SEQ ID NO: 9526 - DNA, 444 bp, Oryza sativa
  Clone ID: PAT_MRT4530_15935C.1
cagaaacacaataatggttttttttactaatcaagggtgataagaaggtactatatatattcaagaacatgcattttattatatcacagaagaaggggtgatccttgatgatataggcccttggataggctggtgactgaaggaacagctgttaattgtgtttcatgatataggcccctggatatttcagtttctggctctgtagagggaggtaaatttcataaatagattcaactgatgtataatgtgagctcaatcttttaagtactgacacagatattcaaaagctgaagcacaaaaacacgaaagtgtagccttcattatgggtggtgtggctgatacttgccaatagcatatatagcgataatcatccgcgtagtttgcattgtgcaggccataaaacccgagggttcaaagtgagtcagaagaactgtgtccagggga

SEQ ID NO: 9527 - DNA, 228 bp, Oryza sativa
  Clone ID: PAT_MRT4530_15936C.1
atggcgggcagcgtggcgacgggctcggggacggcgggggacggcgtggaggaggtcagtggaggacaccggccagcttggggacagcacggaggaggtcagtggaggacggcggcagatggcgtggaggtatgcccggatctataccatactagtgacttcatctgccaccatggaaaccactcaacattcagctcgctcaaatatcaggtagttataggtgcatga

SEQ ID NO: 9528 - DNA, 270 bp, Oryza sativa
  unsure (1)..(270): unsure at all n locations
  Clone ID: PAT_MRT4530_15937C.1
ttttntttttttaaatccatccctaacgcgtctggtatatatataaaaaccaccctcccatatatttcatttacatatnacttcacccaacatcatatatccttatcaacacccactcttacatcaagttacatatacatcatttcaaacaaaaacaaaatcaaatctcggccttcaaaataaaaatactatcaacaaacttataacacaccaaacaacaattaaaacatcattccatcataaatcaacacttaaacaaccttatatata

SEQ ID NO: 9529 - DNA, 354 bp, Oryza sativa
  Clone ID: PAT_MRT4530_15938C.1
gcgaacccaaaacaggaaaaacagaaaaaaagaaacccccaaggggggaaaagggacggggggccccaaaacaccaggggggggcaccaaacctagaggggacggaaaaagccaaaaaagctggagcaggaaccaaactccagaaaaaggagagacccccaaaccgcgggggggggagctggccgcccttgggccggaaaaaggaaaagccccgagagggggaagggggcgccaccagcccgggcgggggccaaacctgggggggtcttaagagaaaagcaaatgatttagacgcagggggggacccggaaatatccgaccagaacccccaagcggcccacctttttctaaagg

SEQ ID NO: 9530 - DNA, 422 bp, Oryza sativa
  Clone ID: PAT_MRT4530_15939C.1
attgtgcttcgttgcacacgcgcgcgctgtggttgctgcatcaaatgggtaacttgcttgatatgaaggtggtggcaatggtggcggcgctagtcgtcatgagcttggcaggggtgtccatggcggcacggagggtgcccgcgctgctgaagagccacgtcggcgacgggatctcctaccacggcggcgccgtgcgtcggcggcgacattcccgtcaccctcgtgtggtacgggaagttcaagccggcgcagaaggccatcgtcgtcgacttcctcctctccctcacggccacgccaccgaacgcgacgacgccctcggccgcgcagtggtggggcgccatcgccgccggctacctgtcgtccaacgcgacgaacgtgacgactgcggcgcgggtggttcttgcgaaccagaccttcgacga

SEQ ID NO: 9531 - DNA, 568 bp, Oryza sativa
  Clone ID: PAT_MRT4530_1593C.1
cccaaaaatgtacacatgaactgctacatccatgtttatagtgtattttcagcttgcacatagaacaagatggcattgaaacaattatactaccctctaattactatagttaaggctatatttaatggatgcatatatatgaaaaataaagtaaagttggatatctattagggatataattcaaaatatctgcactgttaaaaggctggtgtatctacagagttgaagaatttaccgtcataggggggctagtgtaagcagcgcaaccagctattctccatcccagggcctcagtaacataaaagcaaaataaaattttcaattgatgttccacatataagtgcaaatacataaaaaaaaggcttcctagaaccacacttcagtgaagctaacaaatgtaagagaaggtaagcataatgtatcgattcatacaaaatatcaaaagacaaacaggcagtgacctatgaaatttcaaaagaaaaaacatccatccaataaaagatcggaacatatatgtagtactatggaagagtatatgcacattcatattaaaaatcaattcagtgtc

SEQ ID NO: 9532 - DNA, 5005 bp, Oryza sativa
  Clone ID: PAT_MRT4530_15940C.1
atgaataagagactgatgacaagtacttgggaacggataggaagtacacaacatcagccatcagccagctgaatctctgaatacaacaacgagagtacgaaactctgaaacatcacgatcctactatatcacattacaccagccggggctcaccacgaacaagatcacacgcaaaacgttctacacttcgcacacccacgcgaatttgattcagatcactgactgccacacgcctgcacggggtgtaatctgatcgtcatttttcatggctgcttggtctccggctccgggtcgtgaacctcgtgctccggcggcagctccgccgtgggcaatggcggcagctcaggcttcggtggcagcccgtgctttgggaaccccggcacggccgggtagtgcggcagctccggcacgacggggtgcggcagcatctccggcacgacggggtgcggcggcagctcaggcttgggcaacggtggcagctccggcacggcggggtgcggcggcagctccggcacgacggggcgaggaagctcagggagcggcggcggcagctcgggctttggaagctccggcagctcggggtgcggcggcagctcgggcacggcggggaagtctacgactccgtcccaccccacgccacgtgctcatggctcacaccttgagcagaaccattggtcgacggaggagcatggtgaggcgaatgcatcggcgccaatgcctaggatgctaggaggtgtcgacacacatggcaacgctagccacagcaacactagggaaggaaagaccagagccaaggagaggcgttgaatggagaaaagacattagtgggaaacggttcgccagccagccaagcagcgatggcgagcttgggcggctgttcatgctctggcacggtgggatgcggcacctcgggcttcggcaactccggcaccacagggtgtggcacctcaggctttggcaactccggcacgacggggtgtggtggctcttcgtgtttcggcaactccggcacagcagggtgaggcacctcgggcttcggcagctccggcacgacggggtgcggtggctcttcgtgtttcggcaactccggcacgacggggtgtggtggctcttcgtgtttcggcaactccggcacggcagggtgaggcacctcgggctttggcagctccggcacgacggggtgcggtggctcttcgtgcttgggcagctccggcacggcggggtgcggcggcggcagttcaggcttcggaagctccggcacggcggggtgtgggtgtggcggtggttcttcgtgctttggcagctccggcacgacggggtgcggcggcagctcaggcttgggaagctccggcacggcggggtgcggcggctcttcaggcttcggcagctccggcacgacggggtgcggcggctcctcgtgcttgggcagctccggcacgacagggtgcggcggctcttcgtgcttaggcagctccggcacggcggggtgtggcggcagctcaggtttgggcaactccggcacggcggcgtgtggcacctccggctttggcagctccggcacgacggggtgtggcggctcctcgtgcttgggaagctccggcacggctgggtgcggtatctccggcacagctgggtgtggcagctccggcacggcagggtgtggtggctcctcgtgcttgggaaactccggcacgacggcagggtgcggcggctcttcgtgcttgggcaactccggcacgacggcggggtgtggtggctcttcgtgctttggcaactccggcacgacggggtgtggcggcagctcaggtttgggaagctccggtacgacggggtgaggcggctcttcgtgcttgggcaactccggcacgacggggtgcggcggctcctcatgcttgggcagctccggcacggcggggtgcggcggcacctccggcttgggtaactccggcacggtggggtgcggcggggcctccggctccgggaagtggaactcgggcttcggcggcaactcgaacttgggcaatggcggcagctcagccttgggaatctccggcacctccggcttgggcagctccggcacggcgaggtgcggcacctcggggatcttcggcagctccggtcgtataggaagatagctattttattgatttatgaagcatgtatgatacaagtgtagatcgtgtgtgcacacacataaatcagcacatacgataacacaataactcatccaagaacaaagaaagctgccacaaaacaaaacacaacaacaacgtacatcatctcacacactcacacagctagctagatcatcactgaaaatatcttaggcaaacatcgatcaaagcttacacatgaacatacacacatacagcaacacgtagtaatttcaggatacgatacgaccggccgatcgatcgatctctggatcgatcatggcttctcgggataatggctctcaggcttgggcggctgttcatgctctggcacggtgggatgcggcacctcgggcttcggcaactccggcaccacagggtgtggcacctcaggctttggcaactccggcacgacggggtgtggtggctcttcgtgtttcggcaactccggcacagcagggtgaggcacctcgggcttcggcagctccggcacgacggggtgcggtggctcttcgtgtttcggcaactccggcacgacggggtgtggtggctcttcgtgtttcggcaactccggcacggcagggtgaggcacctcgggctttggcagctccggcacgacggggtgcggtggctcttcgtgcttgggcagctccggcacggcggggtgcggcggcggcagttcaggcttcggaagctccggcacggcggggtgtgggtgtggcggtggttcttcgtgctttggcagctccggcacgacggggtgcggcggcagctcaggggccatcggcacctcggggtaatggctctcaggcttcggcggctgttcatgctccggcacctcggggtggtgcggctcttcaggcttcggcagctccggcacgacggggtgcggcggctcctcgtgcttgggcagctccggcacgacagggtgcggcggcttttgtgttttttatgttaggccaatttgttgtttctggttctttataatactagaaacataattcaaacataaattaatgaagcatatatggtacatgggtagatgatgtgtgcatagatataagcgtagcacacgcaagtacatcctccaagaacaagaacaactggatggctgaaacagcaagcatcactcacacattcctagcaaacagcacagtttacatgatcatatcgttgtcgcgctcatgcatacagacccatggcacggcggcgtgtgcgatcatggcttctcgggaaaattgctctcaggcttgggcggatgtccaggctctcggacgctgggatgcgtcgcctcgaggttcgggaactcgggcatcaccgggtgtggcacgtcaggctgcggcacctccggctggagggggtgcgggcgctctccgttgcggggccactcggtgcgagcagaggtaggtccttcgcgctgcggtggttctggtgcgacggcgcgccctccccctccgtgtttgcgcaagtccgctacgacagggtgtgctgggtgtgcctgcttcggcaactccgggacggcagggtgaggcacgtcaggcggtgtcaggtcggccccggcgggctgtgctcgatgttggtgcgtggacagttcgctgatcttctggtgtctgggggcttgcctgagcttgagatcaagtggcacttgagggtgtgcatgttacttggcttggctgctttagtggaggtccaggatgaaggggacacggaccgtgtgttagggatagatggtgtccagctcatcggcatcaataaccgtaacctcgagacttttcaagttgatatttcaaacactaaaaatcttcttgagggtgaaagaggacaaactatagctcagaaaggcataattgttgtaggggaatcagggctgttcacaccagaccatatttcattcgttcagaatgctggggttaaagctgttctcgttggggagtctctcatcaagcaggaggatcctggcaaagcaatcgctgggcttttcggcaaagacatctcacctgtgagtgctgcgtaaagtctaaagacaaacagagtgggcagagaggctgagaaatgatggagcacatcatcatattgtacagggagagatggagcaattagcttttctggagagtttttggtcagccattttttgtttactaaactcgatcagttcttcccatatactcttgtgaccaaaccttttcgaccaatacaaatggttcactgcaaagaaatatatgatcgaataagttggatttaaaaaaaaaaatccggctttcgcagcaccggcacgacggggtgtggcggctcctcgtgcttgggaagctccggcacggctgggtgcggtatctccggcacagctgggtgtggcagctccggcacggcagggtgtggtggctcctcgtgcttgggaaactccggcactggcggcagctcaggtttgggaagctccggtacgacggggtgaggcggctcttcgtgcttgggcaactccggcacgacggggtgcggcggctcggggtgcggcggcacctccggcttgggtaactccggcacggtggggtgcggcgggtactcctcctcgagccaccgtgccgcgctgctcatggagctggacgagagcagcagcagcgcggcgaggaagagaaccgaggaagacatggcgttcttcttaaagaccatgcttgcttagctagctgggcctgtctgctctgaatacccattgttttgatgggctccttatttcccttaatcccccttgcccaggatgccatagattgctgtttattgtgtgcacatggtgcactgtaaaaaacaaacacattaaaaaacaaaaaaaaaaaaaaccccaaaaaaatcaaaaaaccaaa

SEQ ID NO: 9533 - DNA, 129 bp, Oryza sativa
  Clone ID: PAT_MRT4530_15941C.1
atgaagtccaagatcacccaaatcggagttggcatgaaggcactaggggtcatccttggagatttcttttcacattcaagtcttgcaaggtcatctttcaaagcagcggctgtcagggttacggataag

SEQ ID NO: 9534 - DNA, 231 bp, Oryza sativa
  Clone ID: PAT_MRT4530_15942C.1
atgggggccaatgagaatggctttaatggaatggtcaagtgttggaagactagtggttttggagcggatatggacaggcagcaaggtacaagtataaggatgaaaacatatgatcttggcattagctcaacgcaaattgatacatgccatgatacaatcacacgatttcctattcggacggttgtggcatgctatatagaacaggaaaacgatttgcagaagaactactga

SEQ ID NO: 9535 - DNA, 609 bp, Oryza sativa
  Clone ID: PAT_MRT4530_15943C.1
atggccttcgctgcctcccctcccctctcctccctcgccgctgccgccgccgtgatctcctcctcctccccatcaaaacccctctcacgagcaaagacccctccaccagctctcctccaggctattctccccactgccccccccaaacaccattccctctcctgctctgggtcacaagccccacgtgccaccacaggcgaaggatcggccgtgggggaccgcgggagcggctccggaggaaacaacggcaagggtggcggcggcgacggcgatggcggcgacaacgactatgaggaggccgagttcgggcccctgctcgggttcgatgaggtgctgcgcctcaccgcggcatgcggtgtctcgctcccggccgacatgatgggggcggccaaggatgctagcatccgggaagtcatgttgctccaccacttcgatctgcaggttgtgattgactcgtgctgcgctacgtttgcggaggtgtttgagctgtacgatccatggacagatatgcacgctacgggattcatggatacagccatcacccccagtttccattctcttatcctgcacagttcattggatgacatatttgtgattccaaaagagtaa

SEQ ID NO: 9536 - DNA, 345 bp, Oryza sativa
  Clone ID: PAT_MRT4530_15944C.1
atggaactagcagaggccaagaagaagttggttgcaagaacttacgccatctccgcgctcaaaagaccggaacaccgactgcgacgaaacgatctgcaacaaggaaaacaagcgttctcagcacgattagcgaccgccggcgcactgacgcggaggaacaagaagagcaacggcggcgccgcctaccttgtggcgaagagcggcggcggcggcggggttagggttttcgcgaggagggggtggagtgagccgcgtgggagaaggtgttcttatatatcgcgttcactatcgggccctgatgggccgaggagctccccaattgggcctcataatgtccagagttag

SEQ ID NO: 9537 - DNA, 147 bp, Oryza sativa
  Clone ID: PAT_MRT4530_15945C.1
catagtagtgataatggctaataagttcgttacccaatcaaattgccccacccaattagctaatgcagatccaaccataattgaagccaacgctaaagctccccgcacgggaatggcattcaaccgttcgcccgccacgtttaggag

SEQ ID NO: 9538 - DNA, 345 bp, Oryza sativa
  Clone ID: PAT_MRT4530_15946C.1
ccccgccccaaagcacaagccggggccggccaaaaaagccccgccccccagggaatccccaattcccccttaagttccaggcccagggggacaaaaaaccccccaactctggaaggacaaaaaagacccacccgggcgcaggggccagttcacgggacccccttgggccacccagggacccccccacggggcaaacgggccggaccaagcccccagagattaaagagggcgccggaaaaaccctttgggggcccgggttgaaaaagttggtgaaccccaagacgccgacgagaaccccatcccttcccgattccggggccggccccccacacatgcggggcccgg

SEQ ID NO: 9539 - DNA, 709 bp, Oryza sativa
  Clone ID: PAT_MRT4530_15947C.1
ctatcaaccacggaggcggcgggatcccccggtgaaggcggcggttctagggatgagactcggtggccttcctcatggcgtgcgctgccccgtactccggcgtgaagcgtggagggcggatgggcgcagctatcaggaggccactacggcgaggtcgtcaacatcaactttcgttgctacccggttctactgcaacacctcgaagaatggcgaggcagcgacatcggcgacccccatctccgctttctgatggggcggagcccctaccggggttgcaggtccgatacagacggagtatggcacctcccaggggttgagcagccagcattggtagccatcggcgtgagggtgcagcagaccggcgccgtcgttcgaccccgctagcgacctccgacgagttccaacggcaaggaggtgccctctcacatcatcccagatccgattgcccactgttaccgacgtggtggcaggccctccttgggagggaaggagctaggacgttgaagcaactgctggctcctagactgggtcgccgacgctggttgcatccatctccaagaccagcggcactggatctggaagactcctgctgtctctcctccccgaggaggagatgcgtttcttttattcttcctctttcgatttgtaattttttttactgtgaagaatatgattgatttgcatggttaaaataaaaaaaaaaaaaaaa

SEQ ID NO: 9540 - DNA, 693 bp, Oryza sativa
  unsure (1)..(693): unsure at all n locations
  Clone ID: PAT_MRT4530_15948C.1
gccacccccaacccaagtgaccaaccgaaggcggagggtagcaacttcggtctgctcatcccaagttaggcatggcatcaactgttgccatcaatttgattggtgctcaggctggcattatctcaaagttaaggaattgcgacatcacaagctacagtggcttaaaggcaagatcatctattagttttgagtcaaggtcatcattcctgggtcagaatgcatctcttcgatcatctatctctccaaggattgtaccaaaggcaaactctggatctcacatttctcctgaggcatcttacaaagtggcagttctcggtgctgctggtggcattggtcaaccgttgggcttgttaattaagatgtctcctctggtctctgcactacatctgtatgatattgcaaatgtcaaaggagttgctgctgatctgagccactgcaacacaccttctcaggttctggactttactgggccctcggaattagccaactgcttgaaaggtgtggatgttgttgtcatccctgctggagtcccaaggaagccaggaatgactcgtgatgatctttttacatcaatgcgagcattgtcaagacacttgttgaggctgttgcagacaattgtccagaagcctttatccatatcattagcaacccagtaaactcaacagtgccccattgctgctgnagttctgaaac

SEQ ID NO: 9541 - DNA, 1161 bp, Oryza sativa
  Clone ID: PAT_MRT4530_15949C.1
atggacggcgacgcatggtggtaccctggcggcggcggaggtggtggtagcaacaactgggatcttggcgctgtcgtgaggtttgggtgcggcgggggacgggtgagcccggcggcggcgttgctgggcgaggcgtgggagtacgacgacgacccgttctcgtcgttcctcgcgccgcccatgacggcgcagcaggcggcgctgcccgccgtgtgggaggagggagacgacggggacgcggcgtggatggcgccgctcccggggcttcagaccggtggtggctggggtgatcaggcccccatggtcgtcgacgagctctgcggggccctcgttgtggcccctcctccacctccgaagcaacaggaggtgcttcaggtccagcagcagccgccgccggcggacaacacgcagcccactacctaccagcagggatccggcggcgacggtgagagcactcgcgccggcggatcaaggtcggcgaggagaaagtatgcggcctccgctatttatatagtctccgtttgcttttctgattcttgcataatgtggattcgctcgctggctgatgaccgtggcgttcgccatgcatgcaggaagaagcagacgagaaaggaggtggtgcgcgtggcggcgagcgggccggcgccggacttgtgggcgtggcggaagtacgggcagaagccgatcaaggggtccccgtacccgcgcggctactaccggtgcagcagcaacaagaactgcgccgcccggaagcaggtggagcgctgccgcttcgacccctccttcctcctcctcacctacaccggcgcccactccggccacgacgtccccctccaccgcaactccctcgccggcaccacgcgccacaagccgccgccgccgccgccgctcccgtccgccgccgacaagtctccggccaccgcggctgaggcggcgacggcgagccagagccccggcctgtcgccgaccacgccgctgcgcgcctcgtccatggagctccacggcgaggacgacgccgaggccgagctgcaggtggaggaggacgacatggccatcgacgacgaagacgacgacgacgtcgccgacgagaccatcagcaccgtgccgtggggcacgcccatctccgacgcgatcatcgcggcgagctacgagtggagatga

SEQ ID NO: 9542 - DNA, 2079 bp, Oryza sativa
  Clone ID: PAT_MRT4530_1594C.1
tcacttcaacttgagcttgacttggcgtagcggaagtcgatatggctcatcttgagtggaggtggatggcttgtcttccacttcaataggcttgacatctccaatagacatgttcttcatagctctcatcaagccttcatcacctacattatccaaattctcgtgcccctcttgggagccattagtttcatcaaattgaacatcggcggtttcttccacaatacctttgttcttgttgtagacatggtatgccttgctatttgaggcataaccaccggggcaatcatttaccaaatgcccaacatcacgacacttggagcaatacttaccattgctcttgacaaaatgaatggcacggtgagaaggtttcttacccttctttggaatgaatccaagtcccttcttgttaaggatgcaccgttgctcactcaaaatcttgtcaagagtgttcttacccttgaagcatctctccaaactcttgttgagcttagccacttgctccttaagctcattgttctcaacaacaagtgaggcatcacaaatagaaacacaagaccacggcggaaaagcaacggacggcggcggcgacgaggaagaagcggcggcggtcttcggcttgacgacgacggcggtgctccggcggtctacagcggcggcgaaggggcggacgaggacggcgacgcgacggcgaccacgatggcgacctccccgagcgacgacgacaactggagcgacggcggcgcacggctggagcgacggcggcgacggcggctcgaggtcacacggcgctagggcgcttccgacggcgagagacgaaggcgaaggtggcggcgggtagaggagacaccggtgatcctccaaagaagcatgatccttctttagagccttgaacttgacaatttccttctcactataagcatggagctcctcaaacatactcacaagctcatgataggaaacatcatcactctcactatcactaagagatgttaccttagaagagccctttgccatgagacaaagtggagcaaagagtgatggagcctccttgatggctacaacggccatcttctttttcttggagcttgcatcatcaccaccttcttcttcggacccggatgaggcggagctctcctcatttgagtcccattccctgatgacggcctcaatcttcttcccttccttcttgagcttcttcatgagcttgtagcctccactcttcttcttggatgacttgtctccatcatcatccttggaagggcacttggaagcaaagtgtcccttctcaccacactcaaagcacctcaagttggtgagagtcttattgggtcttctatttcttctcctattggagttggagccccttcctctctcatttctttttcccaagagatcattgaaccttctagcaagaagggcaatctcttcctccaagtcttcattggctacattcaccttggtcttccctttgtcttcaacttcggcttggagagcaatgcacttcttggaaggtgaggcttcctccatctccttcttcttcaacttgtatatgtcattggtgttgatcttcaccaagaggcttgcgggtgtcatccttaacatgtcggagttgatgagcatggtgacaagggtctcatacttctctggtagagccctaagcatcttttgggcatcctcaagatcggtgtaggttgccccaagtcccttgagatcattcacaatgacattgagcctcccatacatgtcattcacactctcatgaggcaatatggagaatgtctcatattggatcttaaggaaatgaagcttggcatccttgtactcacttgcaccctcatggatcttcgccaacttgttccaaatctcatatgcggtctcaaggttgctcaccctatcgaactcctcttggcttaaagagttgaacaaggcattcatggcttgggcattgagttggaggttgtggtgatcaatctccgtcaagggcgtgccggtgatagcaaagcattttaattttccaagtggagtagttgtgccatttaacatatgagccttccctacatggttcacctcgttcgacat

SEQ ID NO: 9543 - DNA, 336 bp, Oryza sativa
  Clone ID: PAT_MRT4530_15950C.1
atggccgcctaccgaccgctcaccttgtgcctgcccacgaatgagggcataggcactcttttgactgcacaaaaaagtggtttaaaggattatgatgcacacccaccactcatagagcaagaactatgcgcaggaatggatattttcgattcaaattcactaagcaaacgatccgaagagtatggaacaatggaggggacaaggagacacttggagaacgacttagagtcatggaggatcatcgaggacatccaagtcaaggtggaggcccaaaccaagtcaacttcgagtgcaattcggagtctaggaccagtctgcactaaaacgggcacctag

SEQ ID NO: 9544 - DNA, 489 bp, Oryza sativa
  Clone ID: PAT_MRT4530_15951C.1
atggacggtgtgtcgacgtttgatgtcgcggttctggttcgggcccctgaattgtcaggatccgacaaggccttatcggctctgggcgtccccagccgaagttccctcaggttcctcggaggccttgtcaagacggcgtaaagggacagtaggataggtttcaacgctaggtgtcatctgggtaagggatctctgggtaaaacacttggcgatcttgtgcaccctgacatctagttcctctgccatagatcgtcgggatggtcggcgtgctgcaccatggttgttccggtcgggttggatcttcccgcagctgaagtcgtcgagtagcttgttgttcgagaatccatcttttgaacccatctcgtcgaaatctgttgtcgacatggcggtctgacgatctgactcgtagtcgacaacagggtagccttcctcctcgaatccgtgcccagcgaggtcagagatagcgctttcatctctcgattgcgccat

SEQ ID NO: 9545 - DNA, 1323 bp, Oryza sativa
  Clone ID: PAT_MRT4530_15952C.1
tgaagttggaaaactcaatttccgattacacggcttggttaatacgcacggcgagaactcttacacgaccagatcttacatggtctttcgtctctgaaggatccgacaaggccttatcggctctgggcgtccccagccgaagttccctcaggttcctcggaggccttgtcaagacggcgtaaagggacagtacgataggtttcaatgctaggtgtcttttgtggtaagggatctctgggtaaaacacttggcgatcttgtgcacctaatatcaactttgttgaagcagggtaatgggagaatcgctacacccctggtcgaggaccgggtagtagccgtaacccgaccacgctggtcgaggaccaggcagtagtcgtaactcgaccacttgaagtggaaatagtgggagaaacgctacatcgttggtcgaggaccaggcagtagtcgtagctcgaccacttaaagtggaagtagtgggagaaacactatatcgttggtcgaggaccaggcagtagtcgtagctcgaccacttaaagtggaagtagtgggagaaacgctacatcgctggtcgaggaccaggcagtaatcgtaactcgaccatggttcgagaaccaggagtaggagtctcttaatcacctataggggcgctaaagttggtttattacatgtgcatatcatgtggccagcatgactcacacacccaacttatagcatatccggatgtccgttcgcaatcatgtcgggtgatcaagccgacgacgttcgcgaggaattatccgttaacatccttttctcgagtagtccagcgatggccggcgctatgagataggtcgtcggtcttctttgataggttgggcgcgacgactctgcatttgtcgagatcgttctcgataatgcggtgtactcgaccacgacctactcgagtgctcaattgttccttattgcgtactcgttggacatcatatgatctgacatcttttggtacgccgcgtatcttgaggcttggatgatctcgatagaccaagttgtcgatgacgatgatggttctgatctggttaggttggatctccccacagccgaagtcgccgagtagcttgttgtcggagagtccatctcttaaacccatctcgtcgaaatctgttgtcgacatggcggtctgacgatctgactcgtagtcgacaacagggtagccttcctccttgaatccgtgcccggcgagatcagagatagcgctttcatatctctttaaaaagagttgagtgtccggggacatgctaagagcatctctaacagcctcttcaaattggactctccaaacacccat

SEQ ID NO: 9546 - DNA, 311 bp, Oryza sativa
  Clone ID: PAT_MRT4530_15953C.1
gtagccctgctgtttttaacggtttgttttcatactgagatgagatatcggaagtagaggtgatttcaggagttgaaccccatatgtcccatggcagcttggtattgagtactaccctttaagacagaagatgcagctaatggcttagcgtagacttctctcgcaacggtcctcattaccagatggatgttcttatgcatcttctatttggatatgatattcagacttctatgttctaaaatgctcagcataacaccctaatcataactgataggacaatctacactctgccacctttttacgattcggaa

SEQ ID NO: 9547 - DNA, 429 bp, Oryza sativa
  Clone ID: PAT_MRT4530_15954C.1
atggcttgcatgtcacggggcaatctagccagtggtagcaccttggcaggagatagtcagtcgcttggacagtcatacttcaaagtgcgcaatgagggaacagcagcagtggcaaagtgcgcggcagccaatgggcaagatgaggagcggccggtggtgggctccttcaactccgacgcaacgagggaacggcgacgatggcctcctccagctcccccgcgcgcgtggatctcctacaacttccacaccgctgcgtcctccccgagccctggcgtggcggccaggatggaagatgaagacgacggggagggccaccggcaagctcttctagcattggagggaggaagaagggccaagggtatttccgtccatgatggtattttggcgaatgtcctgattgagaatggtattctagcgaagccaatttaa

SEQ ID NO: 9548 - DNA, 841 bp, Oryza sativa
  Clone ID: PAT_MRT4530_15955C.1
gctgcaggaatcggcacaggcggaataaaacgtcctttctctcatctcacctccctcagcttaattcagacaagaatcatcggactctcctgctttcggtgcaaaccgaaccaaacgctcataaaaagggaaggagcaaaaaattttttgccgcgaaaataaatccaaatccgacgagcagattaagcttgatccccttcttgccgccgccgccgccggaggcggtgatgggcggcgcggcgccgttgctgccgtcgtggagggcggcggcggcggcgtgggtggcgctgtgcctggtccccgtggtgctgtcgctggcggtgctctggctgccgctgctctgctgcgcggtggccgtcttcaggttccggcgggtgaggatgatgaggtcgtcggcggcgacgggtggtcgccgccggtgcggcggagggggaggaggacggtggccggagaagggggagggggaggattccggcggcgatcgggggatgctgctgcagaagtatctcgaggatcagatggagctcgtcggagagttcgccgccgatccaccaccggtagaatcgtagccagaaagggaaaaaaaatctctctctttttctttttttggggttctttttgggaaatctgtagcttgtaaatggtgataggaagagatctgagcttgcaggaacatgagaaattaatttaaaaagcaattaaattagaaattaggagtccaattcgagcaaattttgttgctgatttgcggtttcttgctcttgttgatttgtaattaattaattgtacatgaaactgaactgcttgtatgatgagtgattgtagcagattaattgattgc

SEQ ID NO: 9549 - DNA, 222 bp, Oryza sativa
  Clone ID: PAT_MRT4530_15956C.1
atggtgatggaccgatggacgtacaggggctatagcatccacgccggcgatttcgccgaggacaacatggaaggagaggcctgcagacaccagcaagcgccgattcacccgcccagcaagcgccgattcacccaggcggtggcgatttcggcgcgctctgagggaaaggaagaggatgagagactgggagtgcggcggcggagagggaaggggagaagctga

SEQ ID NO: 9550 - DNA, 2322 bp, Oryza sativa
  Clone ID: PAT_MRT4530_15957C.1
atggagagcagcagcgaggaggagctggaggaggacttccctggccacgagtggatcaccccgcagtcctccatccgcgccgcctaccagtcgcagaccgagaagggcatcaggaaaatttgctctgagctactggagttgaaggatgctatcgaaaacttgtgcgggaatatgcagtcgaaataccacgctttcctcagaatatctgaggaggttgttgaggcagaacaagaattaattgagttgcagaagcatgtgtctgcccaggggattcttgtgcaagatctaatgagcggtgtgtgccgtgaactcgaaatgtggcaaaaacattgcaaggatgaacatgtggaagagaaagaccttcaaacagaacttgatgaaattttgtcatatgatacccaagattccaaggttagttttctggataaattagatactttgctcgcggagcacaaaatagaggaggcattgcttgctttggaaaccgaagagaagaaatgtatggctacggatgatcctggcaaagaattagatgcagagatttctacctataagacagcactatctaaaaggaaatcaattcttgaggatcagcttgttaggtattcagaacagccttctttatctattaccgagctaaggaaatctttgtctggccttattaagattggcaaaggttctctagcccaccaagtacttctaaaagcttatgggtcacgtcttcagaaaaatgttgaagcatttcttccaacatgttcgatctacacagaaacttactctgcaactttgtcaaagattgttttctcagctatctcaaaggtatccaaagaatctagttcgctatttggggatagccccatgaatttgaaccggattattcagtgggctgaatatgaaatagaaacctttgcgcgtttggttaaggaaaattctcctttgcctgagagcgtatctgccctttgttctgcctgcatatgcatccaaactagtctcactcactgctcttatctagaatcatatggcctgaaattctcaaatttactaatggtactattgcacccctatgttgaagaagtgcttgagctgaattttagaaggctgagaagaaagattgtagattcagcaaaaaatgatgatattctgcttcccagccctcaagaaggatcacggctctctagttcagttgcaccaaatataatgcttacaagcagtggaaagaagttcatgtccattgtcaatgatgttttggatcaaattaccccaatgactatagttcactttggaggaacgattttgaataaatttgtccagctatttgataaatatgttgaagcactaattgaagtcttaccaggagcttctgaggatgatcatctagtggagtcaaaagagcctatagaatttaaagcagagagtgatgcccagcagattcaactcattggaacagcatacactgtagcagatgaattattgccagcagctgtatccaaattttttgatatccaaaccgagaagaagagaattggtggaacaggcgagggccttggctctggatctatatactccatagaatacaaagagtggaaacgtagtctgcaacattcactggacaaactgagggatcatttttgcctacagtatgtcttatcatttatttacttagaagggaaatcacgactggatgctagaatgtacttggagctgaaaactgatgatcttctttgggagtgtgatccttcaccttctctgcctttccaggcgctgtttgtaaagttacggcagctagctagtgttgctggtgatgtcttactgggtaaagagaagatacagaaggtcttgctctcaaggctaactgaaacggttgtcatgtggctctccaatgaacaggaattctgggatgttttcgaggatcaatccatccaactccggccttcaggactacagcagcttattcttgatatgcacttcgtcgttgagattgctgtctgtggacggtatccacacagacctgttcagcagcttgtgtcggtaatcataactagggcaatcgcagctttctcagtgagaaatgttgacccacaaagttctctacccgaggatgaatggttcctcgacatggccaaggttgcaattaataagcaattagggacttcaggatctgagtccgagcttgaggagcctgtggttgtacatgatgaaatctcggattctgaagagagtagtatttcaagtccatcgacgataggatctgaagattcatttgcttctgcaaacaatgatgatctagaaactcctgtatatttcacggatcccgaggcataa

SEQ ID NO: 9551 - DNA, 1359 bp, Oryza sativa
  Clone ID: PAT_MRT4530_15958C.1
atgggcgacggcgaggtcgagagagccggcatggaaacagacggcggaggagaggatcgcatcagcgcgctcccagacgatctcctctgctccatcctcctccgcctcggctccacccccgccgccggccagaccagcctcctctcccgccgctggcgccgcctcccctccaagctccccaggctgctcttccccttcccctccaccccgccctgcgtcggccccgggatcgccgccaacaccgccccggtccttcgccacgtcgacgtcgtctgctgcgactcccccgccggagccaccgccacctggctccacctcctcgcgccccgcctcgcccacgacggcgtcgtctacttcaggaacaccatgtcccggaggcgcctcatggcccctcaccgcggccttggcctcgcctccccctccccgaccttcgagctcccctgcttcgccaccgccgccaagctgtggctccgcctcgagttcctcaacctggagctcccccgatccggcgtcttcgcccacctcaccgagatgttcctggagcacgtcgacttcaaccacaggggcaggggcgacttcggccacaccttctccacgccgcgctgcccgctgctgcgccgcctgcgaatcgccatgtgcaccgggattgacaccatgggcatctactccgactccctccaccatttcgagctcgagttcgtccccggattgatggagctcacgctcatggcgcccggcctcaggacgctcgaactgctatcctgcttctactacatccaggagtggaattgctcgatccatgccccggatctggagtctcttcgatggggcgatcggtttaatataggttctgtgcggttcgtcggcttcgcgcgcctccagcagctcgccgccttcaccattcctgtctttggtcggccggacaacacaatcattcaggaattcgcgttgctcttggggcgcttctcggctgtctaccgtctagacctcctgctcagctatgaaagagcgaatagtccttgccattcgaattgcgagtgtgatgagcacccagactggaatgaatgggaagccatcgtgcatggtctcgaggaagcagaaattcgcagcttcagaggaacagagcatgattttaactttgtggcgctactgttcctggtgtcaccagcgcttaaaaaaatgacgataactttagattgtatggctgatgcaagtgaggaatcatgccagaagctacgcgagattgtagcaggccaccctggggcttgccttgaaatacaccagaatacgagtggggtgttctatgaatttcggcaaagcaatttcaccaagacacctgatgatcattattatggttag

SEQ ID NO: 9552 - DNA, 769 bp, Oryza sativa
  Clone ID: PAT_MRT4530_15959C.1
atggcggcggcggcggcagtgtgtggaaccgagagggtcgccgaggtgtccgcgtcggcgtcggcggcggcctttgtggccttctctgccgccgcggcggagagattcctggctgtgctcgcgctcgcgatggaagcggtaaatggtggagcagatatatttaatgaggaccaacatgcaatctacaagctactcggcagaatcaaatctgaatctacccctgagaacaaggatgggtcagatgatgacgacgacgatgatgaagatgacgacgaggatgatgaaggtggtgatgatgatgatgccgaggaggacttctctggcgatgaagggggtgaggatgaagatgatgatgatgatgaccctgaggcaaatggtgacggaggcagcgatgatgaagatgatgatgacgacgatggtggtgacgaagatggtgaggatgatgatgatgaggatgatgatgatgaggaagatgatgatgacgaggaccagccgccttccaagaagaagaaatgagctagcctccttcatcctgcatctgcctcctcaacttgtttcagtctgttgtgctgtttagatgatggaacaggttatgggacctatgtagcttatggtttgggttgtttgggtctctcataggagtaggaaaacatttgacatctgatgttaagccgttctcttgtgttttgcctttgtgcatgtagacgtaaaatgctgcggtgtgttatttattggagatctgattctgtcatgcaaaaaaaaaaaaaaa

SEQ ID NO: 9553 - DNA, 4135 bp, Oryza sativa
  Clone ID: PAT_MRT4530_1595C.1
tcaagccacattagagaagtctatgacaattaactcattcctcaacttgcaaaagcgggtttcatcaagaggcttggtaaagatgtcagctagttgatccttggttcttatgtggctaatgactatgtcacacttggcaacatggtctcttaggaagtgatggcgtattgtcaatatgcttggatctagaatgttggaccgggttattggctatctttatggcactatcattgtcacataggagtggggttttggtgaaggatatgccataatccaacaagatttgtttcatccaaagcaactgggcacaacaactacccgccgaaacatattccgcctcggcggtagagagggctacggagttttgtttcttggatgaccatgacacaagggatctaccaagcatttggaaactacaggatgtgctctttctatccactttgcaaccggcataatccgaatcggaatagccaacaagcttaaatttagcaccttttgggtaccacaagccaatagtagaggaatgctttaaatatcttagaatccttttcacggccactaagtgacactccttaggagcggcttgaaaccgtgcacacatgcaaacactaaacatgatatctggcctagatgcggtaaggtaaagcaagctaacaatcatagaacgataaagctttaaatctactggtttacctccctcatcaaggtcgagatgcccgttggttgccatatgtgtcttgatgggtttcgcatcctccaagccaaacctcttgagtagatccttaatgtacttggtttggctcacgaacgtcccatcctggagttgcttgatttgaagtccaaggaagaagctcaactctccaatcatggacatatcaaattccctagacatcatatcaccaaattccttgcaaaatacttcattagtagaaccgaatatgatgtcatcaacataaatttggcacacaaagaaatcatcaccaatgatttttgtgaaaagagtggtgtcaacttttccaattttgaaatcatttagaaaagcacttttcacatccatttgaaatagttttatgtcaaaacatgatgcaaatgcaagaaggatgagaatagccttaagtcttgctacgggggcaaaagtttcaccaaagtccaaaccttcaacttgtgtgaaaccttgtgccaccaaccttgccttgtttcttaccaccaacccgttctcatcttgtttgttcctaaagacccactttgtccctatgacattgtggtctctaggtctttcaaccaaagtccaaaccttgtttcttgcaaagttgttgagctcttcatgcatagcattcatccaatcaagatcacaaagagcttcatctacatgttttggctcaagacaagaaacaaacgagtaatgttcacaaatcgaagcgacacgagatcgagtttgaacacccttactaatgtcacccaacacttggtcaattgggtgatccttggaaagagcggtgtgtattcttggtggaataggtggatcttgtgccttctcctcctccacttcaacttgagcttgacttggcgtagcggaagtagatgacttatcttgagtggaggtggatggcttgtcttccacttcaataggcttgacatctccaattgacatgttcttcatagctctcatcaagccttcatcacctacatcatccaaattctcgtgcccctcttgggagccattagtctcgtcaaattgaacatcggcggtttcttccacaatacctttattcttgttgtagacctggtatgccttgctatttgaggcataaccaagatcatcacaatagtcctcgatattggtattcttaaactcggaaccattgtcacttctaattttcacaagagtgcaactaaattcattttgggccctttttgcaaactttttgaaaagctcggcaacaatagacttatcatgcaaaaagaacacccaagtatagcgagaataatcatcaacaatcacaagacaatgactattaccaccaatgctcttataggttgttgggccaaacaaatccatatgcaagagctccaatggtctagatgtggacatgatactctgagtaggatgagaacatgcaacttgcttgccggcttgacaagcactacaaagcttatctttctcaaacttcacatcttttaagtccacaactagatcacgttttgaaagtttgctcaattgattcataccaacatgggctagccttctatgccaaagccaacccaaagaagtttttgcaactaaacaagttttcaaatttgcttcactagaattgaaatcaaccaaataaagatttccatatctaaaacctttgaacacacaagacttgtcaagaaggctagaaacaataacttcttgcggtaagaaagcacatgacaagccaagatcacaaattcgagcaaccgaaagcaaattgaaatttagagatttaacaagagagacattatcaattgacaaatcattggagatagcaattttacctaacccaattacctttcctttgctattgtctccaaatgtcactttctcttgtttattccctcctacttcaaatgtggtgaacatagccctatcaccggtcatgtgttgagtgcatccactatcaaacacccaatggctcccaccggtgcggtagttcaccaccgagtataggggaacccacatatctagcaacaatgctaccatcatgagccttccattgctcttgacaaaacgagtggcacagtgagaaggtttcttacccttctttggaatgaatccaagtccctccttgttaaggatgcaccgttgctcactcaaaatcttgtcaagagtgttcttatccttgaagcacctctccaagctcttgttgagcttagccacttgctctttaagctcattgttctcaacaacaagtgaggcatcacaaatagaaacacaagaggtagagctagagctagacatatccacaagatcatcacaagaggtagaaatgctagatgatgcaacatgagcaatatggcaagtagcactatcaccaagcaaatcacaagatatgccaacatcaatgagagctccatgttgagtagtggaaatgaggttgtcttgagcttccttaagcttctcatgagaaatggtgagtctctcatgagaagtctttagctcctcatacaagacctccaaagaagcatgatccttctttagggccttgaacttgacaatctccttctcactataagcatagagctcctcaaacatactcacaagctcatcataggaaacatcatcacaatcatcatcactctcactatcactaagagatgttaccttagaagagccctttgccatgagacaaagtggagcgaagagtgatggagcctccttgatggcaacaacggccatcttcttcttcttggagcttgtatcatcaccatcttcttcctcggacccggatgaggcggagttcttgagctttttcatgagcttgtagcctccactcttcttcttggatgacttgtctccatcatcatccttggaagggcactttaaagcaaagtgtcccttctcaccacactcaaagcacctcaagttggagagagtcttgttgggtcttctatttcttctcctattggagttggagccccttcctctctcctttctccttcccaagagatcattgaaccttctagcaagaagggcaatctcttcctccaagttctcattggcttcattcaccttgccattgcccttgtcttcaacttcggcttggcgagcaatgcacttcttggaaggtgaggtttcctccatctccttcttcttcaacttgtacatgtcattggtgttgatcttccccaagaggcttgccggtgtcatccttgacatgtcggagttgatgagcatggtgacaagggtctcatacttctccggtagagccctaagcatcttttgggcaacctcaagatcggtgtagtttgccccaagccccttgagatcatccacaatgacattgagcctcccatacatgtcattcacactcatgaggcaacatggagaatgtctcatattggatcttgaggaagtgaagcttggcatccttgtactcacttgtgccctcat

SEQ ID NO: 9554 - DNA, 750 bp, Oryza sativa
  Clone ID: PAT_MRT4530_15960C.1
atgtttgaggggtgctacggcggagtcgggtcggcggcggcggcggcggcgcgggacccgaagccgcggctgcggtggacgccggacctccacgagcgcttcgtcgacgccgtcaccaggctcggcggcccggacaaagcaacacccaagtcggtgctcagattaatgggcatgaaaggcctcaccctgtaccatctaaaaagccacctccagaaatatagactgggaaggcaaagcaagaaatcagcaggcctggagctagcagtagcagatagtggtgatgcgctaaagtatcaagtcgaagtccaaagaaaactgcaagaacaacttgaggttcaaaagaagctgcagatgcgaatagaagcccaagggaggtatttaaaggaaatactagagaaagctcagaaaaacatttccctggatgcaaatgggtctgctaacctctcatcaaccagatcacagattacagacatcaacctagctctttcaggtttcatggacaatgcaacacaagttcaggaggaaaacaatgaactgatgaaacctatatctgatgacaacctaaaagttaataatttgggctttcagctctaccatttaggaagtcaggagagtaaggatgttaagtgcactccaaaaactgaagagttgcttctactagacttgaatattcaaggaggatatgaactctcttctagaggaatgcaagggtgtgagttggatctgaagatcaaccagcagagaagatag

SEQ ID NO: 9555 - DNA, 774 bp, Oryza sativa
  Clone ID: PAT_MRT4530_15961C.1
atggcggcctggcgcagggcggtggtgggggaaggagagaggagaaaggtgcggcgccaatggggaagaggaggcctcggtgcggcagcgctcggcacggcgtcgctcggcgcttggcgtggtggcgcttcgctcggcggcacggaggccggcgcgtcggcgaccggccatgtgcaggcggctgaatcaatggccggggacgacgcatccgcatcggcggccgtccatgcgcagtcggttgcatcgacggccggggacggcgcatctgcgagggcggccaagggcagggcattcgtgtcggcggtgaggtccaacgtggcggcggtagcagcgcctaatcctccgcctaatctcgccggccaccttgccgctgtccgccgtcaggtctgcccagccgggtaccacctcgccgtcatcaagctgtcccacctcgtcggagctcgctgttcctcgctcgtcagtggacctagccgggtggtgcggggtcccgcccacccgccggggcccctgcgggggcgaggacgggggatgttttccacccgaccacctctgcggggccggggccgggcgaagaagtcggggagcgggggcgggggcgttctagcccaacccgtccccgacccgccctgttgccaaccctacccgcgggactgcgatttagggactcatgttttcgcttatgcttatacttatcagccaaaatttgaattttttactttaaatttggagttgattttgaggttttttcgtcgaagtttatttattagcatttga

SEQ ID NO: 9556 - DNA, 1596 bp, Oryza sativa
  Clone ID: PAT_MRT4530_15962C.1
atggacatcgaggcgccgaacagcgaggtggcggccggcgggaggcggccagctgctgatcattggcgctccgcgatggacgcgctgatctgcaattgcctgcgcccaccgccgcaaccctctccggcagatcttgccatcctcaagctcatggcggacgactggcccatggaaaagttgaagctggctgaccagcagggaactccatgctatgaggagggtgttggtgttcaaatctgtgataggttccacacccacgtcacaaatgatacaagtgacaacgagatacaagtgacgccggtaaaagtgaccatttgttctgaaggaggcgataactacagatgccgtcttttcggtgtccccgagcatatcagcagaacagacagagcagagcacgagccgagctacatttccatcggaccctatcactgtcgtagagaggggctgcatgtcaggtcgaaccagtggaaaagggattgcaagaaacatgtgattgaccgcttggaatctccaaaaggggaggctagcttacttgaagcgatgaaggagattgaaggtgaagtgaggaagtactacgatgaaataatctcgtcccatgtcctccacgaaagcggcataactttccgtgaaatgatggtgaatgacggatgcttcctactaatcaccctacaaggtttgcaagtgccaggcacagatgggatcgtgtgggataaccagttgtggtggcatgacatcttcctctacggaaaccagctccccttcgttgttttgaggaaaatctaccagcagcttaacctcccggccgatattgaaaacggccaagaagactgtcccctagggaggatcagcaaggtcatcgagtctgggctgacaagctacaccaataggacggtgagcaacccaggcaacgccgaccatatcctgcacctgtgccacgagctgctcaagccaactagctcggcggaaatgccgccgccgccggccagcgataaccagcaggtgcgtgtgtggcgccgggcaacggagtacagcgagctgctggtggagttcaagaagagagaattcggcagcgagcccggcgacgcgcagtgcatctcggacgttaggatcgtcggccgtgtggtggagatacccaagctggagctgcagccggagacgtggaggctgctccggaacctgatgctgctggaggagacgaacaagcagctcggcggccatgtcaccgcttactgcaccttcatatcgcagctggcctccacccccgcggacgtcggcctgctcacgaagaagggcatcctcgtgcacttggagaatagcgacgagatggccgccaagaagctaagcatgctgtgcgagcagatcgattatgctacggaggactacctgatcaagtcagtgtggtacaagctggatagccactgcagcagcaggtggtggctttggcgggcgaagctgcgccgctacagggactggaataacccgctcgtttggctgggcgtccttgctgccttcgtcttgttcctgtgcgccatattacaagcagcctacagcatgttagcctattacaagcagggttcacaatctcggagtacttaa

SEQ ID NO: 9557 - DNA, 579 bp, Oryza sativa
  Clone ID: PAT_MRT4530_15963C.1
gcacgaggaacgctccatatgcatgtgccaggacaaggtactgtactgctcctactatatctttgatgcatattgactcttttttcttgatttgttgatttctaattgaagctttattatttcgctgtggtgttgcctgtcaacattatagtataatttggggtctggatctgcattttagtgatttcaacatgcatatttgcttataaaaggatagtatatttaacataaggaatttaataatgggtgaaatcactggtaatttcgtgtcctttgtattttgtttacatgtcaggactttgccaattccgaatcactggtaaaccatgtttttagaaacactcaacattgttacaactgcatataatgctacacttttcgtgcagtttaaaaacaacagggcaatcattattcatgcatttttgaaacaacattggatagatgatgtttggcatgacctatcaatggggttcttaacggaatatttcgggatttgacgctgcttgctagaaggggtgacactcaccaaaggaactcatggcgatggtcagaattaggcatctacaattctacatggca

SEQ ID NO: 9558 - DNA, 279 bp, Oryza sativa
  Clone ID: PAT_MRT4530_15964C.1
ggggttctcccccatttacttttcaaccaccagttttaaagcgcccttatacctcagcaccgaggatggaggacagcgccacaggaagatccagacaggactagacgggagacacttccggaagtgctgccacgcccctggggcgtgcctctgagctgaccgtcaccacgaccgctcggcctgagcgacaccgtccatgggggcgtctacggcaatggtttccggggactcgacgcggttcgcgaactggcaagtgaccacgacacaacccgcctggcg

SEQ ID NO: 9559 - DNA, 978 bp, Oryza sativa
  Clone ID: PAT_MRT4530_15965C.1
ctacaagctggtgcacagagatggtgaagatcttggtagatatggggccacgacgaagagtgcaccctcggcattgcactcaatcttgggcctactgccgccatctacatggagacgacctgccagtgggtagaaggccaccagggccctagccatagcctccttgatccttcctacctcaaaaaagtcggtgttgccgctggcagcaacaacatcacgtcggtagaagtaaacattaggggtatggcctctgttggccaggacgatgtcgaggggagagagccagagcccttgtctaggcgtgtcctcactgggtgctataaaacatgactcaatctcctctaccccttctatctctgacttcagtgccttgtccatgagcagaaagattgacttgcttgcaattcggctacttctcgcagcactccacatgcagttgagctcttggtcttcatgaacgttgtttgctccattctcgcaccaccgcatcacacggcatgtcggcatctcgccaatgagctggagccaaactaaatatgcagtgacatatacaggattggggccctcgtttgggctgggcccttggccgtcgcccttatggccctgctctagagatggcactgcgtccacaccttcaccaaattcggcaagcagcggagctccctcctcgccgtcaacccgagacagccacctctccatctccgtcgtcgtcatctcctcgctgcctgaagaccccaaaacgtcgctcccatcaccattgtctccctccggccgttgttcctgccaagacgaactgctgcccatcatcgtcgtcaagtccgcagcaccgagtcctttgtcatccacctcctcgtcaagcccgaagatcaccagagccgccttctcgccgtcaatccaaagcatcgtcgctatcttgagctcactgccatcaaaacctcgtcgccaatccctctgtctccgcttcgtcgtcatcttcat

SEQ ID NO: 9560 - DNA, 205 bp, Oryza sativa
  Clone ID: PAT_MRT4530_15966C.1
tggaattctgctcctaccggcttatcgagttaattacatgtaagcgataactacacaattgcatacatagttccaaaaaacatcctccccttgtgcgaccaaatgtcatgaccccggtttcatttccactcttatctatcagtttcactacaacacccagggcaagccctgaacacttactatacccaaataaatttaacacgtt

SEQ ID NO: 9561 - DNA, 567 bp, Oryza sativa
  Clone ID: PAT_MRT4530_15967C.1
cccccgggctgcaggaatcggcacgaggctaacatgcctgtatatacagaactatcatgtgtttactcaactgggaacacatgagtattggatcgtcaaatgcgattcacagagtattggatagtgcaatggataatcatatcttcaaattcatgaatcatatagagacaaaagaataaaattatgacaaatttatagccttttatatatgttacccttacgatttattcactgtttaagaatggaccgaggcatatatcctcttcaaatagcaagctttcaagggatctgtttgtcaatatgaaatcaaagaagaaacaatctttgttggataagatgacaagcaaaaggaatctcttcatatcattggacgatgacaagcaaaatgaagggtttcggcttcaaggtttaagttgtgactacctactcgtataattgttggatgtcatacttagagtgttatagatttcagattattgtcatagaacaaattaaatttcgtttacctcctttgtatttcaagatttgtgaatatgccttctcctttatttatgaggccgtgcaaac

SEQ ID NO: 9562 - DNA, 1164 bp, Oryza sativa
  Clone ID: PAT_MRT4530_15968C.1
atgtcgtcgttcgcgcaccaccaccatggctcgctggtggagaaggacgggaggatgtccgcgctgaggagtagccttaggccgtacgaggcggccgaggagatggccgcggcggcggccgccggcgggccggcggcggcgtggggggcggtggagaggggggcagggatgatgggggacgggttctcggtggaggacttgctggaccttgaggagctctgtgaggtggacagggacggcggcgagcaaggcgaggcggcggcggcggcggcggccgccgtggagaaggagaggtctagtgactcccatggctcatcggtggtgtcgtatgagcccatgccgctgctgccgccggtgatggacctgccggcgcatgacgtggaggagcttgagtgggtgtcccgtatcatggacgactcgctcgccgagctcccgctgccgcagctccccgcggcggcggcggcgttggcggcgtgcggcaagccgcagcaccggcggccgcacgaaggcgcggcgtcggcgttgttggaccctatgcgcaccccgaccatttgcgcgctgtcgacggaggcgctggtgccggtgaagtcgcggcggagcaagcggtcgcgtgcctccgtgtggtcgctctccggcgcgcccctgtccgactcgacgtcgtcgtcgtccaccgcgacaacctcgtcctgctcgtcgtcggcctccttctcgccgttcctccagtacgtggacttccccgcgctagtcgcctccgacctgctcgacgagcagccgcgctccaagaagtccaagcacggcaagaacggcaagcagaagcccaagaagcgcgggcgcaagccgaagcaccagcagccgccgcacctcgccgccgccgccggcggcggcgccgccctccccgccacgggcgaccgccgctgcagccactgcggcgtccagaagacgccccagtggcgcgccggccccgagggcgccaagacgctctgcaacgcctgcggcgtccgctacaagtcgggccgcctcctcccggagtaccggccggcctgcagcccgacgttcgtcagcagcctgcactccaactcccaccgcaaggtgctcgagatgcgccgcaagaaggagacccccgtcatcgtggcggccgccgcgccggccgtcgcctctttctag

SEQ ID NO: 9563 - DNA, 222 bp, Oryza sativa
  Clone ID: PAT_MRT4530_15969C.1
atggactttatcgcctaccagcttggccagagagaggagaagaagatgggccgagtagggaggagcagccttatctcccgaccgattgaggtcgagtcgtacctcaaccatttgatgtcgtggtgcaagcaccgctacgctattgccgttgtcgtacctcgaccgttggaagttaaggcgcgagagatcgcttcgtcatactggttcgagaaccaggagtag

SEQ ID NO: 9564 - DNA, 1189 bp, Oryza sativa
  Clone ID: PAT_MRT4530_1596C.1
ggaaagggtcctccggccgatgcgcagattcctcatcagtacgcctttctctcggaggagaggggaaaggaaggcggaggcggggaggatggcgcggagcgtgtcgtacgtgtcggcggcgaagctcctggccatggcgcgcggcaacccccgcgtcgccatcatcgacgtcagggacgaggagaggagctaccaggcgcacatcggggggtcgcaccacttctccagccgcagcttcgcggcgcggctgccggagctcgcgcgtgccaccggcgacaaggacaccgtcgtcttccactgcgccctcagcaaggtgcgaggtccatcgtgtgccaagatgttctccgactatctatctgagaccaaggaagaatcaggaacaaagaacatcatggtgctggaacgtgggttcaatggatgggagctttcgggacaacccgtttgccggtgcactgatgccccttgcaaaggcacatgctcacctgaagaacctgagttgtaactctactcgcttcctgaatgatcagcaatgttggcagtcgatctccaatgctgaatttggtctattttgcctcatgagatcattcgtcacagtgtattggactgaaatgccactttgtggacaatttcatcagatatagcataagttaactaccccactgtagtgtcaggcacaccacggggtactgaattattactgattactaaaaactctttacatcttggctgaagaacctgaaatgtaaatctactcgctacctgaatgatcagcaatgttggcagtcgatctccaatgctgaatttggtctattttgcctcatgagatcattcgtcacagtgtattggactgaaatgccactttgtggacaatttcatcagatatagcataagttaactaccccactgtagtgtcaggcacaccacggggtactgaattattactgattactaaaaactctttacatcttggctgaagaaatgttcagcttcttcaaaaaaaaaaaaatacatataacatttaaccaaactacaaaaaccaaaaacaaccaaaaataaacacactacacaatcaaaaaaatttataacaccgcaccacaataacaacacggggggggcccgttttaaagaatcccaaattttctcccccctgtctttggaaagataaaaatcttttttttttgggggcccc

SEQ ID NO: 9565 - DNA, 4653 bp, Oryza sativa
  Clone ID: PAT_MRT4530_15970C.1
atggttggtaatctgcccccagttcaccctcatgctggatcacgggcagtccatgagtatcaatttcttcctgaacagccaagtgataggtatgagggtgcaagcagatctcatgagggagcaagcagatctcattattatgacactccagttgaagcatcgaattcgaggatgtcatcgcataccccgggatcacatcttctccgtggatctgatgaggcagcacctggttatgctttccaaggtcaaatgtctggttctggccatttgcctcaatcaggcaggcgtgaggtgcttccagcagtaccaacagattacgagatgattcagtccaatagcgaccttaattctgttccagtcgaaggccagtatggtatttctcaggttgctggaattgaaaactcacttctaccgtctgaaagaagagcctatcatgatgaagacggctctcgagtggatagaaagcgaaaacacaatgaggaagcaaaaattgcaaaggaagttgaagctcatgaaagacgaattaggaaggagcttgaaaaacaagacatgatgaagagaaagagagaggaacagatgcgcaaggagatggagagacatgatcgtgagagaagaaaagaagaggagagattgctgcgtgagaggcagagagaacaagagaggttcctaagagagcaaaggcgtgaacatgagcgtatggagaagtttatgcagaagcaatctagacgagcagagaagcaaaggcaaaaggaggagctccgaaaggagaaagaggctgcaaggcaaaaggctgccaatgaaagagccacagcacgcagaattgcacgggaatacatggaacttgtggaagatgagtgcttagaactaatggaattggctgcacagagcaaagggttgccatccatgcttagtcttgatagtgacacattgcagcagcttgattcctttagaggcatgttgactccattcccccctgaaccggtgagactgaaggagccattttcgataaagccttggacagtatctgaggataatgttgggaaccttctgatgatggataaacaaatagacctttttgatacattagcatcacttcatcaggtgtggaaattctcgattacttttgctgatgttctcgggctttcttcagttacatttgatgaatttgttcagtctcttcatgattatgattcaaggttgttgggggaactgcacattgctctgctgaaatccatcataaaggatattgaggatgtctcccgaacaccatcagttgcattagcggtgaatccagcaggtggtcatccacaaattgttgaaggggcatacgcttgggggttcaatatacgaagctggcaacgccacctgaatgttcttacttggcctgagatattacgacaatttgctttatctgctggttttgggcctcagttaaagaaaaggaacgctgaagatgtttattatcgagatgataatgagggtcatgatggtcaggacgtcatatccaccctccgaaatggttcagcagctgtgcatgctgctgctttgatgaaagaaagaggctacacccatcgccgtagatctcggcaccgtctcactcctggtaccgtaaaatttgctgctttccatgtgctgtcccttgaaggaagtaaaggtctcacgatattggaagttgcagaaagaatccagaaatctggattgagagacctcacaacaagcaagacgcctgaggcatctatagctgctgccttgtcaagggatacaaaactttttgagcgaactgctccttcaacatactgtgtcaagtccccttatagaaaagatccagctgattctgaggttgtgctgtcatcagcacgtgaaaaaattagggcttttcagaatgtgatttctgactctgaagctgaaaaggaggctaatgatgccgagagggatgaggattctgaatgtgatgatgctgatgatgatcctgatggtgatgatgtgaatattgatgtaggagatggcaaggatccccttattggtgttaaagaacaggatggagtaccgattacaactatagtagatagcacaaagagggaaaaagaaaaagtggatgcattaacccaatcgagtgatcttactacatctggaaaagaggctcccaagccttctttaggcaagcccagttcagcaaatacttctagtgattcacctgtcagagcctcatcagagtaccatgaagtacctcctactgatgctgaagataaggagattgatgaaagtaaccaaggtgaatcttgggtccacggattagcagaaggtgactattgtgatcttagtgtcgaagaacgcctcaatgccctggttgcacttgttagtgttgccaatgaaggaaactttattcgtgctgtgctggaggaacgtctggaatcagcaaatgccttaaaaaaacaaatgctggcagaggcacaacttgataagaggcgttccaaggaagagtttgctggcagagtgcaatataattccaacatgaatttgaaggctgatgtaaatcaagaaaatgctactgagagtactccaactccatttcataatgttgataaacataatgatggaaatacaggggttgtggataataataataatgagataattgaccataacagtaatgcagctaatgcatcttatgagaggaatggtttagggcaggacatagctgcaacaccagatactttgtcagttcagcagtatgcttatgctgataaaacacggtctcagttgagagcatacattggtcatagagcagagcagctctttgtttatagatcgctgcccctaggacaggatcggagacgaaaccgatattggcagttttcaacttctgcatcaccaaatgaccctggttcaggacgaattttttttgagtgcagagatggatactggagggttcttgacacagaggaggcatttgattcattagtagcttcccttgatacacgtggcagcagggaagcacaattgcattcaatgctacaaaggatcgaaccaacctttaaggaggctattaagaggaaaaagagtgcagttgtagaacaatccgctggaaggtatctaaagaatggagctacggaaatgattagggcaagttatcgtagtgattttggaagcccaagcagtaatctttctggtgtcacttctgatagtgctatagcatattcagattctttcaaaatagagcttgggcgtaatgatgttgagaagactgctatttcaaaaagggcagatgtctttataagatggatgtggagggaatgcaatgattgcaaattgacatgtgccatggagtatggcaagaaaagatgctctgagttgatgcattcttgtaattactgctatcagatttacttggctgaagaaaggcactgctcttcttgccacaagaattttaaatctattcacaatttttctgaccacgcatcacaatgcaaggataagctaagaactgatcataactggaagatgcaaactgcagatcattctgttcctataggagtgagattgctcaaattgcagttatcaaccattgaggcttctattccaccagaagcaattcaaccattttggactgatggttatcgaaaatcttggggtgtgaagttgcactctacaacttcgttggaggaaatatttcagatgttgacactgctggaagccgcaataaaacgggaccacctatcttcagaatttgaaacaacatctgagttgcttaacttgaacacacaagataatccatcccagaatcatgttggattgtctggatctgctgctgtacttccatgggttcctgacactactgctgcgattgcactacgaatgttagacctagactcagcagtatcatacatgcaaaatcaaaagatggagagaaatggtggagatttcatgaagcctccatcaaggtttgtggctgttaagaatgcacaagaattagatccactggaaacaaccggtttagacctttttgatggaaggtgggctactggtagtggccgtaggggtcgtggacgaggaagtagagggggtagcaggggaggcagaggccgaagtcgaggtggaagggtcccaagaggtattagcatctcatctaggattggatttaaggatgaaaatgaagcctcaaggaagaacactcgtcgagggcgtactcgtggccgtggtcgtgggcgaggacgtcgaactgttaggtcacggcaaccatctgagggcaaaggcagatcaattcccaaggaaaatttgttggggagctttagcatgcttagcaatgcaaaggctgccactgttgaggagtctccaaggagctcaggtgctgatgaatggggcttggagaacagaaggccatatattgatggtgatgagaacagttctggatctcagccccatggcatgatagatgatgatgtgagcgaagaagaggatgaagatgtggagggcgatgatgatggggaggaagatgatgcggaccgtgcagttgatgatgttgatgctgagatggacgaggatgatgatataggtgatgatggtgaggatggtggtgacggtggtgacggtgtggaggcgaatgctgatgaagatgaaggcggttcctcgtattcatcggagtacagcgactaa

SEQ ID NO: 9566 - DNA, 1479 bp, Oryza sativa
  Clone ID: PAT_MRT4530_15971C.1
atggcggcggcgggactaaaccatggtggtgcctcgccttcagcgcgaggaaagtggcttgagtcggtatgtgggaaatatttgcaaccccccttaaagtttagcagtgatcgcacgcatatggcggtcggcttggtgctagcgccttcttttgggttgtgtgaggagctgccagcgtgcggtgctgcgaccattccgtcatcctcagatggaacgagctcggtgacgttgagccaccggtacggcccatgctcgccggcggatcccaactccggcgagaagaggccaaccgacgaggagctgctccgccgtgaccagctccgagctgactacatccgacgcaagttctccggcagcaacggcacggccgccggcgaggacggccagtcgtccaaggtgtccgtgccgaccacgctgggctcctccctggacacgctggagtacgtcatctccgtcgggctcggctcgccggcggtgacgcagagggtggtcatcgacaccggcagcgacgtgtcgtgggtgcagtgcgagccgtgccccgccccgtcgccgtgccacgcccacgccggcgcgctgttcgacccggccgcgtcgagcacgtacgcggcgttcaactgcagcgccgccgcgtgcgcgcagctcggcgacagcggcgaggccaacggctgcgacgccaagtcgcggtgccagtacatcgtcaagtacggcgacggctcgaacacaaccgggacgtacagctccgacgtgctgacgctgtccggctccgacgtcgtcaggggcttccagttcgggtgcagccacgccgagctgggcgccggcatggacgacaagaccgacggcctcatcggcctcggcggcgacgcgcagtcgccggtgtcgcagacggcggcgaggtacggcaagtccttcttctactgcctcccggcgacgccggcctcgtcggggttcctcacgctgggcgcgccggcgagcggcggcggcggcggcgcgtcgcggttcgcgacgacgccgatgctcaggagcaagaaggtcccgacgtactacttcgcggccctggaggacatcgccgtgggcgggaagaagctcgggctgtcgccgtcggtgttcgccgccgggtcgctggtggactccggcacggtgatcacgcggctgccgccggcggcgtacgcggcgctgtcgtcggcgttccgagccgggatgacgcggtacgcgagggcggagcccctgggcattctcgacacgtgcttcaacttcaccggcctggacaaggtcagcataccgaccgtcgcgctggtgttcgccggcggcgccgtcgtcgacctcgacgcgcacggcatcgtgtccggcggctgcctcgcgttcgcgcccacccgcgacgacaaggccttcggcaccatcggcaacgtgcagcagcgcacgttcgaggtcctgtacgacgtcggcggcggcgtcttcggcttccgcgtcggcgcttgctga

SEQ ID NO: 9567 - DNA, 195 bp, Oryza sativa
  Clone ID: PAT_MRT4530_15972C.1
atggatgacgcttcgagcaatgcagtccccatcctagcgctcctcaggctccccgccactactcccacagcccatgggccaatagacgaggagcaacacgatgtggtcaccgtccatggggaagaggaaagcaacacgatgtgttgtggcatggagaagcttagggtcgcccagcactacggtcggcgtggttga

SEQ ID NO: 9568 - DNA, 216 bp, Oryza sativa
  Clone ID: PAT_MRT4530_15973C.1
atggagtgggatctcaagatgccgccggcggcgagctgggagctagccgacgagctggagaacagcggcggcgggggtgtaccggcggcggtatcgtcgtcatcggctgcggttggtggcggcgtcaatgcggggggtggtggcaggcaggagtgctcggtcgacctcaagctcggcgggttgggggagttcggcggcggcggcgcgcagccgcgg

SEQ ID NO: 9569 - DNA, 546 bp, Oryza sativa
  Clone ID: PAT_MRT4530_15974C.1
cccaaaacttggaacttgggccttgaaattccccccgggggttttttcccccccttttctttatggggggttcggaaccaatcgggagggcgggccacctaaacccaaaaaaaaaaaaaaggggggggtaccatggactggggctccctataaaaaacaaaaatttacccggcctttttacccaggcccagggacccccccaccgggaaaaaacaaaaaccggggggggggcctggaatcccccactattttaacccccccccgccgtaccaaggcggccaggggggacccggggggcaaaaacccccccccggggggcccacgaggggcctgggaagccccaaaaatccccccggatttttggctccaatttggaccggccggggggggcgaccatcgacccagggatcgaccgaccgaccgaccccggtaaattttgggtttttgggcggccccctaaacgggaaaaaaaaacccccacccccctgacaggggtaagggaccaaaatagggggggaaggggcgccacgtcccgtaaataaaaac

SEQ ID NO: 9570 - DNA, 1800 bp, Oryza sativa
  unsure (1)..(1800): unsure at all n locations
  Clone ID: PAT_MRT4530_15975C.1
atggcggccgaggaagcccaccgcctcgccgacgccagcgccaccgcgccgcccaagaacgccgccgccgtcgatggcgtcgccgtggcggcgccggcggccggcggcgggcatgggagggcgccggggaacaagctgtcgctggtgccgctgatattcttgatcttcttcgaggtcgccggcgggccgtacggcgcggagccggcggtgcagtcggcggggcccctgttcgcgctgctcggcttcctcgtcttccccttcatctgggccgtcccggagtcgctcgtcaccgccgagctcgccacggcgatgcccgggaacggcgggttcgtgctctgggcggaccgcgcgttcgggcccttcgccggttcgctcatgggcacgtggaagtacgtctccggcgcgatcaacggcgccgcgttcccggcgctgtgcgccgactacgtcgcgcgcgtcgccccggccgtgtcgggcggcggcgcccgcgtcgccgccatcgtcgccttcaacgtcgcgatctcggtgctcaactacacgggcctcagcatcgtcgggtggaccgccgtggcgctcggcgtcgcgtcgctgtccccgttcgcgctcatgttcggcgccgcgctccccaagatccggccgcgccggtggcgcgccacggcggcggacaaggactggaagctcttcttcaacacgctcttctggaacctcaactactgggacagcgcgagcaccatggccggcgaggtggagcggcccgggaggacgttcccgcgggcgctgctctccgccgtcgccatgaccacgctcggctacctgctgccgctcttggccgccacgggcgccatcgacgcggcgcccgaggactggggcaacggcttcttcgccgacgccgcaggcatgatcgccgggggttggctcaagtactggatcgaggtgggcgccgtgctctccaccatcggcctctactcggcgacgctgagcagcgccgcgttccagctcctcggcatggcggacctgggcctcctcccgcgcgccttcgcgctccgggcgccggtgttcgacacgccctgggtcggcatcctcgccaccgccgccatcaccctcgccatgtcgttcaccagcttcgacaccatcgtcgcctccgccaacttcctctacagcctcggcatgctgctcgagttcgccgccttcgtccgcctccgcgccaggctccccgccatgcccaggccctacgccgtgccgctccggggcctgcccgccgccgccgccctctgcgccgtcccctcggcgttcctcgtcttcgtcatggccatcgccgggtggaaggtgtacgccatcagcgccgtcttcaccgccgccggcgtcgcggtgtactacctcatggacctctgcaaggccagagggtggctcacgttcagcgccgctgccgcagaccgcggaggcagcggcggcgacgcgatgatgtaccggcgtcaggggagcacggcgagcgaggtcgtctgatgaggggatcgatcgtcgtcgacgccattgattccggcgttgcattgcaagctgtatatgctttccgatgtttgtttatctgtgtgtgtgtgcgcgcttctttccttgtgcagaagagcataggaattgagtgatttgtaacagtcttaattagtcgtagatgctgatcaaatcaagaaatgggttgcatattactttcnaattagccaattgtacattcatgaaagtggtagaactaaagaagcatacataagctcnaagagaaattntcgacctcactaaaaaaaaaaaaaaaaaaaa

SEQ ID NO: 9571 - DNA, 1217 bp, Oryza sativa
  Clone ID: PAT_MRT4530_15976C.1
taacaatggagggtgtcggtggcggcaagcgccgcggggacgacggggcggaggccacgccgcggtggcgcttctcccggccgtcgtcgcagggcgggcccctggcggccgccggcctcacgagcatccgcgcggtgctcaaccgcgtcaactcctccgtcgacgccgccgccgccggcgggccgcgccccgtcctgcggcttggcaacggcgaccccaccgcgtccgcctgctaccgcaccgcgcccgccgccgaggacgccgtcgtcgacgcgctccgctccggggcgcacaacggctactccctaaccgtcggcgtcctctcggcgcgccgtgctattgcagaatacctatctcgagatcttccttatgagctttcggcaaatgatatttacctgacctccggatgtgtccaagcgatcgaagtcatgatctctgttttggctcagcccggatccaacatcttacttcccaaacccggctttccattgtatgaatcacggactacattcagcaatctagaggttcgacatttcgatctcattccagagagaggctgggaggtagacctagagggtgtgcaagctattgctgatgagaacactgttgcaattgtcgtgatcaatcccagtaacccttgtggaagcgtgtattcgtatgatcatttggcaaaaattgccgagaccgccaggaaacttggtttgctgataattgctgatgaggtatatgaccatttggcatttgggaataatccttttatacctattggtgtttttgggaagaccgtcccagtgatcaccttgggatctatttcaaaaagatggcttgtacctggttggcgacttggttggatagcaacatgtgatccaaatggcattttaaaggaagccaaggttaaccaatcaattgagaactatattaacatctcaactgatcctgcaacgtttgttcagggagcaatccctcaaattatagccaacacaaaagaagattacttcaacaaaattctcgatcaattaaggaatgcagcggatttatgttatgataaaataaaggacatcaagggcattacatgtccacacaagccagagggatcaatgtttgtgatggtaaaattggatctctcttacttggatggcttccatgatgatatggacttctgctgcaggttggcaaaagaggagtctgtgatagttttgccagagacatcatggtaa

SEQ ID NO: 9572 - DNA, 677 bp, Oryza sativa
  unsure (1)..(677): unsure at all n locations
  Clone ID: PAT_MRT4530_15977C.1
cgacgacgacaaccccgcgacggagacgacctggcgacggcgacgaccccgcgacgccggcgaccatggccgacagcggcggatctcgctccgccgcgtcctcctcgctccgcgcgccgtcgatgccgccaccgctgttgtgtttgccatcgtcgcccttgccgtgcgttgtggaggtcgcgatgacctcgagcactccagatctggcctcgagctcgactgggcggcgtcctcgatgcggccaccgccggcgctgccaccttctcctcctcgatgcggcatgggaggagggacgccaccgtgcgccactcgggggcgcagccgtcctcggcgtcggtgtgggagacggcgccggcccggagctcctactcccctgcggtggccgcgttgacgacgaggaactcgaggttgacgccagcggaggagacgggaagaggagaggaagagacggcggcttgaggcggtggccggggatgacgaggaggaggaggagcagctctgctcgggcatgaacggcattgtttatctcaaggtgaaaagagagagagagagagagtgagcaaagctagctctatttctcttctctgngtgagagagctactagactagtacgatgaataaatcccccctgtactccctccgtcccaaaaaaaaaagcaaccgcgggtttacgtacc

SEQ ID NO: 9573 - DNA, 842 bp, Oryza sativa
  Clone ID: PAT_MRT4530_15978C.1
gctccgcaccacaaatttcctcttccaccctcaacagcgacgacgacaaccctgcgacggagacgaccccgcgacgacggcgaccatggccgacagcggcggatctcgctccgccgcgtcctcctcgctccgcgcgccgtcgatgccgccaccgctgttgtgtttgccgtcgtcgcccttgccgtgcgttgtggaggtcgcgatgacctcgagcactccagatctggcctcgagctcgactgggcggcgtcctcgatgcggccaccgccggcgctgccaccttctcctcctcgatgcggcatgggaggagggacgccaccgtgcgccactcgggggcgcagccgtcctcagcgtcggtgtgggagacggcgacggcccggagctcctactcccccgcggtggccgcgttgacgacgaggaactcgaggttgacgccagcggaggagacgggaagaggagaggaagagacggcggcttgaggcggtggccggggatgacgaggaggaggaggagcagctctgctcgacggcatggaggctgggcgtgccgtgcgcgtcctccccggatgtagcggcatggcgaggaggaggagcagctctgctcgggcatgaacggcattgtttatctcaaggtgaaaagagagagagcgagcaagctagctctatttctctgtgtgtgtgagagagagagctactagactagtacgatgaataaattccccctgtactagtttgtgtgagctactagtggttcttttgagaagagttattggttttggtttctagggccaaaccaaagaataaatgcccccaaactaaaagctaaaaaaaaaccccaaaccc

SEQ ID NO: 9574 - DNA, 308 bp, Oryza sativa
  Clone ID: PAT_MRT4530_15979C.1
ataagaaagaacggacatttttaaactcgctctggaagttaaaggaaataaatttcattagaagagaccagaccttggtcaggggacactaaattggtccaggaaagacaaggtttcaaaaatggttacaaaaaccggaggaaaatcgcacgtacactcacaacaacgtttcaacgttgaaaaaacccaccatttgtcccccccgagtacgtaaaaaaaaacttgggcgcacgcacgtacccgggaacaaaaagtagaacggaccgggggccttgagcggggagccctgattgcgcttgaggaacttg

SEQ ID NO: 9575 - DNA, 439 bp, Oryza sativa
  Clone ID: PAT_MRT4530_1597C.1
tggcacgaggtcggctggcggccgcggccaccggcggcgaggaggagagcctggcacccgccgccgccggcgaggacggagctccggtcgaccgaggacgagcgcgggctgccctgtgaagaggctggaggacaatggtcgacgacgccgccgggaagggctggccggtgttcggcgccggcgaggacgatggcaagccagacctcggcgtcaccggcaccggcggcggctgatattactgctgctccttcagtcaccatgtgctcccttgtaaaactgtagtagcctctgtgggtctgtctgtgtagcacacgaagtgcaaagacttcttttctataaactaaaaaagcgaagtgcaaagagttgtaacctgtaatgcgaagttgaagagctggattggaataaccgtaattaaataacatcaattaaattagcacgc

SEQ ID NO: 9576 - DNA, 441 bp, Oryza sativa
  Clone ID: PAT_MRT4530_15980C.1
atgacagaatccacaaagatcaagtattgtcgcgcagattccggctccggctccaagcccttgtcagcagaaacaaagacacgtttgatggcagacgggaagaagattgacgaagaaaagaaagacggcactgcagttcgtcgtgtcctcttctggttcgccgtcttggtcatccggttcgcgctcctgatggcgatgcactactaccacgatgtaacgagttcaaggtgcgacggtgcgcgcgcgggcggagccaggactggacggagtgccctttcacgcgtccgagggagaaggcgcggaggagggacaccggacacgaggccgtactgcgactctggcacggcgtgcctggacttccgcaagggcgggtgcaatcacggcgacgcgtgcgagttcgcgcacggggtgttcgacaattcgagtgctgatctcgcgtaa

SEQ ID NO: 9577 - DNA, 322 bp, Oryza sativa
  Clone ID: PAT_MRT4530_15981C.1
atgtgtggaagggctgggcgtccaccatttgatgatactggaacaattataatcatgacaagaagagagacagtgcatctatatgagaaccttctaaatggatgtgagatggtggagtctcagttacttccatgtgccggtgagcatctaaatgcagagattgttcagctgacgaatcctcagcattacggaattaagaaagaaattccacgtgaacttcttgaaaagcaaatgaaagatatatgtgttgagaagatccatgagctgggggagtatggtctaatttggacagatgaagatggtttccttctaaaaccattag

SEQ ID NO: 9578 - DNA, 461 bp, Oryza sativa
  Clone ID: PAT_MRT4530_15982C.1
ttttgtttttttttttttttttgtttttttttttttttttttttttttttttttttttttttttttttttttttttttttgggaaaaaaaccaagggaaatttttttaaaaaacccggccccccataggagaagggcccaggacccccgatgggacccccccggggaaaaaagaacccacccaacttgctagggaccccccccacaatggacgaaacaccccccccctgacaacccccaccacgggtttatttaggccccaaaacaaaaggcaaggcccgcccaccaaaaaagcggggcccaaagccagcaaaataagggccccaccaaaacttttacccccaagggccgcaacccaaccaaaaaaccctaagcaacccgggcaacaccaccatagattcccttgccggagccccaggggcccccccttcaaatggggccccaccttcagggggtggaacc

SEQ ID NO: 9579 - DNA, 404 bp, Oryza sativa
  Clone ID: PAT_MRT4530_15983C.1
cggttatggacggcggcagcagaggcactacgttgggcatcctacacaacaagcggtggcacaccgtcaccggcacgggactctgctccgccatgtggatatggcctaactacatggatctcagcgactgtccttacgtattggatccgcttttccatgaccaatgatgacgtgcagatggacaacaggagttgctctagctatgctacttacagctgtgagagcacaagaaccacccctgtctgattttactaagcagaatatagttgtggtgggagctggaagtgctgggataggtgtgcttaatatggccaaacaggcgatgctaaggatgccagggataaacatgatctgacaagggcataatcaattctgggtttttgacaaaaattgacttattacca

SEQ ID NO: 9580 - DNA, 454 bp, Oryza sativa
  unsure (1)..(454): unsure at all n locations
  Clone ID: PAT_MRT4530_15984C.1
ctcacgcgtccggtatctgacagcaatacatgaaatcctagaaaagacgggctacaaggaggatgagggaacagcaaatgagctctcatttcagacgtggaccaattaaatgcaatgatacattgaactcaaagaagaagggtgacaatgcttttcgacaaaaggacttctcttgtgcaattgactgttattctcagttcattgaagttggtacgatggtttctccgaccatttatgcgctgagttgcctgtcatatctgatgaatgacaaggcagaacaagctctcagtgatgcgatgcaagcgctagtaatatctccaacatggacaactgcattttatcttcaggctgctgctctgctccttttaggcatggagaatgaagcttaagaagcaatcgagatggttgtgcccatgagacangtagcagcagtggacattggatatgactgaac

SEQ ID NO: 9581 - DNA, 500 bp, Oryza sativa
  Clone ID: PAT_MRT4530_15985C.1
aaaacaatgagatgtattcagaagctcaatagggctggtgctaatgagaggaaaaaaacaaacataaacaaatacatttgcaaataaatgtttctgatattaattgtaatgagacttggtagcattcactgtatgttagactcacctcagacttttattttagtttatttttaaacaattctaagcccaaagtgtatattcaagttagtaccatcaagttcaccaagtacatacaaaatggaattagcctgaataaaacacatgggttctagttgcagacagaacccagcagacctatggcatgaatatctgttggtactttgagtaatggcagacatgttgagctataaaaccgggaagatagccatgtagctattaacaagttatgcagcctgtctatagctcagtttcctcttttttgaactggaaataattttttttttgtctttttgccttttctagggccactcccgcggcatatggaggttcccaggctaggg

SEQ ID NO: 9582 - DNA, 168 bp, Oryza sativa
  Clone ID: PAT_MRT4530_15986C.1
atggggaagaagcggccggatccatcatcgctgtcgatggcctcctcctccggcaccactgtcgtcgtcgaggtcgccgtcaccatcccctctgcatccgtcgtcttgagggctccgctgtctcctaccccgccggattcggccggcggcgtgcttgtccgcgagtga

SEQ ID NO: 9583 - DNA, 2264 bp, Oryza sativa
  Clone ID: PAT_MRT4530_15987C.1
gcacgagggcggtattagcgaataatagttgctgcagccgcggccacccagccagccagcctcaaccccaagccctccaaccccaagagaggccgcgccgcgagagagagagagagatccaatccaatccggcccccgtctccccccctcctccacgccgcggcgccgctccggttgcttgctcaggggggcgggctgctgatcgaaatgggcgggcgcgtgtccaaggcggtggcctgctgctgctgccgctcgcagcaccatggagtcgtcgtcgagagctcggagaagacggcggaggaggaccatggggagtcgtatgagctgccggcctttcaggaattctccttcgagcagctgaggctggccacctcaggctttgccgtggagaacatcgtgtctgagcatggtgagaaggcgcccaatgtggtgtacaaggggaagctcgacgcgcagcgtcgcatcgctgtgaagaggttcaaccgttctgcatggcctgacccgcggcagttcttggaagaagctaaatcagttggacaactccggagcaaaaggttagcaaatttgcttggctgttgctgcgaaggtgacgagagattgcttgttgcagaatacatgcccaatgacacactagcgaagcatcttttccattgggaggcgcaagcaatgaaatggcccatgagattaagagttgttctctatctggctgaggctttagaatattgcaccagcaaggggcgtgctctgtaccatgatcttaatgcctacagagttctctttgatgatgactgtaaccctaggctttcatgttttggcctcatgaagaacagtcgagatggtaaaagctacagtaccaatctggcgtttactcctccagagtacatgagaactggacgtatcacacctgagagtgtcatttacagctttggtaccttgcttttggatgttcttagtgggaagcatattcctcctagccatgcccttgacctgattcgagatcggaattttaacatgctgacagactcctgtttagagggtcaattttcaaatgaggaagggacagaactagtgcgattagcttcaagatgcctgcactatgaacctcgtgaacgacctaatgtaagatctctggtgcaagcattggcccagaaaatgggaaaacgaaaaaaaaaatgggattgttatctaaaggcgttgttgatgtacatgtcaatcttgctggtagtcgtgtaaacttgtacagcagagcgttgtgttttcaccaaggtcatttttcttttctttttggttttgtttcatatgtgttagccccctttggtatattctagagaaaatcgtggaattcttgtctggcggaaatcattacagatgaagaccaatcaaatgcaagatacattgaactcaaagaagaagggtgacaatgcttttcgacaaaaggacttctcttctgcaattgactgttattctcagttcattgaagttggtacgatggtttctccgaccatttatgcgcggcgttgcctgtcatatctgatgaatgacaaggcagaacaagctctcagtgatgcgatgcaagcgctagtaatatctccaacatggccaactgcattttatcttcaggctgctgctctgctttctttaggcatggagaatgaagctcaagaagcaatcaaggatggttgtgcccatgagacaagtagcagcagtggacattgaatatgactgaacaaatttgtagttcagaaaatgcacataacttcaggtgttttggtgtgaacaatcattggacatggaagcagctgttgttcatttgtcaatttggctaggggtttctttaaccttgttctgatttgcacgtgcggaaggtcgtccctcgtccatatgttcatgtaggatgtatatatggaagaaagcgacagcagaggccctgaaagagattgcaaagacattgaaggtgaataagtcctgcagacacgacattgatgggggaagggcaaaacttggtcttggttcctcctacccaagaaaatgggaaaacgaaaaaaaaaaagggattgttatcaaaaggcgttgttgatgtacatgtcaatcttgctggtaggcgtgtaaacttgtacagcaagcgttgtgttttctccaggtcatttttcttttctttttggttttgtttcatatgtgttagcccccattggtatattctagagaaaatcgtggaattcttgtcaggcggaaattggcagtgttgaagggcttggttcatttgc

SEQ ID NO: 9584 - DNA, 924 bp, Oryza sativa
  Clone ID: PAT_MRT4530_15988C.1
tcatacattgctttcttaccgtgatgaatagcacgctaccagatgaactccgagtcatgttgctgggtcatagattaccaaaccaggatcgagatcgctaggtgcaatagttccagtgacctgtaccccctattggcggactctctaccctcaaccacctccgtccagccttttgttgcttccaccatcgacaccaacctctggcatcaccgacttggacatcttggtcatgaagctctctctcgcttagctcaggcgtccgtcattcctcctccgaagagtgctacccattatgtcatgcttgccaacttaggagtcacactcatcttccttttactagcagttttactagggctacgaccagctttgagcttcttcattgtgatttgtggacatcccctatacctagtgtgtctggttttaaatactatttggtcattttagatgatttctcacattatgtatggacctttccgctttgttttaaacccgacacctttgccaatttatcacggtttttttgcctttgtgaagactctatttgcagctagcattcggagcattcagtgtgacaacggtcgtgagtttgacaaatccaacggtcgcacctttttccgatcaccaacggcgtctctctacgaatgtcgtgccctcacacctcccctcagaatgctaaggccgagcgcacgctatgttctctcaacaacgaagttcgctctttgttgtttcatgccaccctactcccttcattttggttgaggccctccaccctggcacgcatttcaataaccggtattcccaccaaaatccttcatcaccacaccccgttttttgccctctatggaactcacccattctatacacaccttcgagtttttggctgtaagtgttacccgaacctctctgccaccaccccccataagt

SEQ ID NO: 9585 - DNA, 252 bp, Oryza sativa
  Clone ID: PAT_MRT4530_15989C.1
atggcggtggtggccgtggcggcgtacgtacgcgaggacgcgagccgaagcaccacgtcgcgccgcgcctcgcctgcgcgcgcgctgtgcacgcatgttcgtccagctgctggcgcggcgcggccggccgccgggcgggcgggcccgtcggctcgcgcaaggacggccgacggcgacggcgagggcccggtggtgcgggtaaccaaccggcggacactgtttgcattggcttctctgaagcctgaagcctga

SEQ ID NO: 9586 - DNA, 4002 bp, Oryza sativa
  Clone ID: PAT_MRT4530_1598C.1
atgtcgaacgaggtgaaccatgtagggaaggctcccatgtttaatggcacaaactactccacttggaaaattaaaatgtctactcacctcaaagctatgagcttccatatttggagtattgtggatgtaggctttgccatcaccggcacacccttgacggagattgatcaccacaacctccaactcaatgcccaagccatgaatgccttgttcaactctttgagccaagaggagttcgatagagtgagcaaccttgagaccgcatatgagatttggaacaagttggcggagatccatgagggtacaagtgagtacaaggatgccaagcttcatttcctcaagatccaatatgagacattctccatgttgcctcatgagagtgtgaatgacatgtatgggaggctcaatgtcattgtgaatgatctcaagcggcttggggcaaactacaccgatcttgaggttgcccaaaagatgcttagagccctaccggagaagtatgagacccttgtcaccatgctcatcaactccgacatgtcaagaatgacacccgcaagcctcttggggaagatcaacaccaatgacatgtacaagttgaagaagaaggagatggaggaagcctcaccctccaagaagtgcattgctctccaagccgaagttgaagacaagagcaagagcaaggtgaatgaagtcaatgaggacttggaggaagagatggtccttcttgctagaaggttcaatgatctcttgggaaggagaaaggagagaggaaggggctccaactccaataggagaagaaatagaagacccaacaagactctctccaacttgaggtgttttgagtgtggtgaaaagggacactttgcttccaagtgcccttccaaggatgatgatggagacaagtcatccaagaagaagagtggaggctacaagctcatgaagaagcttaagaaggaagggaagaagattgaggccttcatcggggaatgggactcaaatgaggagagctccgcctcatccgggtccaaggaagaaggtggtgatgatgcaagctccaagaagaagaagatggccgttgttgccatcaaggaggctccatcactcttcgctccactttgtctcatggcaaagggctcctctaaggtaacatctcttagtgatagtgagagtgatgatgattgtgatgatgtttcctatgatgagcttgtgagtatgtttgaggagctccatgcttatagtgagaaggagattgtcaagttcaaggccctaaagaaggatcatgcttctttggaggtcttgtatgaggagctaaagacctctcatgagagactcaccatttctcatgagaagcttaaggaagctcatgacaacctcctttccactactcaacatggagctcacattgatgttggcatatcttgtgatttgcttgatgatagtgctacttgccatattgctcatgttgcatcatctagcatttctacctcttgtgatgatcttatggatatgcctagccctagctctagctctagctcttgtgtttctatttgtgatgcctcacttattgttgagaacaatgagcttaaggagcaactggctaagctcaacaagagtttggagagatgcttcaagggtaagaacactcttgacaagattttgagtgagcaacggtgcatccttaacaaggagggacttggattcattccaaagaagggtaagaaaccttctcaccatgccactcgttttgtcaagagcaatggtaagtattgctccaagtgtcgtgaggttgggcatttggtgaactaccgcaccggtgggagccattggatgcttgatagtggatgcactcaacacatgaccggtgatagggctatgttcaccacatttgaagtaggagggaatgaacaagagaaagtgacatttggagacaatagcaaaggaaagtctattgttgccgagcttttcaaaaaatttgcaaaaagggcccaaaatgaatttagttgcactcttgtgaaaattagaaatgacaatggttccgaatttaagaataccaatatcgaggactattgtgatgatcttggtatcaaacacgaactttccgctacctactcacctcaacaaaatggtgtagtggaaaggaaaaatcgtacattgattgagatggcaaggactatgctagatgaatatggtgtttctgattccttttgggcggaagccataaacaccgcttgccatgcaaccaataggctttatttgcatcgtctcttgaaaaagacttcctatgagctaattgttgggaggaagccaaatgttgcctattttcgagtttttggttgcaagtgttatatttaccgaaagggtgttagactaaccaaatttgaaagtcggtgtgatgaagggtttcttctaggttatgcctcaaatagcaaggcctaccgggtctacaacaagaacaaaggtattgtgaaagaaaccgccgatgttcaatttgatgagactaatggctcccaagaggagcacgagaatttggatgatgtaggtgatgaaggcttgatgggagctatgaaaaacatgtctattggagatgtcaagcctattgaaatggaagacaagccatccacctccactcaagatgagccatctacttccgcttcgccaaatgaagctctttgtgatccggattggatgaatgctatgcatgaagagctcaacaactttgcaagaaacaaggtgtggactttggttgaaagacctagagaccacaatgtcatagggacaaagtggatctttaggaacaaacaagatgagaacggattggtggtgagaaacaaggcaaggttggtggcgcaaggtttcacacaagttgaagatcctaaaaatcctaaccatgtttacaaactctcaaaagctctttatggtttaaaacaagctcctaaggcttggtatgaaagattgagagattttcttttgtcaaaggatttcaaaattgaaaaagttgacaccactcttttcacaaaaatcattggtgatgatttctttgtgtgtcaaatttatgttgatgacatcatattcggttctactaatgaggtattttgcaagaaatttggtgatatgatgtctagggaatttgagatgtccatgattggagagttgagcttcttccttggacttcaaatcaagcaacttaaggatgggacgttcgtgagccaaaccaagtacatcaaggatctactcaagaggtttggcttggaagatgtgaagcccatcaagacacctatggcaaccaacgggcatctcgaccttgatgagggaggtaaaccggtagatttaaagctttatcgttccatgattggtagcttgctttaccttaccgcatctaggccggatatcatgtttagtgtttgcatgtgtgcacgatttcaagccgctcctaaggagtgtcacttagtggccgtgaaaaggattctaagatatttaaagcattcctctactattggcttgtggtacccaaaaggtgctaaatttaagcttgttggctattccgattcggattatgccggttgcaaagtggatagaaagagcacatccggtagttgccaaatgcttggtagatcccttgtatcatggtcatccaagaaacaaaactccgtagacctctctaccgtcgaggcggaatatgtttcggcgggtagttgttgtgcccaattgctttggatgaaacaaaccttgttggactatggtatatccttcaccaaaaccccactcctatgtgataatgatagtgccataaaaatagccaataacccggtccaacattctagaaccaagcatattgacattcgccatcacttcctaagagaccatgttaccaagtgtgacatagtcattagccacataagaaccgaggatcaactagccgacatttttaccgagcctcttgatgaaacccgcttttgcaagttgaggaatgagttaaatgtcatagacttctctaatgtggcttga

SEQ ID NO: 9587 - DNA, 580 bp, Oryza sativa
  unsure (1)..(580): unsure at all n locations
  Clone ID: PAT_MRT4530_15990C.1
ggtgaggattcggccgagctcgtgccgaattcggcacgagtagcctctctccctccctctcacacactgttcactaacccaatcactatgcagctcagctcagctcatttcattctgagtctcagctcagctcaagcaaagttagccagaagattagaagaagangangaaaaattaattggggtgagtttgatgacaacgctacccaccgcgattctactcctcctcctcctcctcgcgctgccgccgccgtccgccgtcgtccgctcaccgccgacggctcgcgctgctggcgctcaaggcnggggtcaccgacaacccctgtcgtgctgttctccttggtcggaatccgaacccnaaccctgccngtngcccggggtgactnctccaacgtnacggcggcgggcngcaaacccccgcggcgggttgtcggggttggcctcccccnggaaaaaacntttcngggtacntcccttcggaactccgntcccctgctgttncctcccggggggntgaaacctgcnnaaaaaaccngggtcccccggggggggnttccccgggggggggccttnttcaaaaa

SEQ ID NO: 9588 - DNA, 1747 bp, Oryza sativa
  Clone ID: PAT_MRT4530_15991C.1
tcaactcccacggtcttgtagctcgttcatgagaggaatcaactccacagtacccgttccagcatcgaccactttgattctttcatcttcgacagccacattcagagcatgacagctagaatcatctgcgacaaggacggaaaattcagcagtgtcttgacctcctttcctagcttcagtagattcattgtcctgaagcatctctgccgggaggagcattgagttttggtcactctggggaacaagaaacagcagcatcagcgggagcagcctcgacaagtttctgatcaggacggcaacccagaggttactgaactccatttgaaattcctcgaaaaatcatacgtcccaaaaggacgcttgaacaaaaacacaaaaacacacacacccaaaaaaaacccgaaggaactgcctcaatatccttccaaatgatactgtatgcttctttctgttataaaaaatgaaaggaaaactaactgttgtttcacctataacctattgatgtgctgttgctgatgatacataaagaactagtctaccaaagagtggagaacagaaccagaacgccattggtaatttggtatagaatgaatcatggatggaagacaagtatcctgttcatgagcttgtcagtcaactcccacggtcttgtagctcgttcatgagaggaatcaactccacagtacccgttccagcatcgaccactttgattctttcatcttcgacagccacactcagagcatgacagctagaatcatctgcgacaaggacggaaaattcagcagtgtcttgacctcctttcctagcttcagtagattcattgtcctgaagcatctctgccgggaggagcattgagttttggtcactctggggaacaagaaacatgatcatcagcgggagcagcatcgacaagttcctgatcaggaccgcaacccagaggctcctgaacacaattcgtgtctcattcagcaagtgcagcatcaggccaccccaccagcccgacatgagcaacccggcatattggatggacatgagcagcgcatagaaagttccttcgatgcctggaggacaaagcttggagcaaagcacgaggagcggcaaccatttgagcctcccaatcatctgggaagacactgttgtcgatcaccgcaaagacgtaatccggaatgaagatcgccggcatgatgcccagcttgcggtggagagagagcgtgagcatggacgacgccccaatcactccggcgaggaggaagtacgggcggcggcggtagccggcgacggggacgacgtcggtgagtagaccccagatgggcttgacgacccagggggcgctgacgaacccctggtagaactgcgccgccgacggctgcacgcgctgcacgtccttccagtagtaccccgccgcgacgccgccgacggcgtcgccgacaccctggcaggccccgtagacggccacgacggcgagcacgaagctccagtgcagctcgcgggacagacgccggagccagcccccgggaaccgaagccccgccgccggcttctcgaagcgccgcgtcgtcgtcctcctcctcttggcgatccatacaaaggaaaggtgttccaattttgtcttgacattctgacctgcttgtaatcgaaatctgtaactcgcctctccttcacgcaaaacaccagccccagaacacccaggtgccacgaagggatgccttagtaatccaagagcacccttagaacaaaaaaaaaaaaaa

SEQ ID NO: 9589 - DNA, 1344 bp, Oryza sativa
  Clone ID: PAT_MRT4530_15992C.1
atggatcgccaagaggaggacgacgacgcggcgcttcgagaagccggcggcggcgcctccttccccggcggctggctccggcgtctgtcccgcgagctgcgctggagcttcgtgctcgccgtcgtggccgtctacggggcctgccagggcgtcggcgacgccgtcggcggcgtcacggcggggtactactggaaggacgtgcagcgcgtgcagccgtcggcggcgcagttctaccaggggagtgattggggcgtcgtccatgctcacgctctctctccaccgcaagctgggcatcatgccggcgatcttggcgctgacggcgcagagcgcgggcgcggcggtggccgacgtgacggtggacgcgctggttgctcagaacagcatcacgcaccagccgctagccgcagacatgcagagcctggtgctcttggattactaagcatcccttctgcactggtgttcttggctggtgttttgctgaaggagaggcgagttacagatttcgattacaagcaggcatggacagtgatgccacttgagtgctttgatggattcagtctaagcctggatatccaagcaggaatgttctactggtacactgatccaatagtgggaccaggattctctgaggaatttattggccttgtgtattcggtcggttcaatcggttcgctgctcggagttttactataccaaatttcactgaaggactaccctttccgcggcgtgctattctggggccaagttctttcaagcctggcaggaatgctcaatctgataatggtgacccggctcaacacaagaatcggcattccggattacgtctttgcggtgatcgacaacagtgtctcccagatggttgggaggctcaaatggttgccgctcctcgtgctttgctccaagctttgtcctccaggcatcgaaggaactttctatgcgctgctcatgtccatccaaaatgccgggttgctgatgtctggctggtggggtggcctgatgctgcacttgctgaatgtgactcgaacagagttcagtaacctctgggttgccgtcctgatcagaaacttgtcgaggctgctcccgctgatgctgctgtttcttgttccccagagtgaccaaaactcaatgctcctcccggcagagatgcttcaggacaatgaatctactgaagctaggaaaggaggtcaagacactgctgaattttccgtccttgtcgcagatgattctagctgtcatgctctgaatgtggctgtcgaagatgaaagaatcaaagtggtcgatgctggaacgggtactgtggagttgattcctctcatgaacgagctacaagaccgtgggagttga

SEQ ID NO: 9590 - DNA, 765 bp, Oryza sativa
  Clone ID: PAT_MRT4530_15993C.1
ccggccgggacgcgaacccctcaccccttgaaattgccctttcacacgacccggccgggttcctcctttctcttctccctagcgcctcctttccagaagcttccaaaccctaggcgagcgagagaggcgagacgccatggacgcggacgcggtggcgaaggcgttcgtggagcactactaccggacgttcgacacgaaccggccggcgctggtgtcgctgtaccaggacgggtccatgctcaccttcgagggccagcagtttctcggcgccgccgccatcgccggcaagctcggctccctccccttcgcgcagtgccaccacgacatcaacaccgtcgactgccagccgtcggggccgcagggcggcatgctcgtcttcgtctccggatccctccgcaccggccccgacgagcaccccctcaagttctcccagatgttccagctgcttcccgctggaggcaacttctatgtgcagaacgacatgttccgtctgaactatggttaaggaaagctggatagtcatccatcaacgtactgggccagtgttttatgttgaaactatgagatgctgttgctcttttgattgtttatcgactggtgcaaattattgcaagaaatggtgttaaaagactatgcaccttctggatttgttcttctatgtttctcccatgaactgtggtatggaggcaccatttatgtggaatgtgaatgaagacagcctaaaagattttatcaaaaaaaaaaaaaaaaaaaaaaaaaaaaaaa

SEQ ID NO: 9591 - DNA, 499 bp, Oryza sativa
  Clone ID: PAT_MRT4530_15994C.1
gtctcctctcttattctcctctcgcggtctagtgtgtgcggcgagtgcggccagcggagggcacagacggcggtgggcgcggacggcggcatcgagcggcttggcggtgggcgcggctggtggcaccgatcggctcgcggtgccgccggcttcgcgcgcacgcgcgccgccgccaacggattctccggtttcgtcccttatacaggggttggtcttgccctctacaggccctcctccacgtccaactcggggtagaaaccaaaggaaacccaaaacatgccttcccgagcaaggaaacctcgagacccgacgaaacagggtcggactcggaccagccggtgtgcggccggtcacaccgccggtctgaccggccctcaaccggcggtctgaccgcccaacacaaggcctaccccagagaattaagtgcctggattgttccttccattggttaactatcaactgaaatctgtatcccaaaatggatagtagagttcaacac

SEQ ID NO: 9592 - DNA, 631 bp, Oryza sativa
  unsure (1)..(631): unsure at all n locations
  Clone ID: PAT_MRT4530_15995C.1
aaaatgccagcaagaagatccatggcgttctttgcttcttttgttactggtggtctggtccactctgccctcgcttactgctcgtgcgcctcccaatatttgcaatttgctatcttagagaaatcaaatttaagataaaaaacctaataacaacaatgatttctcagtcacaggacaaaactataatcaacaagaatgacatgatgctactgtaaagtgcaatttgttttcatcctccagcatatgatgatcacacaatcacaagtgtctatattgcactttgtacaaaatcttgatagtatagcttccaattcttattggtgcttatgttgcatttgcaagccatgtgaagaaaaccatacagcgaaaataatatgcttcactttcaataagctacaaccgtgaatttgttagaacttgggtattactgaacttgatagcacttattgaacgagcgctggcttttcaaagtcctctttcattacaaagttcatcttcatgtcctatgttctcctatcatgttttgtcncccggngcnaaantcccctggccnanaaattttctacacantacnctaaatggtnatnccccccnntttgaatccatccaacngaattntttgaatctttcn

SEQ ID NO: 9593 - DNA, 120 bp, Oryza sativa
  Clone ID: PAT_MRT4530_15996C.1
atggggatgatatcgcccgtcagaggtgacgaaaatgttggtggtgtgaagatgaaggcgcccaacaacaacgacagagcagtcggtggcgacgaaagcaagccgactatgaagaagtag

SEQ ID NO: 9594 - DNA, 1282 bp, Oryza sativa
  Clone ID: PAT_MRT4530_15997C.1
tttttttttttttttttccacgtgggaagaaatcgtgtctgatatccatcattcagttacgctttcagttctgaacttatgatcacaaagtatccactgaagctacttgtaccaggtgaaaacaagtaaagagtacaattgctgtgatactaagctgaatgttctgagagctgatacatagccatcctgacgcaaatctccataaaaagataaatacaggatagacagatccagggattagaaataaaatgcatttccatatctgcagtcaaggttcgggcgttcctgtagagctaccataagttactccgatgctgcaggctgctccttctctgcttccgcaggcgatccgttggcaggtttctctttgctctctgcaggcttcttggttccatttgctggggctggtgtgccgtctttagcaccatcctttgcgccgtctttagcagcagacgctggtggaggttgcatcatgtgcggtggaggagcgtgcttcagcttcactaagatctggcgcattcgtgagaggtctgtcggcttgccaggcttagggccctgaatgactgtgatggatggcttcttgtccttgtccttctttccccgcttctcaatggtagctatttcatgtgggatgagctccgatatcgacttccagtactgcttgtctgcttcggcatggaatttctcctggccagctacgaaaatcttctctctttctctgttatggaccttgtttgtctcacagttctgtatcctcttctcatagaaagccttcttaaactcttcggcttcagcaagtatctgggcccgtagctccttctccttccgctctttttcctcaagaactatagcattttgcctgcgccactcgcggaggaggatcccctcctccgcccccatctgggccggcggcgggaggatagggccgtcgccgccgtccagctccgggtcgggggagaagggcgagggcgagaaccctccggagacgtggccgatcgggaccccctcggactccacggcgatctcctcctcctcctcctccacatcctctacgccgccgtcgacgaaggaggcgtagccgccgtatccggtgtcgtcggcggcggcgcctcctgatgcatcgggcgcggcgtcgtcgtcggcgtcgaaggggtgggaggcggtgcgggggagctcgtcggcgccgtcgtcggcgaagaaggaggccatggtcggcggcggtggtggtggtgcgaaacgcggcggaggttttgggcggcgcgtggtgtggggaggcctcgtg

SEQ ID NO: 9595 - DNA, 1647 bp, Oryza sativa
  Clone ID: PAT_MRT4530_15998C.1
atgccgactccggcggcgctgctcctcaccgcggccaccggctcggcggcgctgtcggtgggcgtggcggcggtggggcccagggcgccgtcgctgcttctgcggtcggcgtcggccacgaggagggccccggggcgggcgaggccgacgaggatccgcgccgcggcggcgatcgggggagagttcggcgggctggcccagcggcgcgccctcgccggggagttcatcgagcggctgcggaacgtgctgcccgggggaagctggtggcgcctcgaggacggcgaggaggccgggggcggccgcgccgaggccagcggcgccacggccgcctccgcgctcaggcggatgtgggcgctcgtcgcctccgaccgatgggttgtcttcgtcggattcgcgtccctcgtcggcgctgcgctcgcggagatcgcgataccccatctcctcgcagcgtccatcttctcggcgcagaacggaggggctgtgttctaccggaacgctaagcttctggtcaaacgaatgagagaaatgctgtttgattctattctttctcaggacattgctttttttgatgaagaaactgttggtgatttgacaagtaggcttggttctgactgccagcaagtgtcacgagtcattggcaatgatcttaatcttatctcacgcaatttgcttcaggtatcagaaaagagcagccaaatttgcacaggagttcactgcaagtgccaacaattgttgattggagggatatccatcatggctgggaagctaactgctgagcaactgacaaaattcatactctatgctgagtggctaattttgtcaacatggtggattggagacaactggtcctctctgatgcagtctgttggagcaagccacaggttacagaagttggaaggccggattcagtatgccgatgtatcattttcatatccatcaagacctacggtaccaattctgggtggattgaatctaacacttcatccaaatgaagtagttgcaattgttggtcttagtggaagtggaaagagtactgtagttaacctactacttcggctatatgaacctacagatgggcaaatattagtagatggtgtcccactcagtgagcttgacatcagatggttcagggaaaggattggttttgttggacaggaacctaggctattccgaatggatattagttctaatattaggtatggttgtccaagagaagttagcaatgaagaagtggagtgggctgcaaagcaggcatatgctcacgatttcataatgtctctccctgatggttataacaccattgtcgatgatgctcttcttagtggaggccaaaagcaacgcgttgctattgcgagggcccttcttagggacccatccatcttggtattagatgaagccactagtgcacttgatgctgagagtgaacattatgtgaagaatgtaatcacaaagtttagtactgatcctaaggctagaagaaccgtgatcatcatagctcacagactatctacaattcaagcggctgatagaattatcgtgatggaaaatggtaatattgtggaggatggaaaccacagcgagcttattaataagcacgatggtttgtattccagattagctaggcgacaaaacgacgccctcgattag

SEQ ID NO: 9596 - DNA, 731 bp, Oryza sativa
  Clone ID: PAT_MRT4530_15999C.1
gtcgttaaccctctcgattccgcggctggtcgcttccccttccgcttccctccgccaaccacgagctagggtttcgatctcgcccccgaccggcttcccctcccttccctcctcctccctccgcgcgaaggctcgccatggagggagccggcgccgcccgcaagagatcccggccggacacggccaacggaggcgccgccggagggaagcgctcgagagcactatcggatgcccttttggcgagggttgtcatttctcgcactttgtccctggtgggtatcaagcagtagcaaaaacactcaatctaggcaacccagctgtgcctgcaccggcaagagctcctatggatcatgctgctggtggtaattctcatccagcttcttctggcaagacacgcatgtgcaccaagtataacactgcagaaggctgcaaatttggtgacaagtgccatttcgcccatggtgagagggaacttggcaagccagcttacatgtcccatgagagtgccatggctcctcctatgggtggtcgatatggaggccgacctgaaccacctccaccagccgctatgggtcctccagcaggaaactttggtgcatctgctactgccaagatcagcgttgatgcctcgcttgctggtggcataattgggaagggtggagtcaacacgaagcagatatgccgagtaactggggtcaagctctcaaaacgtgaccatgaatcagattcaa

SEQ ID NO: 9597 - DNA, 3309 bp, Oryza sativa
  Clone ID: PAT_MRT4530_1599C.1
atggatgaacacaaagctcaagtgagtgtgagagaggtgcaaggggtgtatgcaattgaattgggtgccaagagagcccccttgctgctggtgggggagtatttatactcccacccaccaaaactagccgttgggggcgaaatcccccaactttgtgctctgctggtctgaccggaggtatgtggccggtcagaccgtgctactctgcaacggctagaaaactagccgttgaagtgctgtcagagggccccatcggcctggccggggggcggtctgaccgctcatgtgccgccggtcagaccggccctatgcgacggtcagaccgccgtcttgcggccggtcagaccggccatggcacgccggtctatgtggtcggtctgaccgtcccgggttgaagtactcgttgggttgcattccaaaataagcatactgcggatgaaagaagacatttggatcatacccatgaggaggaggaggtgctgaacttgagctagctccaggatgagaggagggcgccgtcctaggagcacggggagctccaggctgaaggcggggcttgtactgcttgtgcttcttcaaatttggcccagcagccccaagcttgtcttgaatcaatctcatgatgtaaggggtataatagataccctgagtgaaggtccccttagagatggcaatctcttgcatcatgagagttacagtgtcgaactgacggccctgaatgatggcatcgataacgtgccaagccacccccctaatgtcatcattgttacccaggcgagggaggatggtagctctcacaatcctgttaaccacacttgggatggtcctcaagccggcaaccttcccatgtatgtaccgcgctccatcttcataaaactgagagaggtagtctatggagagcggattatgggtgtgctcctcatgcaagtcatctccaaagtccaagcgaacattgaggagccgccggaattgcctcctagagatagaacactggagggtgtcggacatccacttcatctcattatagtcctcggccacccacactgtagtataaaactgccggatcaaatcttcattgtaatcttgcttaagagtcacaatccggtcaatgccaatagtcctgaagagatcctgcaagccctcaaactcgggagtctcattaatgtctctccaagagatccacttatgttctgcaaaagctttccctgcatagacttgctcatacacactcttctggaaagcggtgtgaaaacggggatccggggtgtcccgaggcctcaaaaactgatcatggtgcctcaagatggtatactgtgatggattccgcatgttcacaacaaactggatggagggatcaatgttcatctcatcacttccttcatcctcatcctctccacttccactgtcatcatctccactttcctcctcgctagccccctcaacattggcctcaacctcttcatcactttgagcgtaatcctctctgctcgattcctcaggctcactcacgggatcaggcgcacgacgaccatgacgagtgcggggaggcatcactccctcatcaaggtctagatgcccgttggttgccataggtgtcttgatgggcttcgcatcctccaagccaaatctcttgagtagatccttgatgtacttggtttggctcacgaacgtcccatccttgagttgctcattagtagaaccgaatatgatgttatcaacataaatttgacacacaaagaaatcatcaccaatgatttttgtgaaaaaagtggtgtcagcttttccaattttgaaatcctttgacaaaagaaaatctctcaatctttcataccaagccctaggagcttgttttaaaccataaagagcttttgagagtttgtaaacatggttaggatttttaggatcttcaaaaccgggaggttgttcaacaaagacaagttcggcaattttaccatttagaaaagcacttttcacatctatttgaaatagttttatgtcaaagcatgatgcaaatgcaagaaggatgggaatagcctcaagtcttgccacgggggcaaaagtttcaccaaagtccaaaccttcatcttgtgtgaaaccttgtgccaccaaccttgccttgtttctcaccaccaacccgttctcatcttgtttgttcctaaagacccactttgtccctatgacattgtagtctctaggtctttcaaccaaagtccacaccttgtttcttgcaaagttgttgagctcttcatgtatagcattcatccaatccggatcacaaagagcttcatttggcgtagcggaagtagatggctcatcttgagtggaggtggatggcttgtcttccacttcaataggcttgacatctccaatagacatgttcttcatagctctcatcaagccttcatcacctgcatcatccaaattctcgtgcccctcttgggagccattagtttcatcaaattgaacatcggcggtttcttccacaatacctttgttcttgttgtagacccggtatgccttgctatttgaggcataacccttctttggaatgaatccaagtccctccttgttaaggatgtaccattgctcactcaaaatcttgtcaagagtgttcttacccttgaagcacctctccaagctcttgttgagcttagccacttgctccttaagctcattgttctcaacaacaagtgaggcatcacaaatagaaacacaggagctagagctagagctagacatatccacaagatcatcacaggaggtagaaatgctagatgatgcaacatgagcaatatgacaaatagcactatcatcaagcaaatcacaagatatgccaacatcaatgagagctccatgttgagtagtggaaaggaggttgtcatgagcttccttaagcttctcatgagaaatggtgagtctctcatgagaagtctttagctcctcatacaagacctccaaagacgcatgatccttctttagggccttgaacttgacaatctccttctcactataagcatggagctcctcaaacatactcacaagctcatcataggaaacatcatcacaatcatcatcactctcactatcactaagagatgttaccttagaggagccctttgccatgagacaaagtggcgcgaagagtgatggagcctccttgatggcaacaacggccatcttcttcttcttggagcttgcatcatcaccatcttcttcctcggacccggatgaggcagagctttcctcatttgagtcccattccccgatgaaggcctcaatcttcttgccttccttcttgagcttcttcat

SEQ ID NO: 9598 - DNA, 612 bp, Oryza sativa
  Clone ID: PAT_MRT4530_159C.1
ctcaaccattcgccccctctctctccctccttccccaaatcagctagagtggtcggctcgacccctcctccacgcctccgcctccgcctccgcctccacgacgtagcccagggcggctagggtttcggtttcctccgccgccgccgccacctcctcctcctcctcgtgcgcggcggcgaccatggcgatggtgcaggccggcatgggcctcacccgcgtcgttgtcctcatcggcgccgggatggccggctccgtcgtcctccgcaacggccgcctctccgagatcctcggcgagctccaggagatactggacaagggggagaaggggaaagacggagaagggggcgggggcgccgacatgacggacgcgctcactagacaggtgcgcaacttggctatggaggttaaacaacttgcttcttcccgtggatctataactgttcttaatggaggttctggtcaaacagtgttctgaggtttgatagtacctgcagcaactgttggagcactcggttatggttacatgtggtggaagggcatctcctttgcggaactaatgtatgtgactaagcgtaacatggcaaatgctgtttccagtatgactaagcatct

SEQ ID NO: 9599 - DNA, 123 bp, Oryza sativa
  Clone ID: PAT_MRT4530_15C.1
atggtgtatttgccggcgagcccgaacggctgcccgggcaagccgtgcggtggctccgccctgtttgtgatggttggcggcgtgctcggcaagacgtgcaccgggtggcagtgcccgtcgtag

SEQ ID NO: 9600 - DNA, 1954 bp, Oryza sativa
  Clone ID: PAT_MRT4530_16000C.1
ttttttttttttttttgtcctcaactgatgaaactactatagatgaataaagtgagggtgaagatactgaaagagggagctctacactggcatacaccccagaaagactaagttatttgcttcttagacatctatcaaaagctgaaccgaaaacgtaacaatccatatagaaaatcgcaatacaacaggctaatcacctaaagatgcagagatatatatagtcacaaaaggcaatggagaattagtgcgccgcgcccaagatgcgtttcggctctcaagcagcgcccttccgctgctcgttctcgccatgagcgaagtggcatcggtcgccgaacgtgcaggttcccttcacgaagttctcgcacagcttggtcttgtagttgctcctgcccccggggccgcctcggcctgctggtgctgctcctgctgctgaaccagcgggtttcttggctggtgtgctcgggctgattgttgcaatgagctcacccaccatgttgcttgcctgctttatctggtcgaaattgccttcgagctcaatgttcttcaggtttgaatctgattcatggtcacgtattgagagcttgaccccagttactcggcatatctgcttcgtgttgactccacccttcccaattatgccaccagcaagcgaggcatcaacgctgatcttggcagtagcagatgcaccaaagtttcctgctggaggacccatagcggctggtggaggtggttcaggtcggcctccatatcgaccacccataggaggagccatggcactctcatgggacatgtaagctggcttgccaagttccctctcaccatgggcgaaatggcacttgtcaccaaatttgcagccttctgcagtgttatacttggtgcacatgcgtgtcttgccagaagaagctggatgagaattaccaccagcagcatgatccataggagctcttgccggtgcaggcacagctgggttgcctagattgagtgtttttgctactgcttgatacccaccagggacaaagtgcgagaaatgacaaccctcgccaaaagggcatccgatagtgatgctcctggccatcatctcctggtacctccggtacgactcctgcttctccagcaagaacttggcatggcacctcgcgatgaacctctccgcgagcctgtcgatctcgttcaccgcaccattgccgtcgccgtcgccgttgccgttgccgccgtcttctccttctccggcagccggcaatgcaccggccgacgtctcctcctccagccagcacaggtacccgcagtcctccccgtcgtcgccgccgccgccgcgcagctcctccgccgcgccgtcggccggaaccaccacgttccacgtcgagtcgtcgtagtcgtagtagtacgggtggtagtgcagctcgagatccttggcgcgagccggcgtgacggcggcggcggcggcccagttgaagcgcagcagcttcatgaagctggcgatcctcttcttgctcttctccggtctcgagcggtagccgatggcgtacttcttgccgccgccgcctctcgtcggcgccctcttcttgcggacgacgtcgaggagcagcgacttgaacttggcgagggcacggaagacatggccgacgtcgttttcgttctgtaaaactctgattactgaatacttgtagtcaaaaagaaaagtaaaaaaatgatgcactgcatgcctcatcggatgctttgcctgtctcaagactttggggccaaaaaaccttggctccatgaagcttttgtttccagtcatgtccttctcaaaggaaagagaagcgacgaacaactttctgtgagcaagcctgttggcacaaaaatggaccttaatctgttgtttgattctttctgcacgccactgactagaattgttcagctggataacagacaagagagagatggagcgatgaactgtgtacgcacttgacat

SEQ ID NO: 9601 - DNA, 1662 bp, Oryza sativa
  Clone ID: PAT_MRT4530_16001C.1
atggccgcctcctcgctcctcccctccaccaccacctccccgcgccgccgcctccccttcccccccacccgcaaaccccactccgccgccgccgccgcagccaagcccccgacgacgctgaccaccaagccactccgcctcgcgcgcccgctcgcctcctcatcctcctccccgcctccgccgccgccgcccgaggaggccgagccgaaggaccccatcgcgctcgccttcgcccgcgccgccgcctacaagaaggagagggacagccccccgccccctccgccgccgcctacccctgcgccgccgccgcagcccccggcggctacggaggaggactcgaggtccagcaaggagtccttcgcgcgggcggtggagtacaggaacggcaacgggggagggctgggcagcggcggcggctccccgctgctcggggcatcgcctagatttggtcaaagtacattttctactgaagatggtgcatttggtaaattcacaaataagaaagaagagtatgagtacgatgagactgactttttgggcctagactttttcgagaaaaagagttataaggggcctccaccaggtttagctccagcagctgatccttttccagataaagattttcctgaagtggagataataataggggaccctagtaaatttgggaagactcatcgttcgacagaggttcaaccagcagatgatagtgagcctgaggagacctcacgctcaacaacagaagaaaagaaggaagaaaacaagcctgatgaaacaccaccttcaactgttactgagccagaagaggatgaagacgagtacaaaccgacagttagatcatggggaatgtttccacggccacaaaatatttctaaggcggtgggtggcggaagaaatatacgccttggtggagagactcgaagtgctgaagagaaggcagccaaggataaacgtaccaaagagctaatagctgcatataggaatagtcagaacatgatagttgatgcaaagacaaaggcagagtgcactgaggccttgaaggaaggtgatgagctgatgaatactggaagacttaaacaagcattgccttattatgaaaaagtgatgcaggctgtggacttcaagtggtccatctgtctagattcactctgcaggtccaaggaagccatgagcatgtacagcaaactcaaaaatcatccaaattctgaaatcagtaagaaagcaaacatgttcatgttcagctttcaggcgatggacttcatgaaggtgaacagctcccctttgccccgtaacacgggctacgagaagtacttcgacaagtttgggggccagaagaactactacgctgccctagacgaacctgagatgggcatcgatcagatcatcccgtacatgctcttccttgtttccccaatattcttggttgcttttgttgctttgagaaaatccttccagttataaaagtcaggaagcatatgcttgaatgcttcaatctttgctccactgacgaattgattagtatgttcctcgaaacaaaaggctgaagaattgatatttgactagtatgcagatatattgacttgattagtatgtagatcaaaatcaaaacttatttaaaaaaaaaaaaaaaaaaaaaaaaaaaaaaaaactcgagggggggcccgg

SEQ ID NO: 9602 - DNA, 357 bp, Oryza sativa
  Clone ID: PAT_MRT4530_16002C.1
tcagtaccagtcccaggacatagcgcttaacttaggttgcagctcagaacagcccgagagtgcaaccgacgacgcggacgaggaaacaccaacaacagcggcagcagcggaaccaacggattctcggctcccagagccattccacttgattaatcggctcccagagcctttttcattttctcggactcccagagtccagctgcccagcagcacaacaatccgcttccactcgggaagcctagtccggatcacccagcccgtgagatcagccacgtcgggagaccctaaggcgtgcctggaagcccaggggtcctccccgacaccaccccggcgaatccacatgtctcttagcatcat

SEQ ID NO: 9603 - DNA, 257 bp, Oryza sativa
  Clone ID: PAT_MRT4530_16003C.1
ctgaccgccgcgacggcgaccgcggcggcgtccggcggcctggcgcgtccacacggacacgttcctcatcctcgccgccgtgctctgcttcctgctctgcgtcgtccggctggcgctggtggcgctgtgctcgcggctgtgcaacccgtcgtcgttcgccgtcgaggtcggaggaggcaatgcccccggtcgccatgcaaggcgctcaagaggaaggcgctgctgtcgctgccgaccgagtcgttcgccgaggcggc

SEQ ID NO: 9604 - DNA, 347 bp, Oryza sativa
  Clone ID: PAT_MRT4530_16004C.1
tgcgtggagtgtccaaccaggaggaggagccgctgatccggcgggtggtcggcagcggcgacaacgagcttgagctgaacatggagcaccacctcgccagcttcgtgcaagagctcggcgggtcgtcctccccaccgacgacttcgcttggagggaccacgatgccgtcagctccatcaacaaccagggatcgtgcagctcgcgtcctggcaacaggcagtagatggtcgattgcgaccatgagcgggacagggcacgacataggaggagtggagctgctcgaggaaggaggcgtcgccggcatggtggacttccggtgggattccttcatcttggcgttgatttga

SEQ ID NO: 9605 - DNA, 498 bp, Oryza sativa
  Clone ID: PAT_MRT4530_16005C.1
gatcaaatcaactggcacgctcacgaacctaaaggcaagatttttggacctgcactgaagttaagcagatcttccaggcctcgtgttttcgcatcaacacgcttttggcatgcccagtgggagacggcaagcatgtcagtagaaaagcaatctccgtcctcgacgggcaagtcgacagatcctcaaaacaggcctccaaatccaactgggtctgaagttcatgaagggaacattgttccaatcactatggacaagctctcaccagaacagaagaaggattttcgacataatgatgaagaatgctcaggagcaattcatgaagtctttcgtagaaacccgtgggaaagtttaccaaaagagggaatggttgaagatcttggtccagatgccaatggattacaacctcagtttaacaacttccaagatcggattgactacgctgtgcaacatgctttgatcaatcaatcaggagtcttagtcaatactttaacaaaaatg

SEQ ID NO: 9606 - DNA, 1701 bp, Oryza sativa
  Clone ID: PAT_MRT4530_16006C.1
atggcgaggagttcatcagctcccgaatccatggaggcggatcaccagctgacagcgacagtgacagctgctgcttccggcgacatgccggtgaccgagcagcagcagcagaaacagatggtggcggtggcggcgccaccggcgaccgagaatgctgatgctgccggcggcggcggcggcgataatggcgaccacttgccgccgacggcgacatcgttgctgggcggggcgaggaggacggggctgcatctgttcgtgctgaacgcgaggagcgcgctgaggctggacgagctcggcgcggaggtgctgcgcatcgccgtgccggcgtcgctggcgctgacggccgacccgctggcgtcgctgatcgacacggcgttcatcggccggatcgggtccgtggagatcgccgccgtgggcgtcgccatcgcggtgttcaaccaggtcatgaaggtgtgcatctacccgctcgtcagcgtcaccacctccttcgtcgccgaggaggacgccatcctcagcaagggcgccgccggagccgacgacgacaacgacgacggccacgacgccaaaggccacggtgccagtgccgccgccgtcgcggatccggagaagcagcaggtggtgggtgtggattcagctgaaaccaatggcgccgaggtctcgacggcggcggtgcgcactactgacgacaagaaggccgccgccgccggcgtcggcgtcggcaaatgcaggaggagattcgtgccgtccgtgacgtcagcgctgatcgtaggcgcgttcctcggtctgctccaggccgtattcctcgttgccgccggcaagccgctgctgcgcatcatgggcgtcaagccgggttcaccaatgatgatccctgcactgcgatacctggtagtgagatctctgggtgctccggccgtgctgctgtctctggcaatgcaaggtgttttcagaggattcaaggacaccaagacacccttatatgcaactgtgaccggcgacctagcgaacatcgcactggatccgatcctgatattcacctgccgttttggtgtggtcggtgcagccattgcccatgtcatttctcagtacctgatcacgctgataatgctgtgcaagctcgtgaggaaggtcgatgtcatcccgtccagtctaaaatcactcaagtttcgtcgtttcctcggatgcgggtttctgctgctggcgagggtggtggccgtaacgttctgcgtgacgctggcggcgtcgctcgcggcgcgccacggcgcgacagccatggcggcgttccagatctgcgcccaagtctggctcgcctcatcgctcctcgccgacggcctcgctgtcgccggccaggccttgcttgccagcgcgtttgcaaagaaggatcactacaaggtggcggtgaccaccgcccgcgtgctgcagctcgccgttgtcctcggcgttgggctgacggccttcctcgccgccggcatgtggttcggcgccggcgttttcaccagcgacgccgccgtcatcagcaccatccacagaggcgttccggtcggcgtagcggcggtgacgatcccgtgcttggttcttctctcgtcgcacggcgggttcgtcgggatctggatcgccttggccatctacatgagcgtcagagcatttgctagcacctggaggatgggagcagccagggggccgtggaagtttcttcgcaaatga

SEQ ID NO: 9607 - DNA, 336 bp, Oryza sativa
  Clone ID: PAT_MRT4530_16007C.1
cgggggttattacttacaaaaaaatctccaataaaaaacactttacacctcacccaggacggggggcacttaccccaaacgtttcccaaaaagaagaaaaagaacaccccccccacacaccaaaaccacaacatatttaaaaaaccaccccaaagagagaggcccaaaaaaaaaagaaaacgccccaccagtgattactccctcccaaactaaagaaattgctaaaatcaccaccttaaacccgccataaaacaaccctttaagcaagcccaaaaagacccaaccaccgctccctcggaaccggcagcctaaaaaaccaaaaaactgggccccccc

SEQ ID NO: 9608 - DNA, 182 bp, Oryza sativa
  Clone ID: PAT_MRT4530_16008C.1
ctttaaaggggcggcctttttttttttttttgtttctctcgcgcgttttcggataatgtttcgcgctccccgttttgtgggtgcccgcacatgacccctttggccggggccggttcgttgggagtgttgacgcttttgtggtgctcccgtgtctctgctccccggtgctagctcatatgttt

SEQ ID NO: 9609 - DNA, 192 bp, Oryza sativa
  Clone ID: PAT_MRT4530_16009C.1
ggggggaggttaaggagaacggcgacgcacccaaaaacaggaggaaccgcataggtagttgagctggctcaacagggagaataatggaccaacacaaagggaatcgcaggccatcttgctcaatgactaccgacaacatgctaagcagctattaacgcaaaaaagaaagcacggggggaaacgggttatcgt

SEQ ID NO: 9610 - DNA, 280 bp, Oryza sativa
  Clone ID: PAT_MRT4530_1600C.1
aaaacgtgtgaattaacacttgtttactaaactatagagcccctggcctataatcagaagataaagtccacgcatcatgacatggaacttcaatttccagggaagcctaaccaccctttttatgccattttttaagaaagggggaggggctgcacgaacacatgatcctctaaaccgagactagacaagattcagaaaaaaccatcttatgaatgaccccttgtggggtctttaaatacagaataaaaaagcaggctaatataaccactcaacatgccgc

SEQ ID NO: 9611 - DNA, 360 bp, Oryza sativa
  Clone ID: PAT_MRT4530_16010C.1
atggcctcccaccccaagcgtcccagcaagttctcacgcaagcccgaagcgaccctgctccgccagacgttggccaggatgccaacccctcgccccgtctacaaactgctgaggctggacggtggcgccgatgaggtccccgtttcgaggcccctcaagtccgacgagctggtcgaggcgaaccgcttcatcgggctgcagcgcgacggcgtcggcgagggcgagatcggcgccgaggaggccgtggcgggcgagggtgcagcggcggcgggccacctggaggcggagggcgcagcggcggctggccaggaggccgagatggcggccaacgacgaggatggcgcggcggagggcgcctaa

SEQ ID NO: 9612 - DNA, 327 bp, Oryza sativa
  Clone ID: PAT_MRT4530_16011C.1
gttgtttatgaattgcggtcgcactaaagaacggaaagaggttgaccagagaaaccctgaccctttgtaccgcaaacaccaataaaaggtcacgccttacaacactattgtcaaccaaccacatgcagattgcttgtggctcgatggcagcatgcgatcgaaaaccgagggccagtggggctggtttacacacacacacacacacaggggggtcgggaaaaagcagaaaggacgtccctcactccaagggcccggggggaatcgggagggggaccatgtagtggttgctgcgcacgttgagcagtcggaccaccctcccgaaggttg

SEQ ID NO: 9613 - DNA, 591 bp, Oryza sativa
  Clone ID: PAT_MRT4530_16012C.1
tcctgtcaaatatcttggtattccaatacattttagaaagctaggtaacaaagactggaaggttattgaataaagaattgagaaaaaacttagtagttggaaaggtaagtatatgtctgtggataagtatccctctttatatgccattgtccgaaggaaatgttcttcaattactagtgttatgagatctgttccacttaatgtttcttttaggagaactttagttggtcagaatcttattttttggtatgagttgtgtgcttctattatacatatccagctaaatcattcttccgattgttttagatggaactttaataagaatggaaggttctcggttaggttaatgtatcttgctttaattaataatggttatattgagagaaataaaatgattgggaagcttaagatgccgcttaagattaagatcttcatgtggtacttacttaaagggccgctgctggtttgtttctgccgacgtttttccagatgcattgcgtaatactactagtaactgagatgcttattggtttctgtatgatggcgtctgcactgcaagcgatcaaccaggatcgaccacaatgacaccga

SEQ ID NO: 9614 - DNA, 2896 bp, Oryza sativa
  unsure (1)..(2896): unsure at all n locations
  Clone ID: PAT_MRT4530_16013C.1
aggctgatggcttcttggttatcgttttctgtctaagccagaaagcactactcactaattaacctgtaagggttgaggcctgatggcttttgctaagcgcgaccaccagaagcaacaaaagaagaaaaatgctgtgacttgtgagcccagccaagctatcactatctctctctctctctctctgtgcagatgagaatgagaggagacgatgagacgagagagagagacctattaagcagcagaagaagctcgattgcgtgcctaatcgctgcaccgtcgcggcgatagctcccgcccctaaagtcgatgcttaatggccgtcatggctctcatccacttggtcgtcatgatcatcggtcgctctcccaacgccaacgccaacgtcttcctcgtcgccgtcgccgtcgccatcatggtgcgcctcgtcgccgtcgtccttcgtcctcccttcctcgttctgctccccgtcgaacgggaaacccggcggcgcgcaccgcacgtctgggtacttcaccaccgcgtccagcagctccgagctgcccttcgcctcctccccgccattgccgcccgccgaggacgacccaccaccgccgccggagccggagcgggagtagaggcggtcgagctcgtcgaagtaggggcacgtcttggcgtgcgccggccgcttcttgccgctctccttggccttgcggaagtacttgttgatgttctcccacttctccttgcaccgcttcgcgttccgccggtagcccgccgccgccatgcgcgcgctcacctcctcccacagggggcccttcagccctggctcctggaacctatcctccagccccgtccgcacccggatcagcgcctccacctcgtgcttcggccaccgcgacgagctcagctgcagcgacccctcgccgtcgtacgccaccacctccttccccacgccgtcctgctcgtcggcgcccggagcggggttggcggcggggggtgggagcgtgatggtctcgccggagatcttttccaggtaggcgatgatggcggactcgcgtgcagcggcgctggcgcggtcctgcgcgcgcgcggcggcctcgcgcgcgaacttgtcggcctcctggcggcgccacgcctcgtcgcgggcggcgcgctcccgctcccggcgctccatggtgtcgaggaactgacggtggaggctctcctggtgctccatgaggcgctgcaccaggcgctcgaagaaggaggccgacgcgctgagctgctcctggcgccgccgcttgcgcttgcggcgcgccgcgtccgcccccgacggctgctgcgtctgcggctgcggctgcaccacggcgtgcgcgtcctccccggcagacgtctcggacgtgttgaggtgcggcgggttggcggcggcggcgtcggggaggtcagccatgggcggcgcgagcatggcattgtcgtccccggtgaggccggagccggagcccgtctgggggcctccgctgccgggcttgtagatggcctccagctcgctgaagagcttgtagttgacggcgccagcggaggcggcggatgcggcggcggcattgtcgtcgggcttattcttgaagtaatacgctgggggcggcggcgcaggggagtcgggagtggcgggtttgtccttgggcggcgccctcttgctgctgctgctgctgtgtatgtagtcgatgtcgagtggccgccaggtcggttctttgatggaagtttcctcgtcccccggccaccgccggagcctgctctccgtggccgcctcgtcatccccgccaccacctcctcctcctcctccatgaagcatcatgccgctgcccgcgccgcccccgtcgttcagcgcgtcgtccgttccgccggtggcgccgctgccgccgccgccgtcgacccccagcttgaagctcatggcggcggccaggaacggagggacgcccggaggggcggcggcgccggaggcagcgctcccggcgccggcaccggagctctccggaacggccgcctcgacgtcgaggccgagatggtggtgcgggtggtggtggtggtggtgctgcggggcccacctagccgggggcggtggctgctgctggtgcttctggtggtggtgctgctcgtggaagagctggaggtgggggtggtggccggcggcggccgcctggtggagcagctgctgcgtgaagggaatcccaccggcgccgccgaagtgcgccaagtggggaggcatctgaggcggcgggtggtggtggtggtggtgctgaggcagggcgtggtggtgcagcggctggtacctgaacggcgcgcccagctcctggccaccggccgccgccgccgcggcagcagcagcggcagcggccgcctgggcgggctgcggcggcgcggacatggcgaaggcgccggggtccatgatgtactgctggaactcagagacgccgccgtagccggactgcatggcgcctgcctgcagcttgctactccactatcttcacctagcttgctaccgagtagagagtgtcactcaccttcacttcacctagttcgctgcatcaagtggtttacatgccggtcgggtaattaagaaggtttgacctgagctaaggaagaaaatgcagccagccaaaaatctcactcacccctcacaacggtctgagctggagctggagctggaggtggaagaagaggatgaggcagggcagtgcagagtgcaggggtgaagagaggaggaaggaagaagggagagggtagcacaggcacagggaagctagtcacgtttggtttccattttgcatctctggtggggtgctcggctntatctcctgccctctttcgaaaggggaccctgctaatatccatatttgtatctccacccatccaggccagcccagggtgctcattattattc

SEQ ID NO: 9615 - DNA, 324 bp, Oryza sativa
  Clone ID: PAT_MRT4530_16014C.1
atgtcttgttccgccagcccatctgccgcgccattagccgagtacactgagcatctgtccaatcttgttgcaattccaagtctgtcgcatgacaaccactatttccttggtccaattggtgattccgaccctactgaattcatcattgccaaaaccaacagaatcccctttagattagcgaaccctaatctgagcgattggaagaacaccttcaagtcttggccatccctcgagaaaacctcccctgagaaaagctggaccacatggtataagcgcgtatcggctagcaagcaggttcattgggatgaaattggaatcggccag

SEQ ID NO: 9616 - DNA, 559 bp, Oryza sativa
  Clone ID: PAT_MRT4530_16015C.1
gatgtatacgactcactattgggcgaattgggcccgacgtcgcatgctcccggccgccatggcggccgcgggaattcgattgaagcttacacttggtccacgctcatttgggctcgctaaacaggggaagcgacagtgactgtcacgtccacctgtgacaagaaatatagtgtatctatcctcaagccgtccgtgccattaggccgagtggtttatgagggtagtactttgccaggtttcagcggctctatatacgccaacggacaaatagccgttggtatgcactgtcacggaggagttcgtgggggcggttatgagttgttatacttgtattaccgcctagcagcagctttagatcaacccgatgaagacagtggcgaattcttcatgagacaagccaagcatggctatctatatgaagatttaggtaatgacaatgtcatcattcgtatgtcggatggggcataccacatgaccaaacaagacattgtccggcaaatggaagaagctaggcccggctatgagcgtggaccaagtgtaagcttcaatcactagtgaa

SEQ ID NO: 9617 - DNA, 1124 bp, Oryza sativa
  Clone ID: PAT_MRT4530_16016C.1
atggtggagggcaacgacgccactgccaccgacgaggccgagcggcgtggaggcatcggcggctggctctcccatctgccaccgctatcagaagagaagaaaatgggggcttctatactggtcatcacggtagacctgaaatgctgccgctgcagggcgaaaatcaccaaggtcctggactgcctcaaagaggagtactgcatcgagaagacggagttcgaggagaaggacgacaaggtgatcgtgcgcggcaagttcgacgccggcagcctccgcaacaagatctgctgcaaggccggcggcaaggtcgtcaaggacatcaagaccgtcgacgcttggccgccgcccaaggagccggagaagaagaagaaggacgagaaaccggtgtgcaagctggtgccgttcccggtgccgtacccagcgccgccgccgccgccggcgtgctgcccgcccagtacccatcagtgctaccactgctgccccgcgccgccgaagccgaagccgaagccgtgcgagtgcacccaccactgcggcggccatggcggcggctgcaataaacctgcagtctcgccgtgcggcggcgggtgttcgatcagcgacggcggcgcctgtggcgccagctgcaagccgccgccgccgccggcggcgatctggccgccgcagcctagcttctactactacccgccgccgccgtgtgggggctacaagttcgcctgcgaggagaactccgacgtgtgcgtcatcatgtgaccaattaattaagctgttgcttaatttgacgtcgacggtgcttcgttctttgcctcggaagtcgggataatgacgtcatctgtgtatatacgtagtacgtacgtattgctgtacctgtaattgttgttatgtatgtaaaattcagtactagtccctgctatatacgttctaaaaaaaagtccctactatacatatatatatacctatatatagttcaaacagaacgatttcccatatggtcatgtctataagtgaccgtgttatttcgaatatatggttattagtttgtgtatatatgtaatttttccttttgctttgaaccaataaataatgcacctattgcttatactgcttttaaaaaaaaaaaaaaaaaa

SEQ ID NO: 9618 - DNA, 273 bp, Oryza sativa
  Clone ID: PAT_MRT4530_16017C.1
aagctttttttttttgacaaagggaatacttaacaaaaacttaaaaatgacaaacctcacaatccctttcaacactgtgtaaccttcgttcaagataaataattctataaaaaaatacaatcccccgtattattacaacaatccaccgtaatattacaattctagatttatttaaatttattttattagcatatatcgcgctctgtattatatttatttattttaaaataaaaaaaatatattgggatttgcaacaccgtgcggtaaaagctt

SEQ ID NO: 9619 - DNA, 264 bp, Oryza sativa
  Clone ID: PAT_MRT4530_16018C.1
gccgtcaatatgcgggtatttacccagaggctgacgacagctgctccctgtagcagttccgagccgtcggtggtatctggtagttgaaattgtagcagatatagtagtacaggagagaaaaataaagtcatgcatcatcgtgtgtgacaagttgaaacatcggggtgatacaatctgaataaaaatgtcatgcaaatttacacataatgcctctgtaaggataaatcctagtacttgttgaaattaattaaaaaaaaaaaaaaa

SEQ ID NO: 9620 - DNA, 3120 bp, Oryza sativa
  Clone ID: PAT_MRT4530_16019C.1
atggcgtcctcctccaccaccagtagcgccaatcgtctccagggaagcacggtgagtgagaagcttgggaaaaccaaccatgcactttggaaggtgcaggtttgtgctgcaattcacgacgcgcgtctacaggggcacctgactggcgcagcaaagaagcccgacgctgagattgccgtcacagttgacggcaagacggagaagaaggcgaatccggcgtttgaagattgggaagccgtggatcagcaggtcctaggcttcctcctcgcatctctttcaagagatgtgctcatgcaagtcgcaaggtgcacaacggcggctgaagcatggacaacaattgatcagatgtactccacccacaccagagcgcgagcaatcaacacatactatgtgctcaccaacaccaagaagggaaacatgtcccttcctgagttcttcggcaagatgaaggcgcttggtgacgagatggcggctagcaccgggcgacctgttgaagaagaagagatgatcatgcacatcattgctggccttggcaagggatacagcgaggaacccaggagaacgtcgtcaaccttgcaagccgtggaggtggcggcaatggaggaggtcgcggtggcggcaacttcagccgcggcagcagcggaggcgctccccaaggcggtcgcgggcgcagcaacaatgccggaggccgctgaggccgcgggcgtggacgagcaccaggggctgcagatcgccgaccaacatgccaagtctgcttcaaacgaggccacactgccacagattgctggtacagcagctgcggcagcgagctcctcctatggcatcacaccaattggtacatcgatatcggcgctacagatcacatcaccggtgagttggaaaaaactcacggtgaaagacaagtacaatgggaatgagcagattcacactgccagcggtgcaggtatggatataagccatgttggtaatactgttgttcatacccctaatagtcgcaacatccatcttaaaaatgtgctatatgtccctcaagctcagaaaaatcttatatctgttcatcgtctagttgagaataactctgcttttcttgaacttcatcgagattatttttatcttaaggatctggtcaccaagaaaatgctccttagaggaagatcacattgcaggctctatccacttcccaagccatccttgaatggggatgaacaggtattccattcatgggctaatccacctgctaatccgcctaatatgtctcacaattttcctcaagatgctgcaacagatcaaacagccaaagaagatccgcctggcgctgactcccatgatgattcctgctcccgccctgacggatctgtgcaccgctcccctgcgcgcacgcctgacgcgtctcctgtccgccagtccagtgctgacacgtctctgcaccagcatccgtctgccgccgatcgcattattctgcaggggccaccgccgcatcaggagacaagggggcagcagtcaggcacaatgacaggcacagcgacgggcgaagagacgttgggcagtcctgtaacagatgttgaaatacttgacatgaatgacattgatactgatgtcacaggtattaatcccgatgccgacactatactgcctcatgttcaacagatggagactcaggaaccacaacaggtccgtcccagaacaaggctacaaagtgacattcacaaggaaaaggtgaacctagtgatcaaagaggccctaaaggacaaaaattggaaattagccatggatgcagaatatgaagcattagttaagaataacacttggcacctagttccacctcagagagggaacaatgtcatcgggtgcaaatgggtgtataaaattaaaagaaaggctgatggttctctagatagatataaagctcgtctagtagataagggattcaaacaaaggtatggtatagattatgaggatacctttagtccagtagtaaaagcagccacaattaggataatattatccattgtcgtgtctagaggatggagtcttagacaactggatgttcagaatgcttttcttcatgggtatctagaagaggaggtgtatatgcaacaacctccagggttcgaggatgtcaccaaaccacactatatatgcaaacttgataaatccctgtatggactaaaactggccccaaggacctggtttgctagactgagtcagaaattgattgaacttgggttcagtggatcaaaggcagacacttccttgttcttcctgaataaaggggaggtcactatctttgttcttgtttatgttgatgatataattgtagccagttcatcagagagggcaattgcagctttacttcaggatctaaagacagactttgccttaaaagatcttggagaactacactactttcttggtattgaggtaagcaagatacataatggtattattttgacacaagataagtatgctactgatttactaaagaaagtaggaatgatgaattgtaaactagcagctactcctttgtcagtaagtgaaaaattttctgttcatgaagggtcccctttaggtccaaatgatgctacacaatatagaagtatagttggtgccttgcaatatttaactctcactaggcctgatatagcctcctctgttaacaaagtttgtcagttccttcatactcccacaacagtacattgggcagctgttaaaagaatcctaagatatataaaacaatgtactaagatgggcttgaatatacataagtcagggtctacactggtcagtggattttctaatgcagattgggctggaagtatagatgacagaaggtcaacaggtgggtttgctatatttgttggctcaaatctagtgtcatggaatgctagaaaacaagccacagtgtcaaggtctagtactgagtctgagtataaggcgatagctaatgcaacagcagaaattatgtgggtgcagactctgctttctgagttagggattaaaagtccccgtgcaggtaaaatttggtgtgacaatcttggtgcaaaatatttatctgctaatccaatgtttcatgcaagaacaaagcacatagaagttgactatcactttgtcagagaaagg

SEQ ID NO: 9621 - DNA, 4428 bp, Oryza sativa
  Clone ID: PAT_MRT4530_1601C.1
tcactcttgtggaggagaaggaggacgcaccaaagtggaaggataaggagcatcatgactacgatgatacacaaatgcttgggagctctccaacatttggactcgagaatctaatgtacccactctagtgtgcaatctccccacggaagcattcaagtctccaacatcggtgcgcaagccacgaacatcctcatgcaaagcttcatgcccggtagacaagcgttgaatgctttcacttagggtattaatagctccaagtaccgggttgaagtactcgttgggttgcattccaaaataagcatactgtggatggaagaaagtatttggatcatacccaggaggaggaggaggaagaggtgctgagcttgagctagctccaggatgagaggagggcgccgccctaggagcacagggagctccaagctgaaggcggggcttgtactgcttgtgcttcttcaaattttgcccagcagccccaagcttgtcttgaatcaacctcatgatgtaaggggcataatagattccctgagtgaaggtccccttggagatggcaatctcttgcatcatgagagacacaatgtcgaactgacggccctgaatgattgcatcgatgacgtgccaagccacccccctaatgtcatcattgttgccaaggcgagggaggatggtagctctcacaatcctgttaaccacactggggatagtcctcaagccggcaaccttcccatgtgtgtaccgcactccatcttcataaaactgagagagatagtctatggagagcagattatgggtgtgcttctcatgcaagtcatctccaaagtccaagcgaatattgaggagccgccggaattgcctcctagagatagaacagtggagggtgtcggacatccacttcatctcactatagtccccagccacccacactgtaacataaaactgccggatcaaatcttcattgtagtcttgcttgagggtcacaatccagtcaatgccaacagtcttgaagagatcctgctcatacacagacttctggaaagcggtgtgaaaacggggatccggggtgtcccgaggcctcaaaaactgatcatggtgcctcaagatggtatactgcgatggattcctcatgttcacaacaaactggatggagggatcaatgtgcatattatcacttccttcatcctcatcctctccacttccactgttatcatctccactagcctcctcactagccccctcaacatttgcctcaacctcttcatcactttgagcataatcatctccgctcgattcctcaggctcactcacggcatccggagtgggtgcacgacgaccatggcaagtgcggggaggcatcactccctcattaaggtcgagatgcccgttggttgccataggtgtcttgatgggcttcgcatcctccaagccagacctcttgagtagatccttgatgtacttggtttggctcacgaacgtcccatccttgagttgcttgatttgaagtccaaggaagaagctcaactctccaatcgtggacatctcaaattccctagatatcatatcaccaaattccttgcaaaatacctcattagtagaaccgaatatgatgtcatcaacataaatttgacacacaaagaaatcatcaccaatgatttttgtgaaaagggtggtgtcaacttttccaattttgaaatcctttgacaaaagaaaatctctcaatctttcataccaagcccaaggagcttgttttaaaccataaagagcttttgagagtttataaacatggttaggatttttaggatcttcaaaaccgggaggttgttcaacaaagacaagttcggcaattttaccatttagaaaagcacttttcacatccatttgaaatagttttatatcaaagcatgatgcaaatgcaagaaggatgcgaataacctcaagtcttgccacgggggcaaaagtttcaccaaagtccaaaccttcaacttgtgtaaaaccttgtgccaccaatcttgccttgtttctcaccaccaacccgttctcatcttgtttgttcctaaagacccactttgtccctatgacattgtggtttctaggtctttcaaccaaagtccacaccttgtttcttgcaaaattgttgagctcttcatgcatagcattcatccaatccggatcacaaagagcttcatctatatgttttggctcaagacaagaaacaaacgagtaatgttcacaaatcgaagcgacacgagatcgagtttgaacacccttactaatgtcgcccaacacttggtcaattgggtgatccttggaaagagcggtgtgtatcctcggtggcataggtggatcttgtgccttctcctcctccacttcaacttgagcttgacttggcgtagcggaagtagatggctcatcttgagtggaggtggatggcttgtcttccacttcaataggcttgacatctccaattgacatgttcttcatagctctcatcaagccttcatcacctttgttcttgttgtagacccggtatgccttgctatttgaagcataacctataagaaacccttcatcacaccgactttcaaatttggttaatctaacaccctttcctttactattgtctccaaatgtcactttttcttgttctttccctccttcttcaaatgtggtgaacatagctctatcaccggtcatgtgttgagtgcatccactatcaagcacccaatggcttccaccagtgcggtagttcaccactgagtataggggaacccacatatctagcaacaatgctaccattatgagccgtcccttgaagcacctctccaaactcttgttgagcttggccacttgctccttaagctcattgttctcaacaacaagtgaggcatcataaatagaaatacaagagctagagctagagctaggcatatccacaggatcatcacaagaggtagaaatgctagatgatgcaacatgagcaatatggcaagtagcactatcatcaagcaaatcacaagatatgccaacatcaatgagagctccatgttgagtagtgaaaaggaggttttcatgagctttcttaagcttctcatgagaaatggtgagtctctcatgagaggtctttagctcctcatacaagatctctaaagaagcatgatccttctttagggccttgaagttgacaatctccttttcactataagcatggaactcctcaaacatactcacaagctcatcataggaaacatcatcacaatcatcatcactctcactatcactaagagatgttaccttagaggagccctttgccatgagacaaattggagcgaacaatgatggagcctccttgatggcaacaacggccatcttcttcttcttggagcttgcatcatcaccaccttcttcctcggacccggatgaagcggagctctcctcatttgagtcccattccccgatgaatgcctcaatcttcttgccttccttcttgagcttcttcatgagcttgtagcctccactctttttcttggatgacttgtctccatcatcatccttggaagagcacttggaagcaaagtgtcccttctcaccacactcaaagcacttcaagttggagagagtcttgttgggtcttttatttcttctcctatttgagttggagccccttcctctctcctttctccttcccaagagatcattgaaccttctatcaagaagggctatctcttcctccaagtcctcattgacttcattcaccttgcccttgcccttatcttcaacttcggcttggagagcaatgcacttcttggaaggtgaggcttcctccatctccttcttcttcaacttgtacatgtcattggtgttgatcttccccaagaggcttgcgggtgtcatccttgacatgtcggagttgatgagcatggtgacaagggtctcatacttctccggtagagccctaagcatcttttgggcaacctcaagatcagtgtagtttgccccaagccccttgagatcattcacaatgacattgagcctcccatacatgtcattcacactctcatgaggcaacatggagaatgtctcatattggatcttgaggaaatgaagcttggcatccttgtactcgcttgtgccctcatggatctccgccaacttgttccaaatctcatatgcggtctcaaggttgctcactctatcgaactcctcttgactcaaagagttgaacaaagcattcatggcttgggcattgagttggaggttgcggtgatcaatctccgtcaagggcgtgccggtgatagcaaagtctacatccacaatactccaaatatggaagctcatagctttgaggtgagtagacattttaattttccaagtagagtagtttgtgccattaaacatgggagccttccctacatggttcacctcgttcgacat

SEQ ID NO: 9622 - DNA, 349 bp, Oryza sativa
  Clone ID: PAT_MRT4530_16020C.1
ttttttttttttttttagctttgttttgttttatgtaacttatataacaactctaatttttgttactacagaaaacaatgggggaaaaaagggcaaaggggaaagcactccacaagggaggctgggctaaatgtaaaaaatgggaacgatgctattacaaaaatcggaactccacaagctacaaaagggcattaacgggttacaggttaagcactttaaactctaaaccaaaaatggggttacaacaatcaaataactgggggggggttaggtaaagccaaaagttggaattggggggaaaatgaaaaatatgggaccgaaaaagtggggggggaaaaaaaggtggagg

SEQ ID NO: 9623 - DNA, 580 bp, Oryza sativa
  Clone ID: PAT_MRT4530_16021C.1
cgtttgtgaatgtcatatgctccaaatgttcgcggattagctggattagaattggtagcctactggaattagctgaaatttacacggaataagcctgtatgaatgacatgatggcgccataatttggctctcccttgttgctatgatgtttctctggtgtcgtaacgtgtcgtgtgttgagtccactatttagctaagctaattatggctgcttgctgtatataattgcagtaaaatgtgattgtggaagaagaaaagtgtgttttgtattggccaatcaaaacgtgcagctatgttgtttagcaaaaaaaaaaaaaaaaggtgagaaagctatggatcgtcaaatcaattgtgtcacaggggggaacttgacagtttgcaaatataatgaactatggatcttcgaatagtttgattagtggctcttagtcttcatagtgtcttgaatgacaggtatcttgtttaccatggttgactggacgtaggtgtttgtgttgtcatatcctttggaattcagtttcttgatgaactgtcctaaactgttttctggcggtctggcctatcatataaaaataggtgc

SEQ ID NO: 9624 - DNA, 2217 bp, Oryza sativa
  Clone ID: PAT_MRT4530_16022C.1
gtctatgctgcaattcacggcgcgcgtctacaggggaacctgactggcgcaggaaagaagctagacgccgagatcgccgtcacagttgatggcaagacggagaagaaggcgaatccggcatttgaagattgggaagccgtggatcaacaagtcctaggcttcctcctcacatctctttcaagagatgtgctcatgcaagtcgcaagagcgcgagcgatcaacacgtactatgcgctcaccaacaccaagaagggaaatatgatggcgcttggtgacgagatggcggcaagcaccgggcgacctgttgaagaagaagagatgatcatgcacatcattgccggccttggcgagggctacagcgaggtcatctcagcaatgagtgcgcgccccgaaccaatgaccatgggagaattatactctcagattgttaacttcgagggtcgcatggcactctaccgaggaacccaggagaacgtcgtcaactttgcaagccgtggaggtggcggcaatggaggaggttgcggtggcggcaacttcagccgcggcagcagcggaggtgctcccctaggcggttgcgggcgcggcaacaatgccggaggtcgcgggcgtggacgagcaccaggagctgcagatcgccgaccaacatgccaagtctgcttcaagcgaggccacactgccacagattgctggtataggtatgatgaagactatgttcctgataacaaacatgttgcagcagctgcggcggcgagctcctcccatggcatcgacaccaactggtacatcgacaccggcgctacagatcacatcaccggtgagttggaaaaactcacggtgaaagacaagtacaatgggaatgagcagattcacaccgccagcggagcagatgtgtcaaatgagtcagtttgtaatgcttgtcagcaagcaaagagtcatcagttaccatttcctgtttcatctagtgtctcccaacaccccctagagcttgtcttctctaatgtatggggtcctgctccagagtctctagggagaaagaagtactatgttagtttcattgatgattttagtaaatttacttggatctatatgctacagcataagtctcaagtctttgaaaagtttcaggagtttcaggaattccattcatgggctaatccacttgctaatctgcctaatatgtctcacaatttgcctcaagatgctgcaacagatcaaacggccacagaagatccaactggcgctgactcccatgatgatccctgcgcccgccctgacagatctgtgcatcgctcccctgcgcgcacgcctgacgcgtctcctgtccgccagtccagtactgccatgtcgccacaccagcattcgcctgctgctgatcgcattgttttgcaggggtcaccgtcgcatcgggagacaagggggcagcagtcaggcacagcgacgggtgatgggacgtcgggcagtcctgcaacagatattgaaacacctgacaccaatgacattgatactgacgatcttgatgtcacagttggagattcaggaaccacaacaggtccatcccagaacaaggctacaaagcggcatttgcaaggaaaaggtgaacctagtgatcatctagaggctctaaaggataaaaactggagattagccatggatgcagaatatgaagcattagttaagaataacacttggcacctagttccacctcagagaggaacaatgtcatcggggtgcaaatgggtgtataaaattaaaagaaaggctgacggttcactagatagatacaaagctcgtctagtagctaagggattcaaacaaagaggatggagtcttagacaactggatgttcagaatgcgtttcttcatgggtatttagaagaggaggtgtatatgcaacaacctccagggtttgaggatgtcaccaaaccacactatatatgcaaacttgataaatctttgtatggactaaaacaagccccaagagcctggtttgctagactgagtcagaaattgattgaacttgggttcagtgaaccaaaggcagacacttccttgttcttcctgaataaatgggagttcactatctttgttcttgtttatattgatgatataattgtagccagttcatcagagagggcaactgcagctttacttcaggatctaaagacatattttgccttgaaagatcctggagaactacactacttttcttggtattga

SEQ ID NO: 9625 - DNA, 1200 bp, Oryza sativa
  Clone ID: PAT_MRT4530_16023C.1
tcagagccaaatcttcttcttcttctccatctctctcctctcctcttctcttctctcgttggaaggtgaggaggtgaggtgaggttgggggcgccgtttgatggacgcgaagaggacgccgccgccgccgacgccgccgaaccctaaccctagcgtaattggcagcggcgccgccgcggacggcggcggatttgggaggggggaagcggcggcggcgacgaagcacatgctggccttccacttcctgcgcgcgctgtcgcggatccaccgggcgacacccgtgacgcggcgcacgcggaccatccgccgggcggcctactcctccatggcgcgggcggcgagcccgcgccgcgcgtggagccgggcgctgctcggccaggtccgcgcgcggaggtccaggacgctgatgaggcgcgccgccggctggtgcgggaaggcgcgtcgtagccgctcctgcgccttctcccgcctccgccagaggcgtcaggattattgctgccggagagacgtcggcggcggctcgggctgttccgccgcctccgcggcagcagggcgagccgccgagggccgaagcgctccggcgcctggtccccggcggcgccggcatggagtactccagcctcctggaggagaccgccgactacctccgctcgcttcgcgcgcaggtgcagctgatgcaaggcctcgtcgacctcttctcctaccaatgatccatccatcgagtaattaacatatgcatcatatggttaattatttattcgttcgtcttgcacgcatcacatgctgctgttgctgcttctgttctacttctctacctacatcatatcgatctatctcttgttcatgtggatcgatcgatcgatgcatatgatggttggttaagataggggattattattggggtaattaaggggaggatctaggagattgggtggagtgttagtatacatgttttttgtttttgttggtaattaagattattggtaggtgatgaaaagattgttggatacatacatccatgtatagaagtataggccgaccggctgggagcacaatgaattgaatcatatataccaagaagaaggctttatagagagagagagagagaggggtaattaattgtaacatataaagagaaggatgaagttacatatactatatgatagtgaattagtgcagtgttaattgttgtcaattgtc

SEQ ID NO: 9626 - DNA, 4593 bp, Oryza sativa
  Clone ID: PAT_MRT4530_16024C.1
atggcgtcctcctccaccaccagtagcgccaatcgtctccagggaagcacggtgagtgagaagcttgggaaaaccaaccatgcactttggaaggtgcaggtttgtgctgcaattcacgacgcgcgtctacaggggcacctgactggcgcagcaaagaagcccgacgctgagattgccgtcacagttgacggcaagacggagaagaaggcgaatccggcgtttgaagattgggaagccgtggatcagcaggtcctaggcttcctcctcgcatctctttcaagagatgtgctcatgcaagtcgcaaggtgcacaacggcggctgaagcatggacaacaattgatcagatgtactccacccacaccagagcgcgagcaatcaacacatactatgtgctcaccaacaccaagaagggaaacatgtcccttcctgagttcttcggcaagatgaaggcgcttggtgacgagatggcggctagcaccgggcgacctgttgaagaagaagagatgatcatgcacatcattgctggccttggcaagggatacagcgaggtcatctcggcagtgtgtgcacgccccgaaccaatgaccgtgggagaactatactctcaggttgttaatttcgagggtcgcatggcactctaccgaggaacccaggagaacgtcgtcaaccttgcaagccgtggagccgcggcagcagcggaggcgctccccaaggcggtcgcgggcgcagcaacaatgccggaggccgctgaggccgcgggcgtggacgagcaccaggggctgcagatcgccgaccaacatgccaagtctgcttcaaacgaggccacactgccacagattgctggtacagcagctgcggcagcgagctcctcctatggcatcacaccaattggtacatcgatatcggcgctacagatcacatcaccggtgagttggaaaaaactcacggtgaaagacaagtacaatgggaatgagcagattcacactgccagcggtgcaggtatggatataagccatgttggtaatactgttgttcatacccctaatagtcgcaacatccatcttaaaaatgtgctatatgtccctcaagctcagaaaaatcttatatctgttcatcgtctagttgagaataactctgcttttcttgaacttcatcgagattatttttatcttaaggatctggtcaccaagaaaatgctccttagaggaagatcacattgcaggctctatccacttcccaagccatccttgaatggggatgaacaggtattccattcatgggctaatccacctgctaatccgcctaatatgtctcacaattttcctcaagatgctgcaacagatcaaacagccaaagaagatccgcctggcgctgactcccatgatgattcctgctcccgccctgacggatctgtgcaccgctcccctgcgcgcacgcctgacgcgtctcctgtccgccagtccagtgctgacacgtctctgcaccagcatccgtctgccgccgatcgcattattctgcaggggccaccgccgcatcaggagacaagggggcagcagtcaggcacaatgacaggcacagcgacgggcgaagagacgttgggcagtcctgtaacagatgttgaaatacttgacatgaatgacattgatactgatgtcacaggtattaatcccgatgccgacactatactgcctcatgttcaacagatggagactcaggaaccacaacaggtccgtcccagaacaaggctacaaagtgacattcacaaggaaaaggtgaacctagtgatcaaagaggccctaaaggacaaaaattggaaattagccatggatgcagaatatgaagcattagttaagaataacacttggcacctagttccacctcagagagggaacaatgtcatcgggtgcaaatgggtgtataaaattaaaagaaaggctgatggttctctagatagatataaagctcgtctagtagataagggattcaaacaaaggtatggtatagattatgaggatacctttagtccagtagtaaaagcagccacaattaggataatattatccattgtcgtgtctagaggatggagtcttagacaactggatgttcagaatgcttttcttcatgggtatctagaagaggaggtgtatatgcaacaacctccagggttcgaggatgtcaccaaaccacactatatatgcaaacttgataaatccctgtatggactaaaactggccccaaggacctggtttgctagactgagtcagaaattgattgaacttgggttcagtggatcaaaggcagacacttccttgttcttcctgaataaaggggaggtcactatctttgttcttgtttatgttgatgatataattgtagccagttcatcagagagggcaattgcagctttacttcaggatctaaagacagactttgccttaaaagatcttggagaactacactactttcttggtattgaggtaagcaagatacataatggtattattttgacacaagataagtatgctactgatttactaaagaaagtaggaatgatgaattgtaaactagcagctactcctttgtcagtaagtgaaaaattttctgttcatgaagggtcccctttaggtccaaatgatgctacacaatatagaagtatagttggtgccttgcaatatttaactctcactaggcctgatatagcctcctctgttaacaaagtttgtcagttccttcatactcccacaacagtacattgggcagctgttaaaagaatcctaagatatataaaacaatgtactaagatgggcttgaatatacataagtcagggtctacactggtcagtggattttctaatgcagattgggctggaagtatagatgacagaaggtcaacaggtgggtttgctatatttgttggctcaaatctagtgtcatggaatgctagaaaacaagccacagtgtcaaggtctagtactgagtctgagtataaggcgatagctaatgcaacagcagaaattatgtgggtgcagactctgctttctgagttagggattaaaagtccccgtgcaggtaaaatttggtgtgacaatcttggtgcaaaatatttatctgctaatccaatgtttcatgcaagaacaaagcacatagaagttgactatcactttgtcagagaaaggaatgataggaacgcatatgaaccaagtgttctctcaattggcccttatcaccattcagagttgcctctgcttgccatggaaacagagaagtggatatgtgtagactacattcttaagctaaaccatcatgttagcttgcgtgagtacccgagcttgctttctgggctggagaaacaggtatgcaagggatttgcagggctaaagacacacatgaagcttctgttgatggtcatgggatccaagaagatagtgatactgttgatgaatcaaattcccttcttcgttattagggccatttatcagctgttctctcgtgataccatggcgactacaccattacttacaagtgatatttctgaattcatggaaggcattctttaccatttcccaaaagcaatcactgaggagaataggccagtagacttttaccatctgctacatctgtgccgtatgtacctgaagcctggtcacaaggtggaggataaacagcatcatggtcatgctggaaagtctcactactttgactatatatctgattttggccaaaaggtcttctgtgttggacaggagcaaaacatgttatatgaattaagcaagttgaattcaccagagcatgtttatcggtggcgtagagcagtggactatcatgaggcaggaatagaattcaagaaacgggactttcatgaagaagaccctcattctttgttggacattagattcaggaaaggagtcatggaaataccatgtttgccaatcgatgataaatcttctttgcttttcagaaatcttgttgctcttgagcaaacatgtcctcaagtcagcgacgacatcactgcttacattgtgctcatgtctgaatttgtcagtacagctgctgatgttgcacttcttgcacagaaagggataatagtccatcagatggaaagcgatgaggaagtgtcgactctcttcaccaaactttttgagtatgtggcatttgactttagaggtgaacactacctgaaatccttatattgtgccatggaagcacattaccaaagtcgtctaaatagagatatgtttgggcaaaagtctgccgcaaagacttatggtatcttagagtttgttagagatagtggtcgtgtccggatcaaatcaactggcacgctcatacattcgaaggcaagctttggacctgcactggagttaagcagatctcccaggcctcgtgttttctgtcaacagtaccatgagatgcagtttaatgacctcttcggagacctggtcctcagcgtcaaagatactagtgtcgtccccgttcacattagtggcttagctccaccgaagggcaatggggatggcgtcaaagtcattggtgccgtcatattggatcacgacgccaatgacgtagccgatgcgaaaagggatcatttctag

SEQ ID NO: 9627 - DNA, 460 bp, Oryza sativa
  Clone ID: PAT_MRT4530_16025C.1
cgtccgcccacgcgtccgcccacgcgtccgcccacgcgtccgcccacgcgttcgcggacgcgtgggcgcggcggcggcggcggcggcgggcggtgaccacaaccaccaccagcgttgtcggctaccggagggcgctgctttccagggaggcggctgcggttggatccacaacgtttcagctgagactcggctgtgtggtgaagtctgagtatagagactgtgttttgttattaagtgggttcgttttgtttttgtatttttattttagtttcttgacttgtattatctttttttttgttcttttggttttttatgtgactttttattttttttggtgatttctttttttttttatttttttcttgtctattttgtttgtttttatcattattaattctcacttattttttactccagtttatattttattttttttatttttcttataatatccttttta

SEQ ID NO: 9628 - DNA, 1236 bp, Oryza sativa
  Clone ID: PAT_MRT4530_16026C.1
atggaaacagagaagtggatatgtgtagactacattcttaagctaaaccatcatgttagcttgcgtgagtacccgagcttgctttctgggctggagaaacaggtatgcaagggatttgcagggctaaagacacacatgaagcttctgttgatggtcatgggatccaagaagatagtgatactgttgatgctgttctctcgtgataccatggcgactacaccattacttacaagtgatatttctgaattcatggaaggcattctttaccatttcccaaaagcaatcactgaggagaataggccagtagacttttaccatctgctacatctgtgccgtatgtacctgaagcctggtcacaaggtggaggataaacagcatcatggtcatgctggaaagtctcactactttgactatatatctgattttggccaaaaggtcttctgtgttggacaggagcaaaacatgttatatgaattaagcaagttgaattcaccagagcatgtttatcggtggcgtagagcagtggactatcatgaggcaggaatagaattcaagaaacgggactttcatgaagaagaccctcattctttgttggacattagattcaggaaaggagtcatggaaataccatgtttgccaatcgatgataaatcttctttgcttttcagaaatcttgttgctcttgagcaaacatgtcctcaagtcagcgacgacatcactgcttacattgtgctcatgtctgaatttgtcagtacagctgctgatgttgcacttcttgcacagaaagggataatagtccatcagatggaaagcgatgaggaagtgtcgactctcttcaccaaactttttgagtatgtggcatttgactttagagatatgtttgggcaaaagtctgccgcaaagacttatggtatcttagagtttgttagagatagtggtcgtgtccggatcaaatcaactggcacgctcatacattcgaaggcaagctttggacctgcactggagttaagcagatctcccaggcctcgtgttttctgtcaacagtaccatgagatgcagtttaatgacctcttcggagacctggtcctcagcgtcaaagatactagtgtcgtccccgttcacattagtggcttagctccaccgaagggcaatggggatggcgtcaaagtcattggtgccgtcatattggatcacgacgccaatgacgtagccgatgcgaaaagggatcatttctag

SEQ ID NO: 9629 - DNA, 435 bp, Oryza sativa
  Clone ID: PAT_MRT4530_16027C.1
tttgttttttttttttttttgtttttttttctttttttttttttttttttttttttttttttttttttttttaaaaaaaaaaaaaaacttccttttttttttttggtttgggcctgcatttgctgatcggggggaccatgaaccccaaccctgccccatttccccattggcccaacaaaagggggccccatcagcagggggggggccttccccttttatcaccccccccctggcgggctgggtcatttttttggggttttccccccccccccctgcggtaattaagcccctcccttttttttttctttttttacacataaaacctcggaatcttgtgttttgggcgcccttaacataatttgggggactccactggcttgcccccacggtggaattagggaggagggggggtccattgttcttgggggggggccc

SEQ ID NO: 9630 - DNA, 4280 bp, Oryza sativa
  Clone ID: PAT_MRT4530_16028C.1
tactcgatggcgtcctcctcctacaccaccagtagcgccaatcctctccagggaagcttggtgagtgagaagcttggaaaaaccaaccatgcactttggaaggtgcaggtctatgctgcaattcacggcgcgcgtctacaggggaacctgactggcgcaggaaagaagctagacgccgagatcgccgtcacagttgatggcaagacggagaagaaggcgaatccggcatttgaagattgggaagccgtggatcaacaagtcctaggcttcctcctcacatctctttcaagagatgtgctcatgcaagtcgcaaggtgcacaacggcggctgaagcatggacaacaattgattagatgtactccacccacaccagagcgcgagcgatcaacacgtactatgcgctcaccaacaccaagaagggaaatatgatggcgcttggtgacgagatggcggcaagcaccgggcgacctgttgaagaagaagagatgatcatgcacatcattgccggccttggcgagggctacagcgaggtcatctcagcaatgagtgcgcgccccgaaccaatgaccatgggagaattatactctcagattgttaacttcgagggtcgcatggcactctaccgaggaacccaggagaacgtcgtcaactttgcaagccgtggaggtggcggcaatggaggaggttgcggtggcggcaacttcagccgcggcagcagcggaggtgctcccctaggcggttgcgggcgcggcaacaatgccggaggtcgcgggcgtggacgagcaccaggagctgcagatcgccgaccaacatgccaagtctgcttcaagcgaggccacactgccacagattgctggtataggtatgatgaagactatgttcctgataacaaacatgttgcagcagctgcggcggcgagctcctcccatggcatcgacaccaactggtacatcgacaccggcgctacagatcacatcaccggtgagttggaaaaactcacggtgaaagacaagtacaatgggaatgagcagattcacaccgccagcggagcaggtatggatataagccatgttggcaatactgttgttcatacccctaatagtcacaacattcatcttaaaaatgtgctatatgttcctcaagctcagaaaaatcttatatctattcatcgtctagttgaggataactctgcatttcttgaactacatcgtgattattttttgtcttaaggatctagccaccaagaaaacgctccttaaaggaagatcacattgcaggctctatccccttcccaagccatccttgaagtatgcttgcaatgccaccaagatctccttccatcgatggcacagtcgtctaggtcatccctcctcgtcagtggttagacaggtggtcaataaaaataatctcccatgtttagatgtgtcaaatgagtcagtttgtaatgcttgtcagcaagcaaagagtcatcagttaccatttcctgtttcatctagtgtctcccaacaccccctagagcttgtcttctctaatgtatggggtcctgctccagagtctctagggagaaagaagtactatgttagtttcattgatgattttagtaaatttacttggatctatatgctacagcataagtctcaagtctttgaaaagtttcaggagtttcaggttatggtagaacggctgtttgacaagaaaattctagccatgcaaactgactggggacgggagtaccaaaccctaaattctttttttttcgaaaattggcatagttcatcatgtgtcatgtcctcacacacaccaacaaaatgggtctgctgaaagaaaacatagacacatagttgaggtaggtctctccttactatctcatgcctctatgccattgaaattttgggatgaagcctttcaggcagccacctatctaattaatcgagtccctagcagagttaatactacccccttggaaaaattatttcatcaaaaaccagattattcggccctacggatttttggttgtgcatgttggcaaaaccttcgtccctataataaacacaagttgcaattccgctctactagatgcgcctttctcggttttagcaacatgcacaaaggtttcaagtgtcttgatatatcctcaggccgtgtatatatttcccgtgacgttgtctttgacgaaacggtgtttcccttctccgaactcgatgctaatgcaggagctcgttttcagtctgaattatctctcttggcacctaatattattagtggggatgaacaggaattccattcatgggctaatccacttgctaatctgcctaatatgtctcacaatttgcctcaagatgctgcaacagatcaaacggccacagaagatccaactggcgctgactcccatgatgatccctgcgcccgccctgacagatctgtgcatcgctcccctgcgcgcacgcctgacgcgtctcctgtccgccagtccagtactgccatgtcgccacaccagcattcgcctgctgctgatcgcattgttttgcaggggtcaccgtcgcatcgggagacaagggggcagcagtcaggcacagcgacgggtgatgggacgtcgggcagtcctgcaacagatattgaaacacctgacaccaatgacattgatactgacgatcttgatgtcacagcatcccagaacaaggctacaaagcggcatttgcaaggaaaaggtatataccgatggcacaattaaatattcctgctttactagttcaggtgaacctagtgatcatctagaggctctaaaggataaaaactggagattagccatggatgcagaatatgaagcattagttaagaataacacttggcacctagttccacctcagagaggaacaatgtcatcggggtgcaaatgggtgtataaaattaaaagaaaggctgacggttcactagatagatacaaagctcgtctagtagctaagggattcaaacaaaggtatggtatacattatgaggatacctttagtccggtagtaaaatcagccacaattaggataatatgccgtgtctagaggatggagtcttagacaactggatgttcagaatgcgtttcttcatgggtatttagaagaggaggtgtatatgcaacaacctccagggtttgaggatgtcaccaaaccacactatatatgcaaacttgataaatctttgtatggactaaaacaagccccaagagcctggtttgctagactgagtcagaaattgattgaacttgggttcagtgaaccaaaggcagacacttccttgttcttcctgaataaatgggagttcactatctttgttcttgtttatattgatgatataattgtagccagttcatcagagagggcaactgcagctttacttcaggatctaaagacatattttgccttgaaagatcctggagaactacactacttttcttggtattgaggtaagcaagatacataatggtattattttgacacaagataagtatgctactgatttactaaagaaagtaggcatgataaattgcaaaccagcagctactcctttgtcagtaagtgaaaaaatgtctgttcatgaagggtctcctttgggtccaaataatgctacacaatatagaagtatagttggtgctttgcaatatttaactcactagacctgatatagccttctctgttaacaaaacctgtcagttccttcatacccccacaacagtacattgggcagctgttaaaagaatcctgagatatataaaacaatgtactaagatgggcttgaatatacataagtcagggtctacattggtcagtggattttctgatgcagattgggctggcagtatagatgacagaaggtcaacaggtgggtttgctatatttattggctcaaatctagctagtgtcatggaatgctaggaaacaaaccacagtgtcaaggtctagtactgagtctgagtataaggcgatagctaatgcaatagcagaaattatgtgggtgcagactgcttgctgagttagggattaaaagtccccgtgcaggtaaaatttggtgtgacaatcttggtgcaaaatatttatctgttaatccagtgtttcatgcaagaacaaagcacatagaggttgactatcactttgtcagagaaagggtaagtcagaaattgttggaaattgattttgtttcttccggtgatcaagttgctaatggatttactaaaccattgtcaactaatcttctggagaagtttaaagccaatcttaacctaaccgagaag

SEQ ID NO: 9631 - DNA, 1077 bp, Oryza sativa
  Clone ID: PAT_MRT4530_16029C.1
atgtctaccaagaaatccggcgccgccgacgtccagccatcgccgtcgtcgtgctcgaccatcgtcgtcaccgaggcgagcggccaccacgtcctcaagatcgatggttacacgaggacgacgatgatggtcgccaccggcgaacacctcgactccggcgagttccacgtcggcggctacgcctggcatctccggtactaccccaacggctacgaccaggagttctcgagctcgatatccttcgctctcgtccggaccgccggcgccggcgacaatgtccgtctccatgcgagagccaagatcagcttgctcgacctcgccggcgagccggtggcacggtacagccaacccgtcgacaagtgttccacctccaaggcaagcgatccatgggtttgcaagagcttcatcgagagggatgagctggagaagtccggccatgtcgtcggcgaccgcctcgccgtccggtgcgacctcaccttcaacgtgcaggaccgcctggtgagggagctcgtcgccgtgccgccgcccctcctgcgccgccacatcggcgagctcctcggcgacgccaggacgtccgacgtgaggttcaaggtcggcggcgagacgttcccggcgcaccggtgcgtcctcgcggcgcggtcgccggtgttcagggcggagctcctcggccccatgagggagcacgccgcgacgaccatccgcgtcgacgacatggacgcctccgtgttcgccgctctgctgcgcttcgtctacaccgacgagctgccggagctggacggcggcagcgcggcggcgatggcgcagcacctgctggtggcggcggacaggtacgacatggagaggctgaagaaggtgtgcgaggacaggatggtcaggcacctcgacgtcggcacggcggcgacgtcgctggcgttggccgagcagcacgattgccctgagctcaagaaggccatcctgaggttcatggcgtcgccggcgaggttgaaggcggtcatggcgagcgatgggtatgagcacctggtgacaagcttcccctccatagccacggagattcttgcaatgtttgctgcacattga

SEQ ID NO: 9632 - DNA, 432 bp, Oryza sativa
  Clone ID: PAT_MRT4530_1602C.1
gagaccgggggggctggaccgatcttattgttgcatttgcccgtctattgtaacgatgcatggacgattgttaaccatcataagttatacgccattttttgaggtggtagggccaatcctgtgattacaccaaaagaaagaactgttctttgtgacagcctacttggtaattatacatctatgctacatgaacctttgttggccatagctaaagtctcgtcaaaccacgacttgtcgttcttgtctaaactatcactagtgggagcgataatggcccacttcattggtcttgagaagcgaggaacaacacactttatgttagaaaacatggtgaccttgctactttttcacaccggaagctttctcctggtcgagatcaccctttagaactgactaattggcttggctgggctgattcagctggctggctat

SEQ ID NO: 9633 - DNA, 135 bp, Oryza sativa
  Clone ID: PAT_MRT4530_16030C.1
ctctccctatcttattctactcatgaaattatgtaaccggccatttatatcaaatgaaatggctataaggtagagctggcatctaccttatcatgacaaaaaagcgcagaccccaaagtcttggcacacagaagg

SEQ ID NO: 9634 - DNA, 300 bp, Oryza sativa
  Clone ID: PAT_MRT4530_16031C.1
ctatacttgttgctcaaggttttactcaggtggagggtttggattatgatgaaacttttgctcctgttgctaggattgaggcaattagacttttgttggcttttgctacttcgaaagagtttgctgagactatgcgcagggaatttgagatgagcatgatgggtgagttatcgtacacgaaagatcttttgagatggttcaggatggagaattgcaaggcaatttcaacaccaattggttctatagttgtgttggatcctgatgaagatggtgaagctgttgatcagaaggagtatagaa

SEQ ID NO: 9635 - DNA, 1425 bp, Oryza sativa
  Clone ID: PAT_MRT4530_16032C.1
atgcaggctttaatctgcaaattaagtggaagatacttcgataaatcagataaaaatgttgcagtgtgttgcacagttctggttcagggggaggatagtcgtatttttgaagacgagagcgacgacgacgacaacgaggtcggctcggccagtcagaccgccggtacacctccggtcagaccggctccagacgagcagtcagaccggccaggtttgtcggcttccggttttgttgatgctgatcgagatggtcctccagaggctacaacttcgaccagtgagggtacagaatgcgaaacaacttcagaagtcgctgctactttgcatattcaacgacaatatccgcgagaacaaatcattgataatataggtgagcgggctacaatgtttaaggttttcaaaaataaacaaaatcaggatggtttgattgtcagaaataaagctatacttgttgctcaaggttttactcaggtggagggtttggattatgatgaaacttttgctcctgttgctaggattgaggcaattagacttttgttggcttttgctacttcgaaaggttttaaatcgtatcaaatggatgtgaaaagtgcttttctaaatggtttcatacagaaggaagtttatgtcaaacaaccaccagctttgtatggattgaaacaagcacctagagcatggtatgataggcgtaagaacttttttcttgcaaaaggtttttcaatgggaaaggttgacaaaacgctttttgttcatatttatgtggatgatatcatctttggttgttcaactcacgctttggttgtagagtttgctgagactatgcgcagggaatttgagatgagcatgatgggtgagttatcgtacacgaaagatcttttgagatggttcaggatggagaattgcaaggcaatttcaacaccaattggttctatagttgtgttggatcctgatgaagatggtgaagctgttgatcagaaggagtatagaagtgacttgatgcctcgggagagtattgccggtgatggatcaggagtcgacttggggataaggcgatgtgtgaatggtaactctgatcctgggaatggggatgatgatgttgatgacttgggtgatgataagaaggatgataagcaaaaggataagaagggggatgatagcgcagagggtgaactgatgactctcatggatcttgacctcaaacatggggagatggaggtgggagcccaggcaggaaaagaacagaagtgcggtattcccactgactctgacatcgagaatatgagatcagaggaagataaacacaacggataccctcatctcaattgggcggtaagccccatctcaatcaggcatggcgtccgtcacaggctagaagtcactgatgtgaagacctatctcaatcgggcaaacggtcgtcacggatga

SEQ ID NO: 9636 - DNA, 221 bp, Oryza sativa
  Clone ID: PAT_MRT4530_16033C.1
ccggccgggacggccctccccaccaaacgaagcggggccgaggccatagcggctcctagacgctccgcacacaccaaatattgtgccgagcggaactcacggtatccagggagagccacagttggggcgaaacaagaatgcgtgccaccacaggaaaaaagagccggggcaagggcagagcaaggggagaggagcccagaccaagaggagacaagggaaga

SEQ ID NO: 9637 - DNA, 222 bp, Oryza sativa
  Clone ID: PAT_MRT4530_16034C.1
atctcttgtgctgaaaagcttgatggtttaatggttgttttttgtgagcacctcaagtcatgtcaaactcctgggggtactaatttcattacagtgttgcttctcagcttgattagcaaaaggagttcaatttgaggaagggcaaataattacattatgatttgtttcttctgtgtttcctgtcattattgtatggccttatggctatctattcgtataatg

SEQ ID NO: 9638 - DNA, 2139 bp, Oryza sativa
  Clone ID: PAT_MRT4530_16035C.1
atggcgttcgagctggagctaggccctcctcccaacacgaccatggactccatgagcgtccggtaccttctcaaccagatcggcagcgaccgcacgacgcacatccagatcctcgccacggtgggcggcgcgctgctcggcttccaggcgctgctgggctaccggcgccggcgcagcagcaacaagctcttcctcgtcctgctctgggccgcctacaccgtctcctccaacgtcgtctcctacaccgtcggcctcgtccagtccgtcgccgagcccgaccgctacagcgtgcagcagtggtgggccgtcgggctgctcctcctcctcggcagcgccgacaccatgtccgccttcacccgcggcgacgccgagcagagcaaggggatgatggcccagcacgccgtgcagaccgtgctcgtgctctggtggaccatcacgctctccgtctgctggctctacagcatcgtcaagatggggcagcggatcaaggcgatgcgcatggcgagctcctcgcacggcctcgtgcgcgccgccaaggtggtcgccgactacatgcacgacaccgtcgacgcgtgggaccgcgactgcggccatggcggcgacggcgggaccgccgctcgtgacctcgactccgtggacatgggcccgtacaagtatctggtccacggcgaggaagggcgctccacgccgccgtcggagcagacggactaccggacacgtgttccagaagacggcactgtcgtcaccattgacaagatctggcgctgcgacggcgagctgctggtgagctccggcgacggcgtcgtcggcgacaagcggcgggcgcgtgcgcgggcgctcaaggacacgtgcctctccttcgcgctgttcaagctgctgaagcggcggttctgcgggctcgagctcgagctgtcgttcgcccacgacttcttctacaccaagtacccggcgctgttccccaccagcgccgtgctccacgtcgcccgcttcgtctccctcctcgccttcctcaagctcttctacgacttcacctacacggccagctacacagctaagattttcaaagacataagcgccgtcggcatcttctcctccttcaacgacttcctcttcatctccatgatcctcggcgtcgaggtcatgcagcagctgtccaccggatactccgactgggcggtcgtccacttcgtctgcgactacgtcaggcgcgtcgacaagaacaacaagaagcggcacggcggcggcttcggcttccggcaagcggtgatcaagcggttggcgactcgccgggcgaggacgtcgaggcactggcagaacaagctcggccagtactctctcctctaccattcgtcagctggcaactgcctgtcatggctgaccgggcgcctgctggagccgaaggtcgtcaggcttccgcgcgaggtgaaggtggcagtcctccgttcgttcaaggagagcggcggccgtctcgccgtcggccggtcgctggacagccggttgcggtgggcgtgcgaccgcttcctgccgccgtcgacgcagctgcagagcgacacgcactggaagacgcgagctcacacgcacaccgtcctcgtgtggcacatcgccaccacgatgtgcgaccacctggacgccgccgccgccgcagacgacgacgagaacggcgccgaccgcctcgtcgcgacccgcctgtcagggtactgcgcctacctgctggctttcgtcccggagatgctgccggaccacagctacatggccacgctggtcctggacgccgccgtgcaggaggcccggaaacacctcgtcgacgccacggccatggcgaacaagtgcaagaagctgcgtgtcctcggcgagagcagcggcggaggccgcgacgggatactgatggacggagcgaggctggggagccagctgatggccgccagctacgacacccgccggcggtggaagctgctcgcggaggtctgggccgagctggtgctcttcctggcgccgtcggagaacgccgacgcccacgccgagagcctcgcccgcggcggcgagttcatgacgcacatctgggcgctgctcacgcacgccggcatcctcgaccgtgaccctgaagctgctgcgccgccggccggtgccactgctgtttga

SEQ ID NO: 9639 - DNA, 395 bp, Oryza sativa
  Clone ID: PAT_MRT4530_16036C.1
ggacatgaaatttataatctttattatcacgagttttccacatgggaaccactggggggcggttccaagatgcctgacagcccttgcaccagccgtctttgatcaattcttgtcgaacgatccattgctgatcataccaacgtacataccaatatctggttcaatatctggttaaatatcacatgatgtgatgtatctatttccaacttagcatgtttacacaggctagaccccaaggaagaaccgatttccgcaacaggccgcggcaacacaacagtacgtccatccaaaaaccagagttggaggataacataaaagctctcgttgctgtcctagactgtgactcaatttttcaagcaagtgggctgacatttccttggcgtgaacagggttgg

SEQ ID NO: 9640 - DNA, 712 bp, Oryza sativa
  unsure (1)..(712): unsure at all n locations
  Clone ID: PAT_MRT4530_16037C.1
tttnggnngngccattnggaaagagtnanaacangccctatcttagttggctcananaattggaagttggatgcatctagttatgatattgcagtatgtgttttttgtcttttgctgaatgaactcctaatgcactgtcactagttccggacaaaagaaaataaattatgccaatggaatgtctctgctgacccagttttattctaaaaaaaaaaaaaaaaaaaactcgagggggggcccggtacccaattcgccctatagtgagtcntattacaattcactggccgtcgttttncnacntcntgactgggaaaaccctggcgttacccaacttaatcgccttgcancacatccccctttcgccagctggcgtaatagcnaaaangcccgcaccgatcgcccttcccaacagttgcgcagcctgaatggcgaaggcaaattgtaagcgttaatattttgttaaaattcgcgttaaatttttgttnaaatcagctcattttttaaccaataaggccgaaaatcgcaaaatccctttttaatcaaaaagaataaaccnaaanaagggttgaattgttgttnccagtttgggaacaaagaattccctaatttaaaagaaacgtggaactcccaacnntccaaangggcgaaaaaaccgtcttatccaggggcnaangggccactactttaaaccatcacccntaatcaaattttt

SEQ ID NO: 9641 - DNA, 910 bp, Oryza sativa
  Clone ID: PAT_MRT4530_16038C.1
ggtaagtgaggaccgaggagacaagatggtgcagaaggagctttcccaggcatggtggttcgacagccacaaccttgcaaggacatctccatggctaaccaacacgctttcagaactagatgacaagaccaagcaaatgctcaagatgatcgaccaggacgccgactcgtttgcgcagcgagccgagatgtattacaagaagcgccccgtcctggtggacatgctcggcgacctgtaccgaacacaccgctcgctggcagagcagcttgatctcctcaagaacggcaatggcacacgccacaccgtgttcgggccatcctcctgcacccagagctggtctcatcaggcagcagcagcagcaatgggtggcaagggaacaacagggagcaggtcttcgatctcactctgctcagacaactacgactctgaatctgaagtcgatgaccctgaacaagaaaacatggaggaggaactgtctgaatccgaggacatgatgaaacatccttcacaaagccaagcggatcaagcagcgcagctagagctgatgcacgcggagatcgagatgctcaaggagaagaacgcggagctgcagaaagcaagtgcagagaatgagatgctcaagcagaagaacgaggagctgcagagagtgagcgaggagaacatggccctgaaggcggagctcgcggcgaaagacgaggagaagagggaggtgatcaggcagctcgcgtcgtcgttcgacatcgtcaagaaggagaatttcaccttgcgggagtacatcatcaagaactcaaagaactcctcctcctcctctcgtggcttcgatttcaagaagctgaccaaggacctgttcactgcgaagctcttcacagctcactgcaaggctactacaggtccaatggttgctctatga

SEQ ID NO: 9642 - DNA, 1176 bp, Oryza sativa
  Clone ID: PAT_MRT4530_16039C.1
aagactacgacacaacaaatcgatcgacacatccaaaaatcgatcgacacgacaaatcgattttcttattatggaaataccgaaataggagttttggattactcggcgacgaacgcctctgccatcggcgatcccatcaactccgacctcttcaccgccggagggctaacctggagggtgaactgctacccgcgcggcgacaaggcagacaacaatggcgactacatctcgctctacctcgagctgatcagcaagtccaagaacatcaaggccatcttcgacgccttcatggtggatgaacacggcaacccgtccgatggatcgaacaggttagtgcaggtctacccacccgcgggctatcccgcgtggggatggccacgattcgtgaagcgaagcaatttgtcatcggtgttcgtggtggatggcaaggtcaggatcatgtgcgtcgtcggggtcaccggcggccatctcgacggcggcttattgccgctgccgccgccgaacatcggggtccatctcggcggcctgctggacagcgaggatggtgcggatgtcaccttcgccgtcggcggcgagacgttccacgcgcaccgggccgtgctcgccgcgcgctcgccggtgttcagggcggagctcctcgggtccatggcggaggccaccatgccgtgcgtcacgctgcgtgacatcgagccggcgacgttcagagctctgctacacttcgtgtacacggacgttctgcagatcgaaggctcttcgtcgacgagtacaactgatctgcttcagcgtttgctcgcggcggcggacaggttcgcgctggagaggctgaagctgatgtgcgcccagaagctgtgggagagcgtgtcagtggagacggtgatagcgactctgtgctgcgccgagatgcacagctgcccggagctgaagaacaggtgcatagatctcgtggtgacgaaagacaacttcatggaggtagcggtaaccaaggactactttcatcttgggcagagttttccgtcagttatcgaagagataacgggaaaccttcctcgcaccatgcaaagaggaccatggggccaaacatggagacagcatcgggtctccggttcactgggtggcgtcacttcgtcaagcagagtgatctacagccggatcatgtcagcgacaaaggcacggtca

SEQ ID NO: 9643 - DNA, 364 bp, Oryza sativa
  Clone ID: PAT_MRT4530_1603C.1
aaatataaattgcacaaatgtaaatgcaacaagtaaatgagacaaggagacgagatttttgaccgaggttcggaaactcgccggtttcctactccccattgaggcgatctcaactccaccgctcaaccacgaagccaccgtacgcccccttcgtcaaggggtgggcaaggcgggagccggcccacggagaggactacccaagcctcgatcactagggtagttcttccttcactccgaagaccatactactctacaacagctagttttctagccgttgcagggctgtcattgggccccactgcctaggccggtcagaccgacttggggtggccggccaaacgggcctcggtaaagtagaccgcca

SEQ ID NO: 9644 - DNA, 521 bp, Oryza sativa
  Clone ID: PAT_MRT4530_16040C.1
cctccgctctgcccacggcctgccgtcgctccgtcgtgaggacgagggagagccgagaggaagaggaagatccgagattggagagggagaggggaggggagccggcgagctcgagctcgccatcctacccgcccgtccttgccgaccactacacgcggacgcttgctccgtccctcttccgctgcctcaacgtctatccccctcaagttcatgtcgagaacgagcgagcgaggcaggcggcgacctcggccggtgagcacgcctgccaccgctccgcccgccgcccgccgcccctctgctccacccaccgccgctcccgctgcccctctgctccgcccgccatcgctccgcccaccgcccgccgcccctctgctccgcccgccacccgccgttgctccgtccaccgcccgtcaccccctctatgccgccgccgctcgccttcttgtagtatagggggaagagagaaaggagggaggctgataggtggaaccaaatgggccccaccttttttttttagctaa

SEQ ID NO: 9645 - DNA, 586 bp, Oryza sativa
  unsure (1)..(586): unsure at all n locations
  Clone ID: PAT_MRT4530_16041C.1
aaaaaaattctctctttttcttcttcttcttcttctccccccttcctctgcatcgaagctgctccctgcagtcgcaggatcccgaatccgagctcctccccgccattgccgcgggggcgcggcttcttgatctgtggaattcgatcggggggcgcggggggcgcggaaaggtgggatttttgcggcgagatttgggacccatctttggcccgtttcttgtggatttcgttcgagttcttgtggttttggatcgggttggtggtggtggtggagctggaaaaaggtggttaccttggccaccaaattcccaaccctttttctgttcagattcttggcgttttcttgcgcaaattttagctagggttggtgtggattcccgctcgtacccccattagctcgtgattcgtatccaggttcgtgtaaaaatctgngagtggtggagatttgggaggttttctccttcctgtgctctatgaggagcagcttcctgtcggaatcgccgtgcgacgagcagcatatccatggattcaatccgcagtcatggctgcaggtggagcgtgggaagctgcccaaatcgggctactcg

SEQ ID NO: 9646 - DNA, 1824 bp, Oryza sativa
  unsure (1)..(1824): unsure at all n locations
  Clone ID: PAT_MRT4530_16042C.1
atgtcaatttctgagtactttggcaagatgaaagcctatagcgatgagattgcatctactggaaaacctctagatgaggaagatacgattgcatatattgtaaacggcctagatggcgactatgactcgtttgtatctgctcttgggatgagggttgaacccatcactatgacagaattgtatgcacaattgctcaactttgagaacaggctacatctgcgaaaacaaggctcagcaaatgcagcacatcgcggcaatggcggccgtggaaacttcatccctcgtggcggtgccattggcgctgctggcggaacgaatcctggacgtggccatggtgacagtggtcgcggccgtggaagcacaggaggaaaccgcggtggatggggtggcaaccagcagcgtgttgacacgcgccctgtgtgccaggtctactacaagagaggccacgtcgttgctgagtgttggcatcgctttgatgccaactacgtgcctggcgaaagacatgtagctgctgccgcatacgcctatggtcttgataccaactggtatatcgatactggggctacagatcatctcacaagcgagctggacaagctgacgacccgggagaaatacaggggaccgatcaaattcacactgcaaatggcgcacaaggctaaaagccatcagctaccttattccaagtcatctagtttttcaagtaatcctttggatcttatttattctgatgtatggggtcctgctcctgattctgttgggggcaagaaatattatatgagttttattgatgattatagcaagtttacttgggtttatcctattaagtataaatctgatgtttttcaaaggttccatgagtttcaagttcttgtagaacgattgcttggtcacaaaattattgccatgcaaactgactggggaggagaatatgaaaaactccactctttctttgagaaaattaggataacccatcatgtatcttgccctcatgctcaccaacagaatggttcagcagagcgcaagcatcgccatattgttgaggttgggcttgctctacttgctcaagcatctatgcctttaaaattttgggatgaagctttccttactgcatcctatctcataaacagaacccctagcaaagtgatccaatttgagacacctctagaaaaattgtttcatcgaaaacccaattaccaatttttacaagtttttgggtgtgcttgctggcctaaccttcgaccatacaacaatcataaactacaattttgctctaagcaatgtgccttccttagatatagtcaccttcacaagggtttcaaatgtctagatatatctaccgggagagtatatatattccgtgatgttatctttgatgaaaatgtttttcctttctcccaacttcactctaatgctggagctcgtctccgtgctgagatatctttgttgcctagctcccttgtcccacactgtactgatcaagggggagaacatggtattgatcatatgcttaatactgcgcctaatgagccatctgatgatttttctggagaaaatgtagcagaagatgatgcagatagtagtgctgggacgcaggaggatgtacacggagaaattctgatgaagaatccactccaaggtcgcggaccgtgcagacacagcaggcaaggcaatctcgggagcaggttctccagctcaagtacaggcgacggtggacacaacagaggttgcagatcatgtgcagctgtttgtcagtggagccaacgaagaaattgangcaggcatgcatgatttacacggcaccaatgctgacaacacgcagtttga

SEQ ID NO: 9647 - DNA, 1894 bp, Oryza sativa
  Clone ID: PAT_MRT4530_16043C.1
atggagtatgaaaggattcacaaggttcaggctggtgcactttctccgacaaagctaaggatgaagcttctgggaactcacaatcgtgtgagggtcatcagcaacagctcatcacggacatcaccttcgaagaacactgaaccatcgcaagcacagaacagactattagtttgtgatgttcttgaagaagtttcaggcagctctgatggatccaaatgctcctcagcaatcaacaaaactgaagctttagagaaggatccaccattggacatcaacaaggttgaggacatgaccaaaagttcagttcagcaacctgcatcaagcaactcaagcatgatacatccagttcgaaccatagaagaagagagtaatgactgtgatagtggtattgacaatgctagtaccagtagtttcgagttccatggaggagagaaaacagcagcgcagaatccaacatcaggatatttctcgagacagacttcctccaagtggaatgatgctgagaaatggattgttaataagcaaaatgttcaacaaaatatctctaagggcgcaccacagaaccagagtgcacagcagatgaattcagctgcaggcaggggttttattgtgcccaaaatttcaaaccgaaacataattcctcgccccatgcagaacatgaaaagaccgagtccagcttcttccgcttctcgaagcatattagagaggttatcttttggttcacatcaaccaaagttggttaggcatgcagatgtctgtacagttaataatgctggtgtcacctcagagtatcaaacaaaggcaaccgataacagttcatcaattgaaataaggccctacaaagatcccaaagctattcctgcagttcattcggtgtccgtgagagatgtgggcacagaaatgactcccataccgagtcaggatccttcaaggacaggaactccacttggatcaatgacaccaactcgtagcccaaattgctctataccatcaactcctgtaggaggacggtcaacagcatcaccaggagatgacaacacagatgatggaccatatttcaacagaaaaggtggcacaaatgaaatatcagacgatgaaatgagattgaagacaaggaaagaaattgccgccctgggtatacaactaggaaagatgaacattgctacatgggctagcaaagaggagctagaactagtctctgcatccccaagcattgctgatttggagcggatgaagaaagaatatgcagctcgtgcagcagcatatgaagaagcagaaaattttaagcatacagcaagattcaagaaggaagagttgaagattgaagcatgggagagccttcaaaaagcaaaaatagaatctgaaatgaagagaatagaggaacatgcagagaaattgcgaagcgaagccatggcgaagatggctgaaaagctagaaatgacacggcgtttagctgaagagaaacgagcctcagccaatgcaaggatgaaccaacaagcagcaaaggcggttcacaaggctgagctgattcgccagacaggacgagttccagggtcatgtatcctatgctgcagtggttgcttctgtcaacactagtgtatgcttgacaattagggagttaaatatggtcgtgaaaaatctaaaccccatgttctataatcagcattccttggttttagtatggaaaggaatgtctgatactttgattaggtattcagatgtacaaattcttgcttgtcataaaagtcaatccaatgcttacatttgcttggtcggctactcggttaaagaacacttggttgttgccctccggcccctcgcgctggaaaaaaaaaaaaaaaaaactcgagactagttctctctctctctctctcctcgtgccgaattcctgcag

SEQ ID NO: 9648 - DNA, 1044 bp, Oryza sativa
  Clone ID: PAT_MRT4530_16045C.1
atggagaggctccgtctcagcctcacttcatcctcattggcggaggggggaaaggaacggcttcttgatgaggtggagctcgccacctccgccgtcgtcaccgccggaggaggaggaggcacggccattatctcctctgctccgtcccgccgctccgcccgcccatccctctgctctgcccgcggtccgcagccgctccgcccgtccctctgctccgccgctgctccacctatccctctgctccgcccatccacccctctgctctgctcgcggtccacggccactccgcccgtccctctgctccgccgccaccctgttccgccgcccgctccgccggcctgctccgcccacatatccgcccgaccgcccctaccgcaacctgtagccgctgatggcttcgacggcgcggcggccggccccaacggcgtggcgtcgccggcggggcaggctccttcgagctcgctccccggatttcacgaggcccctcctagcgtgctcatatcgagaccttcatggatcgtccgcagcgagtcaaatattaggagggagagaccaaaaaggcctgatcctccatgcaccatctgcagaggcacaggcaaaatagattgccgcaactgttttggtcgagggagaaccaatcatgccgatcttgtcatgctcccgaagggcgaatggccacaatggtgccgtatatgtggtggtagcgggttagattactgccaccgttgccatggaaccggtgaatttcgagaacccatgggctttcacttcgctaccatccacaggaaatgaacttcacctagacagtgttgtatggttgacagtccgacagatctgtgtagagaaatcataattacttcatgatatacagttcaaagagttgaacactactagtttagttcgtgaaaaactccattttagtttatcgcaatgctcgtgttatggaatccggactgctcgcaatgacggtcatcaactctttgatataaactgtcgggcattgtcccgagctatttctgccaaaaaaaaaaaaaaaacccgcgg

SEQ ID NO: 9649 - DNA, 549 bp, Oryza sativa
  Clone ID: PAT_MRT4530_16046C.1
atgtccgccgcgctccacacgctccccgccgtcgccgctggcggcctcggctgtcggtggcggcggccctccgcgacgctacgggcggcgagctccgtggggacggcgtcggtggcggtgtccgtgaatgcggagacgcagcagcagcggcaggtgggtgtggaggaggaggagaagaggagggaggatgcggcggaggtgaggacgggcagggtggtggaggctctctacgacgacgggttcggcggcgtcacggtgaaggactacttcgcggcggccagggccgtctccagcgacgacggcggcccgccgcggtggttctgccccgtcgacgccggccggccggcggtggacaacgcgccgctgctgctcttcttgccaggaactgatggtgttggaatggggctcattttgcaccacaagtctttgggaagggtattcgaggttcgctgcttgcatataccagtgaatgatcgtacgccatttgaaggcttcttcactattattaacaaaactaggaagattcgcgcgggcatacgtgtacgctaa

SEQ ID NO: 9650 - DNA, 487 bp, Oryza sativa
  Clone ID: PAT_MRT4530_16047C.1
gtccggaattcccggctcgaccacgcgtccgacacgtaggggatgcaaaaccactcggaggagtgtgcggcgaaacccaaaggttctctgcgtgggaaaacgtgccgaatgatgacatatgtatagggtgatgtcgcgtagcctatccttgtgactaggacttcagcgcgtattcagtcctgagcgatgcttgaaggatatactccagctgcaataacatataacagcgtgagattggtcttgtgatgtgctacatgcatttgtggctctccctttatgctaacttccatttcgattggagacagacctatgtgctataaccttgtgcactaatcatcatttacatgatgttgaataagaccatatttaagcttctttattagaggttgacatgggagatggtagagctacacacacatatgatgagcctcatgtagatccttcgctgatgcagtgatgcatacaccagattctaaaggtcatgaac

SEQ ID NO: 9651 - DNA, 1977 bp, Oryza sativa
  Clone ID: PAT_MRT4530_16048C.1
ccggccgggcacggccagccacgggggaaccgtttcgactcgaatatacccatcgccgccatcactgatccgccgctccccatcttctccgcctccgcgatctcgccgccgccgccgccgcccccaagctccccactgctccccgccgacgcctcccccgaccaggagctccccgccgacgagcgagcgagcgagccgaggggaaggatggggtacatcggggcgcacggggtggagacgctgaagcggtacaggtacagcgggcaggaccactcggtggtggccaagtacgtgctccagcccttctggagcagatgcgtcaccctcttcccgctctggatgccgaaagaaccatttagcccatgtttggttaatccccaagtgggagggattggacgagatttattcggggacgactacacatcagacggccgcagttttacaaatctccggacggtgttccacaacatcacactcactggattcatgtttctagttgtatcagcacttcttggctatgtaagaatattaatttcgcagatctattcgccccacctcgacacagctccccctaggtgggtccatcttgcccatggattacttctcttcttataccagacttttgatgctgttgatggtaaacaagcaaggcgcactagctcatcaagtcctctaggagaactttttgatcatggatgtgatgctcttgcctgtgcttttgaagcattagcccttggaagcaccttgatgtgtggaaggtttactttctgtttctgggtgattgctgctgtcccgttctatcttgcaacatgggaacacttctttacaaatacacttattcttcctttaataaatggacctacggagggcctgatgctgatatatctatcccactcttttacctttcttactggcgctgaatggtgggcacaagattttcggaagtcgataccccttttaagttgggtaccccttccatttattccagatatccccttatacattattgtgatgattcttatgatcctgtttgccgtaatccctaccattggatccaatgtcagcaatgtccaaaaagtagttgaagcaagaaaaggaagcatggtattggcattggcaatgctccttcctttcattgcattgttaactggagttgctgtctggtcttacctctctccttcagatattatgaggaatcagccacatctgcttgtgatcggaactggttttgcttttggatatttggtgggaaggatgatacttgctcatttatgtgatgaacccaaaggtctcaaaactggaatgtgcatggtgaaccatttacgcggatccattaaacgatatatcattattactattgccaggattcctttagttgatgagctgctggttcttttcctgtattgcgcatacacagtgggcctttacctgcatcttgccgtttctgttgtgcatgaaatcaaggatgctcttggaatctattgcttcaggataactagaaaagaggcttgaatgtgttctgagttcttacatagcaataggaggcattctgtcaccttgtttcgttccagatatttttgcctttggccataccaaatctcatcggtgtgcatcctggggtccctgccccttggaacaccacaacatagcagtcgtttgatctgtttgatgcagatggatacttttggagtgtaatgcagaaatatctttagtcctatatatgtacatgttgtacacccagctctttgacgtacttttcgggttccatagttaaggaatcgatacggttttgtactatttagatgacaggaggatgaactattattgcacagtgtggagtcgtgcccttgagcaaacaaaagcgttccatgattgtagctggttaatttgcatgtctaccataatgcgtcacctgttgtttcggcgccacattactgtatgtttctgttatttttttaaaaagtctggttgaactcc

SEQ ID NO: 9652 - DNA, 566 bp, Oryza sativa
  Clone ID: PAT_MRT4530_16049C.1
gcacgaggtcgtggcaggataggatagattttgtaaatcaaaatcataaatatggaacaacagaaagtaaagtctgggactggaaagataattgcaaggtttccgatttaccttcttatcatccttattggacaatgattgtatgtgaagaagcaaagaaaacgctcatatggattgaagataaatataaagaatgtttaggagattatgataagattaaatattattttaattctagtacaaaaattacagatattgaagataaaataagatcttataaaaacaaaatagaattatatcaaaaaaagataagatattaaatgcactcatggtgaaactggtagacgcgcaggacttaaaattctgtccttaggggtgtgggttcgaatcccactgggtgtacaataagatcaggtagcgcctgacaaagcaggtttacattttcgggttcctgttaaaaacctgaatccatgctccactgggcaaaatggtaaagtcgcttcgtttaggccgaagagttctctgggttcgagtcccaggtggagtacaaaaaaaaaaaaaacaaa

SEQ ID NO: 9653 - DNA, 442 bp, Oryza sativa
  unsure (1)..(442): unsure at all n locations
  Clone ID: PAT_MRT4530_1604C.1
tcgccgggggtggcggctcttaccccaaggacgctcgcgcgccgtgctcaccatcccctctggtcctggtggggtagggtgatcggcgtgggaggggcgggtcangtgtaacagttactagcagagaagctgtgagcaggtctgaagggtcttggacaccagaaggcatggaggcacttccttatcttaaaaagggatatgggaatgagttgcataagggtctccatgtgggccctgataggtggacaggagtttctaacttggtgaagggagggaagggtgaagcatggggaggggagccttatgatttggaggatactggtaggagctgcaaaagccttgggcgcaagggctttggtcgtatgggtgatatcaaggtccctcttccataccggcaagattcctttaaccttggtatcgtgtcagatgctttggattattt

SEQ ID NO: 9654 - DNA, 120 bp, Oryza sativa
  Clone ID: PAT_MRT4530_16050C.1
atggctgggaatggatgggggatcgatgcggtggttgcacggaagagaatggggaaagttgcgagagtttcggcggggaagacgaaacgacgctctgacttcggcgtttatttcgctagg

SEQ ID NO: 9655 - DNA, 3130 bp, Oryza sativa
  Clone ID: PAT_MRT4530_16051C.1
ctcccccgcacccaggctaccggtcgcgctactgccgaggaagtgatcccagtactcctccgggtcaacatcttctgaggccaccacgaaggtgaacgtaggagcagtcccctcgaagttccccatgatctcctccgcagcttcgtggacctccgtctcctttgtcctggggggaggagaggggggagtcttcaagtgcaagccacggcaagaagtcggggtcgcgggcatggtagctcgccagcacgagctccaccaccgacgaggacttcactgtgtccttgaccacctcgggaagtctttccaagtcctcggccatctccccgatccggtgggtgagcgctgtcatgctggacgggagtttggggtctcggctaagcgagatgccaacccggtgccccgtgcggtccagccggacgaaggcgtctcggagcatgccggggcccacctcgttcgccagccaaagggccttgacctcctcgacgcgttcttgcagtgccctgtgtagcccggcgatggtgtctgccgccacagtgagctgctcggccagttcgccttcgcccatgggcaccacgccgccgtatgccgacgtggctagctccttctcctgtgcctccagcttggtgacgcgctgctctagggtggcccgctcggcacgagcattctccagatggcgttgctcacgccccgcattggcctcctcccggaggcgcaggctctgctcgagccgctgagcggtggcctcggagtatgcaagggtgcacatccgctcgacgaccgcgtcctcgtgaaggcggagtgcggactccgcctccgcggctgcggactcatgcgccactagcgtcgcctcccttgcctactgggcttgggcgtgctgcgtaagcacctggtcttgcctggccagcgctcggcactactcatccagctttcggatgcgccggtcgagggactccatccgctgttgcgacaaagcctcggcctgcgtcgccctccgctcccgggctagggcggcattgagcagcccccgcatggcgtccagtttccgcgccaactccttcgcgtgggcgtcgtgctggagatgaatgtcgttgatcgccttatccagcgcgttggtagcgatgagggccagctgccgctcctcctctgtctcccgcatgacggcgtccatggtctcggcccgagcgccgagctccgccaggcgcatatggtgcgccttccgaccggcctccaccaaggcctccaccgagtgccacccctcggccactcggtccctctcctcgtccagtgcggccctctcctcctgcaaggcatgcatttgggtgttcagcccttcaacgacggctgtgttcgtcgtcgccaacgcctgcagaaggggctctgtgcccattggggtggaggcggagaaggaagaacgccgtcctcgtggcggcggggtccggcttgacccgccggcagcgctaccctccgtgccttgcgtgccacccccaccagtgtgggacgcgtcctcagcgggaccccctatgtgccctccacccggtgtgcggtcggggaggcctcgctagttgtcgtgcggggcgcgccatgctcccgctcgtctttcttccccgagggccaggccttgggttccacctctggcatcgcccccataactgggcccactctgcttcgacctccgacgcggcctcagtctccgggcccccgctcgaagcctaggacttcgtactgtcatccggccgtgcgctcgcctccgccacctgcgcgctcgcctcggccgcttgcgcgttggccttcgccctccccgggcggccggttttggactgccgagagggttcatcggtgggactgacgggggcggggacctcgctactgggagggcatttgaagctccattccgggggctcgatgaagctcccccgtcacgtctgggtctcacctatcttccgcggccgctttttcttcctcccggtctcaggtggcaccaccggcccagcgcttggcgggtgcctgttggcggtgcgctctgggctacccccgcgagaggggtatggagggagagtccgtccgggcctcttcccgttcggatcggctggatggctactgcccaagcccccccatgggcccctcgctgtggccccctcgggtggaggggtgttgctccccttgtcccccgctgccgcctgcgccgtcatcgtggctgtcgcccgcgccatcgtcgcgaccatgattaccggccgcgtcgatcgcctgcatgaccgcaaagaaactgtcgtgatctcggtcgctgcaaagagggaggatcccatcgggggtaagcgacggctcaatgctgtggtggttcagcattcgctggatcaccagacgaaggtcgtcctggtcccagtccctgttggggcccgggaacgtccgcatggtattgtcgagtccggtgtacgcccatgcgccccgaagtcgctgctggagcggtggaggtagtcaccgtagaccatggccccggtcagcccccgggaccacaagctggcgaggcgattgaagaccgcatcatacgcgtcccctaattccgtcgacgcttgctagcttgtcgccggtgctggcgctctagaagggagctaaaggcgggcgtggtcggggagggcggtgtaaaccagtcactcttcaaatcatcccacttcttgcgcagtgtgcagcagatgtagggatgcgccagctggtttcgcggctagaaatagcaaccgctgacctccgtcgcaaggaacgccggctgcatggtgaagaagtaccagaagaggcggaggcttagtctcaccccaatgaacatctcgcacaagtgtgcgaagatggccaacatcatcacggcgttgggggtgaggtgcgccatctggattccgtagaactccaggacatcatagaagaaagaagaaaatggcgggatcatccccgccatagcgaaggagaggaagaagaccgacttcactaggtagagcagtgcgccttctccttctccgagaccttctccttctctgagagcggactaattcaccaaaaatccatctcgatttgtttctccttctccttctacgagagcggactgattcaccatatctttctcgatttgtttctccttctcggagaa

SEQ ID NO: 9656 - DNA, 471 bp, Oryza sativa
  Clone ID: PAT_MRT4530_16052C.1
atgtccctctccgtcttcttcttcctcacctcgcggcggtggctgccggcggcgccggagctgagcggtgagcacgccgaagctgcagccgtatcgatgcggcggcggcagcggtgggaagacggtggggaggtggctgaaggagggaatgagaagaagacgggaggagacgcgtgcgcacaacgcgcagcattgagaggcgtggcgacggtcaaggcgagggcgttcagggacgtgtggaacgtggccgctgtgatccccgtcgagaagaacgccatcgctgccatcaaccatcaccaacactacaaacacaacgcccagaagcagcagcatcaccaccgccaccgtggcaacggcagcaacacgagcaacagcttcggcgacgacgacgacgacaacaacttcctcaccatctgcagccaagaactcctcgcccgtggcaccgactcctcaagcgcacccgcaaagtaa

SEQ ID NO: 9657 - DNA, 207 bp, Oryza sativa
  Clone ID: PAT_MRT4530_16053C.1
atgggcgccgcccccacgcacgcgccccgcgccgtcgcctacgcctctcggcgcctcgccgcctccctacacatagcaagctgccatgacggagggttcgacaccgatcgacgccgtggcagtggcaccactacatgcacacgcgcgaggccgggtgacgcgtcggcgagcggcgccgctatccccctcccggcgaaaaaggcttga

SEQ ID NO: 9658 - DNA, 246 bp, Oryza sativa
  unsure (1)..(246): unsure at all n locations
  Clone ID: PAT_MRT4530_16054C.1
ggaaggatgggagcacaacttggnttattttttttttttttttttttttttntttgnttttttttggtttttttcctgncaagcaccngctccccccttaaagcctaaacagagttccagcatgatcagatcatgcgcattacttccacttcttgaacttgccaccaccagaacatagccgtagcccatagcttagccatagcttagaacttagccataggtggccgtgcttgccatgcttaaact

SEQ ID NO: 9659 - DNA, 255 bp, Oryza sativa
  unsure (1)..(255): unsure at all n locations
  Clone ID: PAT_MRT4530_16055C.1
tccagatacaagcttggacctcaaaatctagncattccnagtcgagctggtacttaataatcttnttncctaacatnacatcggcttcacgctggcgcccgataccttcncgagaagggtagaaggcgcttcaatgatctcacgagtacctggctataatgctcacatnagtggactcattnggcccattctanccacgttcaagctactttccaatatgannancgggtaccctatcagaaatctgtcttctgg

SEQ ID NO: 9660 - DNA, 369 bp, Oryza sativa
  Clone ID: PAT_MRT4530_16056C.1
cgcgtcgctcaacacgaactcccgaaggcgaggcggctttggacgcacgcacgcacgcacgcgcgcgcggcctacctcctcggcgcgagttgctcagtcgcagggggggaggtgggagcggggcggggcgggcgtcccggtcggggattgctggttcgatccccccgcgcgtgtgggggtgtgggtgcgtgggatcgatctctccctctcgctcgctcgctcgctcgccctagcacctggcggtcggggcgtcgcatgcggcggcgcggcgaggcgaggcaaacgcgggtggattcgtcactggcggtggaggagaggcgagggggcggcggctgtgatggcgattcagacgatgcattcggagcagca

SEQ ID NO: 9661 - DNA, 548 bp, Oryza sativa
  Clone ID: PAT_MRT4530_16057C.1
ggattaaagggtttcctggtatatataatagggggggagacgtatcccaaaacactaatcataagtaataacagagttgtagagttggaattacaatacaacttttttaactgtatcccaaaaagcccaaaaaaaaaagggaggcgtcaaaaaaacggggaatcattgcaatgggagccataaaccctgtcgccggggaggtcgccggggccaccgccaaagctcctccgccggcaatggccaccgtccgagctcctttggcgggaaaccactacttaccataccactcggggtggggggggggctcctacgctgaaaacacccaatcgacgtcgtcgccggtaagtccggcctcgccggggaagaactcctcctcctcctcggccttgccgccgcagcagcagcgtacatgggaaccgaaaccaaccaccttttcccaagccaatccagggcacgcctaccaacaagatcattttcccgccgtcgccggccggcgttttttcccgccgccggccatgcaaatgcagtactaccaccagcagccggac

SEQ ID NO: 9662 - DNA, 351 bp, Oryza sativa
  unsure (1)..(351): unsure at all n locations
  Clone ID: PAT_MRT4530_16058C.1
ctcctcctcccggtcgccattcccgttgcctcctccccgtccggcggcgccgcntccgctcctcctcctcgtccggcgtcggctccactcctcgctgcgccgcaccgcttctcctcgcctcgccgcgcctccactcgcctcgcgtctcgtgcggcggcgcggaccccttgattcggccaccaccaccggcctngccgcnacccgccatggagatggacaataggcgggtgcgtggactcgggagcggcgggggcggcgggagtggacagcctgttttggtgtggttcttgctttctctctgtttgttttgcttttggtgtgggttctttgtttccccaattgagagcctta

SEQ ID NO: 9663 - DNA, 271 bp, Oryza sativa
  unsure (1)..(271): unsure at all n locations
  Clone ID: PAT_MRT4530_16059C.1
ggagtatcttgcagtaacatccaccctttggtgtcccatttgccactgcaggcccattcaaaccctggtggcagttggttggncaccattcgtgggccattccanacacaccatcccaaccaaaaccattgtttgcacttgtcattccattgcaactctcaccaatctcaccagccgtcttggaaccacaatcatcattcattaccaccacaatcagcaatttctccgtgtattcgccgtgtcccaactcagtgcacccaatgttgttgtg

SEQ ID NO: 9664 - DNA, 4884 bp, Oryza sativa
  Clone ID: PAT_MRT4530_1605C.1
atgtcgaacgaggtgaaccatgtagggaaggctcccatgttcaatggcacaaactactccacttggaaaattaaaatgtctactcacctcaaagctatgagcttccatatttggagtattgtggatgtaggctttgctatcaccggcacacccttgacggagattgatcactgcaacctccaactcaatgcccaagccatgaatgctttgttcaactccttcagccaagaggagttcgatagagtgagcaaccttgagaccgcatatgagatttggaacaagttggcggagatccatgagggtacaagtgagtacaaggatgccaagcttcatttcctcaagatccaatatgagacattctccatgttgcctcatgagagcgtgaatgacatgtatgggaggctcaatgtcattgtgaatgatctcaaggggcttggggcaacctacaccgatcttgaggttgcccaaaagatgcttagggctctaccgaagaagtatgagacccttgtcaccatgctcatcaactccgacatgtcaaggatgacacccgcaagcctcttggggaagatcaacaccaatgacatgtacaagttgaagaagaaggagatggaggaagcctcaccatccaagaagtgcattgctctccaagccgaagttgaagacaagggcaagagcaaggtgaatgaagccaatgatgacttgaaggaagagattgcccttcttgctagaaggttcaatgatctcttgggaagaagaaaggagagagtaagaggctccaactccaataggagaagaaataggagacccaacaagactctctccaacttgaggtgctttgagtgtggtgagaagggacactttgcttccaagtgcccttccaaggatgatgatggagacaagtcatccaagaagaagagtggaggctacaagctcatgaagaagctcaagaaggaagggaagaagattgaggccttcatcggagaatgggactcaaatgaggagagctccgcctcatctgggtccgaggaagaaggtggtgatgatgcaagctccaagaagaagaagatggctgttgttgtcatcaaggaggctccaacactcttcgctccactttgtctcatggcaaagggctcttctaaggtaacatctcttagtgatagtgagagtgatgatgattgtgatgatgtttcctatgatgagcttgtgagtatgtttgaggagctccatgcttatagtgagaaggagattgttaagttcaaggccctaaaaatggatcatgcttctttggaggtcttgtatgaggagctaaagacctctcatgagagactcaccatttctcataagaagcttaactctagctctagctcttgtgtttcaatttgtgatgcctcacttgttgttgagaacaacgagcttaaggagcaagtggctaagctcaacaagagtttggagagatgcttcaacggcaagaacactcttgacaagattttgagtgagcaacggtgcatccttaacaaggagggacttggattcattccaaagaagagtaagaaaccttctcaccgtgccactcgttttgtcaagagcaacggtaagcattgctccaagtattgtgaggttgggcatttggtgaactaccgcaccggtgggagccattgggtgcttgatactggatgtcacgcccagaaattcactagctgtgacaatggatgcactcaacacacgaccggtgatagggctatgttcaccacatttgaagtaggagggaaagaacaagagaaagtgacatttggagacaatagcaaaggaaaggtaattggattagttgcaaaaacttcattgggttggctttggcataggaggctagcccatgttggcatgaatcaattgagcaaactttcaaaacgtgatctagttgttggcttgaaagatgtgaagtttgagaaggataagctttgtagtgcttgtcaagccggcaagcaagttgcatgttctcatcctactaagagtatcatgtctacacctagaccaatggagctcttgcatatagatttgtttggcccaacaacctataagagcattggtggtaatagtcattgtcttgtgattattgatgattattctcgctatacttgggtgttctttttgcatgataagtctattgttgccgagcttttcaaaaagtttgcaaacagggcccaaaatgaatttagttgcactcttgtgaaaattagaagtgacaatggttccgagtttaagaataccaatatcgaggactattgtgatgatcttggtattaaacacgaactttccgctacctactcaccacaacaaaatggtgtagtggagaggaaaaatcgtacattgattgagatggcaaggactatgcttgatgaatatggttatgcctcaaatagcaaggcataccgggtctacaacaagaacaaaggtattgtggaagaaaccgccgacgttcaatttaatgagactaatggctcccaagaggggcacgagaatctggatgatgtaggtgacgaaggcttgatgagagctatgaagaacatgtctattggagatgtcaagcctattgaagtggaagacaagccatccacctccactcaagatgagccatctacttccgcttcgccaagtcaacctcaagttgaagtggaggaggagaaggcacaagattcacctatgccaccaaggatacacaccgttctttccaagcatcacccaattgaccagtttttgggtgacattagtaagggtgttcaaactcgatctcgtgtcgcttcgatttgtgaacattactcatttgtttcttgtcttgagccaaaacatgtagatgaagctctttgtgatccggattggatgaatgctatgcatgaagagctcaacaactttgcaagaaataaggtgtggaccttggttgaaagacctagagaccacaatgtcatagggacaaagtgggtctttaggaacaaacaagatgagattgggttggtggtgagaaacaagccaaggttggtggcacaaggtttcacacaagatgaaggtttggacttcggtgaaacttttgcccccgtggcaagacttgaggctattcgcatccttcttgcatttgcatcatgctttgatataaaactatttcaaatggatgtgaaaagtgcttttctaaatggtgaaattgccgaacttgtctttgttgaacaacctctcggttttgaagatccaaaaaatcctaaccatgtttataaactctcaaaagctctttatggtttaaaacaagctcctagagcttggtatgaaagattgagagattttcttttgtcaaagtatttcaaaattggaaaagttgacaccacccttttcacaaaaatcattggtgatgatttctttgtgtgtcaaatttatgttgatgatatcatattcggttcaactaatgaggtattttgcaaggaatttggtaatatgatgtctagggaatttgagatgtccatgattggagagttgagcttcttccttggagttcaaatcaagcaactcaaggatgggacgttcgtgagccaaaccaagtacatcaaggatctactcaagaggtttggcttggaggatgcgaagtccatcaagacacctatagcaaccaacggccatctcgaccttgatgagggaggtaaaccggtagatttaaagctttatcgttccatgattggtagcttacttttccttaccgcatctaggccggatatcatatttagtgtttgcatgtgtgcacgatttcaagccgctccaaaggagtgtcacttagtggccgtgaaaaggattctaagatatttaaagcattcctcaactattggcttgtggtacccaaaaggtgaagcacgaggtgttcttcgttttgcaccaatagagggtagtttcttgctatgcctccccgcactcgtcatggtcgtcgtgagcccacgccggagccaagtgcgcatgaggaatcaagcggataggagtatgctcaaaggggatgaggtggaagtaagtggtgatgacactggcagtggcgatggtgaggatgatgaggcaagtgatgatgggagtcctctcgatcccaccatccaatttgtgctcaatttaaggaatgcccagcaatacactatcctccgtcatcacgatcaattccggaggcctaatgattgtaatgattcaaggttccatacacggtatcaaaaggccgtgtatgagcaagtatacgcaaacaaagccttcaccgaacacaagtggatttcttggaggcacattggtgagacaccggagtttgtggatttgcaggggttgttcaaggccgttggcattgataggattatcaccatgaagcaaccctttgatgaagacctcatctggcaattctatgccaccttttatgaagaaggggggaggcacacctatggaaaggtggcgggtttgagggtcatccctagtgtgatcaaccgcatagtgaaggccaccattctcccaagatgtggcaacaatgatgacattcgcggcgttgcatggcatgtcattgatgccatcatggatggtcgtcggtttcatttcatcaaccttatgatgaaggagatagccatttccaaggggacaattggacaaggaatttactatgctccctacataatgaggttgattcaaagcaagttgggacaagttggtaacaacttaaaagaacacaaggagtacaagcctcgtctccaactctccactcctagagctcctcgtgtgcgccaaccaacatttgatcaaggcgcaagctcaagtgcaaccccgcctcctcctcatgggtatgataccaatgctttcttccatccacaatatgcttactttggaatgtaa

SEQ ID NO: 9665 - DNA, 741 bp, Oryza sativa
  Clone ID: PAT_MRT4530_16060C.1
atgactaaggcggcggaggcgtgggagggcccgacggcggcggagctgaaggcggccggcgcggaggcgatccccggcggggtgcgggtgaaggggtgggtcatccggtcccacaacggccccatcctcaactccgcctcgctccagctctttgaagataaacttcagacaacacatttacctgagatggtttttggggagagtttcttatctcttcagcatgctcaaactggcattagattatatttcaatgcgcttgatgctctgaaggcatggaaacatgaagcactaccacctgttgaagttcctgcggcagcaaagtggaagttcaggagtaagccttctgatcaagtaatacttgattatgactatacattcacgacaccgtacaatgggagtgatgctttggttcagaacccagatagtattcaaacaagtttggatgaaccccgcaatttgtgttgggaggattctgaggatcggattgaccttgttgccctttcagcaaaagaaccaattcttttctatgacgaggttatcctgtatgaagatgagttagccgataatggcatttcattcctcactgtgcgagtgagggtgatgccaactggttggttcctgctcttgcgtttttggaagggatacccttccgactctgcagcatatggagacccgaatcttattgctcataagcttccagttgtgatgcagaagatccaaaagctgaaattacccaattaa

SEQ ID NO: 9666 - DNA, 1728 bp, Oryza sativa
  Clone ID: PAT_MRT4530_16061C.1
tttttttttttttttgatcataattaaaaacgtctccagtgctgctttttttttttgggaaaaaaatttgtggtgccattaatcataaaatcaacagaatagacaaatccatgtcttgttggcatggatgatacggtgaaaccacaaaagcacaactagtttctgggctcctgtctgtggaaggcacattcataggaaaaaaagatgaataaacacctacgaaagcgttcttttttctttatcctcacctacgaaagtgttgggtctcggtatctcttgaagagggattcgatgtcatcaagaacttccggtgccaaaggccgtggagcactggtaaatgcatcaatgttctccttcaactgatccatggtcgttgctccgatgattgtgctagctgtgaatggacggtcacgcacaaagcccagtgcaagctggactggagttaggccgtgcttcttggcaagcttgacatattcattcgttgcttctttagcaaacaatggcacctatctatctgcatctcatgtttggtgaaaatgacaggcaaggtaaccaatgtttatgaacaaaagatatggcaaagatatatcatacttaagctcagaaccaagagcatcaagcaatcttgcaatgaataaagtgaacggataaatgttatcagtttaaccttcaaagtgacatctcacaattagactataactgttctggatgctcacaatctttggaagtccttgaacctttgcagcatgtacaaactccatcactccatatgaagtttcattggaaacaccaatataacgaacctttccttcatcaattagctcttggaaagctttcaactgttcctcaaatggaacacttggcctccatttggttgggttgtaacagtattcaccaaatagtggaccatacctatctggccagtgtatctggagtaaatcaatgtagtctgtagataagcgggaaagactcttttcgacactttccttgatattggcagcatcaacacgaactactttcgcattgtcccggagaaaagtagatcgctctgagtaacctgaaacttttgtggctagaataatcttatctcgtggctttgattgcatccaactgcctatatatagatcagttcttccttgagtctcttttctgggtggcactggatacatttctgctgtgtcaaggatattgacaccttgatcgaaagaataagaaagaatatcgtgcgcttccttctccgtgttttgctctccaaatgtcattgttccaagagtgacctcactgatgacaaggtctgaatctcccagcttccgatactgcatctgcgactgcgcctgcgcccgaattctgctgccgatgcgtctcctgtgccatatctcaggccgacgggagcacaaccccgataaggtattgccatgtgatgaggatgggtttgcagtgaatgcagatacggccatttgttgcatgctgaagttcccagcacaaatctggtcgccggccgtgcgcgcgtggaggattccgcacaggggaggggagaaggctacggcggcggcggagggcgcgaggagaggaggcgatgcggtcgaggggtagccgtggcccgtggctccggcgggaccgcagtttggatagcactatagcaggaggcacgcgccgcacggccgcgccaacgggaaaaaacaaaaaaaaaataaaagaaaagaaaaggaaaaggatatgtcctcgtgc

SEQ ID NO: 9667 - DNA, 1404 bp, Oryza sativa
  unsure (1)..(1404): unsure at all n locations
  Clone ID: PAT_MRT4530_16062C.1
tcacgcgagcccataatcaagtcgggctcgcctctcgacctcggtgttgcgctctcctccgctcggaccgctcctcgccggcgatccccccgcctccaccgccgccgccgccgccgccgtcgatctgcgctgccacggccgggggggaagcttgtgctgaggcgcagtcctgaagagaaccccacttgggaggccggggggcgtcgaagctccaaacaaccaagcaccatcgtgacgaagcacgccacgggagatgactaaggcggcggaggcgtgggagggcccgacggcggcggagctgaaggcggccggcgcggaggcgatccccggcggggtgcgggtgaaggggtgggtcatccggtcccacaacggccccatcctcaactccgcctcgctccagctctttgaagataaacttcagacaacacatttacctgagatggtttttggggagagtttcttatctcttcagcatgctcaaactggcattagattatatttcaatgcgcttgatgctctgaaggcatggaaacatgaagcactaccacctgttgaagttcctgcggcagcaaagtggaagttcaggagtaagccttctgatcaagtaatacttgattatgactatacattcacgacaccgtacaatgggagtgatgctttggttcagaacccagatagtattcaaacaagtttggatgaaccccgcaatttgtgttgggaggattctgaggatcggattgaccttgttgccctttcagcaaaagaaccaattcttttctatgacgaggttatcctgtatgaagatgagttagccgataatggcatttcattcctcactgtgcgagtgagggtgatgccaactggttggttcctgctcttgcgtttttggcttagggttgatggtgtacttatgagattgagggatacccgggtgtattgctcttttggtagtgacgaagcaaaacccattgtactgcgtgaatgctgctggagggaagcaacatttgctagtctgtctgcgaagggatacccttccgactctgcagcatatggagacccgaatcttattgctcataagcttccagttgtgatgcagaagatccaaaagctgaaattacccaattaacccgacaacccatctcgtgtacatcagcgttttttttttccattgactgttggacggtgttctctttctgcttatcatgtgctgtggtctgtggatgcacgttcctgtagctggcaatagtataaaaattcttgtggtaaaggctatttgtctactggggcttatcagcttttaactctcattctcgccatgcttgaataagacgcttcaacggggctttgcatgtttctgatacagancgagtttacagagttcagactaaaaaaaaaaaaaaaaaa

SEQ ID NO: 9668 - DNA, 2094 bp, Oryza sativa
  Clone ID: PAT_MRT4530_16063C.1
atggggctgcatcgtcttcgatctccggcgaagggatcagtccaatgttccgtcggcccaggcaattgtatcgtctacgtcggcatcgttcaaggctgcatcagtacattcgacctcttggattactctggagctaagcagatctcccaggccggtgtgttcgattttttcgtcaacagagtggtacaagcattttttgaaaacggcgaaatgcaggagggagcaaatgacactgtcatagttatgattccaaaaactaagtcaccggaggagatgaaggatttctggcccatcagtctatgtaatgtgatatacaagagtgcttttgtatcaggttgcatgatcacagacaacgcgctcatcgctttcgaatgcttccatgccatccaaaaatgcaaaagggagaaccagaatttttgtgctctgaaattagatctttcaaaggcctatgatagagttgattgggcgtttctggatggggtgttgcaaagaatgggttttggagaatcatggaggaagtggacaatgtcatgtatgacatctgttagatacagtatctgtttaaatgggaacctgctagatccttttaccccaacaagaggattgcggcaaggtgatcctcttagtccatacttgtttctgtttattactgacgggttgtcacatattctggagaagaagagcttggaaggttcaatccaaccaattaaggagaggcaggaggagatcaaagctgttctgcagattcaaagagcaggttttgaagataaatacctaggccttccaactcccgaaggggagaggaaagtacattggatatcctgggaaaagctcacgagccctaagcttcatggtggcctgggctttcgggatactcggtctttcaatcaggctttattagcacgtcaagcatggaggttgatcgcggagccgaatagcttgtgcgctcggttgctgaaagcaaagtattaccccaatggctcccttactgatacagctttcccgtccaatacttcaccaacttggaaaggaatcgaacatgggctggaattgctaaagaaaggactgatttggaggataggagacaggcggactaccaagatttggaggaatagatgggtggcgcatggtgagaaagttgaggttatacagaagaagaattggaataggctcacgtatgtacatgagcttttgatccctggaacaaacgcctggaatgaggcattaatcagacatgttgcgacggaggaagatgcaaatgctattctaaagatccatgtgccaaaccaggagacatctcactttcctgcatggcactatgagaaaacaggccttttttcaggagtagcatggaacttaactaagagtgctcaagttcaggccgcatcaagtactgctaccaatggtgaaaggaagctctgggagaatgtgtggaaggcagacgttcaaccaaaagttaagatttttgcatggaaacttgctcacgacaggctgcccacttgggagaataaacgaaaaagaaggatacaaccagtaggcatctgccctatctgtggtgtaaaggaggaaaatggtttccatgcgactgttgaatgtacaatggcgagatcgttgcgagaagccatcagagagttctgggcgctaccgccggaaaggaagtttgctatgactgggcctgactggctccttgtcctgttggatagcttgaatagttcagacaaggcgcgtgttttgtacttgttgtggagagcatggttcctcaggaatgatatgatccatggaaaggggacggccacaattgcagagtctgtaaatttcctcgtcaactatgagaaggttcagacaaccaatcaggttgataaatggcacgcccttcccgaaggttcagcaaagcgtagaggtgttcaaggctctgtcacaacaggagctgtcgagatcacccttggcagcgacaataaaggaagcgagagggatgatgcagtgtctctaaagtgtgcagttttgcttgaggttctatttgactttcataatacattccaattatcctttccttttgtatctggaaacaagaaaggtgggagctttcttcattga

SEQ ID NO: 9669 - DNA, 610 bp, Oryza sativa
  Clone ID: PAT_MRT4530_16064C.1
gtccatgaaatgattactcttaatttgttttatgccaaagctatcccatccataaatgtttctaaatctttgaacctaaataattcaacacaaaaaccttcagttcagaggaggatatatccagagaggcacagaggatagcaggtgcagggtcatcagggcatcaggcaagatggaaatggtaacttgccaccaggattctgttgaagtaaacttgatggatgtaatgcttgatgcgtcgacgcaaaagtaagaacctcccaaatcaattgagtcctcttttcacagggctctaatacagcacactatgggtcaaagaagaccagaactagctgcacactgttcatcaacttgagaaaagtttgagccataaccattgattgggacaaaatataatcccaatgattcatctgatgggctacaaattagacctttctatgacttttagtctgaccagacaaaatatttccaccccttcttataacgaaaaacgggacacatgaatacataggtggataattgccatcatctgtgtcttgtctcggctccaaaacatgcttcgccccggggcggaactttaccggaccagaccttgaaaaaaaccctgaca

SEQ ID NO: 9670 - DNA, 530 bp, Oryza sativa
  Clone ID: PAT_MRT4530_16065C.1
atggcatacacaatggacgaacttgtcaagtggagcaaatcaaagattggcaacataaagaaaggtattgaaagtcgcaggaagaaattaggtgaactcagaatggcagggatgcttgactctgaaccagaggtgaaaaagatcaaagagcagcttcaggaaatgcttcgccgtgaggagatatggtggagacagcgatctcaaatcacttggctgaaggagggtgacaaaaatacaaagtatttccacctgaaagcgtcctggcgagctcggaagaataaagtgaagaaattgcgcaggcctaatggcagcctggtgtcaaatgaaaaggagatgggagagacaaaaataacagcggaaatgaatgagtctttgatgaaacccttctctgaggaggagataggagacgtcttgttccagatagggcatttgaaagcgccagggtccgatgggtatcgccaggattttggcgttcttgttaagagtgcttcatataagggttacccccccaagggtcggtttttaaccgg

SEQ ID NO: 9671 - DNA, 3299 bp, Oryza sativa
  Clone ID: PAT_MRT4530_16066C.1
cgtcagagagcaaattgaaagattcaagagaagctctggctgattgtgattggcatgatcttggttttcatgagtgcccatggacgtatgatacaatcaaagaggtgcaaacaatgtaagagtacgactggatcgagcagtagcctcgccagcatggctgggcagatttagacaggcaagcatcacacaccttgttacacctagttccgaccatgtaccgttgctactggagagattagaagaagaacttgttcataacagtgtgaagataagtcgttatgaagctatttgggaaagagaagaatcctttgactcggttgtccagcaggcatggggagaaggagaagttgtgcgcaaccttggggacttcaaaaccaagatggcatacacaatggacgaacttgtcaagtggagcaaatcaaagattggcaacataaagaaaggtattgaaagtcgcaggaagaaattaggtgaactcagaatggcagggatgcttgactctgaaccagaggtgaaaaagatcaaagagcagcttcaggaaatgcttcgccgtgaggagatatggtggagacagcgatctcaaatcacttggctgaaggagggtgacaaaaatacaaagtatttccacctgaaagcgtcctggcgagctcggaagaataaagtgaagaaattgcgcaggcctaatggcagcctggtgtcaaatgaaaaggagatgggagaggttgcccgtgatttcttccagaatctatatatgaaagatgaaaatcttgaccctactgaacttttcaatttgttccagacaaaaataacagcggaaatgaatgagtctttgatgaaacccttctctgaggaggagataggagacgtcttgttccagatagggcatttgaaagcgccagggtccgatggtttcccggcgcatttcttccaaagaaattgggacccttaagactgatgttattagagtggtacaagcattttttgaaaacggcgaaatgcaggagggagcaaatgacactgtcatagttatgattccaaaaactaagtcaccggaggagatgaaggatttctggcccatcagtctatgtaatgtgatatacaaggtgatagctaaatgccttgttaatcgactcagaccgctccttcatgatgtaatatcaaatgcatagagtgcttttgtatcaggttgcatgatcacagacaacgcgctcatcgctttcgaatgcttccatgccatccaaaaatgcaaaagggagaaccagaatttttgtgctctgaaattagatctttcaaaggcctatgatagagttgattgggcgtttctggatggggtgttgcaaagaatgggttttggagaatcatggaggaagtggacaatgtcatgtatgacatctgttggatctcccacttactttttgctgacgatagcttattgttttttcaagccgaggttgatcaagcgagaatttgctggaggcgctcagtctatacgagaaaagcacagggcagtgaattttgctcataggagaggcaggaggagatcaaagctgttctgcagattcaaagagcaggttttgaagataaatacctaggccttccaactcccgaaggtaggatgaaatcagaacaattccaaccaatcaagggaagattttctaagagattaacagattggtgtgagaggtttctatcagctgcagggaaggatactctgataaagagtgtagctcaagctctccccacctacacgataggagtgtttaagatgcctgaacatttttgtaatgattatgaatagatggttcgcaatttttggtggggacatgacaaaggggagaggaaagtacattggatatcctgggaaaagctcacgagccctaagcttcatggtggcctgggctttcgggatactcggtctttcaatcaggctttattagcacgtcaagcatggaggttgatcgcggagccgaatagcttgtgcgctcggttgctgaaagcaaagtattaccccaatggctcccttactgatacagctttcccgtccaatacttcaccaacttggaaaggaatcgaacatgggctggaattgctaaagaaaggactgatttggaggataggagacaggcggactaccaagatttggaggaatagatgggtggcgcatggtgagaaagttgaggttatacagaagaagaattggaataggctcacgtatgtacatgagcttttgatccctggaacaaacgcctggaatgaggcattaatcagacatgttgcgacggaggaagatgcaaatgctattctaaagatccatgtgccaaaccaggagacatctcactttcctgcatggcactatgagaaaacaggccttttttcagtaagaagcgcctataagctagcatggaacttaactaagagtgctcaagttcaggccgcatcaagtactgctaccaatggtgaaaggaagctctgggagaatgtgtggaaggcagacgttcaaccaaaagttaagatttttgcatggaaacttgctcacgacaggctgcccacttgggagaataaacgaaaaagaaggatacaaccagtaggcatctgccctatctgtggtgtaaaggaggaaaatggtttccatgcgactgttgaatgtacaatggcgagatcgttgcgagaagccatcagagagttctgggcgctaccgccggaaaggaagtttgctatgactgggcctgactggctccttgtcctgttggatagcttgaatagttcagacaaggcgcgtgttttgtacttgttgtggagagcatggttcctcaggaatgatatgatccatggaaaggggacggccacaattgcagagtctgtaaatttcctcgtcaactatgagaaggtactgttgccgatccgacaacaaagcgatgacatcaaaggaaaaggattaattactgctgtccaagctgaggcattggcatgtctagaaggattaagggcagccatggaatggattcatatgccaagaatcttggaaactgacagcgtagaggtgttcaaggctctgtcacaacaggagctgtcgagatcacccttggcagcgacaataaaggaagcgagagggatgatgcagtgtctctaaagtgtgcaggtttgcaagatcaagagggaagcaaataggattgctcatgctttagctcaaatggctatgaggtctagatcgtgtgtggagtagaagttgtgtgctcccgcaggaatcttagacttgatagaccaagaatattgctacgggacactagatctttcttttt

SEQ ID NO: 9672 - DNA, 2666 bp, Oryza sativa
  Clone ID: PAT_MRT4530_16067C.1
aataattttgccttttttttcaaaaaagaaaacaaaacgaaacgaaaaaagaagtaaagctttactacgaaatcatggcggaaggatagatatatagatgaagaatgcatcaatcattacctaacaaccaagcatgactcggtacacaagattaataatttgtgggttaaacatgcaaccacgccacatcatcaaacaataattacatattcaatctcatgcaagcatacaacatcttctacaatctatcaaattctacagatcaacatacaagcatatccaataatcatccctacatcattttcataatattttaacaaatattattagagtgatgttattagagtggtacaagcgttttttgaaaacggcgaaatgcaggagggagcaaatgacactgtcatagttatgattccaaaaactaagtcgccggaggagatgaaggatttctggcccatcagtctatgtaatgtgatatacaagttgatagctaaatgccttgttaatcggctcagaccgctccttcatgatgtaatatcatatgcacagagtgcttttgtaccaggtcgcatgatcacggacaacgcgctcatcgctttcgaatgcttccatgccatcaaaaatgcaaaagggagaaccagaatttttgtgcgctgaaattagacctttcaaaggcctatgatagagttgattgggcgtttctggatggtgtgttgcaaagaatgggttttggagatacatggaggaagtggacaatgtcctgtgttgacatcttctggagaagaagagcttggaaggttcaatccaaccaattaaggtgtgtcggggagccccagggatctcccacttacttttcgctgacgatagcttattgttctttaaagccgagtgaattttgctcacaggagaggcaggaggagatcaaagctgttctgcagattcaaagaacaggttttgaagataaatacctgggccttccaactcccgaaggtaggatgaaatcagaacaattccaaccaatcaaagaaagattttctaagagattaacagattggtgtgagaggtttctatcctcgggcccggcctgggggaaggcaaattgtgtgcaggaatgcttggcccgggtgcgcacgagtgaggacaaagtgtgcagaaaagacatgtgttggtctgtgagggcagtctatgacctatgaaagctcgggcctggcctgggggaaggcgggacgttatactgctgtcctaggagaagctcacgagccctaagcttcatggtggcctgggctttcgggatattcggtgtttcaatcaggctttattagcacgtcaagcatggaggttgatcgcggagccaaatagcttgtgcgctaggttgctaaaagcaaagtactaccccaatggctcccttattgatacagctttcccgtccaatacttcaccaacttggaaaggaatcgaacatgggctggaattgctaaagagaggactgatttggagggtaagagatgggcggactaccaagatttggaggaatagatgggtggcgcatggtgagaaagttgaggttatacagaagaagaattggaataggctcacgtatgtacatgagctcctgatccctggaacaaacgcctggaatgaggctttaatcagacatgttgcgacggaggaagatgcaaatgctattctaaagatccatgtgccgaaccaggagacatctgactttcctgcttggcactacgagaaaacatgccttttttcagtaagaagcgcctataagctagcatggaatttaactgagagtgctcaagttcagacctcttcaagcactgctaccaatggtgaaaggaagctctgggagaatgtgtggaaggcagacgttcaaccaaaagttaagatttttgcatggaaacttgctcacagcaggctgcccacttgggagaataaatgaaaaagaaggatacaacctgtaggtatctgccctatctgtggtgtaaagggggaacatggtttccatgcgactgttgaatgtacgatggcgtgatcgctgcgagaagtcatcagagagttctgggcgctaccgccgaaaaggaagtttgctatgactgggcctgactggctccttgtcctgttggatagcttgagtagttctgacaaggcgcgtgttttatacttgctgtggagagcatggttcctcaggaatgatatgatccatggaaaggggacggccacaattgcagagtctgttaatttcctcatcaactatgagaaggtattgttgctgatccgacaacaaagcgatgacatcaaaggaaaaggattaattactgctgtccaagctgaggcattggcatgtctagaaggattaagggtagccatggaatggattcatatgccaataatcttggaaactgacaacgttcaaggctctgtcacaacaggagctgtcgagatcaccctgggcagcgacaatcaaggaagcgaaagggatgatgtagtgtctccaaagtgtgcaggtttgcaagatcaagagggaagcaaataggattgctcatgctttagctcaaatggctatgaggtctagatcgtgtgaggagtggaagttgtgtgctcccgcaggaatcttagacttgatagaccaagaatttattattggttgtatacca

SEQ ID NO: 9673 - DNA, 456 bp, Oryza sativa
  Clone ID: PAT_MRT4530_16068C.1
atggacatgggcggcaatggcatggcgatgccgccgccgccggcgccggtgaagaaggcgcggtacatgcacatgaccttcttctggggcaagaacacggaggtgctcttcaccctgtggccgggcgccaggggcggcatgtacgcgctcgcgatcctcttcatgttcgcgctggccgtgctcctcgagttccgcggctaccgcgtgctggaggcgcgcctcgcccggcggcgcgcgccgcgggcggccgcggcgctgcgcacggccgtccacgccgtgcgcgtcggcgtcgcatacctcatcatgctcgcgctcatgtcgttcaacggcggggtgttcctcgcgatcgtggcggggcacgccgccggcttcctggcgttccgcgccggcctgtgcggcggcgggccggcgccgccgctggaggaggaccgcaagaacgaccccgtgtgctgctag

SEQ ID NO: 9674 - DNA, 564 bp, Oryza sativa
  Clone ID: PAT_MRT4530_16069C.1
ttattttaggggcggtgagaaggcagcatcagcggctggcgcggcgaggaagcggccttggctaggggatgacggccctgggagcctcgtcagggactgctggcgggaggagctcgtcaagccggtctcatggtcggagagctcgaccgggatggccataccatggaggacctcgacggcgcgcgcagcgagcaggtggagggcgtcggcaaccgcggtggggtgggcgccagcggagaggaggaactgggcgcggcagaggagggatctggagaggccatagttgctgccgccgcaggaactgccgtggtcgcagccgcagagcccaccttccccaagtcgacaccggagctggtcccgcgcgctcgcccaacgggcaaagcactgcatcatccaatcgaaatcgatgaaatgtggatgaaattcatttcagacaatacagagatgagaatggatttggaatcgattggattggaaagattatcaatgaggaagaaaaattacagcacacacatatgtgaaagaatttgttcccatgacctccattgtaccgaaataatatga

SEQ ID NO: 9675 - DNA, 375 bp, Oryza sativa
  Clone ID: PAT_MRT4530_1606C.1
gcacgaggagcttgccgcctcccgcgcctccgccggctgcgcgtgtggctccagctccgccgccgcgccagagagaagaagagagagagagagaagaggaagggagagaagaggggaaagaaagaggaggctaacctggacaggctgacatgtggggtccacgtgggccacgtaggataaaatcgggatcaaaaccgcagagggacatgttgtgaccggttttgtttagttaagggaccccgcatatctggttttgctgatcgaagatgtttttttatcccgatgacaagttgagggaccttcggtgtacttattcctatatcacactatcaattctggcccatcctaggatcttatgaggcccatcccaataag

SEQ ID NO: 9676 - DNA, 311 bp, Oryza sativa
  Clone ID: PAT_MRT4530_16070C.1
gggggtgattcttgtactttgagctgcacattaaaaggtcacggagaataagttacctcccaaataaacacgctacaaaaataaggcccagaaattgcttggagaaattctcggggactgacagacaaaagccggacccagagcgacaggactattttaagaggaaaagctgggattcaactgagccttttaactagtagggggaacacaccaacttaaaacaccctgataggtttcccaatggtgctcttgaagaaaagggacgtaacattcggccaggacttttaaaaaagggacacgaggaaggtgac

SEQ ID NO: 9677 - DNA, 702 bp, Oryza sativa
  Clone ID: PAT_MRT4530_16071C.1
atggtcccctctcggcgcatcaagtacatagccgttcccatcttccctcagatgttccaagaaaagcctgtaacttggatctatttctgggatactatcaacaggcaagcgcccccgaccggcatcggcgccgtcgaccgcgaccaccccgctgcgcagcgtcactaccccaccaccaagcgccgccgcagatcgccaccgccgccagggcggtggggccgtcgagctggggcggcgggggtggtggcgctcggcggtgggggcggtggggcgtcgagtcagccgcggcggcggcagctctcggcggttggggcggtgctcgggggcggcgagcttgcgcaccctggcggcggcggcgatctgcagcggcgcttggtggcctcggccatgcacgcggcggagttagggctagttggtgcttttgccggtgagtctccacggatgccagtgtggacggcggcggtgatggttggtggtggtggcggtgcgagatccgaagatcagtggacgaatcgacgggtggagatggctccttgtggtagtgttggttgcagcaccgtcttcgcccgggaggtcgccacccagctcctattggctgctgcggcggcttctcgaggccttcgttggctagcgctggcagcacatgtccatgtcgccctactatttcccggagcttgctactcgcggatgtcaagccgatag

SEQ ID NO: 9678 - DNA, 694 bp, Oryza sativa
  Clone ID: PAT_MRT4530_16072C.1
ctcccgtacctccctctctccgcctcgaccgcatccgtgcgatccgcttctgtcgcacctcccccttctggccgctatcgaatccgtccccctcccgtcgccgcccagtctcccctcccaccgccgcctccctcccgtcgccgacccaatccgccgtcttgccgcccagctccggctccggtctccccactctctttctcaaacccgtcgcctgttgatccccgtcctccgccgcaacctacgccctcctccgcgcagacaccgatctccgtcgccagttcaacgtcgggcgcatccatccacgaccacgaccacgaccacgccgcccgccgatccggacatcgctgctgtccctccgccggcgaagtctgtgcggcctccgcctcaaccggcatcgccgccgctgtccctccaccgcggaaatcgtcacgcctcgcctcaaccgccacctatacggagtcacgccgccgtccctccgccgctgaaaggacaacaccagcgacgcctagcggatctccacgcctgctgcccaccggcactgcccactgaggaggagttctacagtgatgctgaaggtgtagagggttaggcgtagccctggtcaagctgcttgtgggatggagtcgcctgagctttttattttattttccgctgcttagatctttattgtttgagaggaactatctacctctgt

SEQ ID NO: 9679 - DNA, 456 bp, Oryza sativa
  Clone ID: PAT_MRT4530_16073C.1
ccacgcgtccgcggacgcgtgggcggacgcgtgggcgctgctgtccctccgccggcgaagtctgtgcggcctccgcctcaaccggcatcgccgccgctgtccctccaccgcggaaatcgtcacgcctcgcctcaaccgccacctatacggagtcacgccgccgtccctccgccgctgaaaggacaacaccagcgacgcctagcggatctccacgcctgctgcccaccggcactgcccactggagaagattttgaagagttccaagaggaggagttctacagtgatgctgaaggtgtagagggttaggcgtagccctggtcaagctgcttgtgggatggagtcgcctgagctttttattttattttccgctgcttagatctttattgtttgagaggaactatctacctctgtaatgactttatattcgcttattaattagagtaataattgcactct

SEQ ID NO: 9680 - DNA, 385 bp, Oryza sativa
  Clone ID: PAT_MRT4530_16074C.1
atgtgctaccaggtgaagtgcgggacgtgcggcaagtccacgtgggccgggtgcggccgccacgtggcgtccgtgcacagccagatcgccgacggccagcactgcgcctgccgcgcctggccgggcgtcgccgacaaggccgccgccgccgccaccgacgccgccggcgaggccccgtcgtccagcctctgcgccatcatggagtccttccagtgtagggtgagaaatgtcactggttgtgggttggttggtgtcttctttgcagctagattcaccggaacttccgcttgcatctgcatctctgtcaacgtgaactcctttcagagtgaagcctgcagctactggggattctttaagcccaaagacaccaagacagatgatctgg

SEQ ID NO: 9681 - DNA, 1250 bp, Oryza sativa
  Clone ID: PAT_MRT4530_16075C.1
atggggtcggcggcaagggcggtgatggtggcggtgaacgcggacccccgtcaggggccccaagctcgggtgggcgcggggcggatctggcgacggtgccgacgacggtggcatccggcaacgacgacctcggagacgacggtagcggacggcgaccttggcagctatagcggatccgatgacggtggcgacggtggctggcgacggagccgacgacggctggcgacgacggcggcgcccggcaacgacgacctcggcagcagcggcacagagactgcagcgaaaagggtgaagcaatattggattgttcccccgaccagaaggccgcgcatgctaagcactgtcgccgcgggcgtcgcactgtcgcaggcaatgtcgtacatacttctcacgcgctcctcccgcgacgtcgtcgtcatcgactactccatcgcggccgtctccccgggtggcatgttcatccaggtcgagtacgatgacgactcaaccggcgccgtggacatgcgtcgcctcgccggtgacaacgacgcgttgagagttgcggcgatctccggctcgctgcggaggggctccgccaacaccggcctcatccgcgccgccaaggagatatgcgaggagtccatcccggggatggttattgaccacgtcgacatccccgacctgccgctgctcaacaccgacatggaggttgacgacggcttcccgccggccgtcgaggcgttccgggccagtgtccgcgctgccgactgcttcctcttcgcctctcccgagtacaactactccatctcaggtcctctgaagaacgcgttggactggggatcaaggccgcccaactgctgggctgacagagccgccgccatcgtgagcgcgtccggaggctccggtggcagccgatcaatgtaccacatcaggcaagtcggggttttcttggacatccatttcatcaacaagcctgaagtgttcatcaaagcacatcagcctccgaaaaaattcgacagcgatggcaatttgattgatccggagattaaagaagagctcaaggatatgctcctgtcactgcaagctttcgccctgaggctccagggcaaacctgcaaactctaaacatgcagcttaagcgggttttcaaaaaaaaaaactggatgaatagaactcattggattctaggacaacttatcttaacgccgaacaattgtgtagccgtgatttgaacggtagcttaaataaatcttttggttgtgtaccttgttc

SEQ ID NO: 9682 - DNA, 506 bp, Oryza sativa
  Clone ID: PAT_MRT4530_16076C.1
ttggttttgcctctctgggtgttcttggctatcgggcgattgttataggcaggaagcctgaatctctacgccctgccagttctgtaaggacggggactgattcttgacttcctgactattgccttgtgttgcgtgcttctagtcgagttggcttgcataaccattcatatttgattcgagaagacttcaggatagaaacaaactcaaggggccatttctcatgctggcttgtcatgtctctgacaattgacacaaatattacgatatgcttctgttctgcatgacaattctgatttggttaatgaacactcagagagactcaaaatgcgccaataaacttgagtcatcaggcgtaattttttatttcggcctgttgcaccatcttatacttaaaaacaaaattaaccgtgctgttttaatgaatcatttctgtgatctactcaaggcggttggacaagggctaatcttggaggcttactctgattgaaccctggagactggggact

SEQ ID NO: 9683 - DNA, 520 bp, Oryza sativa
  Clone ID: PAT_MRT4530_16077C.1
atggggcgccgccaccggcctcaccacggccgccgccggctagggctcccctcgtccactgtcgtcggcgccgccggcgtcatcgtcgcgtcaacgaggagagccggcggctggatgcgaaccgtcgtcgtcgcctgtcgtggccggcggcagagggggcgaggaggtgaagcggcgaggagggatagccggcggcgcgcgcacgtgggagaggagggagccgtcggcggaggtaatgagtcggcggcaaggagggagccggcggtgtcgcggtcgtcgtcgtcgtcgtggccggcggtgcgcggacgtgggagaggagggagccggcggtgcgcggatctggagcggagggagctgtcggcggcaaggagggagccggcggtgtcgcggtcgtcgtcgtcgttgaggagggaggcggcggcgcgcggacgtcgtcgtggagggagccggcggcgggcggacgcggaccatataaggtgcgcctgcgaaaaggcgcacattcgcaggcacaccttatatg

SEQ ID NO: 9684 - DNA, 191 bp, Oryza sativa
  Clone ID: PAT_MRT4530_16078C.1
taagctaactctttggagccatcagggtgttttctgtggcagtggcattgccaagtcatatcaatccatccctttcatcaacttgtaagcttgagtgtacaaacaaagaatgtttttcccatatttatgggatataaaccaacaccacataatacaagcaaaataataacaatttaaaaaaaaaaaaaaaa

SEQ ID NO: 9685 - DNA, 174 bp, Oryza sativa
  Clone ID: PAT_MRT4530_16079C.1
gggggtattagggtgtacgtacgcgtctaccagatgggcggtgtgcaggtacagaatgcggatggccgcgcgcgaacaaaggcgattggtatcaacagacaaatcgtgaaggaccggaacacagttctcaccacctggaacgctgatacagagaacggagacatacagaaggcg

SEQ ID NO: 9686 - DNA, 450 bp, Oryza sativa
  Clone ID: PAT_MRT4530_1607C.1
atggcggtagagaaggtgccgacgacgacaccgaccttcttgcctctccatctccatggccgatggcgcgtggcgggacggcctagaggggagagcgcaacggcagtggtgctaggagggagcgagagcagctttggtggcagggcgttgggcaaggaggaggaggtctcgatgggcctcacacctggtgctgccaatgcctataggtcccccatcaatgacccctccgttcgccgcaccgccaacaccttctcctccgctagtgacgagaggaggatgagagagggatggaaacatggggtggtggcggtgggaggcgatggcgacaacaggcaggcagctcctcgcctccccacccctcccctccctctccctctcccagatctagccagcgggaggggggcggcggccgccgccgcagcgacggcaagcgggcagcggcagaggtaa

SEQ ID NO: 9687 - DNA, 321 bp, Oryza sativa
  Clone ID: PAT_MRT4530_16080C.1
atgaggcattatctggcggttactgaggtcagtgcacctgtaaccgtcgtttgggagctatctggagcgtccatgtggaaagtggcgatgagaggagtcaggggtggttcggcctctcatcaccgaccttcaccagaggtcggcgacgggcggtcgagcggcgggcggcctccggcttttgcttcctcggcgtgccgggtggcccgcggcggcgggcgctggaggcagatcgacggcctgatgatagcgcatgtctccaatgccagagatccctcactcattcgctgcctggagtactggaggcctggtcaatgcagctga

SEQ ID NO: 9688 - DNA, 1859 bp, Oryza sativa
  unsure (1)..(1859): unsure at all n locations
  Clone ID: PAT_MRT4530_16081C.1
aaactcagacgttcggtaaattttgttcaaaattcacaggttttcgagtggtaatgacaaaaatcggcaaaacccctcgaatcagctaataatctttggaactctgcatactacggcatcccatccaatgtccaacaacagaaatgatattacagtttactattggcagacttggtgagactgcccatggcccgggccttctcccggagcacgaacttctgcgtcttccccgtcgacgtcttgggcaaatcatcgaacaccaccgtcttcggcgccatgtaatgcggcagcctctcccggcaaaagcttatgatctcgccttccgtggcgttggcgccatccttgagcttgacgaacgcgcacggcgtttccccccagtaatcgtccggcctcgccaccaccgccgcctccagcaccgccgggtggctgaagatcaccgactccacctcgatcgagctgatgttctcgccgcccgatatgatgatgtccttggcccggtccttgagctggatgtacccgtcagggtggcgcacggcgaggtccccgctgtgcagccacccgccggccatggattccttcgtcgcgccgatgtccttgtagtacccgctcatcaccgtgttcccccggaacatcacctcgcccaccgtctgcccgtcgtacggcacgttctccatcgtggccgagttcttgacggcgacgtcctgcaccgcgatgtgatggaacccctgccgcgccttcagccgcgcgcgctcctccgccggcaacgcgtcccactccggcatccacgtgcagacggtggcggggccgtacgtctcggtgaggccgtagatgtggtacagcacgaagccgagctcctccacggcgagcaagacgcggggcggcggcgccgcgccgcccgtcatgacgcgcacgggccccggcagagccctcctgtccgcggccggcgcgttggcgatcatgttgagcaccgtcggcgcgccgcccatgtgcgtcaccccgtgccgcgcgatgctgtcgaagatgaccttcgccgtgaagtggcggaggcagatgttggtgccgccctgcatggcgacgccccacggcaggttccagccgttgcagtggaacatgggcacagtccacaggtacgtcggcatggcggtgatgtcgtacgcgaggaccgtcgcgatggtgttgaggtaggcgccgcggtggttgtacaccacgcccttgggccgcgacgtcgtgccggaggtgtagttgagcgtgatcgggtccatctcgtccaccggccaccggatgtcaaactccgacggcgcgtccctgacgagatcctcgtagtccacgcagcccgagtcgcgggcgccggcgccgtcgtcggagatggttaggagaaccggaaggctcgcggcgctggttgagccggcgaggcgcctcagagcggctctcccaacgtcgaggaggtgcgactcgacgaagaacaccttggcgccggagtggctgaggagggtggagatcatggccgcgtcgtgccgcgcgttgaacgtgcacaggaccgcgccggccatcggcacggcgaagtgcagctcgtacatagccggcacgtttgggctcaggacagcaaccacatcgccgcgggcggcgagcgcggcggccaagcggacgcaccggccccgcgcctccctccacgtgtaccgcctctccccgcacaccaccgcggcgcggtcgccgtagacggccgcggcgcgctggatgaagctgatcggcgtcagcggcgcgtggttcgccgcgcaccgcaccgtgccggcatccataattnaccaataatttgcatggaagccacattacttcgcagttcatactgctcgtgccgaatt

SEQ ID NO: 9689 - DNA, 3461 bp, Oryza sativa
  Clone ID: PAT_MRT4530_16082C.1
atggctactacatcatcagcatgcgtttccattgctgtactagtagtagtgctatcgtccacctcatgctattcttctccaagtccgacgaccaccgccaatggcagcagcgacaccgatctcgccgccctgctggctttcaagtcccagcttaccgaccccctcggcgttctgacaagcaactggagcaccagcacctctttctgccactggcttggtgtcacctgcagccgccgccgccgacatcgtcgtgtcactggactgtcgcggccccacccgccccgcctccgtcccatcactcctctcctcggtaacctctcgtttctctccttcctcaggctcaccgacaccaacctcacggcctccatcccagctgatcttggcaagctacgccgtcttagacatctctgtctaggtgaaaacagcctctctggtaggattcctcctgacctgggaaacctagcaaggctcgaggttcttgaattaggcagcaaccaactctccggtcagatacctccagagttgttgctgcatctgcacaatcttcaggtgatttctctagaagggaactccttgagtgggcagatcccgtcttttctattcaacaacacgccttccttgaggtacctatctttcggaaacaacagcctatcaggtcctataccggatggtgttgcctccctgtctcaactcgagattctagacatgcagtacaatcagctctccagcctagtgccacaagccctgtacaacatgtcctggcttcgagtcatggcgctggcaggcaacgggaacctgaccggaccaataccaaacaataatcagacattcaggctccctatgctacgatttatttccctcgcccggaacagaatcgccggtcggtttcctgcggggcttgcatcatgccagtacttaagggaaatctatttatatagcaattctttcgtggatgttctcccaacatggttagctaaattgtcacgacttgaagtagtttcactgggtggaaataagcttgttggtacaatcccagctgttcttagcaacctcacccgcctcacagtactagagctctcttttggcaaccttacaggaaatattccaccagagataggattacttcagaaacttgtgtacttgcttctttcagctaatcagttgtctggctcggtaccgcggacactggggaacattgctgctttacagaagctcgttctaccccacaacaacctagaggggaatatgggcttcttgtcatctctttcagaatgtaggcagctggaagaccttatcttggaccataattctttcgtaggtgcccttccagaccatttgggtaatctctcggcacggttaattagtttcattgcagatcataataagttggcaggtagtcttccagaaaaaatgtccaacttaagcagccttgaactgatagatcttggttacaaccaactcactggggcaattccagaatcaatcgctacgatgggaaatctcgggttgcttgatgtctctaacaatcacattttaggccctttgccaacacagattggcacgcttttgagtatacaacgactatttcttgaaaggaacaaaatctctggctccataccagatagcattggcaatcttagcaggttagattacattgacttgtccaacaaccagttaagtggaaagataccagcaagcttattccaacttcataaccttatccaaataaatctttcctgtaattccattgtcggtgctctgccagccgacattgctggcctaagacaaatcgaccaaattgatgtttctagtaacttcttgaatggaagcatcccagaatcattgggacagctcaatatgctaacctatctgattctctcacacaactccttggaaggttcaattcctagcactctccaaagtctaactagcttaacatggttagacctttcctcaaacaacctctctggttccattcccatgttccttgaaaatcttaccgacttgactatgctgaacctctccttcaataggctcgaaggcccaataccagagggaggaattttctctaataaccttacgagacaatctttgattgggaatgctgggttatgtggttctccacgtcttggattttcaccctgtcttaaaaagtctcacccttatagcagacctcttctaaaacttctactcccagccatcttggtagcttctggcatccttgctgttttcttatacttaatgtttgaaaagaaacacaagaaggccaaagcttatggtgatatggcagatgtcataggccctcagttactcacctatcatgatctcgtccttgccactgagaatttcagtgatgataacctgttgggatctggaggatttggaaaagtatttaaaggccaacttggcagtggtttggttgttgctataaaagttctagacatgaagctggagcattcgatcagaatctttgatgctgagtgtcatatactacgcatggtgcgacaccgcaacctgataaagatactaaatacctgttcgaacatggacttcaaagcattggttcttgagttcatgccaaatggcagcttagagaaactgctacactgctccgagggcacaatgcacctgggattcctcgagaggctgaatatcatgctcgatgtgtccatggcagttcattatctgcaccatgagcactacgaggtggttttgcactgtgatttgaagcctagtaatgtgctatttgacaatgacatgacagcacatgtggcggattttggcattgcgaagttgctattaggcgatgacaactcgatgattgttgctagcatgtctggaacggttggttacatggcaccagaatatggctctatgggaaaagcatcacgtaagagtgatgtgttcagctatgggatcatgcttcttgaagttttcactggaaggagaccaatggatgctatgtttcttggagacctaataagccttagagagtgggttcatcaggtatttcctacaaaacttgtccatgtggtggataggcatctactgcaaggctcctcgtcttccagctgcaacttggatgagagctttcttgtgccaatatttgagctgggtttgatctgctctagtgatttgccaaatgaaaggatgacaatgagtgatgtggtcgtcagactgaagaagatcaaggtggcatacaccgaatggatatctgcgacatagaatctggctcagtaaatcgctctagcttattatatatgtatgggtttccttcaaaaaaaaaaacattatgtgtatgtatctaccttgtttatttgtacactgcaaacgtcatcaacgtcactatattatctaccacttcttgtcttcgttgcccaaaaaaaaaaaaaaaaaaaaaaaaaaaaaaaaaaaaaaaaaaaaaaaaaaaaactcgagactagttctctcctgcagcccgg

SEQ ID NO: 9690 - DNA, 379 bp, Oryza sativa
  Clone ID: PAT_MRT4530_16083C.1
gtctcttccctacacagatcttaccaacagatgtgccaggagcactgatgatgtaccagaaggggatgatactgctgaacaaggaggcgtatcggatgggctacaggggaggccgtccagcctgaaggacccaattcagactcggcgtccggctagacaggccaaggcgaatcctcgtaattatgggcctgattgggccatatttactgccaccaggcatgggagtggcaacgacgaccgcaatggcctcgggagtgcggacctaccgccgctggccttgggagtggtggatccgccatgcatgggaggatcgactaacgactacggtagccttaggagtgcggatcgaatgctgcctgcctcaggagcgttgtgttga

SEQ ID NO: 9691 - DNA, 348 bp, Oryza sativa
  Clone ID: PAT_MRT4530_16084C.1
atggagaagctggtgccgaacacgaagaaggcaatggaggacaaggaggagaagcccaaggtgccttcgagcgacccggacctcgtcgacctcgtcgccggcgagcagccgcagctgcagcgggagcaccagccgcccaacatctccgagatgaagccgctgacgcgggaggcgtacggcggcgggatgtacgccaacgaggggcggagggacccgacgcggccgcgcgccagcgccacgcagagcgccgacggcccggaggaggccgccgtcaggcccaagcacgcgccgccgccgtccaccggcgaccgcgacctcgacatcaccggccagtcctacatccagtag

SEQ ID NO: 9692 - DNA, 447 bp, Oryza sativa
  Clone ID: PAT_MRT4530_16085C.1
atgggtcgctgcaggacgcgctgctggggtggcgctgctcggagctcgtggtggagtggccccgctgccttgccgtcgctcgcgacgtggccgccacgctccattacctccactccgtcgtcaagccgcatcaattccgacgcagatgaggacggcaagccggagagcggtgcgatcgcagaaggatgtgacgtcgataggggatgtgatgatgacgcctctatcataagggagagcatgatcaccaccatggtgaatggtgaggggaaccccaaatcgccggagaatgatgatggcttcacatcggcatcaccggcggaagctgcatccgcttctggatttgaccggatcagtgttgagagcggtatgcgtccacctcccgagcccggagccaccgctcgcctgctgctgccgctccgcctacctccgaccgcgcaccgctactga

SEQ ID NO: 9693 - DNA, 507 bp, Oryza sativa
  Clone ID: PAT_MRT4530_16086C.1
ttttttttttttttttagcatgcaaggaaatggagatttcgagtcttggcagtaaaatagatgtacaattccataccattgagactaatttacagagcaagccgagggtaatatttagcaagagaacagtacaaaacaaaaatatcacactcagtcacctcatttcgccagcatacacacccttgtggcctttgtgccggtgcaggctgaccaggcgtccaaaaagcatcagcacttcacatcctatatatgtagtggcaggagcatctaaagcatatgctacaactactccctccgtctaaaaaaaactcaacctaggagggaatatgacccctcctaagataacgaatctggactaagtgtcgttagtcagtccagattcgttgtcttagaagatgtcacatcctctcctatttggattttttttaggacggagggagtacaaggtaccatcaagtagtcttgtaaggagcatatctgatgacgtatgacgtagctgtggacacg

SEQ ID NO: 9694 - DNA, 990 bp, Oryza sativa
  Clone ID: PAT_MRT4530_16087C.1
atgggagggggagggcgcggtgggatggccggatgggtcacactgactgacgagatggccgtggtgtggtatggtgtggtgtggtggtgcgcgggcgtgggcgcgggtcgcgagcgatggtggagtggagcacagcgcacggtgtgccggcccggtggcgcggcgcacgggacgttggatttttgttgctgtgggttcgtgggagccgcgtccatgacgccgcgctgcctcgtcgcgcgcgcccggtggtggattcgcgtcgcgtcgcgccgcaccgcacgcgaccacgagccgcgagcggtggctccgggctcgggaggtggacgcataccgctctcaacactgatccggtcaaatccagaagcggatgcagcttccgccggtgatgccgatgtgaagccatcatcattctccggcgatttggggttcccctcaccattcaccatggtggtgatcatgctctcccttatgatagaggcgtcatcatcacatcccctatcgacgtcacatccttctgcgatcgcaccgctctccggcttgccgtcctcatctgcgtcggaattgatgcggcttgacgacggagtggaggtaatggagcgtggcggccacgtcgcgagcgacggcaaggcagcggggccactccaccacgagctccgagcagcgccaccccagcagcgcgtcctgcagcgacccattgggtatgcggtctatggagtcccgccccttcccacccggcttggcggcggcggcggggacaggaggagatcccggtgcggaggacaacgcgagaaggtgggacgcgacggcgaactcgttgtggaactcccgctccccctgcagcgaaccagcggcatcccagcaacccaatccaacgggacgcaccggttgcttcttgagcagttacccaaagaggaggacctgctcgaccgtcgtttcgtgctacgggaggcccgcctcgatggcgcttgcaaggagattgtgttcctctaa

SEQ ID NO: 9695 - DNA, 444 bp, Oryza sativa
  Clone ID: PAT_MRT4530_16088C.1
atggggtgcatgatggctgacatggcctcactggcaccattggcgccttctgatgagggcaaggccggggaaggcgcaatcggcgagggaggcaacattatcgtcgagattaggcgcgatttgaagcattgggacgatattgtacatgcatgggtggcagccgagcttagcgcctacggcgaggccgtgtgggtcctcgacgccaagcaagaggtgttgagcctgttggcaccggtgacaccatgtgcgtggtgcgatgtcatcggaagtgaggagccaaggagctcaatcacccgctccacggtggtgaagggaggcgaggagccaaggcgcatgggcggtgcccgagctctgcgtctatggcgaggccgcacgggtcgttctcgacgccaaacaagaggtgttgagctggtcggcgctagccacgccatatgtgcggcgtga

SEQ ID NO: 9696 - DNA, 307 bp, Oryza sativa
  Clone ID: PAT_MRT4530_16089C.1
atggaggtccgacggccggccggcgatgaggcggcggcgacccagaagggaaggccggcggcggcggcgggagcacggaggagcaacaccagcgtcttgtgccgcgtccaccgcggcgtgccagcgccggcggccggcgaggtcgcgttggcggcgccggacattgctgctgctgctgctgcctcccggaactcgatcgagacacatcaagggatccaccagctgggatttatctacggccatcgcagccattaaatcgggaatcaaagcttgcaattttggcatccagcagaaacaggcaagaaat

SEQ ID NO: 9697 - DNA, 5370 bp, Oryza sativa
  Clone ID: PAT_MRT4530_1608C.1
tcaagaatccaatacacccaccctagtatgcaatcttcccaccgaagtattcaagttgccaacatcggtgcgcaagccacgaacatcttcatgcaatgcttcatgcccggtggataagcgttgaatgctttcacttagggtattaatagccccaaggaccgggttgaagaattcattgggttgcattccaaagtaggcatattgtggatggaaaaaagcacttggatcagacccatgaggaggagggggggctgcacttgagcttgcaccttgatcaaatgttggttggcgcacacgaggagctttaggggaggagagttggagacgaggcttgtactccttatgttcttttaaattgtgaccaatttgtcccaacttgctttgaatcaacctcattatgtagggagcataatagattccttgtccaatagtcccctttgagatggcaatctccttcatcataaggttgataacatcaaaccgacgaccatccaaaatggcatcaatgacatgccaagcaactccgcgtatgtcatcattgttgccgcatcttgggaggatggtggcccttaccgccacctttccatatgtgtgccttcccccgtcttcataaatctgagaaaagtgatcaatggggaaggggttgtgggtgtgctcatcatgaaggtcatccccattgttgaagcgaatgtgcaagagctccttgaattcacggcggttgatagagcattgaagggtccccgacatccacttcattgcatcacaatcgccggacacccatacggtggcatagaattgccggatgagatcttcatcaaaagattgcttcatggtgacaattctatcaatcccaacggtccagaacatctcttgcaaatcttcaaactccggtgtctcaccaatgtgcctccaagaaatccacttgtgttcggcgaaggctttgttggcatacacttgttcatacacggacttttggaactgggtatgaaatcttggatcattacaatcgttaggcctccggaattgatcatgatgacggaggatagtgtattgttgagcattcctcaaattaaacacaaattggatggtggaatcgagaggactcccatcatcacttgcctcatcatcttcaccattgccactcccattgtcatcaccatcatcacttacttccatctcatcaccctcaacattttccatattgtcatcatcactttgaacatactcatctccgcttgattcctcattctcattgacgggattgggcatgggctcacgacgaccatggcgagtgcggggaggcatagctgccgaaacatattccgcctcggcggtggagagggctacggagttttgtttcttggatgaccatgacacaagggatctaccaagcatttggcaactaccggatgtgctctttctatccactttgcaaccggcataatccgaatcggaatagccagcaagcttaaatttagcaccttttgggtaccacaagccaatagtagaggaatactttaaatatcttagaatccttttcacggccactaagtgacactccttaggagcggcttgaaaccgtgcacacgtgcaaacactaaacatgatatccggcctagatgcggtaaggtaaagcaagctaccaatcatagaacgataaagctttaaatctaccggtttacctccctcatcaaggtcgagatgcccgttggttgccataggtgtcttgatgggcttcgcatcctccaagccaaacctcttgagtagatccttgatgtacttggtttggctcacgaacgtcccatccttgagttgcttgatttgaagtccaaggaagaagctcaactctccaatcatggacatctcaaattccctcgacatcatatcaccaaatttcttgcaaaatacctcattagtagaaccgaatatgatgtcatcaacataaatttggcacacaaagaaatcatcatcaatgatttttgtaaaaagggtggtgtcaacttttccaattttgaaatcctttgacaaaagaaaatatctcaatctttcataccaagccctaggagcttgttttaaaccataaagagcttttgagagtttgtaaacatggttaggatatttagaatcttcaaaaccgggaggttgttcaacaaagacaagttcagcaatttcaccatttagaaaagcacttttcacatccatttgaaatagttttatatcaaagcatgatgcaaatgcaagaaggatgcgaatagcctcaagtcttgccacgggggcaaaagtttcaccaaagtccaaaccttcaacttttgtgaaaccttgtgccaccaaccttgccttgtttctcaccaccaacccgttctcatcttgtttgttcctaaatacccactttgtccctatgacattgtggtctctaggtctttcaaccaaagtccacaccttgtttcttgcaaagttgttgagctcttcatgcatagcattcatccaatccggatcacaaagagcttcatctacatgttttggctcaagacaagaaacaaacgagtaatgttcacaaatcgaagcgacacgagatcgagtttgaacacccttactaatgtcacccaacacttggtcaattgggtgatccttggaaagagcggtgtgtatccttggtggcataggtggatcttgtaccttctcctcctccacttcaacttgagcttgacttggcatagcggaagtagatggctcatcttgagtggaggtggatggcttgtcttccacttcaataggcttgacatctccaattgacatattcttcatggttctcatcaagccttcatcacctacatcatccaaattctcgtgcccctcttgggagccattagtctcatcaaattgaacatcggcggtttcttccacaatacctttgttcttgttgtagacccggtatgccttgctatttgaggcataacctagaagaaacccttcatcacaccgactttcaaatttggttagtctaacaccctttcggtaaatataacacttgcaaccaaaaacttgaaaataggcaacatttggcttccttccaacaattagctcatagaaagtctttttcaagagaatatgcaaataaagcctattggttgcatggcaagcggtgtttatggcttccgccccaaaagaatcggaaacaccatattcatcaagcatagtccttgccatctcaatcaatgtacgatttttcctctccactacaccattttgttgaggtgagtaggtagcggaaagttcgtgtttaatgccaagatcatcacaatagtcctcgatattggtattcttaaactcggaaccattgtcacttctaattttcacaagagtgcaactaaattcattttgggccctttttgcaaactttttgaaaagctcggcaacaatagactttcctttgctattgtctccaaatgtcactttctcttgttcattccctcctacttcaaatgtggtgaacatagccctatcaccagtcatgtgttgagtgcatccactatcaagcacccaatggctcccaccggtgtggtagttcaccaccgagtataggggaacccacatatctagcaacaatgctaccatcatgagccttccattgctcttgacaaaacgagtggcacggttagaaggtttcttacccttctttggaatgaatccaagtccctccttgttaaggatgcaccgttgctcactcaaaatcttgtcaagagtgttcttacccttgaagcacctctccaagctcttgttgagcttagccacttgctccttaagctcattgttctcaacaacaagtgaggcatcacagatagaaatacaagagctagagctagacatatccacaagatcatcacaagagatagaaatgctagatgatgcaacatgagcaatatggcaagtagcactatcatcaagcaaatcacaagatatgccaacatcaatgagagctccatgttgagtagtggaaaggaggttgtcatgagcttccttaagcttctcatgagaaatggtgagtctctcatgagaagtctttagctcctcatacaagacctccaaagaagcatgatccttctttagggccttgaacttgacaatctccttctcactataagcatggagctcctcaaacatactcacaagctcatcataggaaacatcatcacaatcatcatcactctcattatcactaagagatgttaccttagaggagccctttgccatgagacaaagtggagcgaagagtgatagagcctccttgatggcaacaacggccatcttcttctttttggagcttgcatcatcaccaccttcttcctcggacccggatgaggcggagctctcctcatttgagtcccattccccgatgaaggcctcaatcttcttgccttccttcttgagcttcttcatgagcttgtagcctccactcttcttcttgcatgacttgtctccatcatcatccttggaagggcacttggaagcaaagtgtcccttctcaccacactcaaagcacctcaagttggagagagtcttgttgggtcttctatttcttctcctattggagttggagccccttcctctctcctttctccttcccaagagatcattgaaccttctagcaagaagggcaatctcttcctccaagtcctcattggcttcattcaccttgcccttgcccttatcttcaacttcggcttggagagcaatgcacttcttggaaggtgaggcttcctccatctccttcttcttcaacttgtacatgtcattggtgttgatcttccccaagaggcttgcgggtgtcatcattgacatgtcggagttgatgagcatggtgacaagggtctcatacttctccggtagagccctaagcatcttttgggcaacctcaagatcggtgtagtttgtcccaagccccttgagatcattcacaatgacattgagccttccatacatgtcattcacactctcatgaggcaacatggagaatgtctcatattggatcttgaggaaatgaagcttggcatccttatactcactcgtgccctcatggatctccgccaacttgttccaaatctcatatgcggtctcaaggttgctcactctatcaaactcctcttggctcaaagagttgaacaaagcattcatggcttgggcattgagttggaggttgcggtgatcaatctccgtcaagggcttgccggtgatagcaaaacctacatcaacaatactccaaatatggaagctcatagctttgaggtgagtagacattttaattttccaagtggaatagtttgtgccattaaacatgggagccttccctacatggttcacctcgttcgacat

SEQ ID NO: 9698 - DNA, 515 bp, Oryza sativa
  Clone ID: PAT_MRT4530_16090C.1
cggctataccgccagagatctcgtggtttcgccgtcaagttctacactgaagacggcaactgggacttggttggaaacaacacgcctattttcttcgttcgggatcccattcttttcccaagtttcattcacactcagaagcgcaacccagccactcaccttaaggaccctaacatggtgtgggactttttcacactgaggccggaatccacgcaccaagccatgttcctgttctctgaccgcggtactcccgatggctaccggttcatgaacggctatggctcccacacctttaagctcatcaacgctaagggcgaggctgtgtactgcaagttccacctcaagagtggacaaggaattaagaacttgcccgtggacaaggctgccaagatttctggcgacgaccccgactactccatccgtgacctctacaatgccatcaacaatggtgactaccccaagtggaacttcttcatccaagttatgactttcgagcaagctgagaagcaccgatt

SEQ ID NO: 9699 - DNA, 231 bp, Oryza sativa
  Clone ID: PAT_MRT4530_16091C.1
atgccgccgcgcgccacgcacgtacggatgcaccgccccgcgtgtgcccgtcttcgtgtgccccccccccgcccccgcgcgacgatgggcggcagccggcaggacgcgatcagatcgccatctcacaccgacggcacgcggcatgatgaggacggaatggtctctcgctcctcgcgcgcgtttggtgcggcgttgccgtcggcgctgtgccgctggcccgtccgtcggtga

SEQ ID NO: 9700 - DNA, 459 bp, Oryza sativa
  Clone ID: PAT_MRT4530_16092C.1
atggccgagagcttctcccgctcctccgccgtctgcgcaaaaccaaaagcgagagtaccgtcagaaaccgagaacgcccggagagaagggagagcgggggtagcaaagcgcgcgtacccgcgccgtgacggcgtcgaagacctggtcggcggcagcctgcaggtcgagcagggcgcggccgagctcgccgtaccccgccgcgtgggcctcccgccgccgccgccgcccgccgtcctccgacacccgcagcatctctctctctctctcctctctccgccggtctccgacgagagagagaggggaatatcagcggtgcggcgggccaagcccgcgagcagatccggcccagcccacgcaaatcctagcccgatagccaaactgggccgcactcctctcgcgtggatacattcaacggcccatcctctcgccgccgctacgacatccccggtcgtcgtttag

SEQ ID NO: 9701 - DNA, 314 bp, Oryza sativa
  Clone ID: PAT_MRT4530_16093C.1
ggcggtaataaagggacgaggtccaacgtctgcacatcctgcttacaaacaacggccatgcggtgcctggcctgctttctgaatcataaccagtccctggaaaacgctaatccagcgatactcatattgcgctgcgcacacaggaagcggatgtaagctgctcattcactaggaaataaggcacgggagcaatgtaaagcacatatactgtgtccactgggcactcaagatagccacattttgacatacgcagacttattcttgtgagtccacatggcaaccgagcctccgacaggttacgatccatccataca

SEQ ID NO: 9702 - DNA, 185 bp, Oryza sativa
  unsure (1)..(185): unsure at all n locations
  Clone ID: PAT_MRT4530_16094C.1
gattcngcacgagcntcagctacngcntcancctctgcngccgcggtcaagtgagctcaccgccgtcgcgagtgcnactccggccgatgcccaagaantagtcatttatnaatntatanattatnactaaattgtataantttgcccttttgctttgtaatttgaaaggtactggaaaacgttat

SEQ ID NO: 9703 - DNA, 330 bp, Oryza sativa
  Clone ID: PAT_MRT4530_16095C.1
gttggcaaactcaagtatccaaccctgagctggttcctatggtcaagcatcagtacagatttgcgcctagacccagcatcagtgatcagccaaagaatacatttttctcaaatgctttatcatgaccgtggccggaggtaccttcagaggtatcattttacccaaggatctggtaatggaggccagagtgcataatctacctctgggggacaaaatacggagaccaactgtggaggctccaatgacactctaatggacatggttcgagacagtgctggtcacgaatactcccgatgtggattgcggtgagaacgaatactactgacgtgg

SEQ ID NO: 9704 - DNA, 603 bp, Oryza sativa
  Clone ID: PAT_MRT4530_16096C.1
atggagaatgcttgcttcccaaacacaatgcctagcatcgattgttgcatttttgctgtgcatgtcattgacatggcgattttaaacgatctagagtgtctctgcggtttgaaggatgaacggtcattctttgataacggtttatccctacaggatatggctgatttctattccagtagtatttgccagggtcaggatcttataaatgcccaggttgtcgtcgacgcatgtgaagagaaaggggtgtacctcgcatcacttgaatttgaccaacgtctttcgatttggatcctcaatgaatcatgtggtcattttgagtggttactgaagccccagaacaaccttatgcctctgttgctacgtttgaacggtggaaaacaagctcgtgggccatggatcttacaagctcgtgggccttggatcttacaggatgttaactatcatctttattgtcaaatgttwcctggtgaatggaatttatatgattgggagtatgatccctctcatcccgattatcaaaacgatagtggtgaagcattggatgaaaataattttaaatggaattctgatgatgataacgttgtagatactcaaggatattaa

SEQ ID NO: 9705 - DNA, 1171 bp, Oryza sativa
  Clone ID: PAT_MRT4530_16097C.1
gcacgaggggtctccttggccctcccaactcccaagttccccactccgccgcagcttctgtgccggccggacccccgttgtgccccgatttccgcggccgtcccgcccccgagcggcgctgccatctcgcattgccgccgccgccgccggtatggccacgggtgctgaggccgccgcggcgttatctcctccgggcgccgccggtgccgccgtcatgggagtcttcaagtacaacttcgcggcgcagttcctatccagggtcacccccttcctctacaacagctggttcgtgcgccagctcagcgccgacgactgcgcggcatacgcgttacagcttcctctcttcatcaactgcgtcctatttttaagccgggaggggtttcggcgtgcatgcttgcgtaatgattctgacagtggcaatgcgataagtgatgaagagatactaaaggtagcttggatgattgtcccatttggcatcttagtttcctttatcagcagcttatttgtgttgagggtaaagaaattgcggttatccgatacctatgctaaagctacattaattatcggacagactttcaggaaactgatgctccaagaaggcgaaaagtttgttcttgtttggtttgatactccatataaccaggctgcctatggtcttgtggataaattagggagtctggttgttagaatagttttcctgccattcgaggagagttcttatgctacatttgcacagttggcatcaggacaaaatccccagaatatatccaatttggaaggttctttgctcggagctcttaagcttattatgctgataggcacatctgaagctttccttcatgctgttgcaaatgaagacaagcttaagcagtcaaatgatatgttgctcctgttctcggcaatttacattgtgctaaatgttgtcctgattaaatctgctgatatgctgctgcgaatcacatattcagcggcattcattaaagactatttcaagggctcattctctttccgccactgcttgccggcaggctggggtgtgttgctcatttctggcctgaccacagctttctctgaaaggatgtttctgaatagaaacaggttcaagcagacccttcccattcacatggcgataggcataatgtgcctgggtttctcatcactcgagatgtaa

SEQ ID NO: 9706 - DNA, 476 bp, Oryza sativa
  unsure (1)..(476): unsure at all n locations
  Clone ID: PAT_MRT4530_16098C.1
ctccttccattcaggttgtcagccatgatggactgcgataaacagttgttgcacatgtgcatgttgtttacaggacagactttcaggaaactgatgctccaagaaggcgaaaagtttgttcttgtttggtttgatactccatataaccaggctgcctatggtcttgtggataaattagggagtctggttgttagaatagttttcctgccattcgaggagagttcttatgctacatttgcacagttggcatcaggacaaaatccccagaatatatccaatttggaaggttctttgctcggagctcttaagcttattatgctgataggcttggtggtcatctcatttggtccaagttattcatatacccttcttagactactttatggggcaagatacagtgatggagatgctacagntattcttcgttactattggttctacgtcatatgcttagcaatgaatggcacatctgaagc

SEQ ID NO: 9707 - DNA, 1498 bp, Oryza sativa
  Clone ID: PAT_MRT4530_16099C.1
ctgcaggcttgcgccacgtcccgcgagatgcagatccgagaggggggcccgcggcgcggggcggcgtcggcggcgaggtcgccgatgtccgccatgatgctcgccatgttcgccaccatggcctccttctacgtcgccggccgtctgtggcaggatgcgcagagtagggtttacctgattaaagagctcgacaggcgaaccggccagggccattcgacgatatcggtggatgataccttgaaggttgtcgcatgcaggcagcaaggaaagaggctggcctcacttgagatggagctggctgcagcaaagcatgaaggtttcgtggggaaatatacctatgagacaaatggaactaactctagaaagaggccactgattgttattggaataatgacaagctttgggaggaaaaactaccgtgatgctgtcaggaagtcatggcttccgacaggttcaatgctgaagaaactagaagaagaaaaaggcattgtagtgcgcttcatagttggaagaagtgtgaaccgaggagatgcttcagacagggagattgatgaagaaaatagaagtacaaaagatttcatgatcttggatgatcatacagagtctgaagaggagagtcctaaaaagacaaaaagtttctttgctaatgctgcagagtcatttgatgctgaattctatgctaaggtcaatgatgatatatacataaatgttgacactttgagtgcaatgctcaaagaacactgggacaagcctcgtgtctacattggctgtatgaaatccggcgaggtcttctctgaatccttccccaaaaacagaactcataagtggtatgaaccagaatggtggaaatttggtgatgggaaaacgtacttccgccatgcttctggtgaaatgtttgtcatctcaaaggctgtagctcaattcatctctataaacaggtctgttctccggacatatgcacatgatgatgttagtgtaggatcatggttaattggtcttgctgtgaagcatgtaaatgaagcaaaactatgttgttcatcctggccctcaggagctttgtgttcagctctgtgacaagcaacactttcgaggggaagaattttgtgaaaattatgttaggatcgagattatacggaatgaagcataccatctgcagacaatgagatcaaaactggcgttttgaagattttgttttcttctgccgttttctgtggctcccgttgatcaagcagcactagttcaaactgagccatatatatcttctttttgcgaaggaaaatcttgtactttttttcctgcaagaccacactgctaaaatcagggatcctaactaaattccatctgcagattgtatcttgattttgcctgtcgcttgtagatgtccacccttaccattcttttactgatagacaccattgttggagtgacaaaatctaatagcaaatcaggaaattattttactccatcaaaaaaaaaaaaaaaaaaaaaaaaaaaaaaa

SEQ ID NO: 9708 - DNA, 219 bp, Oryza sativa
  Clone ID: PAT_MRT4530_1609C.1
atgcggcagtggggcttcctcagcagggatctggctccgtatcgaaggggcgtcgggggcggtgcaggaagcggcaagaaggtgggcggcggaggcgttgcggtggcggccggaggtggtcgggcctacgtatggccgtgcgagctggtgtcagcggtggaggtggttggcagcggcgtgggagtccgggtggaagacttctccggcggcgacggctaa

SEQ ID NO: 9709 - DNA, 261 bp, Oryza sativa
  Clone ID: PAT_MRT4530_160C.1
ataaaatatatccttagcgactactgcttgtattgaatgatggagcaagaaaagacattgttgctctccacagactatatcctagctttgtgatgcactaagaattctacctaacctacatactaatcatgatcacaatcatgatggagcgtacactgaagacactatacattgctaccctcatatgaagactcttattgctatacatgcataagaactgactcagtatgatctaccctcaaaatggatggagattttagg

SEQ ID NO: 9710 - DNA, 432 bp, Oryza sativa
  Clone ID: PAT_MRT4530_16100C.1
ccacgcgtccgggtctccttggccctcccaactcccaagttccccactccgccgcagcttctgtgccggccggacccccgttgtgccccgatttccgcggccgtcccgcccccgagcggcgctgccatctcgcattgccgccgccgccgccggtatggccacgggtgctgaggccgccgcggcgttatctcctccgggcgccgccggtgccgccgtcatgggagtcttcaagtacaacttcggtgcgtgcactctctccctcttccttcttcgatccaagtctgagggtgatttcggggggtgggggatctaaatgcggcctcgttgttgcagcggcgcagttcctattcaggggcaccccctttctctacaacagctggttcgtgcgccagctcaacgccgacgactgtggcgggcgcggatccccttccc

SEQ ID NO: 9711 - DNA, 980 bp, Oryza sativa
  Clone ID: PAT_MRT4530_16101C.1
ggcatccttcctcgcgcggcctctccctcccatggtcctcatggccgccgtcgacgaccacgaccgccaccgagccggcaattcctcgtctccttcggaggattccccggctccggctccggctccggctcccgctcccgctccgccgcagccgtcgcgcacgcggctccacagcttctcgttccccaccctcagctggggcacccaccgcctcctccgctgctccaagaaccccgcctcgtcgccccctcccgcggcgccggacaccccgtcgccggacaaggagaaggcggcccaccgctccaccgacggcgtgggcggcggctgttcgcctcagcggggtccgcagcggccgtggaacctccgcacccgccgctccgccacggccgcgccgcgtccggagggatcggacgacgcggccgatgccgcgccggatcgagcgccatcgccgctggcggcgaccaagaagcgggtgttctccatcgtgctgtccaaggaggagatcggccaggacttcaaggcgatccgcgggactcgccccccgcgccggcccaagaagcgcccccgcaccgtgcaacgccagctcgacttgctgtaccctggattgtgcctagcggacctgacgccggagacatacaagattgaagagaggtgattggtgttatttgtgaaagctccaatgggaggggattttcagatgttctgatatcttttctcttcagatgttctgatcgttttccttttgttatgtgatcatgggctaacaaggttgcttcagaaccgtaatgttctggacgggttaggggaagtttagttgggaatctcctctaattatgtattggatgtggttgttgaggagtttaggttgtggaaattgattattgggcttgtaggattgttaattgtataaagtgtaatcatctgtacattgtactattaatctatgaagaattttcgttattacgaaaaaaaaaaaaaaa

SEQ ID NO: 9712 - DNA, 1515 bp, Oryza sativa
  Clone ID: PAT_MRT4530_16102C.1
gaagatgcttgtcttggaagcataacaagtgctacccttggaactgggtatggcaggtcttccaggctatgaaggggattttagatgatcccttccattgtctgatgagaatatgtacggagagttctttaacttctcagacccagggttttgacctaatgagtaatctgcaattctgcatacgggcagttactgagatgcgtcaggtaagtccgtggattggttgctgccgtggaaactgaagccttcacgaacgaatggatgaaattctgtttttggtggtactcttgtcgatcagagctatgaataaagttggtgatgacttcttcatgcttgtggatgttctttccagctatattgttcattgtggtacattgttaaaatcgacgccggcatgctgccgagctcgcctccatggatgctagcctcctgtgctcctggcgacgacgcttggtcccggagagccaccgtcatcgtgcctgtccctgcctcctgtcgctccagctcctgccgaaccctatcccctgttgcttttgctgtattgttgacggtgacgcaaggatcgtcgacggctcctacatggcgagacacggccccgccgccagcggcatcccccgcgtcaagctcggcggcacgtggtggagaaagccgccgctgacgactccgctcagcggaaagaggcgaagaaggccaccatggcggtgacaacgaggatgtggacggcggcattgcctccgtcgacgcgtcgccgaacctccttcgccctccggcctcctccccacccgtcggccgccctagcctaagcgccgccgccgcttcgccttccccacgcgggtcgccggcgcccccagcctcaccggtgttgctccccctccacgcgctcgccaccaccgccgctccccgagtcccgtgcgcgccgctgtcgacaccggagcttggccacctcggcaaggccggtgacctccaccacctccagagtttcgtctctagtccattcatggattcgaccctaacaagcggcttgacttcgccatcttcaaggagactgacctcatcgttcatcgacatctcttcaaggaggccccgctccccatcaatcactatgttttcgtcgttttcacggtcaatcactactccttgttggtgagaacccgggagggagggggacggcggcgcatagatgtcctcctcgatctcctccggggtgagtgccaccaagaacggcgcgctttctagcgtcgggacgaggacggcacgggcaccgccgccgcccacaacatggaggcggctgggcgccgccgtgtccactgtagcaggttccacggcctcgctgcaccgtccgcttgcggctgtggcagggcgagaagtggaggcggaggcagggccttgaactcgggctcggagtccatctctgcaggtaggctctcgggctttgtcgtcgtcagcggcagcggggggtggggggctaggctggggcacgcggagacggttggcggcgtctcgtaggtgacccat

SEQ ID NO: 9713 - DNA, 642 bp, Oryza sativa
  unsure (1)..(642): unsure at all n locations
  Clone ID: PAT_MRT4530_16103C.1
ccacgcgtccgcccgctcatctgggacaacggtgacatttgtataatagatggattgtttattaccgttgcatctgttggtgattcgcgttgtgtactagaagctgaaggttctatttatcatttatctgctgatcatcgatttgatgccagtaaagaggaggttgaccgtgtaacagaatctgggggtgatgttggtagacttaatgtcgttggtggtgctgagattggccctcttagatgctggcctggtggtttgtgtctatcaaggtcaattggagaccaggatgtgggtcaattcattgttccggttccttatgtcaagcaagtaaagctatcaacggctggaggccggcttattatttcaagtgatggtgtttgggatgtcttgactgcagaagttgcatttaactgttcacgaacacttcctccagaggctgctgcggaacaaattgtcaaagaagcagtgcaacaaaagggacttagggatgacactacttgtattggtgntgacatactaccagacaaagcanatcttaccatgccacatacaaaaaagcaaccaggaatggggtgtttttaaaaaacatgttttcgcaagaaaacaccatctgattcatcatcccatacagatagagaatat

SEQ ID NO: 9714 - DNA, 469 bp, Oryza sativa
  Clone ID: PAT_MRT4530_16104C.1
tcactcgatttcccggcggctagcgacgcgggaggaggcgcccggccggccggcgagcacgtgctgatagcggccgaggaggcgttgcggctggacgaagagcgccgcgtgcagcgaagcggcagtccggcgagcaggaggtggatctggacggcgtcgtcttcgcacggcaacatctcggtctgcttgttcttcacgctgcgccacaagctcaactgcaatggccgccgccgcggcgtcaagctcgtcgccggagttctcgtagtagccgaggtgccttgctccttccatttcctccataacggccccggtagcggggcgaggcgttccgaatctggcggcatcctcggaggcacacggcaacatctcggtctgcttgttcttcacgctgcgccacaagctcaactgcaatggccgccgccgcggcgtcaagctcgtcgccggagttctcgtagtagccgaggtgcct

SEQ ID NO: 9715 - DNA, 1224 bp, Oryza sativa
  Clone ID: PAT_MRT4530_16105C.1
atggaagggatgctgccatctgatcctccgggcagtgatgatgatggaaatggaacgaacatgtggacaggacagaaggacaagctggccctagacccttgtgtttccggtgacaccaatgagaatgcacatgcctgcacctcattgacagctgtgcatcaggttcttgaagaatctaccaacaatactgtgcatgctatggacatgggcgtagttacaaggcaagatgatccgctgaaagcctcagaagaagatatcaatcaacacaaagatgaacaagagctttggggcccaaacgtgcaaactagccaggacgactactttgattacgtcaagcagttgtctcccaacagtcgtcgcatagacaaatggtccttgctgagtcatgacgaaatgattgaggttaaggagcggcatgcacgctatcgcatcagattttgcaagatgctaaacaaagaatttgaggatacgatgaaggatccagcagagtactctcgaggcgaactgttgaaggagaattactttttgcgatatgagcgggatgaaactcttggttggtacttccatcctgtccacacctggcttgcaggcttgaatgactaccagaagctcgtcctcgtaaatcatgatgatagcactgaattccttgccagggatgactaccactcatgttttaatacatatgaagttgatgaggattatgtcaaatattgtgaagaactaccaaagaaaatcaagtggattggagactatgtagatttggatcggtcttctcaggagtggtcaaaaatggacaacactacgtttttccaagcgttaaagattgcaacaaacttttgccatatgactgttggtttagcccaatttgcatacatggagtatgtatgggacctgcgtgaaattagtcgccttaaggaatggccttatttcttacatgagatttggaagctagttgctaagcaaaagatgaatttcaatgatgctttgaaggtagtctatgaaatggatatgtttcatagtttcaaatttgcagtggaggctgaactaaatggggacaaattgtttggattggaatataggttctctatgtgctctaaggatatttctggtgatgttgaagagggtaaagctctagatttgattacaaaggcagtttacagagaagtaatcagtgaaacacttaagctaaaaatgtttcttattctacaccctgcacagttctaa

SEQ ID NO: 9716 - DNA, 571 bp, Oryza sativa
  Clone ID: PAT_MRT4530_16106C.1
attagaaacggtgatggttctacttcaataaggggcggcccccgggcaaaacctcttttttggaagaagaggtgctccgaccatgggcagccaatagggcgggtttcaggggcctgctagtgcgggaaggagggggctttacataaccagtgactgcgtctagctgacctaaggaaccgcggcgctaccttgttctttatggctcctagccagagccactgttaatgcttgcgtgcctagctgcagtgtgaggcgaagcacaagcgacctctgacctcactggtggttgggtcccgtacaacggcgtaggcggccataagcagcagctgtacatgcccggcccattacggaaaggtcccgggcccccacccccactgggaaaccgacaggcggcgtttcccatccggagcgctcactgtctgccattgtcactgcgtggccgcttgagggtctggactagcgtccccgctgaagacgcacggctcgtgggccagcggggcctccggacagtccttgcatgcgcttgccgtatttggccggggtcaaaactggacaaagccggactgccctc

SEQ ID NO: 9717 - DNA, 371 bp, Oryza sativa
  Clone ID: PAT_MRT4530_16107C.1
aagattgggtgagcttcccaggatggggatggaggcacgccatagcacatggcaggcggtcaagtacagtgcaggcaggcagagagctgtggagccaggatggggcactgtacagtcttgtcagacaggcaagctttgctgtcacacagacagcgccagtctggcggttctaacacacagatgatcaacacaatcgagtccagtggcagtattgcgtcgcacaagggcatcccacagagtcgctcgcagtcgcgcacagcgcagctcagtggaataaccagtggatgtgtccacagaatcactcctctagcattgctgaatcaattaatacagattattaacattcttaattaatacatgtgctttttttt

SEQ ID NO: 9718 - DNA, 504 bp, Oryza sativa
  Clone ID: PAT_MRT4530_16108C.1
atgaggcaactccttgcattgcagttcaagaagcagattggaattgataacgcaggcaagtaccctaggggagaagccctcctgccgctcagcctcggggtggcacgggcgggaccacttctcctcctcccctccgcctcgccgccgcccgagcggccactggcaaagtcgggcgggcgcatggacggcggcggcgggactccttgcctcctctcgcaggcacggcggctcggggcgctgccaagacggagggaggaccccaagtggtggtcatcggcgactagcttcgacgatggtggggacagatctgggcctctcatggtcggatccggtgtcccagctggtgtccacacggaggtggtcggtgtgcgcatggaggagcccggcggcgcgctggccggaggtcgacgacgtgtcgggaaggctgcaacgacggtgaccctcggcccgatgatggggacggccagttccggcgccccttggccagatcccccgtctggatga

SEQ ID NO: 9719 - DNA, 1292 bp, Oryza sativa
  Clone ID: PAT_MRT4530_16109C.1
ctagtggatccccgggctgcaggcgcagcgttctctctctcgctctcgctatctatctctgtccttgtcactgtccgtccttgactcgctagcccaagaagaagaccaaccggagaggggaggggaggggaggcggagagatggctccgagctcgtcgtcctgccacgacgcggccgcgtcgatgctgctctgcgccgaggacaacagcagcatcctgtggctggaggatgaggagggggaggtgggggagaggaggagcggcggttgccggtcgatggtcggggacctcgccgccggcggcggcggcggcagcggcgggggtggagtggaggaggaggaggacatgttcccgcggcagtcggaggagtgcgtggcgagcttggtggagagggagcaggcgcacatgccgagggcggactacggcgagcggctccgcggcggcggcggcgacgtggatctccgcgtccgcagcgaggccatcggctggatttgggaggtttacacttactacaacttcagctctgtcactgcctatctggctgtaaactacctggaccgtttcctgtctcagtacgagctgccggaaggcagggattggatgacacagttgctctcggttgcgtgcttgtctatcgccgccaagatggaggagaccgtcgtcccgcaatgtttggatcttcagattggggaaccacggtttttgttcgaggtggagacgatccatagaatggagcttcttgttctcaccaacctcaattggaggatgcaagccgtgactccattctcctacatcgactacttcctacgaaagctcaacagcggcaatgccgcgccgagaagctggctcctgaggtcgtcggagctcatcttgcgcatagcagcaggaactggattcctagagtttagaccctcggagatcgctgcagcggtggctgccacagtggccggagaagccaccggcgtggtagaagaagacatcgcagaggctttcacccatgtagataaggggagggtgttgcaatgccaggaagcgattcaggatcatcactactccatggccaccattaacactgtgcaacctaaacctgcaagcaccaggagaggctcagcctcagcctcctcctcctctgtgcctgagagccctgttgcggtgctggatgctggctgcctcagctacaaaagtgatgatactgatgcagcaactattgcctcacatggaggaggaagaaggaagagttgctttgatagctccccggtcactagcaagaagaggaggaagcttagcaggtga

SEQ ID NO: 9720 - DNA, 335 bp, Oryza sativa
  Clone ID: PAT_MRT4530_1610C.1
cggacgcgtgggctgacgcgtgcccgtctagatcctgaatcacaatatctagacgacacggcacacacgcgacgcaggtgggcacgccttggcaccttctcctccaagacgtcacgcccgacgccatgaacgtgatgaacgtacctgatctggaagcagcgactattattggtactgatggccagcccggtcgcttcgtcgttgttggtgctgcgtacgtacctcttctgcgtctgctacggctgcgacggtggagaccgccgctacgtattatgcgtcggctgggacatactggcgccgggagggcgtgtaccgcggcgtccgcccgtacgcgg

SEQ ID NO: 9721 - DNA, 360 bp, Oryza sativa
  Clone ID: PAT_MRT4530_16110C.1
atggagccttgcatgcgtgggaggagacgtggtcgtgcatggctcggtggccgacacacactcgcatcgtcgaacgggcggtgggcaggtaggggacggccgcgcgtccgctatcgggcgcagggtgggcctggtctattggccaacacactaaagaagtgcatggtggctgtgagtgagcaagcagcacgcgggaggaggcgaggacatgggccgtggagagacagagtgatgggccgtgcggaggaggaggataaaaaggttgcaggccaggatcagaaggaaagagggaggatgatgtggtccatatggacagtagcacatgggaattttcaagggagagtttggaacagaatttga

SEQ ID NO: 9722 - DNA, 488 bp, Oryza sativa
  Clone ID: PAT_MRT4530_16111C.1
agccacctagacttcctgctccgactgggtggtcaacctaaccgagctgatctccgtcttcggcgccgactgcacggtgcgcgccatcatcggcagccggttcgagcaccgcgacgcatacctgcggatgctccttgtatcaggctcaagatcgtccccgggatgacgctgacggacctgttcccgtgctcccgcctggcgctgatcctcatccgcgttcccggccggatcgagcaccaccgccaagggatgcaacggttcatcgacgccatcagtcgtcgagcaccaggagaagcgcgccgccgacgtcgtcaacgacgacgacgacgaagacgaagacttcctcgacgtgctcttgaagctccaaaaggagatgggctcccaacacccgctcaccacggctaacatgaaaaccgtcatgctggacatgttcagcgccggcagcgagtggtcagcgacagtgctgcagcggacgatggcggagctga

SEQ ID NO: 9723 - DNA, 305 bp, Oryza sativa
  Clone ID: PAT_MRT4530_16112C.1
attgatctgacttgacacccaagggaatgcgcgtgcccggggctagcatagtgcattggaagtttgccttcaaatgcagagaggtctatagggcgcgatgtaactttattagagttggagttaggaggttgataggacagagtggtagctgtaccagagttagcataggattagatagaaaacgtagcataaatagggaaagtatttgtgacgcaggggatccaagaggggttttgtacatcattggtttgaggtatacttatataggcaatcaatccaagcttcagtcattaaaaaataaaaac

SEQ ID NO: 9724 - DNA, 116 bp, Oryza sativa
  unsure (1)..(116): unsure at all n locations
  Clone ID: PAT_MRT4530_16113C.1
ttattagtaatagttaatctctgtgtaacttcaggaaactcaaggttattaaaaaaagtanctgctccagcacaaaactactagcattacataatcacagaaaaaggtatgatcct

SEQ ID NO: 9725 - DNA, 645 bp, Oryza sativa
  Clone ID: PAT_MRT4530_16114C.1
gatctgggtgctcagccagtttttaattttttaatcacataacgcactttacatagtacctgtgtcccaaaatacagggcctatctagatacataatcgtatcccttgtattgttggatgaagatacaaagataggagagaatgtactctatgccactgtgtttgtctcagttcaatgatttaccactgacattatctcctttacaatgtactgacgactttgttatacaatacgctcttgggtttagccattttttaaaattttttaatcaaataacacactttacatagtacttgcatcccaaaatacatggattatctagatacataatcgtatcttttgtattgttggacaaagatacaaagataggagagaatgtactctatgccactgcgttgcgtttctttcggttcaacgatttaccactgatattgcctctttttacaatataccgacgattttgttaattgttatacaatacgcccataggtttagctgtttttcaaaactatccaaaacacccttagagacattatggtttagcaaccttggtatcaaccttgaacagtacagaaaagaacatcattgtacgtcaaaattcggcaaccatgaaggaacaatacaatgcattaatgtggatcagg

SEQ ID NO: 9726 - DNA, 1215 bp, Oryza sativa
  Clone ID: PAT_MRT4530_16115C.1
aaaaggaactctatctgtagtgttaagatagcccctaaaatgtagcaaattatagaaatgcaacaagtgctacaataaaatttcacaaacagtattattgataaatgatgtgatatgatcttggagtgcatacacgtttgttttttctgttccgcaaatttatttgatgaaattattcaagacttttttaattaaatgctccccgtatacaaccttttcatacttggcgacaccacctgttctctcccggcagaactcaacaggctctatggcagcatcgaagtttgactcatagaaaaaggcaacagatacacggtaacgaggggaattgttaacaactcgatgaagtgttggttgatatattccatttgaccaaaccttcagcatgtcaccaatgttgcagacgaaggttcctgggattggtttggcataaatccattcacctgattggtttctgacctcaagggcgcatatgtcatcatcctgattaaccaatgtcagaagatcagcaaaaaggtgaccttcaaaagcatcaactggcgcacccaacgccaaggctatacctcgcatgatctttcttgaaagatctcttagaaggctgatatagttttccagcagtacatcaaaatttgatggatatttgggccacaaattagatcctaccattggtttagcaaggtctccatatttaccaggttcaataggcgtgtagcaatcaattgcttcatgcatgtcaggtttacccttggtaatattttcaccaactctttggtaccctctgtatccactctgaggtgtcattttaatcttgagtttttcctcataaggaagctgaaagaacttctgtgtcacatccctaacttgcttcattagcgagtcagcaatcccatggcctttcacataaaagaatccagcctccctgcaggcatcgtccaacatttgcacaacttgcagcaaatcctcgtcattgaccatgctcggatcatcaatctttccgacaaggggactaatgtcgatcaaggggattgccttgaagtcagaacccatggtgatgcagggagagaagccgcctgtggggacacgaacgcggcggcggtcgggcgatggcgattccggcggcgggcgggcgggcgaagagtggcgtgatagtgcggttgggttgggttgggttgggttggggattttggattgctgcgatagcggcccggccggcgg

SEQ ID NO: 9727 - DNA, 459 bp, Oryza sativa
  Clone ID: PAT_MRT4530_16116C.1
atggaatcagattcaatgctagatccctacggccggcctctgaagcactcaccctcgcccgccgtcgccatcgccgccgccttcccctccaccgccgccctccccaccaccggatctgtcgccgtcgcccgagcccgcctccggattcgccgctgccaccgagccatccccgccctccccacctttggattcgccgccgccaccgctggattcgccgccgtcgccctccccgcctccggattcaccgccactgccctccccaccactggattcgcagccgtcgcccgagctcgcctccggattcgccgctgccgccttccccaccaccggatccgccgtggccgtcgcttgagcacgccgtcgtcgtcaagcgagcaagcacgatgggcagaggagcagagcacgacgcgagcaagcgagcggggcgaagcggcgcctcacgccgtgcactcatcctag

SEQ ID NO: 9728 - DNA, 3914 bp, Oryza sativa
  Clone ID: PAT_MRT4530_16117C.1
atgggttctgacttcaaggcaatccccttgatcgacattagtccccttgtcggaaagattgatgatccgagcatggtcaatgacgaggatttgctgcaagttgtgcaaatgttggacgatgcctgcagggaggctggattcttttatgtgaaaggccatgggattgctgactcgctaatgaagcaagttagggatgtgacacagaagttctttcagcttccttatgaggaaaaactcaagattaaaatgacacctcagagtggatacagagggtaccaaagactgggcgaaaatattaccaacggtaaacctgacatgcaggaagcaattgattgctacgcgcctattgaacctggtaaatatggagaccttgccaaaccaatggtaggatctaatttgtggcccaaatatccatcaaattttgatgcactgctggaaaactatatcagccttctaagagatctttccagaaagatcatgcgaggtatagccttggcgttgggtgcgccagttgatgcttttgaaggtacaaccgcaggagatcctttttgggtttgcaggctgatcggttatcctgtatcaaccgatattccagaagagcagcgcactgacactggctggggagctcacacagactatggccttctgacattggttaaccaagatgatgacatatgtgcccttgaggtcaaaaaccaatcaggtgagtggatttatgccaaaccaatcccgggaaccttagtctgcaacattggtgacatgctgagtagaggcggcagtcactcgaacggaagacataagccgcaaaccgacccaacggaacccgaccggactatcacgccactcttcggccgcccagcatccgccggaatcgccctcgcccggccgacgccgcgttcgtgtcagcagaggcggattggctccctgcatcagcaggggtactgacctcgagcaactccccttgatcgaaattattgcccttgtcggaaagattgatggtccgaacatcgccaatgacgaggatttgaggcttggtgtgcaattgttggacgatgccctccccggggcccgccgctcgcccaacccctccgcgaccttctttcttcatccagatcaccgccttctccgcccggaccaccaccgccaccgcactggggagtgagtcggaagagaaggagaggggaaagggaggagcggcggtgccggccctcctcgctgctattcgcctcctgcacagctccatctcgtgcatcgccgccgtggacgcggccaccgacacccgtcactcgtcaaaaaccaatcaggtttggtcaaatggaatatatcaaccaacacttcatcgagttgttaacaattcccctcgttaccgtgtatctgttgcctttttctatgagtcaaacttcgatgctgccatagagcctgttgagttctgccgggagagaacaggtggtgtcgccaagtatgaaaagatggatctagattctactcatcagtatattgtccatcaacgaactagaactttgggtgttttagctgttgtgttggcaattattcgctggcgacgtcgtataagaaatagacgacatccaaggaagtatggtccattggtggatagagatttggtcaggaaaacaagattagatgatttgtacaatgggagtgatacaacttgcatcagtcagcttcggatgaggaaagaagtgttctggaaacttgcctccaaattacgtgataatggcctactatgtgacacaatccatgtctcagtggaagaacaattagctatgttcctgcacacagttggccacaatttaagaaatcgtgtgattggattctatgtcataagatccagtgagacagtgagccggtacttcaatgaggtgttgaaagctttatgttgtcttgctaaagatatgatacaaattaggtcaatagagacccattcaaagatagttagtaatcctggcagattctacccatattttgaggattgcatcggggcattggatggcacacacatccctgcatttgtcccagagaatatagttaacaggtttagaggtcgcaagtcctatccaactcagaatgttcttgctgcggttgactttgatttgaggtttacctatgttcttgctggatgggagggttccgcacatgacttagtggttctcaaggctgctcttagaagatcaagtggaattcaaatacctgaaggcaaatactatttagccgatgcagggtatgcagcaagacctggtatactaccaccatttaggggtgttcgataccacctgaaagagtacgaaggcgggaaatcaccagaaacacctcaagaattattcaatcttcgacattcctcccttcgcacatctgttgagagagcatttggaaccttaaaaaaccgtttcaaagttcttgctagcaagcctttctttccatataaagtccaagtgaagatagtaatagcgtgttgtgtactgcataattggatccttgataatggtcctgataacatcatatatgatgaagctcgttggtatattcataacatggatataggaggaagcaacaaacatggcaagggaaaaagtaaggcacgcaaaggagttgggggatcaggtgtgaggtcaaaacccataaattggccaccagcattctctgaatttcttcttgactggtacattgaaaagaagttagagctgccaccaaagggagtgatcaagaagatgcatcacactgcttgcacatcagctattaatgcaaagtatggcagtacttacaatgttgatcagattaatgaccgtggaattctttcaaagcctattcagttcttcgataagctgcaagagttgtttagtggttcctcggctgatggagcgtttatggaagatccttcaagtgttgctgattttgatgatgaagctgatgaacttgataatttcaatgatatgtcaacctatgctgaaacaaaatatccacaaggggaagactcggacaaattagaggcagacagtgatgattgcaaggaggtggcagcccttaatgcagcaactgcagcccttaatgcagcaactagtcaagtttcatcttctcataccagtggtctgaagccaaacaagaagagtttcaaaaagtgtgggaagccaaagaccttgcctcaatcacataatgataagggtaagcttaaggcaaagtcatcatctggattgcatgatgatgatgatattgatgtgctgatcactagtaccttggttggaatcaaagataaccttgccaaaccaatacagactgcagcccctcaagatccaaatgcccctctatgggacatgctcaagaagattgccttagaacctgaagataaaatgagagttggactacacctttgcaagccagaatttcaagctcatcgcagttttcttattagcatgggtcaagaatatcttgaacgttgggtttacaagttcttatctggtgatgatacaggcctctagatagtatacggtgagtgtatgctcaggcagaatataagccaaacactgcctaacccttatgtccactcaggcatgttctcagggcttcaaccaaacacctccttaaatttgtgtcatgcctggacagaaatagccatcccccaattccccttgtcgtggggagccccccaagctgtgccactgcgtgtcagcgggagcagcgtatcctcctccacctttgctgctgttggtatttcttaccgatcacagataaaatccgcaagcgcacggatataccgatatagcacttcccctacggagtattccaagggtatcgaatccaagggaacgtgtgtgatcagatcttcctctggttcattcaaggacaccaaggaaatgataggccaggatagagaggatttactggtgagaaacaatgtctag

SEQ ID NO: 9729 - DNA, 135 bp, Oryza sativa
  Clone ID: PAT_MRT4530_16118C.1
atggagatgctggccggcggctgcagaagaggggaaatgcgaggaggccccgtccctggtcggattgagatctggttcagccgttcattcttacgatcaatggtccagatcaatttctacactgttcacacctag

SEQ ID NO: 9730 - DNA, 115 bp, Oryza sativa
  Clone ID: PAT_MRT4530_16119C.1
atgaagccactggtgaaggagctcactggtggttctgccgtcgcggacggcagatgcagggcgagcgagcaagcgtacaagcgggggcatggatgcggggcgagcgtgcacgcag

SEQ ID NO: 9731 - DNA, 364 bp, Oryza sativa
  Clone ID: PAT_MRT4530_1611C.1
gggtacacataaaaggacttgatttagcattcaccacgagcctgaacatttgatagaaacttaaacttaaaaaggggcgatatccacaggagtttcctaaaactttgaaggaaagaataaaccttaacacacacattaagaagggaagcaatccccagggcattttttgttcacgggcatgacataaggtttcctaacctggcaaaagcagatttacactttacaggggtttattttaacggggaaattcatcaaaaatttctttggcgggatgaagagttattcttttcgggtttgacacaaggaaccaagacttggattaaaaggatggggctctggagggggggggcaacctgggcgtttt

SEQ ID NO: 9732 - DNA, 1449 bp, Oryza sativa
  Clone ID: PAT_MRT4530_16120C.1
gggacggtttatacttgataagcagcggcggaagcccccacgattttcagaatttgccctcctcacttctatacttcaatccccttcctttatttttttttttgggaggggccgaggcaaccgtcgccactccgacgatcccgtcccatccgccgccgccgccggagatttcctcgagataagccatgggtcaagcactcggtttggtacaagtagatcaatcgacagtagccatcaaggagtcctttgggaagtttgatgaggttcttgagcctggatgccactttttaccctggtgcatagggaagcagatcgctggatatctttccttgcgtgtgcagcagctggatgtccgttgtgaaacaaagactaaggacaatgtttttgtcaatgttgtggcatctgtgcaataccgtgctcttgctgagaaggcatcagacgccttttacaggcttagcaacaccagggagcaaatccagtcatatgtttttgatgtgatcagggctagtgttccaaagatgaacttggatgatgcatttgagcagaagaatgagatcgcaaaagctgtggaagatgagcttgaaaaggcaatgtcaacgtatggttatgagattgtgcaaactctgattgttgatatcgaaccagatgagcatgtgaagagagcaatgaatgaaatcaacgcagctgctaggctgagggtggcagccaatgagaaagctgaagcagagaagattcttcagatcaagagagctgaaggagatgcagaatccaagtacttggctggtctgggtatcgcaaggcagcgtcaggctatagtggatgggctgagagacagtgttcttgcattctccgagaacgtgcctgggacctctgccaaggatgtcatggatatggttctggttacgcaatacttcgacaccatgaaggagataggagcctcatccaagtcctcttcagtgttcatccctcacgggccaggtgccgtcaaagatatcgctgcgcagataagagatggtcagctccaggccaaattgatctaagaggatggcagggaatggatgttctggatttcttgggcattacgaaagtctgcagtaataccttatctacgtattcgatattttgtgagataaaaacttaggcaaaagaagttctattgtaagtatcacatgcacgcgtgcttcagtaccgtttgttcatagtaattcctgaggttatttccctagacgagtgtcaatatacttcttgaattgcatgtttctgtaaataattcctaagtgttaccgggctgtttggaattatttgcatgttgatgttagtgaccttaagtaatgtcccatcttattatgtgatgtcatgatgatttccagaatgctagagtttaatactgcttgtggagaaatatcaaatactccctccgttttgagattaaaaaaaaaaaaaaaaaaa

SEQ ID NO: 9733 - DNA, 915 bp, Oryza sativa
  Clone ID: PAT_MRT4530_16121C.1
atgggtcaagcactcggtttggtacaagtagatcaatcgacagtagccatcaaggagtcctttgggaagtttgatgaggttcttgagcctggatgccactttttaccctggtgcatagggaagcagatcgctggatatctttccttgcgtgtgcagcagctggatgtccgttgtgaaacaaagactaaggacaatgtttttgtcaatgttgtggcatctgtgcaataccgtgctcttgctgagaaggcatcagacgccttttacaggcttagcaacaccagggagcaaatccagtcttcatactcttctgattaccttctctatgttttgcctctattgttcaatgctaacagaactttcttcctcgcagtgatcagggctagtgttccaaagatgaacttggatgatgcatttgagcagaagaatgagatcgcaaaagctgtggaagatgagcttgaaaaggcaatgtcaatgtatggttatgagattgtgcaaactcttattgttgatattgaaccagatgagcatgttaagagagcaatgaatgaaatcaacgcagctgctaggctgagggtggcagccaatgagaaagctgaagcagagaagattcttcagatcaagagagctgaaggagatgcagaatccaagtacttggctggtctgggtatcgcaaggcagcgtcaggctatagtggatgggctgagagacagtgttcttgccttctccgagaacgtgcctgggacctctgccaaggatgtcatggatatggttctggttacgcaatacttcgacaccatgaaggagataggagcctcatccaagtcctcttcagtgttcatccctcacgggccaggtgccgtcaaagatatcgctgcgcagataagagatggtcagctccaggccaaattgatctaa

SEQ ID NO: 9734 - DNA, 389 bp, Oryza sativa
  Clone ID: PAT_MRT4530_16122C.1
ggtcgaagcacagcgggaagaactagctggattttttcatttttcgattagaccgcccgacgaagggcaagatgaacaaaatgtgaccccttgaacgatcggattgagcccttgacagattaatccacaccttgggaccttaattaaatatcatgggtcacaatatatttgggccagtgccgatgaaacgggcgaggggaagacgaaacaaaaattcaggaaaccagcaagaaagaaactttgtgggtggggatcgttgggattaaagcgggggaccggctgccccgcccggaattccctttggcgacgcgggggactgccgggttttcctttggtcttatcacccctttaaaggttcttattgagttgctgggttggcggggcttgga

SEQ ID NO: 9735 - DNA, 2523 bp, Oryza sativa
  Clone ID: PAT_MRT4530_16123C.1
ttattcagataagtatcgctggatagccgatatagctctttgcctaatctgttctacttcttctatggcttgggcatcttgagcgtcggttccaggaatgaccttcaaagatttggtcatattagcaacattcttgatagctgattttaaccttgctttttgttcttcgatagactgtgggagatcggctaacctcttgtgctctagatccagttcagcattgcattcttgaagttgtgctaagagttcgatcttgcgagcttcaagccggtcaatattggatttgatcgggcctttagataattgatcgagcttggctttttcttcatgaacaaattgccgattggcctggattgttgcttcaatgtctttgcgctcttgatgctcggctaatctcagcttggccttttccagcttaaattgatgttgctcaagataaacagctgtagtaaggatatcggctaactcatcgaggatttgagcgtaaacttcgtgaagccgagtcctaattgatccacagtcgactactaggctatctagtgatgatgtctctagccgatgagagatatcttcaagagttttcttcacatcatcagacaaaggaactagagccttgctagtagtgtcaacctctgtctcttcatcaagataatctctgatatcaaaaaagaaaagatcggctaagaccagtggagctggtttagatgtcattggagccgatttcttcttcacagcagccttcctttttcttgtaaaatgagttggagcagaaggagtttgagggacctgcttaggtgaagccgatggtgttctttcagtatcgcttatttcggctacagcttgatcaacatcctctccgatttcttcttcatccagagcttgtttaatagatggatctagggcaggcagatcatcagctggtttagctttctttttgatcttcttctttggagctggggctaaagtatctacagccgatgatctggttttccttttcttaccggcatcggctggttctctgataagcccttgaagaagagctgaagtcttgggggcatcatagccgatgacaggaggagatggcccacctccattaggaattaagcctggggcgtaggtgatatccctgccactgttgctttgacgaggaggagaggattctgttgttagctctatgttttcaatgctacccagtggaggtccttgaaggttgagcagtcgatccatcattaaagttgatgaaatctctcctcggcattggatcttatcggcaaagaataagccgattggaagttggcccagtccaagctgtctagctgaactcattggatgatagaattcgtaagaggcttggacgtttcttccttgatggatgccgactggaagaatgcatgggctgattgcagctatgaagacttctctggatgtttggaatctttcatgattaatgtcttcaaatctgaaatctgatgggagctcgaggtttgctgaatcttcatagggaaaccaaactcgagcatctttttgaaagccttcatagaaactgcagaaccaatctttgagcagttcggctgataactttgctccagcatcggccggtgtggatgcgtattctccatatgacatacatcggcgatgagtgcattcttcgtcatcttctatgatcggctctaatcttggaaattcagcttctgtgacggatggccgattgacgactgctccgactaccgagccgacagctaacttagccgaagcattattcagcatttggtacaagtagccgaggaggattttgcctaaaggaaattgtttatttgcttccaaggcttcggctacaaactgccagttggttgtaggaccacagcttgatccacaaaagagaaatttctctaaccacattagcaaaaaggctacatgttctcgaggggtaactgaaccttggcccatgtatgctgcaacataacctgaccaacctcctatactcttggtcttgaagtcatattggttttttgtgttcagactcatggggttagccgatgaagtgacatctagacccgtgatcataatgatgactatgagagttagggtcatcggcccttggttgaataagaaggcattgatagtgttggaccaaaagtaagaagcagcagccattagaggttcttctttggctgagtttgctatggttaggtcaagtgcttggccgattccgatttcgttccagtgaactcgtttgctagctgacatacgcttgaaccatgtaatccaacttttctcgggtgaagttttttctagagacggccaagatttaaaggtgttcttccaatgacctagatctggattggatagtctgaaaggaatcctattggtttcaccgatgatgaactcagtggggtcagggttgccgactgggccgagaaagtagtggttttcatgtgacaagcttggaactgcgactaaattggagagatgctcagcgtatttggccgatggtgcggcagatgggctcgcggaggttgacat

SEQ ID NO: 9736 - DNA, 159 bp, Oryza sativa
  Clone ID: PAT_MRT4530_16124C.1
atgtcgccgtcgctgctgaaccgccaccgccgtcgcagggatatcggtcgggatgaccgtctatcagattggacggctctggcttctcccgcgccgtccacactatttggccgcctcatggaccatgtgtatgctccgtatggaacaagttcactttag

SEQ ID NO: 9737 - DNA, 1476 bp, Oryza sativa
  Clone ID: PAT_MRT4530_16125C.1
atgaccccaactctcatagacatcattatgatcacgggtctggatgtcacctcaacagctaaccccatgaatctgaacatgaagaaccaatacgacttcaaaaccaagagcataggagacctctttccagatgttgtccctcagacaacagaatcctctcctcctcgtcaaagcaatagtggcagggatatcacctacgccccaggcttaattcctaatggaggtgggccatctcctcctgtcatcggctgtgatgcccccaagacttcagctcttcttcaagggcttatcagagaaccatccgatgtcggtaagaaacggaaaaccagatcatcggctgtagatactttggccccggctccaaagaagaagatcaaaaagaaagctaaaccagctgatgatctgcctgccctagatccatccattgaacaagctctggatgaagaagaaatcggagaagatgttgatcaagccgcagccgaagacttagccgatcttttctcttttgatatcagagattatcttgatgaggagacagaggttgacactactagcaaggctctagctcctttgtctgatgacgtgaagaaaactcttgaagatatctctcatcggctagagacatcatcactagacagcctagtagtcgactgtgattcaattaggactcggcttcatgaggtccaggctcaaatccccgatgagttagccgatatccttactccagctgtttatcttgagcaacatcaatttaagctggaaaaggccaagctgagattagccgagcgtcaagagcgcaaagacatcgaagcaacaatccaggccaatcggcaacttgttcatgaagaaaaagccaagctcgatcaactatctgaaggcccgatcaaatccaatattgaccggcttgaagcttgcaagatcgaactcctagcacaacttcaagaatgcaatgctgaactggatctagagaacaagaagttagccgatctcccacagtctatcgaagaacaaaaagcaaggttaaaatcggctatcaagaatgttgctgatatgaccaaatatttgaaggtcattcctggaaccgacgctcaagatgcccatgccatagaggaaagctctatcaacttggttctcctcgccttagcctcctccccgccctcctcgtcggtgctgaacggcgcgagtggacggaacgtcagccgaaagtggccccgaccccggcgagccgtcggagaccacgtcggtaaccgtgaggacgaggacgatgagcggcagcgcgggccgccgccgccattcccttcgccctcccactgccgtgagccgctgccgccgttcccctcgtcctcccactaccgcgagccaccacggccgagccgccgccatcctagccgccgaccgccgccctcggtccggttccgctgcgtcccgatggccgccgccgctgccatcgagaaggagagaaaagaaaaaatatag

SEQ ID NO: 9738 - DNA, 154 bp, Oryza sativa
  Clone ID: PAT_MRT4530_16126C.1
cattagtcctacaacaacatggcgtgcataaatcgccccgtaaatttcttcacagattagttgttcctcttgtgcgaaagctccctaacccagcagctattaagccagagcactagtcaatggcagagttctccccctggaagccccccaggat

SEQ ID NO: 9739 - DNA, 1911 bp, Oryza sativa
  Clone ID: PAT_MRT4530_16127C.1
atgatgtcatcctctgcgagcccatctgccgcaccatcggccgaatacgctgagcatttctccaatttagtcgcaattccaagcttgtcgcatgaaaaccactactttctcggcccagtcggcaaccctgaccccactgagttcatcatcggtgaaaccaataggattcctttcagactatccaatccagatctaggtcattggaagaaaacctttaaatcttggccgtctctagaaaaaacttcacccgagaaaagttggattacatggttcaagcgcatgtcggctagcaaaagagttcactgggacgaaatcggaatcagccaagcacttgacctaaccatagcaaactcagccaaagatgaacctctaatggcagctgcttcttacttttgggccgatgaccccactctcatagatatcattatgatcacgggtctggatgtcacctcatcggctaaccctatgagcctgaacacgaagaaccaatacgatttcaagaccaagagtataggagtcatgaaagtcgtcaatcggccatccgtcacagaagctgaatttccaagattagagccgatcatagaagatgacgaagaacgcactcatcgccgatgtatgtcatatggagaatacgcatccacaccggccgatgctagagcaaagttatcagctgaactgctcaaagattggctctgcagtttctatgaaggctttcaaaaagatgctcgagtttggtttccctatgaagattcagcagacctcgagctcccgtcagatttcagatttgaagacattaatcatgaaacattccaaacatccagagaagtcttcacagctgcaatcagcccatgcattcttccagtcggcatccatcaaggaagaaacatccaagcctcttacgaattctatcacccaatgagttcagctagacagcttggaatgggccaactcccaatcggcttattctttactgacaagatccaatgccaaggagaaatttcatcaaccttgatgatggatcggctgctccaccttccaggaccccctctgggcagcattgaaaacatagagctagcaatgttcaggagcaaaaactttgatagatggtgcggtgaatggaagttgtatctattccaccaaccagcttcaatgtacatgacagacctctttccagatgttgtccctcaagtgggctatctcctcctgtcatcggctatgatgcccccaagacttcagctcttcttcaaggactcatcagagaaccagccgatgccgaagaagatcaagaagaaagctaaaccagctgatgatctgcctgccctagatccatccattgaacaagctctggatgaagaagaaatcggagaagatgttgatcaagccgcagccgaaaaaaggaaggctgctgtgaagaagaaatcggctccaatgacatctaaaccagctccaccggtcttagccgatcttttctcttttgatatcagagattatcttgatgaagagacagaagttgacactactagcaaggctctagctcctttgtctgatgacgtgaagaaaactcttgaagatatctctcatcggctagaggcatcatcactagacagcctagtagtcgactgtggatcaattaggacttggcttcatgagctggaaaaggccaagctgagattagccgagcgtcaagagcgcaaagacattgaagcaaaaatccaggccaatcggcaacttgttcatgaagaaaaagccaagctcaatcaattatctgaaggcccgatcaaatccaatattaaccggcttgaagctcgcaagatcgaactcttagtacaacttcaagaatgcaatgctgaactggatctagagcacaaaaggtcattcctggaaccgacgctcaagatgcccaaaccatag

SEQ ID NO: 9740 - DNA, 2259 bp, Oryza sativa
  unsure (1)..(2259): unsure at all n locations
  Clone ID: PAT_MRT4530_16128C.1
ctctctctcccgcgacgcgctctctcgtttcgtctcgtcgtcctcccggagcgaccgcctttcgccctccctccatggcgtcgacggatgccgacgaggaccagctcctcaagagcttcctcgccgaggtcagcgaggccgaacgcgacaacgaagtgctcaggattcttggttgcttcaagttaaaccctttcgagcatcttaagttgtcatttgattcatcagcagatgaggtgaagaagcaatataggaagttgtccttgttggttcatcctgataaatgcaagcatccgaaagcacaagaagctttcgcagctctggcaaaagcacagcagctcctacttgatccacaggagagaggatatattcttgatcaagttactgctgcaaaagaagagctgagggcaaagaggaaaaaggagctgaagaaagacagcgcgtcaaagataaagtcccaagtagatgagggaaaatatgaagagcagtatgaacgatcagaagaatttcagaagcagctaataattaaagttcgtgaaattttgacagacaaagagtggcgtcgcaggaaaatgcagatgaggatatcagaggaagaaggaagactgaagaaggatgaagaggaaacaaaagaaatgtggaagaagaagcgggagcatgaagagaagtgggaagagaccagagaccaacgagtctctagctggagggattttatgaagacaggaaagaaggcaaggaaaggtgagatcaaacccccaaagctgaagaccgaggatccgaacaaatcttatgttcagaggccggtgaagcgtgcttaagaggaatgatgttagtctttgcagccaaagcatatatacagtaaccattcttcttgttacccgatctaagctttatcctatcaaagctcctggcaggctgtaaggttcggttatgccttccgtgttcccactgtagtcagggaacataacacatctttgttagcagaatggcttcatgttctctacatagagttgtattggattaatgtacctcttggatataacacattcctggaaaatgttgaaaaaaatatgtgaaaaagaaactcatcgaattgaatgctgaaaaaaaaaaaaaaaaaaaaaaaaaaaaaaattaaaaaaaaaaagcagttgctgttagtatcattttagaacgcgaactgcataatgatattaacatatcaatcgagatgcatatgacatttcttctgaacatgctctgctattctcacaatttggtaaatttgcttggaccctcgttccgttgcacgcacggaaacagggtgtttatcagaagttacaaacacaagttacaggttttcaacaggtaaagaatgtgaagaaaaacctccctaggttgtgattacaagaacaccgatggcgagggattgacgacgatatgcctaagcggatttgagacgtctccccctccagcgtgcttcacaaactctgcaggactatggaatttaccatggcagacacacattatactcacatcctcacctttcctgtacttgtacaggaagccatctatcttcctaccattgggcccttccaccttggaagacaccattggcatgtccatcatgatcttcccgatgtcgccagtgctgctcgtccgcattgtcagtgacccaagcgttcgcaacggggactgctgtgtcacggtgccgtttagcggcttgccagttgatgctgttggaggaagtgcactgttttggttgctatcatcagaggttgatgggcttctcgcctccgtggattggcagattgcacttccatcaggacctgatagtgaacactgaacagcacatgtaagtggatcacaatcccatatacttctatatatgtccgcacgtcaggactttgaaaatcaatagcttgatctgcgggttggccgagctgctcccctgcgacccgattgacctcctcagctgcaacctgttaacggcgccgtcgccgccgtcctccctgccgggcttgttcgggaccgacgacgacccgacggagatcctccgctcgagccgcttccgccgggcctccaggcggcggcggttctgcatctccctgcggcgccaccgctcctcctcggtctccgtgggcagcgagctggtgcgcagcagcggnngcggcgcngcgggggaggggtccngtcggcggcggacacggagcagacggacgcgatggacgatgaccgcgccagcngcgcgcgcttggcgtccggggacatgtcggtgccgaa

SEQ ID NO: 9741 - DNA, 2289 bp, Oryza sativa
  Clone ID: PAT_MRT4530_16129C.1
ttatgctaagagttcaatcttgcgagcttcaagccggtcaatattggatttgatcgggacttcagataattgatcgagtttggctttttcttcatgaacaagttgccgattagcctggattgttgcttcaatgtctttgcgctctcgatgttcggctaatctcagcttggccttttccagcttaaattgatgttgttcaagataaacagctggagtaaggatatcggctaactcatctaggatttgagtttggacctcatgaagatgagtcctaattgatccacagtcgactactaggctgtctagtgacgatgtctctagctgatgagagatgtcttcaagagttttctttacgtcatcagagaaaggagctagagctttgctagtagtgtcaacctctgtctcttcatcaagataatctctgatatcaaaagagaaaagatcggctaagaccggtggagctggtttagatgccattggagccgatttcttcttcacagcagccttccttttttcggctgcggcttgatcaacatcttctccgatttcttctttatccagagcttgttcaatggatggatctagggcaggcagatcatcagctggtttagctttctttttgatcttcttctttggagccagggctgaagtatctacagctgatgatctggttttccttttcttgccggcatcggctggttctctgatgagctcttgaagaagagctgaagtcttgggggcatcatagccgatgacaggaggagatggcccacctccattaggaattaagcctggggtgtaggtgatgtccctgccactgttgctttgacgaggaggggaggattctgttgtctgagggacaacatctggaaagaggtttgtcatgtacattgaagctagttggtagaatagatgcaacttccattcaccccaccatctatcaaagtttttgctcctgaacattgctagctctatgttttcaatgctgcccagagggggtcctggaaggctgagcagccgatccatcatcaaggttgatgaaatttctcctcggcattggatcttgtcagcaaagaataagccgattgggagttggcccattccaagctgtctagctgaactcattgggtgatagaattcataagaggcttggatgtttcttccttgatggatgccgactggaagaatgcatggactgattgcagctatgaagacttctctggatgtttggaatctttcatgattaatgtctttgaatctgaaatctgatgggagctcgaggtctgctgaatcttcatagggaaaccaaactcgagcatctttttgaaagccttcatagaaactgcagaaccaatctttgagcagatcggctgataactttgctccagcatcggccggtgtggatgcgtatactctatatgacatacatcggcgatgagtgcgttcttcgtcatcttctataatcggctctaatctcggaaattcagcttctgtgacggatggccgattaacgactttcatgactattagattcaaccaagtctgcagcagccaccatggtccacctgctccaactactgagccgacagctaacttagccgaagcattattcagcatttggtacaagtagccgaggaggattttgcctaaaggaaattgtttctttgcttccaaggcttcggctatgaactgccagttggttgtagggccacagcttgatccataaaagaggaatttttctcgtatactcttggttttgaagtcgtattggttcttcatgttcagattcatggggttagccgttgaggtgacatccagacccatgatcataatgatgtctatgagagttagggtcatcggtccttggttgaataagaaggcgttgatggtgttggaccagaagtaagaggcagctgccattagaggttcatccttggctgagtttgctatggttaggtcaagtgcttggccgattccgatttcatcccagtgaactcttttgctagccgacatgcgcttgaaccatgtaatccaacttttctcgggtgatgttttttctagagacggccaagatttaaaggtgttcttccaatgacctagatctggattggacagtctaaaaggaatcctattggtctcaccgatgatgaactcagtggggtcggggttgccgattgggccgagaaagtagtggttttcatgcgacaagcttggaattgcgactaaattggagagatgctcagcgtattcggctgatggtgcggcagatgggctggcggaggtcgacat

SEQ ID NO: 9742 - DNA, 1948 bp, Oryza sativa
  Clone ID: PAT_MRT4530_1612C.1
atatgttacacagaacaacattatatgagatttacagatacaccaccagatggatctcttgataaaacagggagcaatggcagaattctcctacaagctggggtcaaatattcaacacaggctagcgactaagcctactacatttcgtctagcaaatcagagcatgacaaaactggagctgctgcgagccatggaaggacacaaatccgcagtacctcgcaccaaaatactcagcagcggtacacagctgttggagttgcatctaggcaaagatcacaggctactatacaatgtcattgtatcgcaaagatcacgggtgcttccaatcaaaacctaaatagatacttcagatcatccacggtgagccgagtcgcgtggccacccgatttgtcttcgccaaaagcagagctaaccatggctctcttttcctcctgcagagctaaaatgcgatcttccaccgtatctttaatggttaaacgggagacagtaacaggacgagtctgaccaattctgtgtgctctatcaattgcctggtcctcagcataaggattccaccaaagatcaaggagaattacatggcaagcagcaaccatattgagaccaagattacctgctttcagtgacatgatcataaccctgacctctgggtctgtgttaaaatctttcactgctttatctcttgaattgagggacattgttccatctagtctcctgtactgtatgagattgctattcaatgaaagctccagcaaatccagcatgccagtccactgggagaacacaatggctttcactggggccactcggctaggatttgattcgacggtatcactgtcggtaagggcataggtgttaatgatcgaattcagtatatcgattgccgcctgtatctttgaggatatgtaactagtttgactaatagaagatgactcgtcatctaatgatgaactccctgatgcatgagaactggatacaccagacatgcaaatccttaacgctcctgacgaaaatactgaatcggtacttaatgtgtttccacaattaggggagggacacatattctcatcagtagttatccgctcgtatatacattgatagcagaagacatggccacacatcgtcacgacggcatcctcaggtacatcactgcatacagaacaaaactctccaacttccagctttgcaagcaaatttattatcatttctttaggaagttgctttgccatttctatagaaccatcgcctttatactctgactgatgccccttcacaagaagaggatgatcgcaggcctgcctaaggcgcaacagcattagaagaatgttggcatagttctgtttgagtgtaccagcagcagcgtatgccttgaactgttgccgcgagcgttcttccagcgtcaaatagaaagctcgctcctcttttgtaaaatctactttatccagattaattgtctttggaggtagctttatgattggctcaccatcaatcagagtttcttttgtgcggcgcaggagaactatcctcaacacagtctgaagtttcttatacccatgaactgcatttctagcaatcgggtgctttatcattgtacaaaatgaattataagtagaatatggatcgtatttcaagaaatggaaatagctgtagagctcatcaattgcattttgtataggtgttcctgataagcaccatcttctttttgcacgtaatccacaacaggctttagccacttgagttcgaaagttctttattgtctgagcttcatcaaggacaaccctaaaccatcgcactcttgcaactgcgccactggcaaggtaaatgtctgaatccttaagtttctttttctttttcttcgacttgctccgcgcgctgggtggttgttttctcttattaccagcagaagattcttcaccattcttctgcctcgtgccgaattcctgcagcccgg

SEQ ID NO: 9743 - DNA, 113 bp, Oryza sativa
  Clone ID: PAT_MRT4530_16130C.1
atgtctactggtggcggcgtcaacggaggtgcgccaggaactggagtcgcaccgatcgacaacaccaacggaggcagttctgtctcacaatccagcggagggacctttacagg

SEQ ID NO: 9744 - DNA, 2130 bp, Oryza sativa
  Clone ID: PAT_MRT4530_16131C.1
ctgcgataagtattgctggatagccgatatagctttctgcctaatctgctctacttcctctatggcttgagcatcttgcgcatcggttgcaggaataacttttaaggacttggtcagttcagcaacatgcttaataacctatttgagcctagctttctgctcttcaatggactgggggagatcggctagcttcttgcgttccatatccagctcagcgttgcattcttcaagttgtgctaagagatcaattttgcgagcttcaagccgatcaatgttagatttgattggacctttagataattgatcgagcttggatttttcttcatgcacaagttgacggttggcttggatagtgccctcgatgtccttacgttctcgctgttcggccagtcttaatttggctttctccaacttgaattggtgctgctcaaggtaaacagctggagtaaggacatcggctaattcatctgggattaaggcttggatttcatgcagccgagccctgattggaccatagtcgactaccaagctatctagcgatgatgcttctagccgatccaagatacttcttagagttttcttgacatcatcagataaaggagccaatgctttgcttgtgacatcttcttctccttcgtcaagatagtctttgatgtcaaaagagaaaagatcggctaggactgggatagcaagagcggctagttgttcttcttcttcaacatgacgacatcctacagctgatggggtccgatcgcttgatgcttgttgaataggaggggaaggaggcggtggggctggctcagatgtcattggagccgatttcttcttcacagcagccttccttttctcggctgcggcttgatcaacatcttctccgatttcttcttcatccagagcttgttcaatggatggatctagggcaggcagatcatcagctggtttagctttctttttgatcttcttctttggagccggggctaaagcatctacagccgatgatctggttttccttttcttaccggcatcggctggttctctgataagcccttgaagaagagctgaagtcttgggggcatcatagccgatgacaggaggagatggcccacctccattaggaattaagcctggggcgtaggtgatatccctgccacgttgctttgatgaggaggggaggattctgttgcatcggcgatgagtgcgttctttgttgtcctctatgatcggctctaatcttggaaattcagcttctgtgacggatagccgattgacgactttcatgactattagattcaaccaagtctgcagcagccaccatggtccacctgctatgactattgagccgacagctaacttagccgaagcattgttcagcatttggtacaagtagccgaggaggattttgcctaaaggaaattgtttctttgcttccaaagcttcggctacaaactgccagttggttgtaggaccacagcttaatctacaaaagagaaatttctctagccacatgagcaaaaaggccacatgttctcgaggggtgacagaaccctgacccatgtatgctgttacatagcctgaccaacctcctatactcttggtcttaaagtcatattggttttttgtgttcagactcatggggttagccgatgaagtgacatccagacccgtgatcataatgatgtctatgagagttggggtcatcggttcttggttgaataagaaggcgttgatggtgttggaccagaaataggaggcggctgccattagaggttcatccttggctgagtttgctatggttaggttaagtgcttggccgattccaatttcgtcccaatgaactcttttgctagccgatatgcgcttgaaccatgtaatccaacttttctcgggtgaagttttttctagagatggccaagatttaaaggtattcttccaatgacctagatctggattggatagtctgaaaggaatcctattggtctcaccgatgatgaactcagtggggtcgaggttgccgactaggccgagaaagtagtggttttcatgcgacaaggtgggaattgcgaccaaattggagagatgctcagcgtattcggctgatggtgcggcggatggactggcggagatcgacat

SEQ ID NO: 9745 - DNA, 1830 bp, Oryza sativa
  Clone ID: PAT_MRT4530_16132C.1
atgtcggctagcaaaagagttcactgggacgaaatcggaatcggccaagcacttgacctaaccatagcaaactcagccaaggatgaacctctaatggcagctacctcttatttctggtccaacaccatcaacgccttcttattcaaccaagggccgatgaccccaactctcatagacatcattatgatcacgggtctggatgtcacctcaacggctaaccccatgaatctgaacatgaagaaccaatgcgacttcaaaaccaagagcataggagtcggcatccatcaaggaagaaacatccaagcctctgacgaattctatcacccaatgagttcagctagacagcttggaatgggccaactcccaattggcttattctttgctgacaagatccaatgccgaggagaaatttcatcaactttgatgatggatcggctgctcagccttccaggaacccctctgggtagcattgaaaacatagagctagcaatgttcaggagcaaaaactttgatagatggtgggacaacagaatcctctcctcctcgtcaaagcaacaaagcaacagtggcagggacatcacctacgccctaggcttaattcctaatggaggtgggccatctcttcctgtcatcggctatgatgcccccaagacttcagctcttcttcaagggctcatcagagaaccagccgatgccggcaagaaaaggaaaaccagatcatcggatgtagatacttcagccccggctctaaagaagaagatcaaaaagaaagctaaactagctgatgatctgcctgccctagatccatccattgaacaagctctggatgaagaagaaatcagagaagatgttgatcaagccgcaactgaagaaggctttcatcttcccttgctcgtgaaggaggaggagaaggaggcggagtggcgggtggagagcctgaagccccacgttggtagctccgacgaggacgcgttcaccaggtgctccgggtacctcttcgaggagggcgcggcgaccgagggggagctccccacggcttacgatctcgccggcatcggcgccgtctaccgccgcaggccgctcctcgtggtccggcgggcactgcagattggcacctccttcggccgatggtttacgctgcgatacctcgaccgcgtcaacgagcgctccgacgacatgttcgagatcagggctgctcaactcaggcgaatactattggaacttggcccggatgtgattccacctgcgtaccttgacgaactttcactacttcaagaccgtatagcaccattttcaactgaggttgcttttaacattatagaaacagagcttgggttgccactggacatgattttctcagagatatcaccagagcctgttgctgctgcatctcttgggcaggtttatcaggccaggcttcgttccaacaggaaggttgttgctgtcaaagtacaaagacctggagttcaagcagcaatttccttggatatctacatcttgagattccttgctggtgtcgctaggaaggctggcaagctgaacacagatcttcagtcgcttcgagcaagaacagagcagtccctgaccagggatcaacaagaggaaactgatagttccaaatttgcaattaaacaagtcttgtcatttactcttactgaacagggtgccttcgtgaaggatttacttcttcaggagattgctaagattccaggatacaatagcactgaggagaacgaaggtgatagtacagatgagatttctcttgtgttatatgaaatgagatctctaccagagttgttgccagtactttctgtcattcctgagatttaa

SEQ ID NO: 9746 - DNA, 2265 bp, Oryza sativa
  Clone ID: PAT_MRT4530_16133C.1
ttattcagataagtatcgctggatagccgatatagctctttgcctaatctgttctacttcttctatggcttgggcatcttgagcgtcggttccaggaatgaccttcaaagatttggtcatattagcaacattcttgatagctgattttaaccttgctttttgttcttcgatagactgtgggagatcggctaacctcttgtgctctagatccagttcagcattgcattcttgaagttgtgctaagagttcgatcttgcgagcttcaagccggtcaatattggatttgatcgggcctttagataattgatcgagcttggctttttcttcatgaacaaattgccgattggcctggattgttgcttcaatgtctttgcgctcttgatgctcggctaatctcagcttggccttttccagcttaaattgatgttgctcaagataaacagctgtagtaaggatatcggctaactcatcgaggatttgagcgtaaacttcgtgaagccgagtcctaattgatccacagtcgactactaggctatctagtgatgatgtctctagccgatgagagatatcttcaagagttttcttcacatcatcagacaaaggagctagagccttgctagtgttgtcaacctctgtctcttcatcaagataatctctgatatcaaaaaagaaaagatcggctaagaccagtggagctggtttagatgtcattggagccgatttcttcttcacagcagccttcctttttcttgtaaaatgagttggagcagaaggagtttgagggacctgcttaggtgaagccgatggtgttctttcagtatcgcttatttcggctacagcttgatcaacatcctctccgatttcttcttcatccagagcttgtttaatagatggatctagggcaggcagatcatcagctggtttagctttctttttgatcttcttctttggagctggggctaaagtatctacagccgatgatctggttttccttttcttaccggcatcggctggttctctgataagcccttgaagaagagctgaagtcttgggggcatcatagccgatgacaggaggagatggcccacctccattaggaattaagcctggggcgtaggtgatatccctgccactgttgctttgacgaggaggagaggattctgttgttagctctatgttttcaatgctacccagtggaggtccttgaaggttgagcagccgatccatcattaaagttgatgaaatctctcctcggcattggatcttatcggcaaagaataagccgattggaagttggcccagtccaagctgtctagctgaactcattggatgatagaattcgtaagaggcttggacgtttcttccttgatggatgccgactggaagaatgcatgggctgattgcagctatgaagacttctctggatgtttggaatctttcatgattaatgtcttcaaatctgaaatctgatgggagctcgaggtttgctgaatcttcatagggaaaccaaactcgagcatctttttgaaagccttcatagaaactgcagaaccaatctttgagcagttcggctgataactttgctccagcatcggccggtgtggatgcgtattctccatatgacatacatcggcgatgagtgcattcttcgtcatcttctatgatcggctctaatcttggaaattcagcttctgtgacggatggtcgattgacgactcctatactcttggtcttgaagtcatattggttttttgtgttcagactcatggggttagccgatgaagtgacatctagacccgtgatcataatgatgactatgagagttagggtcatcggcccttggttgaataagaaggcattgatagtgttggaccaaaagtaagaagcagctgccattagaggttcttctttggctgagtttgctatggttaggtcaagtgcttggccgattccgatttcgttccagtgaactcgtttgctagctgacatacgcttgaaccatgtaatccaacttttctcgggtgaagttttttctagagacggccaagatttaaaggtgttcttccaatgacctagatctggattggatagtctgaaaggaatcctattggtttcaccgatgatgaactcagtggggtcagggttgccgactgggccgagaaagtagtggttttcatgtgacaagcttggaactgcgactaaattggagagatgctcagcgtatttggccgatggtgcggcagatgggctcgcggaggttgacat

SEQ ID NO: 9747 - DNA, 700 bp, Oryza sativa
  unsure (1)..(700): unsure at all n locations
  Clone ID: PAT_MRT4530_16134C.1
aaacactttttaacacaacaaagggggggggcaacacattttaaaaaggccttttttgcttggggggccctggggccttttttttcccaaattttttcccccgtgaggttccccggaaaagggcctttcaccgggaaaatttcccggggacccaaaacacaaattttcccccgggggggggctctttggggcctttttggggcgcaaacccaaaatggggggggccaccccccgggggttccccccggggggccaaaaaaacccgggccccggggggggtttccccggggttacccgggaaaacctgggaaaacccaaaaacgggttttaacacaccttttttgtggggggggttttccctttaattcccgcggggggagggggggacccccccgggggggggcctttttccccccaattttgggccccaaagggggcccttttccccaaaatttccccaaaaaanccggggcccccggggtttataggggggggtttgggggtttaaaaacggggccccggggccccttttccccttttcccccaacaaacaccgggggaaaaaccgggggtggcccaaaaaaaacccggggccccccgggggaaaacccttttcccgggcccccccggggccccccgggggggccccaaaaaaaggggcccggggtttcccggggattccccggggccccaaaaaacc

SEQ ID NO: 9748 - DNA, 396 bp, Oryza sativa
  Clone ID: PAT_MRT4530_16135C.1
atggcgcacggcggcgacggcgcgaggcggcgagcggcggcacagctaggcggcggcgcagcggctaggcggctaggtggcggcttagcggcacgggagagagggagggagggaggaggggaggcctcttcgacgacgatcgacgacggcgagcggcggcgatggcaggacgggctccgggatgacctaaagaacaaaatgagggaggttagagaacgagagggaggccgcagcgagttagggcgctggccgaaggcggcgaccatggcgatgctcaccggtgcaagagggatggcggattccggctgcggattcggccgactgaggggtggacggggtggcgctcgaggaggtgaacacaacggcgttgacggcgcggctcggcgcggcggctag

SEQ ID NO: 9749 - DNA, 897 bp, Oryza sativa
  Clone ID: PAT_MRT4530_16136C.1
aaaaggaaggctgctgtaaagaagaaatcgactccaatgacatctaaaccagctccaccggtcttagccgatcttttctcctttgatatcagagattatcttgatgaggagatagaggatgacactactagcaaagctttagctcctttgtctgacgacgtgaagaaaattcttgaagatatttctcatcggctagagacatcatcactagacagcctagtagtcgactgtggatcaatcaggacttggcttcatgaagtccaggctcaaatctcagatgagttagccggtatccttactccagctgtttatcttgaacaacatcaatttaagctggaaaagtctaagctaagattagccgagcgtcgagagcgcaaagacattgaagcaacaatccaggccactcgacaacttgttcatgaagaaaaagccaagctcgatcaattatctgaaggcccgatcaaatccaatattgactggcttgaagctcgcaagattgaactcttagcacaacttcaagaatgcaatgccgaactggatttagagcacaagaagttagccgatctcccgcagtcgatcgaagaacaaaaagcaaagttaaaatcagctatcaagaatgttgctgattgtcacgcccagaaattcccgaataggattccaagcagaatgtgtattaaaacccccgtccaggaccagccggggtacacaaacgacaatgttgacatacagatcctccgggaacaccactccacaggcatcctcgacggcacggacgaagcctactcctcggggaaaccttcatctgacacatacccgtcctctggggttgggaaaaatagagcaagactgagcccagccatccacctgaactatccaagttcaacagattacactagg

SEQ ID NO: 9750 - DNA, 870 bp, Oryza sativa
  Clone ID: PAT_MRT4530_16137C.1
atgtctaatggtggtggcgtcaacggaggtgcgccaggaactggatacgcaccgatcgacaacaccaacggaggcagttctgcctcacaatccagcggagggacctttacaggatctgttgacaacagaaataaaccggggggcaacatgaatgatatatttatcttcaatgatgtaatcagttccttgggcctgctcgagattcccctaagtggaagatcttacacatggagtgatatgcaagctgatcctcttcttgaacagcttgattgggtttttacttcggctaattggatcagtgtcttcccaaacacgcaagcactagttacggctaagaatacctctgatcatgcccctatcaagattcagattgccacctccattcctaagtccaatgtcttcaggtttgagaattactggttgaagcagcctgggcttttggatcaggtgatcctgtttctcgacaaattggaagagcttagacttctgaatgtgccagaactgagatttaggctgatttttaaagatcatgttgctcatctactccacggtcgagagctatattggaagcagagattcaaacagaactcagttcttttagggggtgaaaacaccaagttcttccatgcaatggccactgaaagaatatgccaggagataaagccccaggcccagatgggttcaatggatgtttcttcaaatcctgctggccaactattgctcaagatttttataggatgcatgtgtgcagatttttggggtggttccattgacctttctgccatcaactacataattaatacatggtcccacctctcatacgcacataacgtattggagtacatgttacagctggctacaaatctgtag

SEQ ID NO: 9751 - DNA, 1707 bp, Oryza sativa
  Clone ID: PAT_MRT4530_16138C.1
atgatgtcatcctctgcgagcccatctgccgcaccatcggccgaatacgctgagcatttctccaatttagtcgcaattccaagcttgtcgcatgaaaaccactactttctcggcccagtcggcaaccctgaccccactgagttcatcatcggtgaaaccaataggattcctttcagactatccaatccagatctaggtcattggaagaaaacctttaaatcttggccgtctctagaaaaaacttcacccgagaaaagttggattacatggttcaagcgcatgtcggctagcaaaagagttcactgggacgaaatcggaatcagccaagcacttgacctaaccatagcaaactcagccaaagatgaacctctaatggcagctgcttcttacttttgggccgatgaccccactctcatagatatcattatgatcacgggtctggatgtcacctcatcggctaaccctatgagcctgaacacgaagaaccaatacgatttcaagaccaagagtataggagtcatgaaagtcgtcaatcggccatccgtcacagaagctgaatttccaagattagagccgatcatagaagatgacgaagaacgcactcatcgccgatgtatgtcatatggagaatacgcatccacaccggccgatgctagagcaaagttatcagctgaactgctcaaagattggctctgcagtttctatgaaggctttcaaaaagatgctcgagtttggtttccctatgaagattcagcagacctcgagctcccgtcagatttcagatttgaagacattaatcatgaaacattccaaacatccagagaagtcttcacagctgcaatcagcccatgcattcttccagtcggcatccatcaaggaagaaacatccaagcctcttacgaattctatcacccaatgagttcagctagacagcttggaatgggccaactcccaatcggcttattctttactgacaagatccaatgccaaggagaaatttcatcaaccttgatgatggatcggctgctccaccttccaggaccccctctgggcagcattgaaaacatagagctagcaatgttcaggagcaaaaactttgatagatggtgcggtgaatggaagttgtatctattccaccaaccagcttcaatgtacatgacagacctctttccagatgttgtccctcaaacaacagaatcctctcctcctcgtcaaagcaacagtggtgggctatctcctcctgtcatcggctatgatgcccccaagacttcagctcttcttcaaggactcatcagagaaccagccgatgccgatccatccattgaacaagctctggatgaagaagaaatcggagaagatgttgatcaagccgcagccgaaaaaaggaaggctgctgtgaagaagaaatcggctccaatgacatctaaaccagctccaccggtcttagccgatcttttctcttttgatatcagagattatcttgatgaagagacagaagttgacactactagcaaggctctagctcctttgtctgatgacgtgaagaaaactcttgaagatatctctcatcggctagaggcatcatcactagacagcctagtagtcgactgtggatcaattaggacttggcttcatgaggtccaggctcaaatccccgatgagttagccgatatccttactccagctgtttatcttgaacaacattaa

SEQ ID NO: 9752 - DNA, 303 bp, Oryza sativa
  Clone ID: PAT_MRT4530_16139C.1
atgcagaccgagagggactccatcggcttgaatgccaacgtgcgtggtacttcatgccaagcatacggaggtaacttgctaggcacaatgttgcatgatgtggtcacggaagggacctatctctgcaagagttcaccgcagctatccgcggagagacagacgtccatcgacttgggtgcaattctgcacaagcttggttcccgatgtgcttatggggacattggcttgcttgtttgggagtacttcttgccatgtgatggtcttgctaccggcacccacgtgaggttcccaactagcacatga

SEQ ID NO: 9753 - DNA, 1025 bp, Oryza sativa
  Clone ID: PAT_MRT4530_1613C.1
aggaaacaccctcacaataagggcgaaatgtgggcaccgggccccccccaggagagttatataaaacataaaacaaattaacattcaaaacacaatttccccccaatatgctaaaattgaattgcttcccattccatgcgaggccttagaaaatctctcagatggctcaaatggcgaggcatgtaagccgcgtagccggatgtgtgatactctcattcaggacttacaaaatcgcaaggaaaatataaaatgataaacatcatacatatccatttccctgtcttcaaatcctggcaatccacaaagaacaccgtgaagcacggtaggactatgattctatagttgccagatttgtttcgttagaagtggcatcaggagtaccaccggacgggctttgtttcctttctgcctgtaatgatcgacatagagattccagcttctctttttgattcttgaacttatcaacttgcttcttcattaactcacgctcctcaatcaacttcactagagcaacatctgaattctcacatttactcttcatgaattcattatccttctttagatcctttataagcttcaccatcttttccatctccttcttgtatgtctcaaagacttcattgctttttgtgagggcatcctgaaactgctgaaatctttctccatcagcagctagctgcaaccttaaatttttctcggtagacataagttgagaaacttgatcagcatatagctgcatctgggtttgttcctgagctgttttctcttgatgttgttgcattttcagatcggcgagctcaagttccagcatcttttctttcaactgatgagcatatttctgctgtgtgatattatattgatctgcaaggtctttgagtttacttctcagcaagttgttctgtgctaactgagcaatgcattcatttttctgctcgtcaagcttgacgctcacatcctttatagcattattgaatttgtcggataactccatccgcatattctgcccctctgttgacacccttcgg

SEQ ID NO: 9754 - DNA, 1295 bp, Oryza sativa
  Clone ID: PAT_MRT4530_16140C.1
ccggccaggtccgcccttctgacagccgccgcatccgcgccgcccccgacctaggattccgccgccattctcctccaaggagatgccgcgctatgatgatcgttatggaagcacgcgcttgtatgttggtagactgtcttcccgcactcgttctcgtgacctagaataccatttcagcagatatggaagaatacgtgaagtggagttgaagcgcgactacgcatttattgagttcagtgatccccgtgatgctgaggaagcaaggtacaaccttgatggcagggatgttgatggaagccgcattcttgttgagtttgctaaaggggttccacgtggtcctggtggttcacgtgaatatatggggagaggacctcctcctggaacaggtcggtgttttaactgtgggattgatggtcactgggcaagagactgcaaggctggtgactggaagaacaaatgttaccgctgtggggagagaggtcacatagaaagaaactgtcaaaacagcccaagaaatctcaggcgtgagagaagttattcatgctctccatcgccacgccgtggacgtggtcgcagtcggagctatagccggagccggagccggagccgcagttacagccggtctaggtccagatccctgtctggatctcccagggcacgcagagagcttgaaagatcaaggagtcttagttacagcaggagtcccaggcgatccatctccccagcagcaaatgaaaagaagcgcagccccacccctgatggtagccgtagtccaaggagtccacaggaccaggtgagcccaccacccaaggataatgctgagcgtaatggctcagatcacggtgacagcccccggggcagggagaacagcaggagcccgtctgatggctaccgtagccctgcagctgccaacgggcgcagcccaagcccaaggaacaatggaagccctagcccaatggacaacggtagccgaagtcctagggatggaaatggtgacggtggtagccgtggtggctcacgctcacctagaccgagcgagtctcctgaagcctgaaatttaatcgcagtctatggcgttcgtcatgctatggttgtaatggttacattcccggtttaagacgagatgagtgtatttgctcttttctcaaaaacgacagcgtattttgttactttgtgaatgtcatgctatggttgtaatagtcacagtcctgttttaagacgagataagtgtatttggttcttttctcaaaacgacagcgtattttgctaaaaaaaaaaaaaaaaaaaaaaaaaaa

SEQ ID NO: 9755 - DNA, 553 bp, Oryza sativa
  Clone ID: PAT_MRT4530_16141C.1
tctagatcgcgagcggttgcccttttttttttttttttttccatcagaatgaacaaacagaagttttaatttctcatagctcacaaagtcatcaatgatacaagcaaagttttgaacaaaggaaacccccaagagaatgagaaaagaaagaagagaaaaaattcactctagaagaggaacaaggaattggacgacccttaacaagtccaatgcatgagaactcaaaaacagttctctaattatgctgcaaggtggtgatctaaagagtactattataacttatacatctagagtacttcccaaagccaaggtagggtaattaaccaattaaacacaccgattaaaatgccgagatgagagagagagaaaaggtcccccatatatgttcttgcaccaccacaccgccatggatatgccgcaagaacttcaagctcttctcatgtatctatccccccacaccgtatgccctatatacaaaataagctactacataccacccaaggaaggagatcaagaagccaagaagccaagtagagctagctagctagcaaat

SEQ ID NO: 9756 - DNA, 440 bp, Oryza sativa
  Clone ID: PAT_MRT4530_16142C.1
actggagtgccgcaagtagcatggatcttaccgatttatcagaacgacatgatgctgaacgctctggaccactgcgttccaataacataatggatagaacaaggtgcgacctttgcgagaggctcttgtccaagagatcgccctggggctcccgccgaatcgtccgtactggagatctgcctgttgctggtgtgcttccctgctgccatgtctaccatgccgagtgcttggagcgaaccactcccaaggggcagaagcatgaccctccttgccctgcctgcgataggctgtccggcaaagacaccgagcagtggtcgatctgcaggctaagaaacggattcccgagtctaaggtcacttggggaaggcccttccagggtctggagctgtgcccaagctggagactgcgtggctggcgctgtccagataccaagagcaagc

SEQ ID NO: 9757 - DNA, 1892 bp, Oryza sativa
  unsure (1)..(1892): unsure at all n locations
  Clone ID: PAT_MRT4530_16143C.1
ctggactgcaaaacagtggtggttccacttcctctcgctctgatggaagtgaatatgatattgtaccaaaatcatattcctctaccccacgcaacttcccaagtcgtcgatcattcctgtcaaagccaatccatccgctctcgtttgcagagcatgcactagaagggcaagaaactgatagccctgttgccaatgcaagcaccagcagtcctatgccctcggagttcaaggcaataggggatgatccgcccgtcaggtctgatggactacgcctacgccagtggcagtcatggnggagtcagcaaactggagtgccgcaagtagattgtatcttaccgatttatcagaacgacatgatgctgaacgctctggaccactgcgttccaataacataatggatagaacatggcgacactccccatcttctcgcaccgcaatcccagacgagagggggaagcaacaggatgcttccccacatcctccctcctcgcaatcgtggacaaagaggatgagcaacagttacgagacgaggggggcgtagccgttggccgctggcgtgaggtttttgtggtgccttgaggtgtttgttcttgcaagggagttctgcgaacaagcttatggctcgtcagttccttacggctacgaaaggttagcctgatgggggagtagcagatagccagcggggcaccccgccttggttgagtttgccgcaggaagagactctggaggttgtgactgtactgtatagattgctaagggcttttctgtattagcggtggtttttgtcggccatgtggtcattgtgctgcgtcgcgttgcgaccttagggagcaggctcgtgtagccgggagtggccctggggtgcccccggatcgtccgtattgcagatctgcgtgtggttggtgtgcttccctgctgccatgtctaccatgccgagtgcttggagcgaaccactcccaaggggcagaagcatgaccctccttgccctgcctgcgataggctgtccggcaaagacaccgagcagtggtcgatctgcaggctaagaaacggattcccgaggctaaggtcacttggggaaggcccttccagggtctggagctgtgcccaagctggagactgcgtggctggcgctgtccagataccaagagcaagcagcatctctctgctgagccggagtggccacaagaggcatcatgctgcttccaagggagaatccggcaaagactgggctgagacatcatcatcatcaagaactgcctgcatgtagcgttgtagcttagctcaacgcatgtttgctttgctaaacctgatgatcgatttaccttgcattgcattgcattgtctcttgttgatgtggatgcaaaaaggcttgatgtgtatcagatgcagatgttgccatgggattaaagttaactggtccggctaggagaaatgacatagatgtgcctatgtagctgatgactgaaatttaccccccaccccccttattttatataccaaatatgagggctgtaaccttgttcataaaggttgtcgatctttacatatccattcatgccgagtgcttggagcgaaccactcccaaggggcagaagcatgaccctccttgccctgcctgcgataggctgtccggcaaagacaccgagcagtggtcgatctgcaggctaagaaacggattcccgaggctaaggtcacttggggaaggcccttccagggtctggagctgtgcccaagctggagactgcgtggctggcgctgtccagataccaagagcaagcagcatctctctgctgagccggagtggccacaagaggcatcatgctgcttccaagggagaatccggcaaagactgggctgagacatcatcatcatcaagaactgcctgcatgtag

SEQ ID NO: 9758 - DNA, 405 bp, Oryza sativa
  Clone ID: PAT_MRT4530_16144C.1
atggtgtactggaggagcaagagcggcggcggtggcgcctcaccgagccgcgccaacggcggcgaggatgatcaggtcccgagagggcacgtcccgatggtcgccggctgcggcggcggcgacggcgacggcggggagcgcgtgatggtgccggtgaggctgctcggcgacccgtgcatcgcggagctgctggacatggcggcgcagcagtacgggtacggccagccgggcgtgctgcgtgtgccctgcgacgccggacatttccggcgagtcgtcgagcgcgcgctgcggaaggacggtggccgattggcaaataataaaggggtttgtagagctaagcttggggctaaaaccctaatatgcaccagacttcccactacccttgaggaggaccttgtgttctga

SEQ ID NO: 9759 - DNA, 483 bp, Oryza sativa
  Clone ID: PAT_MRT4530_16145C.1
atggcgaggacggggcggcgcggggcggcgccgccgttgctgctggcggcgacaacgccgacggggttctgcgagaccaatggagtggacgcaatggaggaactacccgtcgagctggaactccggcgacccctgcggcggcgggtgggacggcgtcatgtgcagcaacgggagggtgacatcgcttggcgtggccaaacagagtggcggcaccaatggtcatggcatggcaagagctgccccatggcgatcgttgctgttgaaatcgtcaaccgggcgccaatgtggcagttttgccacgcccggagttacagagagtcggagagcaagagagttcaggctctagaacccctcttcctctttctctcctctacgagctcaggagttagcacgccggctccggctagggacgagtgcctggaggctctcatcattccgacgggacggggcgaggcgtgtgacaggccgcctgttgccacctaa

SEQ ID NO: 9760 - DNA, 276 bp, Oryza sativa
  Clone ID: PAT_MRT4530_16146C.1
atgaccattggtgccgccactctgtttggccacgccactgctattggcataaaggagctgggctcttacagcgatgtcaccctcccgttgctgcacatgacgccgtcccacccgccgccgcaggggtcgccggagttccagctcgacggaaccccgtcggcgttgtcgccgccagcagcaacggcggtgccggcccgcgccggcccgttcttgccattgcgcgctagagcgcgtgaggttggggaagacgaagaactcagggaagaagcggactag

SEQ ID NO: 9761 - DNA, 216 bp, Oryza sativa
  Clone ID: PAT_MRT4530_16147C.1
atggcaagaacgggccggcgcgggccggcaccgccgttgctgctggcggcgacaacgccgacggggttctgcgagaccaatggagtggacgttgacgcgctgcggggtctgatgcagcaatggaggaactacccgtcgagctggaactccggcgacccctgcggcggcgggtgggacggcgtcatgtgcagcaacgggagggtgacatcgctgtaa

SEQ ID NO: 9762 - DNA, 366 bp, Oryza sativa
  Clone ID: PAT_MRT4530_16148C.1
catcaaaagaagataacacttgtggagctgtacagatcacctcctcagtgttggcaaagtcggccacaactgtcactacattcaaggggctcatgtctaccgacgatgtgtttgaggctcgacgctctggcatcgccagctgagctagcaccagcacgtggcatctgatcgggtggttcggggacgtcttagtggactctcgaacctggccatttcttggcccattgctgggaagcactgaaactagaggtcttgcagcccaatggggccctgctctagtaagcaaggtggtgttcgtctaccgcgagaagcacagataccccggatactactaaagcaggtgctcgtccatgtggaagctgccca

SEQ ID NO: 9763 - DNA, 1751 bp, Oryza sativa
  Clone ID: PAT_MRT4530_16149C.1
cacagatttaaggaaaaaagacgcagcgctctaccaggttggggcaagcttattacggttagtagaaataaaacaagcacgaacctaagcacaggagcttcttgaatttcttctctcttcttgttgggaggaagaagcagcagctgcagatagcttagctgccagacacagccatggcggggagggccaggggagcggcgctcgtgctgctgctgtgcctgagtggcgcggcggtgggcgtgtgggcgcggccggttgccgccaagggtgacgacaatgctgccggtgaggagaagtccctctggttgaagaagcaatttggaaagggacttggagccgggcttggtggaggttatgggaaaggtggtggctttggaggtggtggtggaggaggcggcggcggtggcttcggaggtggtggtgggtttggtggaggcggtggtggcgggctcggtggtggaggaggtggtggcttaggcggaggtggtgggtttggcaaaggcggaggggttggcggtggtttcggcaagggcggcggttttggtaaaggtggtggatttggtggcggttttggtaaaggcggtgggattggtggaggcatcggacatggtgctggaggtggatttggcaaaggtggtggtttaggtggtggcattggtcctggcattggtggtggctatggtaaaggtggaggtcttggtggcggcattggtaagggtggtggacttggcggcggttttggaaaaagtggtggacttgggggtggtggcggacttggtggcggcggtggtcttggtggtggcattgggaagggcggtggacttggtggtggtttcggaaaaggtggtggtcttgggggcggtggcggacttggtggcggcggcggtcttggtggcggcattgggaagggtggtggtcttggtggcggcattggcaaaggcggtggacttggtggtggttttggtaaaggtggtggtcttgggggtggtggtggacttggtgggggcgaggacggtggtctcggtggcggcattggcaagggtggtggaattggtggtggttttggaaaaggtggcggtcttgggggtggtggtggacttgggggaggtggcggtcttggtggaggcagtggtctcggtggcggtattgggaagggtggtggtctcggtggcagctttggtaaaggcggaggtcttggtggtggctttggcaagggtggtggaattggtggtggtttcgggaaaggtggtggccttgggggcggtggcggacttggtggaggcggtggtggaggtggtggaggatttggtggcggtggaggcagtgggattggcggtggttttgggaagggtggtggatttggtttcggtgttggcggcggaggtttcggcggcggtggaggtggcggcggtggtggcggagggatcggtggcggccgcggcggcggcgtcgccatgggccggcgggaggcggaggagccacgggaagtggtcgatgtggcggaggtggcgagggtggtggtggaggcagagttggtagcggcagcggtggcgagggatgtggcggtgctggggagcggcggcggagtcggtggtggtggcgggtctggtcgtctggacaacggcggcagtggagaagatggggccggcggcggagagtgcgacggaggggctgggggctctctctctcggtgggctaaaagaggatgtcggcgttgccacgactgcggacacgcgtcgagcacgaacaac

SEQ ID NO: 9764 - DNA, 1046 bp, Oryza sativa
  Clone ID: PAT_MRT4530_1614C.1
gcacgagggcaacgcttgtgttgtcgcgagtctcgtgacctagcctaagcgccgccgccgcttcgccttccccacgcgggtcgccggcgcccccagcctcaccggtgttgctccccctccacgcgctcgccaccaccgccgctccccgagtcccgtgcgcgccgctgtcgacaccggagcttggccacctcggcaaggccggtgacctccaccacctccagagtttcgtctctagtccattcatggattcgaccctaacaagcggcttgacttcgccatcttcaaggagactgacctcatcgttcatcgacatctcttcaaggaggccccgctcccctagcccctagccgaagatcctgaggtacacagagaaggtgcccaggaggttctcttaccatcaatcactatgttttcgtcgttttcacggtcaatcactactccttgttgtgttacggagcttccttaaagtctaggcattatgcgtggaagaggcaagaacaaaaggatttgaaggtattgtttgagctttctttggatccaaggtcgaaatcaaaagggggtttcaaaaatggataccgtcaagttctagagagcgtacttggtaagaggttgccaaattcttgccttactgctgttctgcacattgagtcatgagtgatgcactgttaggaccaagtttggtgcaattgagtcaagatggtgcagtgcgagaaacaacatatgatgatcatggcagaatgaagcatgaagaaaaattcatgtgatggctatatggtcatttaatctatcagatgctcattacgagattttgaattcgtaggtcatttgacttcgggattagaggcctgcctttatttttcatgagcatgttcattttcagtactttgaaattttataagcttgcactatgacagtttgtaatattgtgcagttggttaaaagacgataagactgctagctactatcataaacatgaatgtcacaaaatctggtactgttgtataaattgcgttcaacagcttggttgtcacaaaaaaaaaaaaaaa

SEQ ID NO: 9765 - DNA, 120 bp, Oryza sativa
  Clone ID: PAT_MRT4530_16150C.1
atggctggtctgcgccagagacgcaggaagaacggagtccacagcagcagcggggtggaagcgacgccggagtcttcgagctgcggcggcctcgatgtgacatcagccgcggcggactag

SEQ ID NO: 9766 - DNA, 567 bp, Oryza sativa
  Clone ID: PAT_MRT4530_16151C.1
ttacgaaggcggtgccggcaggtgcacggagccgaaggcggtgatggcattggcgtcggcatcggtgggaggtcgtggtcgaaggtggaggcggcagtagatttgggacaaaaccagagcctgcaggtgcgtagggtcggaggccgcgccggcacctacgggaactcggggtgaaggctgcactgcttggtggtggaggggaagacaaagattgaagcggagggcgagaagtccaaatctgcctagctcatcatcaccagaaggggagatgaggagggaggcgcactgggtgaaggatgaggctgggtggagggccgagagctcgccgacctcgtcttctccacctccgacagccaccggtgtgatttttcggatcggagtatcgatctgattggcctcgtcgtcgatgccgccggggaaggagcagcagcgcacgtcgcggagaatcggccacagcagcaacgcgtcgtcatcgtcgcagaaatcaattcggtgagattgaatcaccggtgaagcaaacccgaagcggtgtcgaccagatcgatttaagcaggtgctccaacacat

SEQ ID NO: 9767 - DNA, 286 bp, Oryza sativa
  Clone ID: PAT_MRT4530_16152C.1
atggtccataatttccagttaattacgcgcaagtctccgctccccaccgtccgatctcatgttgcgatcgatctggccatacacgtgtcccgccatggcggccctttcacacccgtgggatcgtcggatcgcgaacggacgcccgcgctcttcgagccatcgtcgctgcgtggacgagaggaacgcgagccgccaccgccctcttatccctattcatccccatgcggccaccgcttccctctcctttgcgctctccactccgctagtcagtcagctaacacagcat

SEQ ID NO: 9768 - DNA, 663 bp, Oryza sativa
  Clone ID: PAT_MRT4530_16154C.1
atggactgcgtgcatagtggcttggtcagggagagccccgccgacgagctagtctggtggctcgccgcctcggctcccccggcgaccaccacttacggtagcgacggtacacacaacagcagcagcacaaggccgccgcggcgcagcccgcccccaacgacggcgcggcagttgacgattcggggcgacgcggcgggtcgcgggcggcactccggcgcgctccgggagcgggagcaggagcagcagcaacggaaccccgcggcggcactccggcggtggcgatggcatggggagcgagagcagcagcgggcgaacgccgtgccgtcgctgccaagctcggcgctgacgcgcgttcaacgccggatcataggagcacaggctccggactcgctcggcgtgctcgacatcgacgagtacgaccgcgtcatggctgtcaatgccaggtccatgttcgtatgcgtcaagcacgcgtatcacatcgccatagtgtcgcccaagccctcacgccggcatcgtcgacgacctggccgtcaccaccagcctctagggggcagcaacagcgtggtttgtgagctcacggtgccgcgcttcctctcgtcgccgctccagccggtcggccaactccgtggcaagcgtggccttgtctcagtctcgtcgtcgtga

SEQ ID NO: 9769 - DNA, 342 bp, Oryza sativa
  Clone ID: PAT_MRT4530_16155C.1
actagcacaagaggagagtcatcgatgaaatactagtgcgatgtatagtatacgtttgagtttcttttttctgtgacacgtaggatgcgtttgtgttgcctgcactattggagtgagcaaatccagaggcgcatacatgccatgccaagaatagaaggatcctctctgaccatgttccacgccgatcgaggtctgctccgggtactacacgattcattgtaagcccggccttctatgatctccggtcgaaataggccaatttatttcccacgtggccgatactttgaagaatatagagtgctcaaaagcagccatcgctctggatacattagcatgggattt

SEQ ID NO: 9770 - DNA, 288 bp, Oryza sativa
  Clone ID: PAT_MRT4530_16156C.1
gtgaatcgcaggattgtcattctatgtgactggacagaccgggctctggtagccggtcagaccggcgtgtattgcgcggtcagaccggcgcagcccgcggtgactcgatgtctcgggagagtatttgcggtgatggaccgggatcagaccggcgggagcacggcggtcagaccggttgatctataccggtcagaccgacggcatccgagcggtcagaccggcaaggcaacttcggtcagaccgatctccgtcgatttcgaggggaaggttgatattgaggctttctag

SEQ ID NO: 9771 - DNA, 394 bp, Oryza sativa
  Clone ID: PAT_MRT4530_16157C.1
acaccgagacaacttgttatatgcatggacaagatacaaatggaatgacctgggtacgggggaacaatttaaagaagaaacatctggaataaggcttcatgggactgaaagtaagtttgatgaactgaggagtgagaaccaacctaagctcactattgccgattaatgacttgacgagcggataattcctggctaagccatctacagattgtgtaattgaggggatctatgccatgagaggcatggacaaactgaagatgtcttgagaaggaggaggagaatgaacagaactacattgtcttttgcatcctcatgactggtgatgctgatacggggcttcaagaaccatgaagatgctgctgcgatgcacccaccatgagctgatcccacgcgt

SEQ ID NO: 9772 - DNA, 737 bp, Oryza sativa
  Clone ID: PAT_MRT4530_16158C.1
cacgaggcacaaaacggaaggttttttcgacacgaatgatgattctattaactgggtacttgtcatagtggtaaatttatttattccaatagttatcatgcactaacttgttgcttggattttaggacaagaaatgcttttcagatcttgtagatgaattcaatgagagagttttttctgggcattcccttcctaagcacttacatgatcagaggaatcattgattgttggttaatcttcacgcggaagggtaactcttggcaagatactttcgaagaggttgttgttgaagcatgtgaaaggtggactgaaaatcgtgagaagatactatgagcaccactactatgacattgttagacgacccttgcaagaggttttttcctcgtttcttccatcaatagaatctcgccgttagcagctaaaaagtgaagatcgccctgcagatgagtgtagcctgtcaaggagccctcaccagggcaacaatgccgtattttgatatatatccggatgtgactccggctcgggcgcccgatgggaggaggttaaaatcggcgcctgatttacgtgcaaaactattttaaactgatttttctcttaaattacttatccaaataatgatccgattgcactattaaattcgttgtaattaaatattcgaaacaagatcacacgtggatatattccgacgaaaaccaaatttagcttattattgaattatttttaaaaaaaaaaaaaaa

SEQ ID NO: 9773 - DNA, 217 bp, Oryza sativa
  Clone ID: PAT_MRT4530_16159C.1
tcggcccatctctgaatcgtgaggtcctcaagatcatgcccgtacagaagcagacccgtgccgtcagcgtactcgttcaaggccttcgtggctatcggcgacaacaacggacacattggtctgggcgtgaagtgcagcaaggaagtcgctaccgctatccgtggtgctatcatccttgccaagctgtctgtccttccagtccgcagaggttactggg

SEQ ID NO: 9774 - DNA, 567 bp, Oryza sativa
  Clone ID: PAT_MRT4530_1615C.1
atggtcggcgctgacgggcggcgcgggaacaggcggtgggcggcggtggtgagggggcgcggggacaggcggatggtcagcacggacaggcggtgtgcgggagcgcggggacaggtggtgggcggcggcacggggacgagcgatggcgacggcgcgaggcgagcggtgggcagcggcgcggggacaggcggtgggcggcggtgcggggacaggcgatgggcgggcggacgattggcgtggacgggtggtgtgcggtggcgcggggaagacgaggtgcctctgcctccagtcgccgcctgcctctccatcacggcttgcctcccgcgcggcttcaccgcgctccacgccgtcgacctcccggccttcaccgtgctatgccgtcgcaccggtgttgcgccgccgccgctgactgtgctccagcacttcttcacggcgcttgggtgcccgcccagggcttggttcttccgcgccgccctcgacagccgcgagctcgacgcctcgccgaggagagcaaagagaatgaggaaccggaggcagaaggatgaggggagtaagcctgtcttgtga

SEQ ID NO: 9775 - DNA, 199 bp, Oryza sativa
  Clone ID: PAT_MRT4530_16160C.1
tgttcgcaggcagcttgggcactcactgggctttctgggtgcaagaccttgctcaccgacgctcagatggaggtgtgaccctgccattgaccaagcaatagaatttcacgttaactggtataaaccattcaatggagccgcaccctacccaatataacttgtgttaaatggccgcagaccttggaaattctattgaggg

SEQ ID NO: 9776 - DNA, 207 bp, Oryza sativa
  Clone ID: PAT_MRT4530_16161C.1
ggccgcttttttttttttttttttctttggtttttttttttttttttttttttttttgctggagaatacttattctgctgtggggtttaaaaagggccagttaaatgtgtgatattacattcgggatgccgctgtccatagccagaactaggattggtccatatcaggatccctatgcacggaggggggggggtctagttttttaca

SEQ ID NO: 9777 - DNA, 2155 bp, Oryza sativa
  Clone ID: PAT_MRT4530_16162C.1
atggtggatctactagaggagcagaagcatgtcaaggaggagactcatcgtctgcggcagcttctcgtcgaaattcacaccgctctggaggcagccaaggggtgtgccatcaccaattcatggctactacgctggctacgcgagcttgaggacgccgcatgtcgaggcgatcagacactgcgcaactggagagatatgtccagcaaggtgagctccatcatcgattctagtaactccttcaaacgcatcaagatcgcagcatcgcagctgattccatccaaggaatccaccatgaaagtttctgccactgtcaagaagctagaagcagtagcttctgggatccccaaggtagttggcagagtcgatgagaggaaacaggccatcgaattcttgcttcacatagacaagaatggatcatcctctccagatggttggttcctggcaatggaagatctcggctgcatgttcatggaaaatgccctgggtggtgcacaccctgaagaataccagaaattacttgttattggaaagaagatcgctgtgacattgagggtgtgcagccctttagctgcaaaagttgtgagtggactgcttcgagaaaacctcaatgagaagtactggtacattgttctgaatcgctgtcagcagttcgtcgcatccagttccagggctctgcggctgcgcacaacgtgttcgatggaatgccgcggcagggtgaagcacgcgctgcgcggcgccgatgcggcgttccgcgtgctcgcgggcggccgacgcgggatccacttcgtgcccgggccgaccgaagacgaggaggaggagcacgccacgcccccgtcgcggcgctggtaccgcgccgcgtacgccaggctgctccggctcgccgggtcgctgcggggcgtggagcgcggggacggcgggggtccgcggcacgcggagacggggtccgtcgtggcggacgcgcggcgcgtcgccgaccgggtggcggagttcgacgcgctggcggcgcggtacctcgccgcggggcagcgcgcgccgcccctgaaggcgacgtcgctgagctcgctgacgcgggtgtgcgacgtgctaggcgtgtcggcgcagctgaggaagagcgtgcgcctcgccatctgcccgcagctgacgcagcaccacatctggcgcggcgcgctggaggaggtgctccgcgacctgcgcgccgacatggccgcgctgggccacccatccccggcgacccagatggccgaccagatcgccgccgcctgcgtccacttcctctccgacaccgccgacgaggcgacctcgtcgtccccatcctggatgcgcccgacccctttcaacaaacctgcaaattcgccgccgccgccgccggcgaagacatggcaagaggtgctcgacatgttcaccgacctagccaagagcctggacgccgacgcgcggctcgccggccacgccgacaaggtcgccgcgatgaaggaggggctctaccagatacgcaacgtcttcgtcgagagggacatcgccttcaaggaggctcgccggcaagactgcctggtgcagaagaagctctccaagagcctaggccattcgtccaaatgcctctacaccttgctcctcttctacctctacggcaatgtccgggacgtcgaggtgcacgccggcaagcgcctctctggcaagggggggaagagggtcaccgtccacgccgccaagttcctgatcgacggcgatgaaccggcgatcaggaacgccgtcaagcagctgagccgcgccatcggcgtgttccggttcgtctgggaggcggctcatgctgacaatggcgatcatgccaatggcaatggcaagggcggtgccatggccaagaaaggccatggagatgatgcaaagggtttactgaagctgcaagggcatatctggggtttgggtgttgaagagaaggaagtgacttacagaggggatgtgttccatgttcatcagatacagcttccatgaattttcagttttgcaaacatctttgtaaaatcatatataacttctgaatattagtgagaattcttttttctataatagaattcaatccagcctctacagcaaatatgtatccagccagccaaagtgggaattcagaccaaaattgatcaaaaaaaaaaaaaaaaaa

SEQ ID NO: 9778 - DNA, 374 bp, Oryza sativa
  unsure (1)..(374): unsure at all n locations
  Clone ID: PAT_MRT4530_16163C.1
ggatagccatagattaattaagatggtctccgcaaaacaaattaattaatactcatacatatataccggcaaaaaaggaaagaaagcagagatggaatcagttcacattgggagtaggtactgaaagtcgtagtcgtatggaatgacgtcgacgaggtgatggatgttgagacggtgttccggaccactctgaggcaattcaaccatgngatnnttcctgagagaccaggacgtggngcagctggttcgcaaatccagcgaacaangcgagtccaggtcctttgcgaagtcgggcatgttggagtgtatgaggcttgggatcatcagccttctccttggcgatgtcaccaccagcgatgcctgcagatactcca

SEQ ID NO: 9779 - DNA, 285 bp, Oryza sativa
  Clone ID: PAT_MRT4530_16164C.1
atgggattggaagttgcggcgcgctgcagcggcgcgagaccgcgagagtgcgagacaccgacgggcacgtacagcagcctttttgctgttctgctagtagtatttgacggccgtctctggacatgggcgatcattggacccgtgccgtgcatgtgcattgcaggcctagttgtccatgatccaaacccacccgcccggttggtcggccaggatagacgggttggagacggttttgctaatgggcgagcgatcgtccgggatgatcagggccgatcccccctccac

SEQ ID NO: 9780 - DNA, 760 bp, Oryza sativa
  unsure (1)..(760): unsure at all n locations
  Clone ID: PAT_MRT4530_16165C.1
attcggctcgaggctacgggctgcttcataatcgaatcgaagtttcnctgcttctggaggacgagccgntgccggcgctctttgagcatgcccgcttgatccacaactcagcctccgccaccgcctccgccgccgaccaggtacgctttagtcttctcattctgtctctttttttttttttttgtgttcttcatcgctttgtttttggggttcgggaggttgtgaagaaggggtgcgaggctctgcatagatgcgaggacatggtcaataacctaggtttgttctctcccaacgagaccaaagaagatatcagcaccaccaatctcaagtacattctggtgccattttatcttgcggagttgacagaaaaattagcacaggatgacaggatacatattctaaaggcttcccaggcaaaactaaaggagtttatttcattttgcgaagcaatggagctggtcccaaaagaggagttagaatcttacattgaaagggcatcaaaaactgttgctgatcagagggccaggaagatcgctaggttcaaacgtcagagagctgcagaatcaaagttgttggaaataaaagagcaaaaggaacggcgtgggcgttctactaaagcagctgccctgtccacccctgttgaggcaagagaggaagaaatattggatgatgatggggaagaagaaagagaggcttggatcactaccatatctttggcaatctgtaaagcactagatctgctggatatgttgaagaaaga

SEQ ID NO: 9781 - DNA, 210 bp, Oryza sativa
  Clone ID: PAT_MRT4530_16166C.1
gatattgcgtggcagagcactttataaggtgacatgtgatttcgttgatgctgcagttaaaggggcagttggtgtcattaataggtatgtacacaacaatattttctttagtttcgctgttgactccgactatgagcaactcccaaaggaccagaagccaaatggtcaaaatggatctggcagaagtgtgataggctcctcagatccggg

SEQ ID NO: 9782 - DNA, 1245 bp, Oryza sativa
  unsure (1)..(1245): unsure at all n locations
  Clone ID: PAT_MRT4530_16167C.1
cggacgcgtgggtgagcgatgccttggtctagatcattctgatacagcccacagctacggtaacatggctttgttctatcatgggcgtatcaaactgaacttgctctgcgtcacatgtctcgcacgttgcttttgctaagtttagcatcaggtcctaatcatccagatgttgcagcgactcttataaatgttgcaatgatgtaccaggatgctgggaatatgagtactgctcttaggtatcttcaggaagcactcacaaagaacgagaggcttctaggaccagatcatattcaaacagctatctgctatcatgcccttgccattgcattcagttgtatgggtgcattcaaactttcaattcagcatgaaaagaagacctatgatatactggtgaaacaattggggagtgatgattcaaggactaaggatgcagaaagttggttaaatacatttaagtcgcgagaacagcaggtgaatgcccagaagcaaaaaggtcagcagggtactaacccacctgctaatcctattgagttgttgaaggcaaatcctgatttggtgagagcactgaaggcagctgcgaaacaacctggtgaaggatcagcaaatgtcaaccgatcacttaatgctgcagtagttggtgaaggtgttcctcgagtaagaggagttgatgagcgggctgctcgggcaactgcagaagttcggaagaaagctgctgccagaggccttaatgtgcgaagcgggcaggcgcctgattacatgtctaatctatctcaaattctcaactatctgggctcggcgaaggcgcctactgcttctggtagcactccagccactgccgctgctacttccgctactgccagcactcaaaatgcatctgaaggtcagcaatcgaatggacccccacaaaacggcactgcagggaataccaacgggccatcgtctaaaaagtccggtggttccacaccagtaggattagggacttccttggagttgaagaagcagaaatcaaagcagaagtcatagaaagtaacatcagtggtaggtttatttccaacaattttggaattctagggtgctttgagttttttacccacatagaattgtcacgccagnatggtggnagagtaattntgtttgtnttttttgaaggggtncttangatgagttnaataataacaaacgagaatgaagtgaaacaattggtgggacattgatagactactgatgatgagataaatgactaag

SEQ ID NO: 9783 - DNA, 551 bp, Oryza sativa
  unsure (1)..(551): unsure at all n locations
  Clone ID: PAT_MRT4530_16168C.1
atgaacacnacttgactcagctttctggtgtgaagcagaagcttagtcattttatctcatcatcagtagtctatcaatgtcacaacaattgtttcacttcattctcgtttgttattattggaactcatcctagaggaaccccactgatgttactttctatgacttctgctttgatttctgcttcttcaactccaaggagtccctaatcctactggtgtggaaccaccggactttttagacgatggcccgttggtattccctgcagtgccgttttgtgggggtccattcgattgctgaccttcagatgcattttgagtgctggcagtagcggaagtagcagcggcagtggctggagtgctaccagaagcagtaggcgccttcgccgagcccagnaagttgagaatttgagatagattagacatgtaatcaggcgcctgcccgcttcgcacattaaggcctctggcagcagctttcttccgaacttctgcagttgcccgagcagcccgctcatcaactcctcttactcgggggaacacctttcaccaactact

SEQ ID NO: 9784 - DNA, 1694 bp, Oryza sativa
  Clone ID: PAT_MRT4530_16169C.1
ctaagcccgtttaacaagctgagcacggagcggctttgccatcacagtggtgaactcattcttctcggtcaagtccacctcgtcgccggccacctccttccactcgaactccttcaccaaattcgccacgaaatactccaggtgtagcatggcaacgccgagcccggcacagatcctcctcccgacgccgaacggcatcatccggacctcccggctgcccgtcacgtccactccctcgccgtcgccgccggcgaggaaccgctcagggatgaactccatcggcttctcccactccctctcgtcccttcccatctcggccaccatgaagttcaccgtcgcgcccttggggatgaggtacccgccgacctcgacgtcctccgccgccttgtgcggcagcacgaagtgggccggcgggtgcttgcggaggccctcgaggatgacggccttcaggtacggcatgtcgtgggtgtcctcctcggtgatctcgtcgtcgctggtcttggacttgatctcgtcgtggagcttggattggatggatgggttcttgaccagctcggccatgatccactgcagcgcggtggccgtcgtgtcggtgccggcattgaggaactcggagcagagcatcaccagctcgtcctcggtgagggcgctgtcgccgtcggtgtcggggaggcttacgtcgagcagcgtgtcgacgtacgagtgctcgaacgtcgtctccttctccggcaccggtgggccgccggcttgctggatatggttcttgcgcgctcgccgggcatcgatgagtggcacaaagagctccttctgctgccgtcgcagggcgaggcctatttggaggcggcggcggaagatgtgcttggtgaccgccgggtagaacgcgaatacgctcgtcttcctcgcgacgtacaggagccagtcgcgctgcgcggcgccgatggcgcgcaccgcggcctcgtcgagccgctcgccgaagcacatgagcacgaggaggcagaacatggcgtaccggaacgtctccaccaccacgcgcgggcgtggcggctcggactcggggcgcgcgccgtccgcgagcttgtcgacgagcactcggcgaacccaggagcgcgcgggcgcgaacaggcggacgcgcgacgggtgcagcgtctcggcgacgaggttgcggcggaggacacgccacacggggccgtagctggagcgcgtgatggtgttgccggtctcgccgagcagcgagcgcgtgacgtccgggcggtcggcgagcgcggcgccgcgctccaccagggccgcgtgcgcgacgcggcggtcggcgacgaagatggagaggcgggagcccacgcgcagcgacacgacggggccgtaccgcgcgatcaggcgctggaggagcggctccaagttcgccgaggagtgcctcagccacaggaggcttccgagcaccggcacggcgagcgggccaggcgggatgcggcggctgccaccgccgctccggcgccgccgcgcgaggaggacgacgagcgggaggacgagagcgacgaggagcaggagccatgaggtgtccgtggccatggcgtcttcttgccttttgctctgctccgccgcctcgtcagctgagcttagtagcttgagttcagagtcaaaggcctgtttagatgataccccaaaataaatcttactaaattttgcaaaaaaaaaaaaaa

SEQ ID NO: 9785 - DNA, 3183 bp, Oryza sativa
  Clone ID: PAT_MRT4530_1616C.1
atgggagccgtggaggagcagctaccttttgggatggatgatatcctccagcacagtgatatcaacatcagaaatttctccctctcagtccgtctcacccaacggtcctcaaacacggcattcctcctcaccaacgtctatggaccgacggatgacgctgataaggaaaacttcctccaggaaatgtgcgaagtggcaccatcaggacagaccccctggctgattatgggggacttcaacctgatttatgaggcaagagacaagaataacctcaaccttgatcgtcgattgatggggcggttcaaggctgcgataaatagatgtgaactccgtgaattaagactgcaaaatagacgattcacttggagtaacgagagagatgccccaaccctcgagaagttggatcggattttttgtaacccagatggcgatatgctcttctctaaccacaacctacaagctctctcttcctccaactctgaccactgccccctgttgctctcaccaacacaccagctgctgcgaaaaccaactttcagatttgaaaacttttggccaagaccgccgggcttccttgacaccgtccagacggcttggtcccagccagttagcgcttctcaccctgtcaagcgcttgagttccaagctgaaagctacagccaaggctctacggtcctggagcaatcgcatcctaagtgacagtcgcatccaattccatctcgtaaatgagctaatcctccgtttggacattgcacaagaaaacagagcattgtcgcccttggagatctccctcagaaaagatctaaagctacagattcttggtcttgctgctgtagagaaggcaaggagaagacagcgatccacactaacatggctgaaagagggtgatgcaaacactaagtttttccacttgaaagtcaatgcgtgccatcggaagaacttcattcacaaactccaccgtggcaacgtcatcccagaaactcatgaagccaaagagcgtgccctacacgaacacttctcctctctgatgggccagcgactccctcgctcttgcaccctaaactgggaggagcttcacctaccccaggtgacgccagaagatcttgactcccccttcaccgaggaggatgtttgggaagctatcaaacggatgcttgctgagaaggcacctgggccagacggcttcacaggcaccttcttcagatgttgctgggaggttatcaagtcagacatcatggaattgcttgacaaattccactccttatcgggaggaaatttcgggagtataaacagagcgacactcatcctcatccccaaaaagaatgatgcttgcactatgggcgactatagaccaatcagcttaattcactccttagcgaagctccttgcaaagattttggcaatccgcctatccagacaaattaacaaagtgatatcacaagctcagagtgcgttcatcataacaaggtgcatccaggacaatttcctctatgtctccaacctggctaagaagatgcacaggtccaagcagcccaccctattcttcaagctcgatattgccaaggccttcgactcggtctcatgggagtacctcctaacgctgcttgaaaaaatggggttcagtactagatggcgagactgggtggctttaatcctctcaacctcctcttccagggttgcactaaatgggattgagggagaaagaattgatcaccatagagggctaaggcaaggggatcccctatccccatacctttttattcttgcgatggaccccctacatagactactcaagattgcaactgatgagggcctcctcagtgacctagcggaccgcagtgcacgcttcagatgctccctatatgctgatgacacggcaatcttcatcaaaccatcacgacaagatgtggacagcctgatttcgatcttgaataacttcgggagtgctactggacttctggttaaccttcacaaaagctcagtgatcccaatcagctgtggtgaaattgaccttgatgaaatgctacacaactttactggcccccgcgggacattcccaatgcgatacctagggatgccactcatgataagcaggctccgaaaggtccatcgccaatacctaattgacaaaatcaaggcacgattagccagttggaagaaaaagctcctctcggcaggaggaagaagagagttagtactatcagtaccaagctccatgccaatctatgccatgacagctctgaaaataccaaagcaaatcattcaagaaattgacaaagtaagaagaaaattcctctgggacggtggcgatgaagtcaatggcggaaagcccctaaagtatgacggtctgggggtctcgaatctcaccaagatgggaagggcgcttcgcctgcgatggctatggtatgaatggacctcccccgacaagccatggatcggcatgccaacaccctgtgatgaacaggacaacgagctctttgcagcatccacgtcagtgacaatcggagatggtaggaaggcgctcttctgggaatccccatgggcttgcagctccaccttgaaagcaatggcacccaatctcttccaccacgctagaaaaaagaaaaggacggtcgcagaagccctacaagataacaagtggatcgatgacatccgatacaacttgacaactgtcctcgtcaccgatttcttcaaggtcttcgagataatctggacctcaggcatcacactaacccaagacattgaagacaacatacgatggaaatggacaacaagtggagtctacacaacaaaatcagcttaccaaataatttggacggccgatcgacttcagcagagggagtggccaaataactacttctgtcagctctgcttcagaaacctcgagacggcacaccacctcttttatgaatgcccgatcacaaggaaaatctgggatgccatagcaacaaggctcggcatgcctcagctaagaccacagaactggtctaaaacgacaatccttgaggaccggtggacacaaaccgttagtacaatgcctaaggagaaaaggaagggtgccaaatcgatccttatcctactatcctgggaaatctggaaagagagaaataacatggttttcaagaacatagagacagcgacgcagggaatcgttgagaaagcgatcgacgagatctggctctag

SEQ ID NO: 9786 - DNA, 4405 bp, Oryza sativa
  Clone ID: PAT_MRT4530_16170C.1
cccacgcgtccgcggacgcgtgggcgaggccaatcattctctcccttcccctccgcctcgcgccgcctctcctctcctcgcccccctcaccggagccgaagcttccccgccgccgcgcggcagggaatatggcggggaagtcgaagggcgcgaggaacaaggcgaaggcgcagggtggaagccaggccgccgtcgcggcggagccggaggtgccggtgaccgatggagtcgaggatgccaagcccgagatcgaggaagttagtgaacctgccgtcgtagagggcagtgacactggcgctgagaaggagcagggcgatgcagctggggaaacacaagccgcgaagaagccagctgaaggggaggttcatctctaccctgtttctgttaagacacagtctggtgaaaagcttgagttgcagctaagccctggagactccgtcattgatgtcaaacaatttctcttggacgctcctgaaacgtgcttctacacatgctatgatttgttattgcacactaaagatggctcaactcatgagcttgaggactataatgaaattgctgagattgctgatataactgctggtggctgttcattggagattgttgctgcgatatatgatgagagatctattaggtcacatctccgtcgtgtcagggaattgctatccctctctagtcttcatgtatcactttccacatcccttgctcttcagcaagaatctgcacaggaaaaatctgcagatactgcaggagattctgggaaaacggctaatcaagagcttgatgggttgaatttcatggaggacagtactggtgctgtcattaatttgttgccatctgtaccagcagagatcaaatgcgtgggtagcatagttttttcttcatttaatcctccgccaagttataggagatgctgtaatatagcttttatactccacatttttgtgttagcagaacatagaagggatgcagctagggctgaagattctgttgtgctgtcatatggaaccgaattgattggcatgcaaagagactggaatgaagaattacagtcttgccaggagtttcctcatagcaatcctcaagaaaggatattgcgtggcagagcactttataaggtgacatgtgatttcgttgatgctgcagttaaaggggcagttggtgtcattaataggtgtatacccccaataaatccaactgatccggaatgttttcatatgtatgtacacaacaatattttctttagtttcgctgttgactccgactatgagcaactcccaaaggaccagaagccaaatggtcaaaatggatctggcagaagtgtgataggctcctcagatccggggtctaagccaaataagaaccatgcagatcctagtggcacaacaaattcaaaaactgaagaacctaatggtgttttggacaatacttctgatgcatcggcagaggcacagatagcagacagtgaacaggctacctatgcttctgccaacaatgacttaaaaggaactaaggcataccaagaatctgatattcctgggctgtataatcttgctatggcaattattgattacagaggtcacagggttgtagcacagagcatcatacctggtattcttcaaggagacaagtccgattcccttctgtatggttccgttgataatggcaagaaaatatcttggaatgagtcattccattcaaaggtggttgaggctgcaaagcgactccatgtgaaggagcatgtggttttggatggttctggtaatcctgtaaaattagctgctacggttgaatgcaagggaattgttggaagtgatgacaggcattatattttggatctgatgagagtgacccctcgagattctaactacattggactacagcaccgcttctgtgtgttgaggcctgaacttgtagcctcattcattgaggctgaatccacaaataaatccactacacagaaagttgcagatgctcctggagaatctaatgggcaattggctacaactgcggaaggacctgccaaatctgatgaaaactctgttcctagacctgataagtttgatgaagactctggtcctagacctggcacatctgatgacagctctgctactaaaccagctgaacataacgagtcaactgcagaaatcctttttaatccaaatgtgtttacagagtacaaacttgctggtagtccagaggagattgcagcagatgaagcattggttaaaaaggttggttcgtatcttctagacacggtgataccaaagtttgttcaggatctctgctccctagatgtctcccccatggatgggcagactttgactgatgtgctgcatagcaatgggataaatgttaggtatcttggcaaagtagctgacatgatcaagcatttgccacatctacggggtttgttgtcttctgagataattgttaggtcggcaaagcatgtggtcaaggaaatacttaggcaaagcgcagatcatgatattggaccagccattgctcatttcttaaattgttttattggcaatgttttggcaccttccacaaaaggtagtgttgacagtacggatacaaaaacccaaaagggtcatgagaagactcaaaatcaaaaatctgccgagggacagaaatcaagcctttctgcttcttcaaagaacattgtgccaacattttcccatctaacatctgatgggatttggtctaacattaaggagtttgcgaaacataaatatctgtttgaagtgaccgatgatgctaagactggtgctaaaagagttgcagtactccgcaatctttgccaaaaggcgggaataacaattgcttctcgcaaatatgacctcgatgctgcagctccattccagccttcagatatcctgaatctccaaccagttgtcaagcattctgttcctgtatgtacagatgcaaggaatcttatggaagcagggaaaatccggatggctgagggaacattgaatgaggcctatgcactattttctgaagctttttcactacttcaacagattactggtcccatgcataaggatgccgcaaactgttgccgctacggtaacatggctttgttctatcatgggcttaatcaaactgaacttgctctgcgtcacatgtctcgcacgttgcttttgctaagtttagcatcaggtcctaatcatccagatgttgcagcgactcttataaatgttgcaatgatgtaccaggatgctgggaatatgagtactgctcttaggtatcttcaggaagcactcacaaagaacgagaggcttctaggaccagatcatattcaaacagctatctgctatcatgcccttgccattgcattcagttgtatgggtgcattcaaactttcaattcagcatgaaaagaagacctatgatatactggtgaaacaattggggagtgatgattcaaggactaaggatgcagaaagttggttaaatacatttaagtcgcgagaacagcaggtgaatgcccagaagcaaaaaggtcagcagggtactaacccacctgctaatcctattgagttgttgaagttatggaagctttttgccccaatatttgtccctatattgtttgtttgctattctgtacatggattaatccctggcacgcttggtcgtttgaaggtgatggcaaatcctgatttggtgagagcactgaaggcagctgcgaaacaacctggtgaaggatcagcaaatgtcaaccgatcacttaatgctgcagtagttggtgaaggtgttcctcgagtaagaggagttgatgagcgggctgctcgggcaactgcagaagttcggaagaaagctgctgccagaggccttaatgtgcgaagcgggcaggcgcctgattacatgtctaatctatctcaaattctcaactatctgggctcggcgaaggcgcctactgcttctggtagcactccagccactgccgctgctacttccgctactgccagcactcaaaatgcatctgaaggtcagcaatcgaatggacccccacaaaacggcactgcagggaataccaacgggccatcgtctaaaaagtccggtggttccacaccagtaggattagggacttccttggagttgaagaagcagaaatcaaagcagaagtcatagaaagtaacatcagtggtaggtttatttccaacaattttggaattctagggtgctttgagttttttacccacatagaattgtcacgccagcatggtggcagagtaattttgtttgttttttttgaaggggttcttaggatgagttcaataataacaaacgagaatgaagtgaaacaattgttgtgacattgatagactactgatgatgagataaaatgactaagcattctgccttcacaccagaaagctgagtcaagttcgttcgttcat

SEQ ID NO: 9787 - DNA, 917 bp, Oryza sativa
  Clone ID: PAT_MRT4530_16171C.1
accaacaacagaacactgccgagatcacccaaaacccgacctatacaatcaacacaaaacccaactcctccccctatgccctcgcgccgttacaccgccgccttctccccctaagctgcgtgcacggcgccgctcgctcgagtggacactcgctctacctccgctccatccccgtgtgctcccccctcaaggcatgtcgcagccacgactctgcccacgtcgtccgtgtggcggccgcagaggcaagctctctcttcccccacccgcggcggctgccgtccccaccaccattgccaccgccgcctcctccccctcagctgcgtgcatggcgccgctcgctcgagtggacactcgctctacctccgctccatccccgtgtgctcccccctcaaggcatgtcgcagccacgactctgcccacgtcgtccgtgtggcggccgcagaggcaagctctctcttcccccacccgcggcggctgccgtccccaccaccattgccgccacaactcaccgccatccccaccgccgccctctccgccatcgccacgctgtcgccgccaaaatccaccgacatggctcccgctccagctcccaccactgccaccggcctcccgtacgcctgcagcaccagcaccgacgccgtcgtctggaagtccttggacgccagcaggtcgccgatcggccccagctccggcgactcgctccactccgccatccccgccgtcagcccggaccccccgggcaccttcccgacgacgaacaggtccttgttccccatggcctccacgctctgtatctcccccaccatctcgctcgccaggtcgatggtcgggttcctcaccatgcgcgttgcaagcgccgccacctcccggtcgtcgctcccgccgaagaagagcgccaccacgcggtacccgccacc

SEQ ID NO: 9788 - DNA, 876 bp, Oryza sativa
  Clone ID: PAT_MRT4530_16172C.1
atggctggtacgaaccccaaatcctcgacctcctcctcctcctccgccgcgcgcgcttttcctcgtttttgtatgattgctcacctcgtcgtgtgtctgtgtgcccctgcgtatggcggcggcggtggcgccggagaagattacgagcaggagcaggagatggaggtggaggccctgcaggccatcctcatggacgacatcaaggagatcgaccccagcgagagcgggctcagcaccacggctcgctgcttccagatcgtgctctcccctcaggatgatgatttcgatgagtcggcttatgtgccagtccaactggctctgatttttgcacacaccgaaaaatatccggatgagcctccgcttttgaatgtcaaaagtgtacgaggaatgaaatcagaagatcttgcatccttgaaagaaaagcttgagcaagaggcaactgaaaatctcggcatggctatggtctatactcttgtcacatcggcacaagattggttaagtgagaaatatggacagaatgctggagatggggaatctgaagaaaatgaggcagaagaagaggaggtcattgtgccccatggtgaagctgttactgtagagagctttctggcttggagagatcgttttgaagctgaattggcgctacagcgtgccaagcttatgccagagtcagctcttacagctccgaaggaaaagaaactctcaggaagacagtattttgaaagtggaaggcatacaatgaaaggagcaagtaccactgctgacgaagaggaggaagaagaggaagacatcgactttgatgaagacttcgatgatgacgaagaggacatgcttgagcattacttagcagaacagtcaggcaagtcggccgcttaa

SEQ ID NO: 9789 - DNA, 2349 bp, Oryza sativa
  Clone ID: PAT_MRT4530_16173C.1
atggcagcgcatacagtgacggacccactggaggagctatggaaccacacgatgtcgatggacaagacgcacctgatgtgcttctacccgagcaagatcaccatgggtggcgtctggacgggcgacaatccgctcgacttctccatacctctcctcctcttccagatcctcctcatcacctccaccacccgcgccgccaccctcctcctctctcctctccgtctccccacctacatctcccagatcctcgccggcttcctccttggcccctccgtccttggccacctccctcacttctccaacctcgtcttccccgtccgtagcctcttcgtccttgagtccatggcccttctcggcctcgtctactacaccttcatcgtcggcgtcgagatcgaggtctccgccatcacccgcgccggcatccgtagcttcggcttcgccattggctgcacgctcccgcccttcctcgtcggcgctctcaccggctacgtcgcgctcagcactgacgacaaacacaagggtgacacgttcctcaacaagctctccttccccatcttcctcggctccaccttctcctccaccgccttcgccgtcctcgcccgcaacatcgccgagctgaagcttgccggcaccgacgtcggccagctcacgctctctgcgtcactcatcaacgacaccttcgcctggaccggcctcaccgtcgccacggtgctcggccactcgcgctgcaccatcacgcagaccacgtggacgctcacgtcgggcgtcgtcatcttcggcgccagctacctcctgctccgccccatgctcctgcggctggcgaggcgcgccgccgagggggaggcggtcggcgaggaccgcgagtgctggattctgatcggcgtcatggtggcggcgctggtggcggacgcggggggcacgcacgccatattcggcgccttcgtgttcgggctcgcggtgcccaacgggccggtcggggtggcgctggtgaagaaggtggaggacttcgtggtgggcgctctgctcccgctcttcttcgccctcagcggcctccgcaccgacaccgccaagatcaccaacatgcattctgccgtgttgctcatggtcgctgccatggtcgctgcggtcttgaaggtcgtcgccgcaatcggcgtcgccggtgtgttcggcatgccgctcggtgacggcacgtccatcgggctgttgctcaacaccaaggggatcatcgagctcgtcatcctcaacattgcaaggaacaaagggattatgagtgaccagtcgttcacggtgctggtgttcgtgtcagcgctgatcacggcgatgccgatcgcccgtgggcgtcctcgccctccacctcatcgagttcgtgggccgctcctccccgcgctcctcctcatcaacgcctcggcgccatcgtcgtcctcctacgacgcctccgtccacgggcgcagccacacggagatgcagttcaagcacatctcccacgccttcatggcgtacgaggagcagtcggtgggcgtgtcggcgcgcaccatggccgccgtctcgccgtacgcctccatgcacgaggacatcacctccgccgcggagaaccagcactcggcgctcatcctgctcccgttccacaagtaccggtcggtggacggcggcctggaggtgtcccacccggcgatacagccgctcaactgcagcgtgcagagcttctcgccgtgcacggtgggcatcctcgtggaccgtggcctcgcggcggtgccgggtggcgggtaccgcgtggtggctctcttcttcggcgggagcgacgaccgggaggtggcggcgctggcgacgcggatggtgaggaacccgaccatcgacctgacattgctccggttcgtccagaagggaggaagcttcacggcgagcgagttcgacgcgctgaaagagcggaaggccgacgaggggtgcctgcgcgacttcctggagagggcgaacgagggcggcggcgcgacggtggagtacagggagcgcggcgtgttcaacgcgagcgagatggtgggggagatacagagcgtggaggccatggggaacaaggacctgttcgtcgtcgggaaggtgcccggggggtcagggctgacggcgggcatggcggagtggagcgagtcaccggagctggggcccatcggcgacctgctggcgtccaaggacttccagacgacggcgtcggtgctggtgctgcaggcgtacgggaggccggcggcagtggtgggagcgggagcgggagcaatgtcggtggattttggcggcgacagcgtggcgatggcggagaggacagccagtgggcgtaggccatgggcacgaccgggtgtatga

SEQ ID NO: 9790 - DNA, 2628 bp, Oryza sativa
  Clone ID: PAT_MRT4530_16174C.1
atggctgatagtactaaagggactgaagagaagggtttaggggagcaagagcagtcccttgctgttgtggttgctccggaaccaacggtcccaccagaagatagttccggcagcgacgtagctcacgaagacgatgagtactcgtcgccaagcgatccttgtccaagcccaagcccgaagagaaggaaaaagggcgacggtgaagaaggcgacaaagactacattccccctaaagaaggggaaacggcgccacggcgatcaaaacggcaaccgaagaaaaaagttccgtcgcaaattgacgaggtactagctaacacaaccggctcaaagaaaagcgaacggtcagctaaggcaaagaaaaggaagggcgagagaagcgtgaatagaaaggatgaagggttccatgttgttacccatgttttgccaaaaggagagccgctcgcccctaagacggcacgtgtgaaattcagttcacagtgtggcataatattcccgaatggatcagaggcagcagtgaggaattgtgcactgcaaacaatggccaagtcttggcgtggttggaaaaccatcttgaacacaaaatttgtcaagacgggacgcacaccgttttcgatgtatgccaacataaccccgaatcagtgggacgactttctggcgttgaagaactccccggaagaaattcaaaggagccaaaagtatgcagagttggccaagaagaacaaatttcctcatcgcttaggttccgcgggatacgcaccaaaggtggagcagtggacaaaagaggaggaggaaatgaggaagaaggggcaaccagtaccaatggaggaatggacacagagatcaaggaactgggtaagagctagaactcctaagatcacggatgaaggaaaagtatcgtttgaagatccggagctgcagagcgttgctgataaaatagagaatttatccagttcacagaagaaaggatttttcaagcctaagagggagaaagatgtgctaagtacggcgttgggtactcctgagcatgggggaagggttcgagccattgctatccttgggagaacatacaacgaagagttcatacccgatgcatatgccaaggtgcagccgcaagtggtccacgaagggtttgaatcctatgacattgacttcccgactgcagatggtgtatccgtacttggggatgcggtcgatcttgtaattctctggcacaagaatgacgtatcctttggattgggcaccgacgccacggaaaaacctgtggtgccaaaaccggggttgggaaaacctccgagacctcctaagaggaaggtgactgataaggcggaggaacccgatatgcaaaaggataatccagtgccggaagtgccaccggagattgcagtgccggaggcagccatggagattccagtgccggaagtgcccatggagattacagtggcagaaccagaggtgcaatttgtggcatcagtcgggtcagaaatagaagaagtactaggattggaatgggacggtatagagccagaaatatttgaagatccttctcttgcgaaagaccccgaggtgcaagagaccatggtccctgagaaggccactaccaattctgagatgcctagagtgcttaggagccacgactttaagtccaaagatgagaacaaggagaagttcatggtaaccgtcttcagagggggtaaggaacgtgccaagctcagagatgatgacccccagaaggccgctgaactagccgggccaacatacttcgcaaccgatgattgcccgactgagtacgaacatgggaaaacactcttgccggaatgggcactgaacgaagtaccatgggagatgaaaaggttacataccttctacatgcaggccagcaagaaaggcttgggcaatataacagctcgatcatcggcagattgttttggcgaagaaggttacgtatggctagatttctcagatctccacgccatatatcgtcgggataagatggacgttaactacgtcggtgtttggtgcatgatgcaatacatggatgctaagaagacaaaagaacctatcggcttcttggatccaactcagatttgccaaacacaacataccatgaggctagcaccagggtcagaccagctgaagggcaagactccaaaagagatagctgaatacaagaagggcttgcacaaggagaaattgattactgtcgcacagtacattggacgagccttcttgcactttcaaaataagagagccaaaataagagagtcgtcatggctgcttataattttaacgatcattatatctgtttactcatccaccctaaagacggaaccgtgtgcgtaccagtactacaagttcaagggtggagaacagacccgaacaagggagaagctgctatgtcacaagcaaccgcaaggaacggtcctttgcgggtattacgcttgcgaattccttagagttaatgggaggtacaggactaacgcggaggatttgccaagattacaatgtcgaacaagctttgacgatacaggcataaaaaatgtccagtgtgatctgtgtcacttcatccaccataagatgtcatgtgaaaggagatttcttcgacccagagggtgccctagccacaagtga

SEQ ID NO: 9791 - DNA, 588 bp, Oryza sativa
  Clone ID: PAT_MRT4530_16175C.1
tcacctggccagagcggcggtggggatggcggtgagttgtggcggcaatggtggtggggacggcagccgccgcgggtgggggaagagagagcttgcctctgcggccgccacacggacgacgtgggcagagtcgtggctgcgacatgccttgaggggggagcacacggggatggagcggaggtagagcgagtgtccactcgagcgagcggcgccatgcacgcagctgagggggaggaggcggcggtggcaatggtggtggggacggcagccgccgcgggtgggggaagagagagcttgcctctgcggccgccacacggacgacgtgggcagagtcgtggcatggcggcgacaaccgctgatccagctgtagaagaagggcggtgggaggcgcggctccacccaatgcggacgtggcgcgcggtaggagatgcgggcggtgacactgaggaggacgttgtcagggaggtcggtcggtccactaatcagaccagcatcatcaccagcttgtactttgctatacatgcgaatgaaaggaaccagtcaggtgtggcaacctttatattcgtgactggatatcatgagatatga

SEQ ID NO: 9792 - DNA, 2715 bp, Oryza sativa
  Clone ID: PAT_MRT4530_16176C.1
atggagcgcctcattgttcacattgtgccgcagatggttgcgcttggcccattgtacctccatcaaatatggtcatacgaccgttacatggcggttctgaagggttacgtccgaaatcgtgcacatccagagggatcaatggttgagggttatagtactgaagaggttgtcgagtgctgtatcgattacctcaaagatggatatgcaattggagtacctgtgccccgacacgagggcagattgagtggcaggggaacgataggaaagaagagattcgtcacccatgatcacaaatcattccaagaagcttacttcagcgtgcttcatcagtttgctatcgtcgagcccggtgtccgtgtggaggcaattgatgaagccagggaaaaacaatcatacttcgggtttattgaagaaatatgggaaatcgactatgggcacacaatgctattccccatatttaagtgtcagtgggtaaaatacccgaacggggtcaatgttgataagttcggccctactgttgttgaccttgcgagtgtgggtcacaaggatgacccttggaagattaagaatgtcgagacatctactcagaagaccgtgaagccttacatgcgcacggatggctgccgaaaattttcaccgccgcacgcctccgccgtcctccgccgccgaccgcctgcgaccttcactctccgaccgtcgtcctccgccgccgccgaccatcgtcgtccacgcgctgccaccgagaccgtcgtcctccgccgccgccgaccgttgtcaagcactctgccgccgccgccgccgacccctccaccgcgcacccgctccaccgccgccggctcctccaccgccaccggcccctccaccgccaccggctcctccaccgcgcgcgcggccgccggtggcccctccaccgccgccggcccctccaccgcgcgcacggccgccgctggcccctccaccaccgtcggccacccctccaccggcgccggccgtcggcccctccaccgccgtcggccacccctccgtgcaaaggcgaacggcttcatcggccgatcgtcgtccacgagcgacgacgtcctcggccgaacgacgtcttcggccagtcgtcgtccacggccgaacctcgtcgtcggccgttcgtcgtcgacggccgaagccggtcgtcgtccacgaccgaagctcgtcgtcggccgttcgtcgaacacggacgagcagtcccttgctgttgtggttgctccggaaccaatggtcccaccggaaggtagttccaacagcgacgtaggtgacgaagacgaggagtactcatcgccaagcgatccttgtccaagcccaagcccgaagagaaggaaaaagggcgacggtgaagaaggcgacaaggactacattccccctaaagaaggggcaaatgatggattctgcgtcaagcacatgattttgcctcgccccgaaaccaaagaaactgagccagattaccccttcgatgacctcaaggagaatacaccctgcagattacacgttcccattggacgctccggtaaaactcttgaggccgctacagccattgctatccctgggagaacatacaatgaacagttcatacccgatgcgtatgccaaggtgcagccacaagtggtccacgaagggtttgagtcctacgacattgactacccaactgcagatggtgtatctgtacttggggatgcggtcgatcttgtaattctctggcacaagaatgacatatcctttggattgggcaccgacgccacgcaaaaacctgtggtgcctaaaccggggttgggaaaacctccgaggcctcataagattaaggtgactgataaggcggatgatccagagatgcaaaaggaaaatccattgccgaaagtgcaaccggagattgcattgccggaggcagccatggagattgcaccgcaggagacagccatggagattccagtgccggatgtgcccatggagattacagtggcagaaccagagagccagaaaatatttgaagacctttctcctgcgaaagaccccgaggtgccacgagtgcttaggagccacgactcgaagtccaaagatgagaacaaggagaagttcatggtaaccgtcttcagagggggtaaggaacgtgccaagctcagagatgacgacccccagaaggctgctgaactagccgggccaacatacttcgcaaccgatgattgcccgaaaaagtacgaacacgggaaagcactcttaccggaatgggcactggaagaagcaccatgggagatgagaaggttacataacttctacatggaggccagcaagaaaggcttgggcaatataacagctcgatcaccggcagattgtttcgacgaagaaggttacgtatggttagatttctcatatctccacgccatatattgtcgggataagatggacgtcaactacgtcggtgtttggtgcatgatgcagtacatggatgctaagaagaaaaaagaacccatcggcttcttggatccaactcggatctgccaaacacagcatatcgtgaggctagcaccagggtctgaccagctgaagggcaagaatccaaaagagatagctgaatacaagaagggcttgcacaaggagaaattgattaatgtcgcacacgtgatctgtgccacttcatccaccatgagtgctgtcatgtcaaaggagatttctttgacccagagggtgccctag

SEQ ID NO: 9793 - DNA, 458 bp, Oryza sativa
  unsure (1)..(458): unsure at all n locations
  Clone ID: PAT_MRT4530_16177C.1
gtgaaccactcttcttattattcttctgattttttatcatcacattcacgagaaagcactccaaacatgataaatgctctagcaaattcgataattaattatccataacgtgtttgctaggggaataataataancaaagcctaattaattaattactaaggaagttaatccatgcccccccaaacatggggcagccaaagaaccagtgtgctgcaggttgcaccggccgtggtccgtcagggcgctcgccatcccggcgatcgtggcggngtcccacccgggcgccgcgtgctgcgagaacatnccggcgacgcggtggcccttcttcgtggtcccgcctagcaccagcacgctaaacgcgtcttacctggcctgcttttgggctgcggngagctcccggcgggncgggtccaggagctgtcgtggtggttgcttgccggagtttatggtgtccccg

SEQ ID NO: 9794 - DNA, 2588 bp, Oryza sativa
  Clone ID: PAT_MRT4530_16178C.1
atgtcgatggacaagacgcacctgatgtgcttctacccgagcaagatcaccatgggtggcgtctggacgggcgacaacccgctcgacttctccatacctctcctcctcttccagatcctcctcatcacctccaccacccgcgccgccaccctcctcctctcccctctccgcctccccacctacatctcccagatcctcgctagcttcctccttggcccctccatccttggccacctccctcacttctccaacctcgtcttccctgtccgtagcctcttcgtccttgagtccatggccctcctcggcctcgtctactacaccttcatcgtcggcgtcgagatcgaggtctccgccatcacccgtgccggcatccatagcttcggcttcgctgtcggctgcgcgctcccgcccttcctcgtcggcgccctcaccggctacgtcgcgctcagcactgacgacaaacgcaagggtgacactttcctgaacaagctctccttccccatcttcctcggctccaccttctcctccaccgccttctccgtcctcgcccgcaacatcgccgagctcaagctcgccggcaccgacgtcggccagctcacgctctccgcatcactcatcaacgacaccttcgcctggaccggcctcaccgtcgccacggtgctcggccactcgcgctgcaccatcacgcagaccacgtggacgctcacgtcgggcgtcgtcatcttcggcgccagctacctcctgctccgccccatgctcctgcggctggcgaggcgcgccgccgagggggaggcggtcggcgaggaccgcgagtgctggattctgatcggcgtcatggttgcggcgctggtggcggacgcagggggcacgcacgccatattcggcgccttcgtgttcggcctcgccgtgcccaacgggccggtcggggtggcgctggtggagaaggtggaggacttcgtggtgggtgctctgctcccgctcttcttcgccctcagcggcctccgcaccgacaccgccaagatcaccaacatgcattctgccgtgctgctcatggtcgctgccatggtcgctgcggtcttgaaggtcgccgccgcaatcggcgtcgccggtgtgtttggcatgccactcagtgacggcacgtccatcgggctgctgctcaacaccaaggggatcatcgagctcgtcatcctcaacattgcaaggaacaaagggatcatgagtgaccagtcgttcacggtgctggtgttcgtgtcggcgctgatcacggcgatggtgagccctttcctggggatggtggtgaagccggcgcggcgcctcgtgttctacaagcggcgcacggtcgcgtgggctcacccggaatcagagctccgcgtgctggcctgcgtccacgtgccgcgcgacgtgcccgcgctactgacgctcctcgatgtggtgacgccgtcgagccggtcgcccgtgggcgtcctcgccctccacctcatcgagttcgtcggccgctcctcggcgctcctcctcatcaatgcctctgcgccgtcgtcgtcctcctacgacgcctccgtccacgggcgcagccacacggagatgcagttcaagcacatctcccacgccttcatggcgtacgaggagcagtcggtgggcgtgtcggcgcgcaccatggccgccgtctcgccgtacgagtccatgcacgaggacatcacctccgccgcggagaaccagcactcggcgctcatcctgctcccgttccacaagtaccggtcggtggacggcggcctggaggtgtcccacccggcgatacagccgctcaactgcaacgtgcagagcttctcgccgtgcacggtgggcatcctcgtggaccgtggcctcgccgcggtgccgggtggcgggtaccgcgtggtggcgctcttcttcggcgggagcgacgaccgggaggtggcggcgcttgcgacgcgcatggtgaggaacccgaccatcgacctgacattgctccggttcgtccagaagggaggaagcttcactgcaagcgagttcgacgcgctgaaagagcggaaggccgacgaggggtgcctgcgtgacttcctagagagggcgaacgagggcggcggcgcgacggtggagtacagggagcgcggcgtgttcaacgcgagcgagatggtgggggagatacagagcgtggaggccatggggaacaaggacctgttcgtcgtcgggaaggtgcccggggggtccgggctgacggcggggatggcggagtggagcgagtcgccggagctggggccgatcggcgacctgctggcgtccaaggacttccagacgacggcgtcggtgctggtgctgcaggcgtacgggaggccggtggcagtggtgggagctggagcgggagccatgtcggtggattttggcggcgacagcgtggcgatggcggagaggacagccagtgggcgtaggccatgggcacgaccgggtgtatgatcatcgatcatcggagaatttttctttctagaattggtgaccgttgagatagatgtaggaatagctgataatatggtgtggataattgcatattatggtataaaatttatacatagtgc

SEQ ID NO: 9795 - DNA, 612 bp, Oryza sativa
  Clone ID: PAT_MRT4530_16179C.1
atggatggctgggtcgacgacgacgacgcggtggtggtggctggacacgggggggacggggtgtcgtcctctcccacctccgtgctagggtgtaaggaacgtgccaaactcagagatgatgacccccagaaggccgctgaactagccgggccaacatacttggtaactgacgattgcccggaaaagtacgaacatgggaaagcactcttgccggattgggcactaaacaaaggaccatgggagatgagaagcgccgaaggttacgtatggctagatttctcagatctccacgccatatatcatcaggataagatgaacgtcaactatgttggtgtttggtgcatgatgcaatacatggatgctaagaagaaaaaagaacctatcggcttctccaactcggatctgtcaaacacagcataccgtgaggctagcaccagggcggccactttctattttcgtaggcggaccggactagccaacgtccgcctgcgaaaactatcttcgcagacggacggccgccccgcctgcgaagatcggcgatcttcacagtcgtttgcttacaggcggatggccgccccgcctgcgaagaccgttttcggccgcttgcgataa

SEQ ID NO: 9796 - DNA, 1194 bp, Oryza sativa
  Clone ID: PAT_MRT4530_1617C.1
atgacacgattacttcaaaaggatgtaaagtacaagtggtcagaagaatgtgagcagagttttcaagagttgaagaatcgcttaatatcagctcctattttgattttacctgatccaaagaagggtttccaagtgtattgcgatgcatccaagcttggattaggttgtgtactgatgcaagatgggaaggtggttgcctatgcatctcgtcagttacgtccgcatgagaagaactaccctactcatgatcttgagttagctgcagtggttcatgcgttgaagatttggcgtcattatcttttcggtactcgtacagaggtgtacaccgatcacaagagtttaaaaggttttgttgcagctttagaagcgaagactactctcattgatcaagtcagagaagcccaaattaatgatcctgatattctggagatcaagaagaatatgagaagaggtaaagctatcagtttcttgaaagatgagcaaggaactgtatggttgggtgagagaatctgtgtcccagacaacaaagacttgaaggatgcaattctaaaggaagctcatgatactttatactccattcaccctggcagtactaagatgtaccaggatcttaaggaaagattttggtgggcaagtatgaagcgtgaaatcgcagaatatgtagcagtatgtgatgtttgtcagcgagtcaaagcagaacatcagaaacccgcaggtttgctgcagcctttgaagataccagaatggaagtgggaggaaatcggtatggattttatcactggactatccagaacgtcgtcaggtcatgactctatttgggtgatagtcgacagactaaccaaagtggctcatttcattctgacagatggacagaccgaaagggtaaatcagatactggaagacatgttgagagcttgtgctttagatttcggtggaagttgggataagaatttgccttacgcggaattctcgtacaacaacagttatcaagctagtcttcagatggctccgtacgaagcactgtatggtcggaaatgccgcactccacttttgtgggatcagacaggagatcgtcagattccgacgtttccggagagtccgttttcgctggagaagaatttgaagagttccaaggccagtaaggcaagtcacacagatctcaaacaaccctttgagcatgttgatcctatttaa

SEQ ID NO: 9797 - DNA, 2217 bp, Oryza sativa
  Clone ID: PAT_MRT4530_16180C.1
atggacataacggaggtgacggtggtgcaccacgcggcgctggtgctgctcgcgctctgggccgccgtgtcggccgggtgggcgcacccggcgatcttcctcgccgcgctcctctatctgttcgcggtgaatgaacgatacacaatgaggctgcgaaagcgaatacaacatgaggaaaggaaatgtgcaaaccaaagaaggcttctctctgatgcagagactgtcaggtggttgaattatgctgttgagaagatctggccggtttgcatggaacgggttgcatctgagcagttccttttgcccatattcccatggttcctggaaaagttcaaaccatggacagcgaggaaagcagtgatccaagacctttacttgggcaggaacccaccaatgtttacagatattagggttgtcaggcaatcaactgatgatgaccatctggttttagagataggaatgaacttcctatctgcagatgatatgaatgcaacaatggctgtgcaacttaggaagagattaggatttggcatcacagcaaacatgcatataactgggatgcatgttgaagggaaggtcctagttggggtgcgatttctccgacagtggccatatattggtcgcgtaagagtgtgctttgttgagcctccatacttccagatgacagtcaaaccattatttggtcatgggcttgatgtaactgaacttccaggaatttctggatggcttgacaggatgttggatgtcgcctttggacagacccttgttgagtcacaaacaagtgaagttttgggtatcaacattgtacaaaatgcaactttcactgtgttacctaatatgctagttattgacttggaaaagtttgcatcggaatcaacagatagctggtttagtgttgatgagaagccacctattgcacatgccaaggtagagatcttggaaggtgctgatatgaaaccctctgatccaaatggattagctgatccatacgtgaaaggccatcttggaccctatcgtttccagacaaagatccacaagaaaacactcaatccaaaatggatggaggagttcaaaataccagtaacctcatgggcagctctcaatcttctctctcttcaagttcgagataaggatcccatctttgacgacacactcggtgactgttccataagcatcaacaaattgagaggtggacaaaggcacgacatatggattgctctgaagaatataaagacagggcggattcatatagcagtaacagtacttgaagatgaaaatgaaaaggttccaaacgatgacgatgagcagtgtggaacacccaaggggggtaaagcaagcacaccaaggtctagcttttcgtccaggaccaacaatgaaagtgaatcatcagaggagtttcgaaagatatctgctgaatatgagccagtagacattgaaggactggaaaaggttgatgtttgggtccatcggccaggcagtgatgtcgcagtcacttgggagcctcggaaaggacgtgcgaggtgtcaggattccagaatcctacgagagaatgatgtctactgtgacagccctaagtcgtgccaatcagaatctcagagaagtgactccagtactgaagaaccagccaatggcaaatcacgccatcatctccacaaggtcaaaaagggtttggggaaactagctggtgcgatgttcaagagcccaaagaaagagagtgatgatgaagcctcgccatgtgtgacgcctcacccaaatataaaaccacttggagaaaaaagggtgtcagtaagatacgtcgtcgatgaagatccttctgaaaacttgccagatgaccagcattccagtcctgagagaggcgagtcggaaagtccgaccaagaggcatttgaggaagaaggctgtgcacatggtgaaacatgcggggaacaaaacagctcataatctgaagaacatgttcagcaggaaaggcagtgacaagagcaaagaaggccaagatgaccagaaagacgatcctgatactatagtagtagaaccttcaaaagttaagaaagacaatcctgatgcaagtgaggtagacatagacccttcacaagttgagaacgacatccccgattcaacggcaattgaccctttgaaggttgattctaatgtggccaacaacattgtggttgatgcactagagtatgcatctgaatctgatgcgaaggacaaaccacagtga

SEQ ID NO: 9798 - DNA, 1824 bp, Oryza sativa
  Clone ID: PAT_MRT4530_16181C.1
atgcacctagaaggtatgaaggcgcgcagcacgctgtggcgtgcagccagaccgcacgaccacgcggtggtggacgcaaatgggccgcgggagcgatacggtggcgggctatcgtggcacggggttatcccagtcgtcggtcccacgcgtcaacgccgcgctgacaaatcgatcgcgcgcgcctacccactagatatggaaagtcgggaatggatgtatcattggccgaggtttttgtctccatgtagaaatgaagtgtctaaatttattggtattgcgaaggcacacgctgagaagaacaatatgaggaagataatttgtccatgtgctgacttgaaggagcacttagtaactcgtggatttatggacaagtacgaaatatggacacgtcatggcgaagaacaagtggacgggcctaaaaatgtagttccgacacaagttgaagacctggtgcacgacgatggttctgttgaggacaaaatcgatctagaggaaatgttacgtcatgcagaacccgaggtgctgatggggtcggctagaggtttaaataactttgaagctttactaaaggcagctaaggaagttttgtatgatgagtcgaagggctgtgacagtgagttcacaacactacggaaagagtatgcttgtttagatgaatgtccaacatgcgatgctagctggtacaaatcgaatagcaatacgggcctagaaccgtctgacacttgtgatgtgggaccccgtcagtctggtattgatattgacgtatttcttgaaccattgttggaagatatggctgatttatggaaagagggattgaaagtgtgggacgagtacttaagagaatacttcacagtgaaggccatcatcttcgtgaccattaacgattatccagcaatgttttcagttttagatcaaattaaagtgactaagaaactatcaaaggggacaaagtgcaagaaacccgagaagactacgaaaccagaggatagtaagaagcaagatgatagttcgaagccagatgataaactccctcccccattcaagaagcattctatattctttaagtacctcccgtactggaaagatctggaggttcggcatgccatagacatcatgcatctggagaagaatgtgtttgacaatatagttgaaacattgttggacatgccgaagaagactaaagatggtctgcaatcaaggatgaacctagtcgagatgggaatcagggaagagttacaccctcaagaaggagagaagaatggcaaagtatatcttccaccagcctgtttcacactgacatctgaggagaagaagtcattttgcaagtcactccgtgatgtcagagtgcccataggtttctcatcaaacaacagtcgactagtttccatgaaagatttctcggtatctggttataattcacacgactgtcatgtcttgctcaccgtgtttcttgcaattgcaataagggccataaaaccggagcatttaaaggttgttatcacaaggttgtgctactttttcaacgcagtgtcacagaaggtcattagtctcgaagagttaggaaatctccatacattcgcacatgagacacagtgccaacttgagatgtgtttccctccgtcattttttgatatgatggagcacctcattgttcacatagtgccgcaaatggttgtgcttggcccattgtacctccatcaaatgtggtcatacgagcgttacatggcggttttgaagggttacgtccgaaatcgtacacatccagagggatcaatggttgagggttatagtactgaagaggttgtcgagtgctgtatcgattag

SEQ ID NO: 9799 - DNA, 900 bp, Oryza sativa
  Clone ID: PAT_MRT4530_16182C.1
atgagttggaaggaagggttcaaacatgacccccacaagaagcgtgatgcgtacaaggataaacttagagatgatggggctgcggattttcaaaggcaaatgatggatttctgcgtcaagcacatgcttttacctcgccccgaaaccaaagaacctgagccagattaccccttcgatgacctcaaggagaatacaccctgcagattgcacgttcccattggacgctccgggaatactcttgaggccgctacagccattgctatccctgggagaacatataatgaagagttcatacctgctgcatatgccaaagtgcagacgcaagtggtccacgaagggtttgagtcctatgacattgacttccctactgcagatggtgtatccatgcataaggaaaatctagtgccggaagtgccatcggagattgaagtgccggaggtgcccatggagattgcagtgccggatgtccaaatggatattaaagtggctgaaccagaggtgaaatttgtggcatcagttgggacagaaatagaagaagtaccaggattggaatgggacggtacagagccagaaatatttgaagacccttctcctgcgaaagaccccgaggtgcaacagaccacggtccctgagaaggccactaccagttctgaggtgcctagagtgcttaggagccacgactccaagaccaaagatgagaacaaggagaagttcatggtaactgtctttagagggggtaaggaacgtgccaagctcagagatgatgacccccagaaggccgctgaactagccgggccaacatacttcgcaactgatgattgcccagaaaagtacgaacatgggaaagcactcttgccggaatgggcactgaaggaaggaccatgggagatgagaaggtaa

SEQ ID NO: 9800 - DNA, 3723 bp, Oryza sativa
  Clone ID: PAT_MRT4530_16183C.1
atggaaagtcgggaatggatgtatcattggccaaggtttttgtctccatatagaaacaaagtgtctaaatttattggtattgccaagacacacgctgagaagaacaatatgaggaagataatttgtccatgcgctgacagtaagaatgaaatagcctggaactttgacaatgcttttaacgtgaaggagtacttagtaactcgtggatttatggacaagtacgaaatatggacatgtcatggcgaagaacaagtggacgggcctgaaaatgtagttccgacacaagttgaagacatggtgcatgacgatggttctattgtggacaaaatcgacctagaggaaatgttacgtcatgcagaacccgaggtgctgatggggtcggctagagggttaaataactttgaagctttacagaaggcagcaaaggaagttttgtatgatgagtcgaagggctgtgacagtgagttcacaacactccggtcagttcttgaacttatgaggttaaaggcgagacatggatggtctgataccaatttcgacagtttgttagaacttctgcagaaaatgctcctgaggcctaactcactaccatccagcacatatcaagcaaagaaactcatatgccccctttcacttggtgtggaaaagattcatgcgtgcgtaaatcactgcatactatacaagaaagaatacgcttctttagatgaatgtccaataagcggtgctagccggtacaaattgaatagcaatactggcctagaaccgtctgacacaactgagggacgacagagaaaaatcccgcagcttgtgatgtggtaccttcttgtcaaagaccgcattaaacggatatactcaaatctgcgagatgcggaactaatacgctggcatgaagaagggcgcaaaaaggatgggatgattcaacacccgacagatgctcgtcagtggataaactttgatgctcagtacagagagtttgctaaagacccacggaacattagatttgccctgagtactgatggagttaatccttttggagacatgagcagctcatatagtacttggccagtgcttctcaccatgtttgaaactatggccgatagtactaaagggactgaagagaaaggtttagtggagcaagagcagtcccttactattgtggttgctccggaaccaacggtcccaccagaagatagttccggcagcgacgtagctcacgaagacgatgagtactcatcaccaagcgatccttgtccaagcccaagcccgaagagaaggaaaaagggcgacggtgaagaaggcgacaaagactacattccccctaaagaaggggtaagaaacggcgccacggcgatcaaaacggcagttccgtcgcaaattgacgaggtaccagctaacacaaccggctcaaagaaaagcgaacggtcagctaaggcgaagaaaaggaagggcgagagaagcgtgaatagaaaggatgaagggttccatgttgttacccatgtttcgccaaaaggagagccgctcgcctctaagacggcacgtgcgaaattcagttcacagtgtggcataatagtaagggaaaagatccccatcacggtgaaggactgggatcatgtatcgaatggggataaggaagtcctatggaaagagttgaagaaaatcttccagttcccggatggatcagaggcagcagtgaggaattgtgcactgcaaacaatggccaagtcttggcgtggttggaaaaccaccttgaacacaaaatttgtcaagacgggacgcacaccattttcgacgtatgacaacataaccccgaatcagtgggatgactttctgatgttgaagaactccccgaaagaaattcaaaggagccaaagctccgcgggatacgcaccaaaggtggagcaatggacaaaagaggaggagaaaatgaggaagaaggggcaaccggtaccaatggaggaatggacacagagatcaaggaactggaagaaaggatttttcaagcctaagagggagaaagatgtgctaagtacggcgctgggtactcctgagcatgggggaagggttcgaggtgtgtcgagaaaaatgagttggaaggaagggttcaaacatgacccccacaagaagcgtgaagcgtacaatgataaacttagagacgaaggggctgcggagtttgaaaggcaaatgatggatttctgcgtcaagcacatgattttgcctcgcctcgaaaccaaagaacctgaaccagattaccccttcgatgacctcaaggagaatacgccctgcagattgcacgttcccattggacgctccgggaaaactcttgaggccgctacaaccattgctatccctgggagaacatacaacgaagagttcatacccaatgcgtatgccaaggtgcagccgcaagtggtccacgaagggtttgagtcctacgacattgacttcctgactgcagatggtgtatccgtacttggggatgcggtcgatcttgtaattctctggcacaataatgacatatcctttggattgggcaccgatgccacggaaaaacctttggtgccaaaaccggggttgggaaaacctctgagacctcctaagaggaaggtgactgataaggcggaggaacccgagatgcaaaaggataatctagtgccggaagtgccaccggagattgtagtgccagaggcagccatggagattccagtgccggaaatgcccatggagattacagtggcagaaccagaggtgcaatttgtggcatcagtcgggtcagaaatagaagaagtaccaggattggaatgggacggtacagagccagaaatatttgaagacccttctcctgcgaaagaccccgaggtgcaagagaccactgtccctaagaaggccactaccagttctgaggtgcctagagtgcttaggagccacgactccaagtccaaagatgagaacaaggagaagttcatggccagcaagaaaggcttgggcaatataacagctcgattaccggcagattgtttcggcgaagaaggttatgtatggctagatttctcagatctccacgccatatgtcgtcgggataagatggacgtcaactatgtcggtgtttggtgcatgatgcaatacatggatgctaagaagaaaaaagaacctatcggcttcttggatccaactcggatctgccaaacacaacataccgtgaggctagcaccagagtctgaccagctgaagggcatgaatccaaaagagatagctgaatacaagaaaggcttgcacaaggagaaattgattactgtcgcacagtacattggacaagccttcttgcactttcaaaataagagagtcgtcatggccgcttataattttaacgatcattatatctgtttactcatccaccctaaagacggaaccgtggtagtcttggaccctctcgattacagacaccagtcatacaaagaatttctagcaatcttacagtatgcgtaccagtattacaagttcaaggatggagaacagacccgaactagggagaagctgctattgccaagattagaacgtcgaacaagctttgacgatacaggcatcaaaaatgtccagcgtgatctgtggcacttcatccaccatgagtgctgccatgtgaaaggagatttcttcgacccagagggtgccctagccacaagtgacgaattcaaggatcttcgggagtggaacagtgctatgccataa

SEQ ID NO: 9801 - DNA, 335 bp, Oryza sativa
  Clone ID: PAT_MRT4530_16184C.1
aaaaaaaaaaaaaaaaaaaaaaaaaaaaaaaaaaaaaaaaaaaaaaaaaaaaaaaaaaaaggggaagggaaatttaaaaacacttacttaaccccagcttacctacttctttaaatcgcgcggactttttatagtttccacgcttccttaccctttctttcctcggcatacctttaatttaccgcaccctaaattcacttcactggccctccttttacaccttcgggactaaaaaaactttgcctttacccaatttattttccttgcactaattccccttttttccagatggtttattacccttaagcccccaattgaccccccttttaaacagt

SEQ ID NO: 9802 - DNA, 174 bp, Oryza sativa
  Clone ID: PAT_MRT4530_16185C.1
cgacggtggcggtgctcgttatggtggcgatgctggtgatgtacggggctgtgtattctgacgatgcacgtgctcatggcgtcacttgaaaaacaggttgcagctgctgcacacgctcatggaagtcatggaggacgcgtcgtgacagaggcacttagtactgagtcaacagct

SEQ ID NO: 9803 - DNA, 405 bp, Oryza sativa
  Clone ID: PAT_MRT4530_16186C.1
aattaaagtgcaaaaattatcatttcgtctcatatgcatgatatggcagatacaagttgtgcgggcaatgcaacggcaagcccacttttttttttatctcgtctcctcgtgaactctacatatatagagatttatcacaagcgaggaaattaattaaccgaggaaaaattacacgcagccatgcaggtagaaaaactcgaaacccacatgtcagcgaaacaattttgacgccacataggcccttatatatatatataagcttctcgtgctttagtattcgcgctcgctcgcccatgccgcggcggcgatggcggcggcggtcggcgggctagccacggtaggtcggcgttggcgcggcggacgcctgctgctggaggagctggcggcggaaccactcgatgaagt

SEQ ID NO: 9804 - DNA, 5165 bp, Oryza sativa
  Clone ID: PAT_MRT4530_16187C.1
atgtcggataaatatgtaaatataggcatatcactaaaactcatgttccaggtctttccgcccaagctcctccattgcctgaaggcggttcttgtaaccatccaggcgagccccgacagattgttcgatgctactttacgccgaaagagcctgcgagcaaaaagggggaaggtggcgaaaatatttagtgcaaaaagaacacttagtaaaaaagcagatatagaaagtcgggaatggatgtatcattggccgaggtttttatctccatatagaaacgaagtggctaaatttattggtattgccaaggttcacgctgagaagaacaatatgaggaagataatttgtccgtgtgctgactgtaagaatgaaatagcctgggactttgacgatgcttttaaagtgaaggagcacttagtaactcgcggatttatggacaagtacgaaatatggacacgtcatggcgaagaacatgtggacgagcctgaaaatgtagttccgaaacaagttgaagacatggtgcatgacgatggttctgttgaggacaaaatcgacctagaggaaatgttacgtcatgcagaacccgaggtgctgatggggtcggcaagagggctaaataactttgaagctttacagaaggcagcaaaggaagttttgtacgatgagtcgaagggctgtgacagtgatttcacaacactccggaaagagtacgcttctttggatgaatgtccaacatgcggtgcaagccggtacaagtcgaatagcaatactagcctagaaccctctgaagcaactgagggacgacagagaaaaatcccacagcttgtgatgtggtaccttcctggaccccgtcagcctggtattgatatagacgtatttcttgaaccattgttggaagatatggccgatttatggaaagagggattgaaagtgtgggacgagtacttaagggaatacttcacagtgaaggcaatcatcttcgtgaccattaacgattatccaacaatgttttcagtttcaggtcaaattaaaggtaaaacaggatgtgtgatatgcttgaatggaacgcactataggtatctcccgggttccaacaagcttgtgtacatgcggcaccggcggttcctacgcacaaatcacaagtaccgtaagatgaaggcggagtctgatggtactgaagagactgatcctgcaccaaaacctacatcgggagaaaatgtgtgtgcaatgatagagaaaattgtttgcgagtttggaaaaatgactaagaaaccatcaaaggggataaagcgcaagaaacccgagaagaatacgaagggaggggatagtaagaagcaagatgacagttcgaagccagatgataaactccctcccccattcaagaagcattccatattttttaagtacctcctgtactggaaagatctggaggttcggcatgccatagacgtcatgcatctagagaagaatgtgtttgacaacatagttggaacattgttggacatgccgaagaagactaaagatggtatgcaatcaaggatagacctagtcgcgatgggaatcagggaagagttacaccctcaagaaggagaaaagaatggcaaagtatatcttccaccagcctgtttcacactaacacctgaggagaagaagtcattttgcaactcactccgtaatgtcagagtgcccataggtttctcatcaaacatcagtcgactagtttcaatgaaagatttgtcggtatctggttataattcacacgactgccatgtcttgctcaccgtgtttcttgcaattgcaataagagccataaaaccggagcatttaaaggttgctatcacaaggttgtgctactttttcaacggggatcctctagagtcgacctgcaggcatgcaagctttgatatcaatgtttttttgagcacgatcaggatgctattcacttcttgttcactcaggtctccgccgagtgatatgattttggcggggtcagagtcatctatctgcaaccagacaaccttgccgtggggacgggtttcagcgtcggcctggttctttcttgccgttcgacttctaaggtatgaactcccctgtcgaaggaggccactaaggccaccatggtagccgaaggatgggaacccttgacaactaccacaccggctgggctaggcatcttgagcttgaggtagttgtgataagagactgcttcaaacttggtcaaagtgcctcagccgaagatggcgttgtaattgtatgggatgtcaacaatgtcgaagagtatctcttcttctctcttgttttcttgtgtgccgaaggtgactttgaggtgggcttgacccaaaacttgcactacttcgcctccaaaccccctgagcgaggttggtgcttgggacaatgccagtgtcggcaaacccatcttggcatatgttccggcgaagatgacatcagccgaactgcctccataaatcaagatatgccgaacttcaataccaaccatctctgcaccaaccgatcctggtgtgggaaaaggactccttcagcatccttcggtctgaaggatatctgttgcgtcaagtatcttgggaccccttcgcctgccgaaacaatactatgcactgctcgaagttgcatctttttttgtcgtttcgacacttgctgtgcatcttggcgctgttcagcctgaggtgcttggttgaggaccgcttcgcgcgttgcctcttcagccctggcttgctgctgcctgagctcttgagtgttgccttgctgccgaatgttccggcattgctcggttgtgtgcgaagagtgtccatgaacggcgtagtataggtctttcctgatctttttgcgaaaaggttgttgctggccgcccgcttgctgagcgtcgaactccttgcgaagggcttgcacttcttctcctgccatcactgctttgccagctcgatcagttctaaatttttccatgtcatcggggcatggttcggccttaaaggctgcccttgattcaccggaggggttgagtgaatcagaacgggtgccgaactagtaacttgggcttgaatttgagcttgtgcgtgagcttgcgcggtggccgtctcggctgcggctgttttgtcatattcggcttgtatctcttgccgccgcttggtatctttttcgcctcatgcataaccatcgattatgcgaaagaggtgttcgagcatccttggttccttgcgggcgatcttcctagtgagttcgcccttaagtaggccggtcgaagtagcgttgatgacagaggcttctgttatgtcttgcacttggcaccgtgcttgcgagaagcggcgcacgtattcccttgtcgattctcctggcctctggctaatgccgagaagaccttattgtgttttcggctcctcataagtgcctcgaaagttaagaacaaagacattgcgcaattgctcccatgagtaaatgctactagtaggcaaattaatataccaagatcgagcaatgccatcaagagcgaggtgaattaccttcgcctttgtattctcgtcaccatgggcagcttcgattgtggactcatagatggagaggaactccttcggatccgtttctcccgaataccttgggacatgagggaacttgaactggggtgggatgggatgattcttgatcccccaactcaacggcaaacccttttcgccatccgacttgatcatgacgccttgctgcggatatggtgtggcgaagggcaaagtcatggcttgcgcgtgtggttgggtcactgtgttcggctgcccggcactgaacggtgatgtttggtgtgccgccatggatgggtcgaacgaaggttgggtccatgtcatggcgacctggttcggcgcttgagccgttccgaagcctggtgtcgttgcctgtggtggaatggctggtgcttgagtggcgttactgaggtcgaactgtggtctttgaccccatagcgaagtccctggaccaggctggttcgacggcagccaactgggtgcaccttgacttgtgttccccttcggttgggccgaaggggttgtacttgaaatgttgtggggttggttgagttgccgaaggaaggcttgaagctgtgcctgcaaggccgaagccccctccgccattgcttatgacatttgacctggtggtgaagggtgtacttgggcagcgaccgggcgaacctgtggttgcacacgaggggtcgggtgtgctgtcgcggccgaaggctgcccggcgaagtacactggcgcttgcattgcttgtggcggaagggcatgaatcggtgcttgcaggtagacttggggtggaatgtagcctgccgaatactggagaattggggccgaagcgaccttggcttgccgggctacttcgtaggcctgctgctgctcttgcatctggcgaagcatgtcttgaaatcgcgtcatattctagcgcatggcctccatgtcagcttcggctagtgcttcaaggttggggttgatttgaacagcaacgagctcggtcgaagtcgtagtctgttgtgacggagcggcttagggcgccaccagttggcttgtcgaaagaatctccgtcctggtctggagcgcccttgccgccgcagctgccttcgccgcatcaaccgtgttcggcactagcccatccgaagcaggaggagccgaaggtggcggttgcggtgcgggtgccgaggccgatggtgccgcacctacttcgacgatgggcgccgaaggctctgctccctctccggtggcaatctcccctcctgcctcactctcctttcgcttagcaactttctccttcgcgaccttcttcggtggcattcgctctcagtggtttcgctcggaggtccccacggtcggcgccagctgttgtcgaagcgacaaatggttgccctcatgagaagggtacctgtatgggcatgtagtgtaattaagatacatgggcccctaaggggccaattggcgaacactggcccactggccaatgggctagagcggctgggatggccccttgggcctccttgcagctggactcgatatggcgaagtcatcctccttcggcatgcacccttcgccatttagtcttcgcccaggatgcatttggacccgcgggacaccagcgtggctcttcacccttcgccgtctttgctccatagtcttcgccag

SEQ ID NO: 9805 - DNA, 1260 bp, Oryza sativa
  Clone ID: PAT_MRT4530_16188C.1
atgacccccacaagacgcgtgaagcgtacaaggataaacttagagatgaaggggctgcggattttgaaaggcaaattgatggatttctgcgtcaagcacatgcttttgcctccccccgaaatcaaagaacctgagccagattaccccttcgatgacctcaagaatgacatatcctttggattgggcaccgacgccacgcaaaaacctgtggtgccaaaaccggggttgggaaaaccttcgagacctcctaagaggaaggtgactgataaggtggaggaacccgagatgcataaggaaaatcctatgccgaaagtgccaccggagattgcagtgccggaggtgcccgtggagattgtagtgccggatgtgcccatggagattacagtggcagaaccagaactgcaacttgtggcattagtcgggatagaaatagaagaagtaccaggattggaatgggacggtacagagccagaaatattggaagacgcttctccgtcgaaagaccccgaggtgcaaaagaccacgatccctgagaaggccactaccagttctgaggtgcctagagtgcttaggagccacgactccaagtccaaagatgagaacaaggagaagttcatggtaaccatcttcagtgggggaccatgggagatgagaaggttacataccttctacatggaggccagcaagaaaggcttgggcaatataacagctcgatcgccggcagattgtttcggcatcgaaggttacgtatggctagatttctcagatctccacagcatatatcgtcgggataagatggatgtcaactttgtcggtgtttggtgcatgatgcaatacatagatgctaagaagaaaaaagaacctatcggcttcttagatccaactcggatctgtaaaacacagcataccgtgaggctagcaccagggtcagacgagctgaagggcaagactccaaaagagatagctgaatacaagaagggcttgcacaaagagaaattgattaccgtcgcatatacataccaatactacaagttcaagggtggagaacagacccgaacaagggagaagctgctattgccaagattagaacgtcaaacaagctttgacgatacatgcatcacaaatgtccagcgtgatctgtgccacttcatctaccatgagtgttgtcatgtgaaaggagatttctttgacccagagggtgccctagcgacaagtgacgaattcaaggatcttcgggagtggaacactgctatgccataa

SEQ ID NO: 9806 - DNA, 3825 bp, Oryza sativa
  Clone ID: PAT_MRT4530_16189C.1
atggcgaagaacaagtggacgggcctgaaaatggaatacttcacagtgaaggtcattatcttcgtgaccattaacgattatccagcaatgtttttagtttcaggtcaaattaaaggtaaaacaggatgtgtgatctgcttgaatggaacgtactataggtatctcccgggttccaacaagcttgtgtacatgcggcaccggcggttcctacgcacaaatcacaagtaccgcaagatgaaggcggagttcgatggtactgaagagactgatcctgcaccgaaacctacatcgggagaaaaggtgtgtgcaatgacagagaaaattgtttgcgagtttggaaaaatgactaagaaaccatcaaaggggacaaagctcaagaaatccgagaagaatatgaaacaaggggatagtaagaagcaagatgatagttcgaagccagatgataaactccctcccccattcaagaagcattccatattttttaagtacctcccgtactggaaagatctggaggttcggcatgccatagacgtcatgcatctagagaagaatgtgtttgacaacatagttggaacattgttggagatgccgaagaagactaaagatggtctgcaatcaaggatggacctagtcgagatgggaatcagggaagagttacaccctcaagaaggagaaaagaatggcaaagtatatcttccaccagcctgtttcacactgacacctgaggagaagaagtcattttgcaactcactccgtgatgtcagagtgcccataggtttctcatcaaacatcagtcgactagtttcaatgaaagatttgtgggtatctggttataattcacacgactgccatgtcttgctcaccatgtttcttgcaattgcaataagggccataaaaccgaagcatttaaaggttgctatcacaaggttgtgctactttttcaacacagtgtcacagaagatggttgcgcttggcccattgtacctccatcaaatgtggtcatacgagcgttacatggcggttctgaagggttacgtccgaaatcgtgcacatccagagggatcaatggttgagggctatagtactgaagaggttgtcgagtgttgtatcgattacctcaaagatggatatgcaattggagtacctgtgccccgacacgagggcaggttgagtggcaggggaacgaaaggaaagaagagattcgtcacccatgatcacaaatcattccaagaagctcacttcagcgtgcttcatcagtttgctatcgttgagccgtacatcgatcaacatatcgaactaatacgagctaacaataaaggtcgcaccaccgacggtgtccatgtggaagcaattgatgaagccggggaaaaacaatcatacttcgggtttattgaagaaatatgggaaatcgactatgggcacacaatgcaattccccatatttaagtgccagtgggtaaaatacccgaacggggtcaatgttgataagtttggtcttactgttgttgacctggcgagtgtgggtcacaaggatgacccttggaagattaagaatgtcgagacatctactcagaagaccgtgaagccttacatgcgcacggacggttgccgaatttttttcgcctccgctgttctccgccaccgcccgcctgcgaccttcactctccgaccatcgtcctccgccgccgccgaccgtcgttgtccgcgcgctgtcaccgagaccgccgccccttgccgccgctccaccacgcgcgagctccacaactctgccaccgctgccgacccctccaccacgcgcgagctatacgccgctcgctccacccccgccggcccctccaccgccaccggcccctctaccgcaccggccaccggcccctccaccgcgcacgcggccgccgctggcccctccaccgccgccggcccctccaccgcgccgttggccgcccctccactgccgccggcagccacctctctctctatctcgctcgcggccgaacggcttcatcggccgatcgtcgtccacgagcgaagacgtcctcggccgaacgacgtcttcggccggtcgtcgtccacggccgaacctcgtcgtcggccgttcgtcgtccatgaccgaagccggtcgtcgtccacggccgaacctcgtcgtcggcccttccttcgtcatccacgaccgaagctcgtcgtcggccgttcgtcgaacacggacaggtttgaaacgatggccgatagtactaaagggactgaagagaagggtttaggggagcaagagcagtcccttgctgttgtggttgctccggaaccaacggtcccaccggaaggtagttccgacagtgacgtagctgacgaagacgaggagtactcgtcgccaagcgatccttgtccaagcccaagcccgaagagaaggaaaaagggcgacagtgaagaaggcgacaaggactacatcccccctaaagaagggacgttgaagaactccccagaagaaattcaaaggagccaaaagtatgcagagttggccaagaagaacaaatttcctcatcgcttaggctccgcgagatatgcaccaaaggtggagcagtggacaaaagaggaggaggaaatgaggaagaaggggcaaccggcaccaatggaggagtggacacagagatcaaggaactgggtaagagctagaactccgaagatcacggatgaaggaaaagtatcgtttgaaaatctggagctacagagcgttgccgataaaatagaaaatttatccagttcacaaaagaaaggatctttcaagcctaaaagggagaaagatgtgctaagtacggcgctgggtactcctgagcatgggggaagggttcgaggtgtgtcgagcaagatgagttggaaggaagggttcaaaaatgacccccacaagaaccgtgaagcgtacaaggataaacttagagacaaaggggctacggagtttgaaaggcaaatgatggatttctgtgtcaagcacatgcttttgccttgccccaaaaccaaagaacctgagccagattaccccttcgatgacctcaaggagaatacaccctgcagattgcacgttcccattagacgctccgggaaaactcttgaggccgctacagccattgctatccttgggagaacatacaatgaagagttcatacccgatgcgtatgccaaggtgcagtcgcaagtggtccacgaagggtttgagtcctacgacattgacttcccgactgcagatggtgtatccgtacttggggatgcggtcgatcttgtaattctctggcacaagaatgacatatcctttggattgggcaccgacgcgactcaaaaacctgtggtgcctaaaccggggttgggaaaacctcagagacctcctaagaggaaggtgactgataaagcggaggaacccgagatgcaaaaggaaaatccagtgccggaagtgccaccgaagattgcattgctggaggcaaccatagagattgcaccgccggaggcagccatggagattccagtgccggatgtgcccatggagattacagtggcagaaccagaggtgcaatttgtggcatcagtcgggtcagaaatagaagaagtaccaagattagaatgggacggtacagagccagaaatatttgaagactcttctcctgcgaaagaccccgaggtgcaagagaccacggtccctgagaaggccactaccagttctgaggtgccacgagtgcttaggagccacaactccaagtccaaagatgagaacaaggagaagttcatggtaaccgtcttcagagggggtaaggaacgtgccaagctcagagatgacgacccctag

SEQ ID NO: 9807 - DNA, 492 bp, Oryza sativa
  Clone ID: PAT_MRT4530_1618C.1
atggcgacggcgcgaggcgagcggtgggcagcggcgcggggacaggcggtgggcggcgtcgccgcctgcctctccatcacggcttgcctcccgcgcggcttcaccgcgctccacgccgtcgacctcccggcgtgcgcgcccccgtctccgggtgctcgcctacttcgggctcgcaccgagctagctcacgccgagcgcgtggcgcctcctcgccagcttcaccgtgctatgccgtcgcaccggtgttgcgccgccgccgctgactgtgctccagcacttcttcacggcgcttgggtgcccgcccagggcttggttcttccgcgccgccctcgactcatgcgagcatggatgctgctgagtttctctgccacatcacgaatcccgctcgatgcccgcgacagcgacagccgcgagctcgacgcctcgccgaggagagcaaagagaatgaggaaccggaggcagaaggatgaggggagtaagcctgtcttgtga

SEQ ID NO: 9808 - DNA, 2005 bp, Oryza sativa
  Clone ID: PAT_MRT4530_16190C.1
ctaatctatgttgttggacttaaaccacatgctgtcaaacactaaagattccatggccggcgccgcgtgggtgccatcctgccctgctttcatcctctttgggcgatgttggtggtggtcttcgctactattgttattctccaacaagaccttcaattgctgttctttacagattgtttggctttgtttgcatccagagaagtcattgtggtggttacaaatatgcttcaacattttccacattgtctttgccaaatttgtgtatttgccgtctgcttgactgcaaaagatatctgcgacagaccaaaggtaggcctcttgctccgttgcttgcttctcgttcttcagcttaaacatatccttctcaaatccattgctgcgatccactccgtcccaatgacgaccaggctttatgccgtagcggtttggaggaggatctacaccacgcttcagccagctgtgactaggtatattttggggaacaatgaagccagattctttcatcttttcatcatctcccaagtcctccagaaggaggtctgtatcattcctcttgacaagatgagccataggatcaccccaccggattctgttttttagcatggtgtcgagctcaggatcatcccttgtccgtgcaaatggcttactcttttcagattcaagctcctgtaatctagcctcagcttctcgcttctgcaccaaccctttaccccattctatatgtatttcctttggtttcgtgtcttcctttgccttcctcatatcttcttcacttattcgttttccttgtttatctcggaatactgcttttgcccctttcccaatcactgagggatcctgtgcagcaaacttgagcctctcatcctccttaatcttcctgatgtcctctttaacttcctctgctgtcatcaacccagctttcctcacctccttcggagccacttccttcctacccttccttggaggtgaaatgtccccatcacccaaagcctgccttttcagtggtggcaatttgtccttgggttcatgagagtcgtgccgcgtccgtctgcgtgggggagagaggtcttcgggctcttctgaatcatgtctcgtgcgcctccgtggtggcgagaggtctttgggttcctcagaatcatgcctcacgcgcctccatggtggcaagaggtctttgggttcttcagaatcatgccgccccttccggcgtggtggagagaggtcctgtggctcctctgagtcatgcctggtacgccttcgtggtggtgaaatgtcctgggattccttggagtcatggcgagagagcctgcgtggaggagaggggtctcgttgctgcctagacttccgcggtggtgacaaatcatcatgccccccagctacctcactaccctttggtgacggcgtgtcttgccgccttcgcctctgcctcggcggcgacagatccttacccgcagcatctctcgggtccggcgagggcgtatcctgccgctgcctccgccgcggaggagacagatccttccttccagcacccccgcgctccggtgagggcgtgtcatttctgcggcggcgaccggttaaaccaccatcggagtcctcgggggcggccacggtgacccacccgcttccgtcctcagcgatagcattgtacggccgcgccgcgcgaatcgcctccaggcggcgcatccgcttgacctcgatgtcctcgtccaccaacggtctctcatccccggacgacgcgggctcctcctcgatctggacgggcttgtgccacgtggggtcctcgtcgacgataagcacacctccgcccacggcggccgcgggcttgggcttcttcttcttcttcttcttggccttgccctgcgcgtcgtcggattggtacctcttgaggtactccttcatggacatggccgcgccggacgtcgaagcgtcctgctgcttcgtcgccatggccggcttctcaccgcctccgccgccgccggcggcggtgagggaaacctactggaagcta

SEQ ID NO: 9809 - DNA, 165 bp, Oryza sativa
  Clone ID: PAT_MRT4530_16191C.1
atgctccagagaaaggcgacatcgctaaagctggttgggaagagaacgccgtggccggagaggccgccgacgcaagagcggagccagtcgcctagcagtccaccatgggagcccccctttttcccgtgcatcaagctgaaagcagtcggctggctgttttgttga

SEQ ID NO: 9810 - DNA, 181 bp, Oryza sativa
  Clone ID: PAT_MRT4530_16192C.1
attcgactcgagggagcgcacacacacacaaccagatctcccccaaatccacccgtaggcacctccgctctaagatgcagatctttgtgaaaaccctgactggccagactatcaccctcgaggtggatccgcctgacaccattgacaacgataaagccaagatccaccacaaggaggacat

SEQ ID NO: 9811 - DNA, 1233 bp, Oryza sativa
  Clone ID: PAT_MRT4530_16193C.1
atggcagcgggggagcagtgcaagacaatgacagagttgaacggcaagcggtcgccggccaccgccaccgtcacgacaacccggcatgtgggtctcagagatatggaaagtcgggaatggatgtatcattggccgaggtttttgtctccatatagaaacgaagtgtctaaatttattggtattgccaaggcacacgctgagaagaacaatatgaggaagataatttgtccatgtgctgactgtaagaatgaaatagcctgggacttcgacgatgcttttaaagtgaaggagcacttagtaactcgtagatttatggacaagtatgaaatatggacacgtcatggcgaagaacaagtggacgggcctgaaattaatgtagttccgacacaagttgaagacatggtgcatgacaatggttctgttgaggacaaaatcgacctagaggaaatgttatgtcatgcagaacccgaggtgctgatggggtcggctagagggttaaataactttgaagctttacagaaggcagcaaaggaagttttgtacgatgagtcgaagggctgtgacagtgagttcacaacactctgggaatacttcacagtgaaggccatcatcttcgtgaccattaacgattatccagcaatgtttttagtttcaggtcaaattaaaggtaaaacaggatgtgtgatctgcttgaatggaacgtactatatgtatctcccgggttccaacaagcttgtgtacatgcggcaccagcggttcctatgcacaaatcacaagtaccgcaagatgaaggcggagttcgatggcactgaagagacagatcctgcacccaaaccaacctcgggagaaaagtacctcccgtactggaaagatctggaggttcgacatgccatagacgtcatgcatctagagaagaatgtgtttgacaacatagttggaacattgttggacatgccgaacaagactaaagatgagcacctcattgttcacatagtgccgcagatggttgcgcttggcccattgtacctccatcaaatgtggtcatacgagcgttacatggcggttttgaagggttacaagattaagaatgtcgagacatctactcagaagatcgtgaagcctcacatgcacacggacggtcgttggcaatggcgggccgagtgcggcggggttaagtgccagccagtccttgagaaggccaccgtagttgttggcagcggcgaggagggatga

SEQ ID NO: 9812 - DNA, 768 bp, Oryza sativa
  Clone ID: PAT_MRT4530_16194C.1
ctcctatagggcgattgcacgaggcagagccggcccggctctctcgccgccgccgccgatccccacctggaagcagcgagccgccgcctcctccccaattcctctccagaatggccggggcgaggagcctgctcctgaggcacctccgcgtggcggtggccccttcctcctcctcaccggcggcgtccctcaggcccgtggtggcgctgcgcgaggccctgtgtgcccggcggtggatgtcgtcggaggaggccaaggggtcgttcctggacaaggccgaggtcaccgagcgcatcgtcaaggtcgtcaggaacttccagaagatcgacgaccccgccaaggtcacaccagatgcacatttcaagaatgatcttggtctagacagtttggacgcagtggaggttgtcatggctttggaagaggaatttggttttgagatacctgacaatgaagctgacaagatcgactccattaaagttgcagttgatttcattgcttcacacccccaagcaaaatgagcaaatcaattgtgttatactcgttaattttctatgttttgttgtcacggagcctgtctaaggtggaagtcatctgctgtccgcatgatgtccacttttgcaatcagcattgtaccaatgctaccgttctgaatattttcttctgcctgtgggtttctggaccaaataatacttgattctgaggcggcagcccgccatcttgtatggagatttcgctggatatcaaaggtttagtttcatgccaaaaaaa

SEQ ID NO: 9813 - DNA, 683 bp, Oryza sativa
  Clone ID: PAT_MRT4530_16195C.1
cccatgataacctgagtatgagggcatcctagtgtatacttttttaccattttgttgggtcatgtgtttacacagattatagatctcagtgtggaaacttggatgtcaagtttcacattatttcaaggtcaaattcagcttggcagcgaagtcagttcatttatggaacaaacatcaccgttgtcagttgccggactattagcttgcttctgctcacacaccagcatagccgcttcttggagtgatttatgcaactcatcgtgcatacttgatctctggaaggtaaacgtgttgccgtttatatgtgtacaaggtcgttttactgccttctcaagtatttgtttaacagcctgcagcatctttggatcgaaggttggtactccaacctgcgaaacagcagccgcgccgaagaagttgcccagcagcgcggcgtccgtagccgacagcccccaaagcaacccggacgcgaagccggcgaggaagctgtcgccggcgccggtgggatcgacctgcacagcggggaacggtgctacgcgcgcctctccaccgtcccagtagagccgacacccgtccctcccctccgtcactatcacgcagcaccgccgcctcgccgtctcccccccgacgtacggcgcctcctccgaggacgccttgaggaacgcccccgcgggaggagccgcgcg

SEQ ID NO: 9814 - DNA, 201 bp, Oryza sativa
  Clone ID: PAT_MRT4530_16196C.1
gggaacaaaaccgccaaaaaggttcaaaaactggggggattttgttttttttgggaccccctatgctattccattggaccatcgctggggggccttgttttccgactcattgaaaaagcctagggggggttgttggggatttttaggggggaaggccccgagcttttctccctaattatttaaaaggcttgggggtggctc

SEQ ID NO: 9815 - DNA, 466 bp, Oryza sativa
  Clone ID: PAT_MRT4530_16197C.1
gtttgcctctccagcatcctccatcccccatttgatgtaggcaggtgatttgcatgcattgaacttgatacccagctgtcgaccatcggttgaggaggaaaacatgcagactgttcattgctcaagaactttgatatctaagggttgcagatatgatgcgctcgaaattgccttcgctagaaacccagcccaatggattagctgggtgtgggaccgccccgagtaagctcagccaatctcatgccaaccctcatgggcggcgttaggacatattcagcacattgtcgagacagcgagattcctatggttggacgagggtactccgtgaggaaagagaccacgccttctgcgaatcatttgtccgctagggaggagctcattctgaaactattgtggatctgggactggacgaccatagacgtcatgcgcatgtcgagctccttcaggagacccatatggtcacccc

SEQ ID NO: 9816 - DNA, 1739 bp, Oryza sativa
  unsure (1)..(1739): unsure at all n locations
  Clone ID: PAT_MRT4530_16198C.1
tttccgacccaacgccccggattgaaatcgggcaggcttccacgcacccggcggcgtcagcctccaccgccgctccccctcacacgcgcgccgccaccacgtgcccctccgccgcggcatctgtaaagccccccttgtcgcctccctcaactcaaccgccgcttttattcccccacctccacctccattccacgcgatgccgtcgcgcctctcctctcctcctcctcctcctcctcctcctcttctcccgcgaccccgactcccccacgcctactacttcttcttctcccccttctcctccatccatggcgccctctcccgccgccgcgatgccactcgcggccgagcccgatgaagtggtggttgaggtggaggaggaggaggagcggggggtgaaggggggaggaggtgttgcggggcttgatgaggtcgaggggctcgtggtggggagctactgccacgacgtgctgctgcggggcgggcgggtggtgggggagacgctggggggtgcggcggcgttcgtgtccaacgtgctcgacgccgcgtcgcccgcgggggcgtcgctggcggtggtgtcgaaggtggggcacgacttcgcctacgccaccgcggcggcgcccgcgcggcacccgcccgtgctctgcgcctcccccacgacgtccttccacgcgcgcttctccgacgacgcggcctcggcgcacgcgcccgaccggcagctccggcgagtccatgcctgcgacccgatctaccccgccgacctccccgaccgccgcttcgcctacggcctcgccgtcggcgtcgccggggaggtgctccccgagacgctcgagcggatgatcaggctctgccgcgcggtgctcgtggacgcgcaggcgctgatccgggccttcgacggcgaggccaagggcggcggcgccgtccgccacgtggcgctggaggccacgccgtacgcgcggctcctcccgcgggtggcgttcctcaaggcgtcctcggaggaggcgccgtacgtcggggtggagacggcgaggcggcggtgctgcgtgatagtgacggaggggagggacgggtgtcggctctactgggacggtggagaggcgcgcgtagcgccgttccccgctgtgcaggtcgatcccaccggcgccggcgacagcttcctcgccggcttcgcgtccgggttgctttgggggctgtcggctacggacgccgcgctgctgggcaacttcttcggcgcggctgctgtttcgcaggttggagtaccaaccttcgatccaaagatgctgcaggttttcactgaaccagtatatagcaacatgcatgagtcagaactgcaaacagacacagaaatagaagagactgcattaggggtcaaataagatgagttgcataaatcactccaagaagcggctatgctggtgtgtgagcagaagcaagctaatagtccggcaactgacaacggtgatgtttgttccataaatgaactgacttcgctgccaagctgaatttgnccttgaaataatgtgaaacttgacatccaagtttccacactgagatctataatctgtgtaaacacatgacccaacaaaatggtaaaaaatatacactaggatgccctcatactcaggttatcatgggaatcgctgagtgcagaattggatatactccgtataagatcagctgatgctctctgttgaattatgtgctctactcgagctttgaaaaaaaaaaaaaaaaaaaaaaaa

SEQ ID NO: 9817 - DNA, 690 bp, Oryza sativa
  Clone ID: PAT_MRT4530_16199C.1
atgagctgctgctgattcaaacttcgcgttcaaaaccttatatgagagagagaagagagtgagaggaggagagggagggagagagagagagagagaggggcttgattcggtggagattgtgattttgcgagggctttcgctgttcttgattccaggagcagggtgtttgatctagaggagataaggacgctgccgttcttggttcgcggcggcgagcgatggggcgcagcctgagcccgctgctccgtcaggagctggacaacctcgacaaggacgccgacagccgccgcaacgccatgaaggcgctcaagtcgtacgccaagcacctggactccaagtccatcccgcatttcctcgccgaggtctccgacaacaaggcggcgccggggctgccctccggcgagttcaccatctcgctctacgaggtcctcgccagggtccacggccggaacatcgtgccgcaggtcggcaacatcatgtccaccatcatgtgcacgctctcctccagcggcggctcgttcccgctgcaccaggcgtgctccaaggtggtgccggccatcgcccgctacggcatcgacccctcgacgcccgacgaggagaaggccggcatcatcgcatccctctgcaagccgctctgcggcgcgctgatggggaaccaggacggcgtagcgtctggcgcggcgctgtgcc

SEQ ID NO: 9818 - DNA, 1482 bp, Oryza sativa
  Clone ID: PAT_MRT4530_1619C.1
atggggagctccggttatttttgtggaaaagaaagaccatacccagaggatcttaaaggtgccaccgttttctccaagatagatcttcgatcagggtatcatcagttgagaatcaaagaggaagatatacctaagacagcttttaccactaggtatgggttgttcgaatgtactgttatgtcttttggacttaccaatgctcctgctttcttcatgaacttgatgaatatggtgtttatggaatatctagacaagttcgtggtggtctttattgatgatattcttatctactcccgaaccaaagaagaacatgaagaacatcttcgccttgcactagagaagctacgagaacatcaactgtatgctaagtttagcaagtgtgaattttggttgtctgaagtgaagttccttggtcacgtcatctcagccggaggagttgccgtcgatcctacgccgtgcaaccttgcgccgccgccgccgccgccgctccagccgtgtgccgccgtcgattcagccgtcgccgtcgctcgggaaggacgtcatcgtggtcgccaagtcgtcgccgtcctcgtccgccgcttcgccatcgtcggagaccgccggagcatcgtcgccgtcgtcaagccgaagaactccgccgtttcctcttcgtcgccggcgccgtccgttgcttctccgccgtcgttttggtcgtcgcgccgccgttcgccggcgagcgtgcgccgcccgagccgtccgctccgccaagccgccgccgccgtcggtgacgtcattgctgacgtcatcaagatgccgcgctacaagcctgagtacttgtttggtgttgagggttttgtccaggagttgcgtactattgaagatatcccatcagtgatgttcgaagctggaggaaggaactacatccatgcatgtcaggaagtggcaaggatcgccataggagagctccgtgatcgctacagtgatcagttggccgacactgagtatcgttaccatcctcgtcaaccgcagggaagtgaccgtggcagttaccttgagactgaaggaattgagaatgatgctaccacaagacatttggttgagatgctatgggctatggatgaaagtcgtgcggagactgtgttagcagctcaagatcgtgaagatcggaatcgtggtaagatttgcgagctagaagacaaggtggatcgtttggagaaggaactagccgcattgaagggagaagcaccgccgcagaaggccaggattcgtcttaccgcaaggaagagagctctatttgtccctcgctatcaattggcgccaaaggtccgtgtggtggagaaagaagttgccccagcagatcctccgatcatcatcataagtagtgatgaagaagaagaatccaagcgcaaccattccaagattgagtgggtagcaactcaagatgatgaagacgagccgaacgagccttcaatcgaccttcgatgctcggaagaacaagagtag

SEQ ID NO: 9819 - DNA, 1986 bp, Oryza sativa
  Clone ID: PAT_MRT4530_161C.1
atggatttcgacaagtccacctccaccaacgcgtccctgaagaagctgcaggacgacggtgccctccctggtcgcgggatcatggagagcgaactaggaggtactgaacccgaacctgtcctgggccgcatggttgcggttgaggattacattctttgtggttttcttcctccgccctccgagtttcttcttcctgtcatgaatttctacggcctttccttgcttcatctgaaccccaattctatcgcattccttagcattttctcctacctttgtgaggcctacattggggtagagtcatttcttgatctctttcgcttttactacgagttgcgctggacggaaccaaaaaagatagagaactcggatccagcctctgttgttcctgaggagcaaccagacaagattctagagtggaccgccaaacccgccctaactccctcccttcagtctttaatcgacattattgatgacctccgagtacgagggttgtcggggtatgaagttgctgccgacttcatcggtttgaatagcgaaaccgtggagcgccgcgtcggtcaagctctccctctaacggatgtcatcggaccgcttgcggatcaccaggcggcggcgtcgttgaaggagggcgtcgccaaggaggtgtccgacattgctgctgctgcaacgacgagtggcagcaatgttccgaagaaggggaggatgttctcctccgtactcgggaaccgtcggaaagcacctactccgtcggccatggatgcatctcccccaccccagcgaaggcaaaggctggtgacgctcggcgaaaaggcggcgcgggcgaaaggctgcgcaagacgggtccagtgcagcctccattgcatcccctgcagcggcctcgacggatgtcgtggtcgtggccagggagcgggagaggacctcctaaagatgagggagctggtgaccggcaacaaaaggcagcgacaaggactcgagcaccgaatgtcagagctcgagaacaacttgtcggagatccgcggctcgctgcggatgacttacactggcctacaccagctcgccggggagtgcggcgtcacgagcaccattacggtgaaccctgacgagttctcgctgacgtcctcactcacggaactagccacggcgatggaggagatcccctgcaagcatgcggccaggatcggcgaggagatgtttaacgggatctacaccggggcgagccacgtcctcgcgtgcatgaggttggcgcaccctaatatcgacctccagaggatcttggatcagggggccgccaatgacacgcgcaagggcgtgatggacgaattcggtgacttgggagatgttgatatcgaggatgtccagcaacgcgggcagcttgagttgccggtagtcgttccggcacttgtgcttaagccgtacgtgccgcgggacgatgtcgatcaaagcctgtccgtggaggcggacatggtgatgacttccttagacctcgagagtgtgttggccgaccgagatcatcgaatccaatattggaggatgaagttcaaggtggccgaactcgagaggactatggtggaagtgaagaaagagcaggccgtggaagccctccgaggtcgcgaggtgtggttcaactcgtacctcaggagctgctgcatggcgatggctggagtctgtagggagctccgagtacctcgcgggaatcccgaggagtcggcggctggatacatctcatggttaaatggggcctgcactcagcttgaagtcatcggcaagcatatcgacgaggccctgaaacaggagtgtcgtcggttgagccgatatgccggagggcacgtgctggcctgtgtccgagatcaccgcccgcagctgcacctcgagttcctccaagaagggttttcacgttctcggaggactcccgcagagatagacaatctggcgaagtcaatggcgccgcttgccgagaaagtctttcaatccatggattggcgttag

SEQ ID NO: 9820 - DNA, 796 bp, Oryza sativa
  unsure (1)..(796): unsure at all n locations
  Clone ID: PAT_MRT4530_16200C.1
tcgcctcgccgccgcagcctcgcctcggcgcccttccctcgcccagctgaagagagagagagagagtgagagattgggagagaaaaagagtaagaaacttacaggtgggatcacctattttttttataaataaattgctgactggactgccacgtaggatcaaaaccaccgcggattgagtcgaggggggtaattcgtccggtttgtatagttggtggtgaaggatgtccggttttgtatttcaggggataattcgaacgaccgcgatagttcgggaggtaattcgtactttttccatagaaaaacttgcgcggtaggaacaacaatcacacatctcacaaaattgttcacatgagatcgaagattccaaattaattctactatcagtagagctatgagaagtgggtgcacgacttcaaatcacagatgcaaaactagcatactgcaggacaacgctatcggctgattgaaaatccaataatatgaataataacatagcattgattgactggctactgcagagcagtgctcatacgaacaaaaatatcaagattttgatttaatgaaaaattaagacacagccacgatgtggctccatgtcagtgttcgtaacaagtttgcaagagaatttatgtatgccagtattggtaaaaaagagaagcttttttttttactanaaaaatagaagcttttggacaaagggaaaaacacatcacaaagccgtcgatcaatagtttgacgaaaaaatactaattacacagattgcatgtaaattacgagacgaatcttttaacct

SEQ ID NO: 9821 - DNA, 594 bp, Oryza sativa
  Clone ID: PAT_MRT4530_16201C.1
ccccgggctgaggcacagctagcacttcctgtgaggggcttgtatgagtatctattgtttatataagcaagaatgcatgataccttgcataaacaacaaccagagattaatgtatagcttgcatatgtggcataatcatttacgctccatcaccgctagcattccctgtgagggacttgtatgtggtatctattctttatataagcaacaatatattatacatgacagtatttctccttgcataaatatcaaccaaaagttaatgtatgatttgcactgttagccagtatgtatgagttattgaggcatataagttatgtatgaccgtacaagcttgtttggtattagtttaattattgcatactgatcttgcttaattattgcaattcccacgcgtgctaatcatttgtgcatatggatattcataccataccacctcctttgttaccccccccccccttttgcagctatttcgtcctgttgtgagctaatttcttactgcatatatccctcccagcagcatacttttttagctactgttatatttgctgacttcacatgttgtaacacatctcatgtagctgtgctcgttga

SEQ ID NO: 9822 - DNA, 1313 bp, Oryza sativa
  Clone ID: PAT_MRT4530_16202C.1
caatctcgaagagcaagggaaatctgaaatttggagagaccaaagatgtgcagcgagcgaacaagaagatcgtgctgaggaaccacgtgacggggttccccaaggagtccgacatggagctcgtcgccgcgacgggcgccgcgccgtccagggtgcccgagggcacggacggcgccgtcctcgtgaagaacctgtacctgtcctgcgacccctacatgcgcggccgcatgtccagccatgacggctcttacgtcgacgctttcgtcgtcggcgaggctatcaccggctatggcgtcgggaaggtggtggactcgagccacccggggttcaaagccggcgacctcgtgtggggaatgacgggatgggaggagtacagcctcatcaaggatcccagcagggccctcttcgccatccgccatcccgacctgccgctctcctactacaccggcctcctcggcatggcgggcttcacggcgtacgtcgggttccacgagatatgcgcgccaagggaaggcgagagggtgtacgtctccgccgcgtcgggcgccgtggggcagctggtgggacagttcgccaagctcatgggctgctacgtcgtcgggagcgccggctccgacgacaaggtgaggctgctcagggagaagttcggcttcgacgacgccttcaactacaagaaggagagtgacctgagcgcggccctgaagcggtgcttcccggaagggatcgacatctacttcgagaacgtgggcggcgcgatgctggacgccgtgctgctcaacatgcgggtgcgcggccgcgtcgcggcctgtgggatgatctcgcagtataacctggagcaccccgaccccgtccacaacctgacggccatcgtcacgaagcggctccggatcgaagggttcatcgtgtccgaccactacgccaggtacagggagtacgaggagaaggccgcgcggtatgtgaaggaggggaagatcgcgtacgtggaggacgtcgccgaagggctggagaacgcgccggccgcgctcatcgggctcttctccggccgcaacgtcggcaagcaggtggtcgtcgtcgccagggagtaaccgcgagatgtgtagttaaacgtgtagcggtatggttacacttcactagtgctgtgcattgtcctgatggctgatgctgtgtttagatgtgtcaagcttagctgaatgcgttggattttgtatcttgaacatcaataacggtgtgttttaacaagtgtttagttgttttgaatacacagtaagacaagattaaaaaaaaaaaaaaaaaacagagcggcccctcgttcc

SEQ ID NO: 9823 - DNA, 241 bp, Oryza sativa
  unsure (1)..(241): unsure at all n locations
  Clone ID: PAT_MRT4530_16203C.1
ggagaacgaagacggtgtgcgtnaccggcgccgggggcttcgtggcgtcgtggctcgtcaagctcctnnnctcccgcggctgntacaccntccatggnaccgtccgtaatccanagattttaatatttacggcgttctgctcttgttcttgattgattgattggtgcgcgtgtnctggcgattttttgcgaaggcgacgncaagaacgcccacctgatgtctctngacggcgccgcggaga

SEQ ID NO: 9824 - DNA, 1067 bp, Oryza sativa
  Clone ID: PAT_MRT4530_16204C.1
gcgcccacgcgtccgcggacgcgtgggggccggaggaggaggtcgccggcgagacggggagctcgcggatccggagctgacgcccgccgccgccgccgccgcagcagtagcagcgctcgcccgggaaggcgcctcgtcgccaccaggggggggcgccgctagtctgtcaatggcgacgagatgagatgagaggagagcgtgtatcaaaccatgcgacgacactgtgttggcttgtttggaatgtctgaatttctactgatctatacggtcgagcacctcttcttcgcccaactctacgacgaccgcaagcagcgggaggcatgcatgtcgatgtccagggcggagcacgcgcacgagtcgtacgtggactacctcaagcccatcatcgccgacgtgcccagcctgagggagttgctggagcggataccggcgccagaggtggagcgcctccggacggggtgcggctccggaaagaagagaggagcgagaagaagataggagcgaggatgaggaagaagagagaaaagaagggagctgacatgtggggccacgttttttattatttttctgggattgaattgcacctgactaatagcctgctattgtacctgctcttatatctgtcaatccataactctaagagcagattggctatagatgaattggagccagtagttggctatactattgaacttgttctaagaggaggtagggttactgccaccgcacggtttaacggttaccgcggtaatcacgcggttaccgtgaggattaagctttctatcgatagtggattggtcagaatctgtcaacatcagcctgatcacattcaggttgttgagggtgatgctaccatggaaagggtggacgatgacgaagacggaatggctgctcgagagtcaatcttttttacaggatggaatcaaaattcagttccaggcggcgtcttgaacatcttcatctgcgttgctttgatcttaatatctcttgtcctagtcgcgatggcattaaaggagcttgaaaatgatagtactcctacatgtttcgaacagttgtcgtttggctga

SEQ ID NO: 9825 - DNA, 1184 bp, Oryza sativa
  Clone ID: PAT_MRT4530_16205C.1
tctcctacttaccgcagccatggcggaggacgccccagcaacgtcgctgccgccgccgccgaggggagccagcacgcgtcggctgtcgcggagggaggctccgccgccgctcccgcggcactagccaccaaggccgcggaggcgctgctcccgtcgccggcaaagctgcgcggcggcaaggacggcggcggcgggaccttctccctctctcgagaagcgcggctagggcaccggcgggacctgagcaaagcggacgacggcgacagtgtccggcgccatctgggccggatgggaggcggcgtgggaggcggcgaccgcgaccgttggtgggagggacgacggatccggccactctggcggcggatccagtccccctggatggctgcggccggcgggcggaggtggccgacgccgaggaggtttgtggcggaaggcagtggtgacggcgaccgacggagtcgagagggcggtgacagcagtcgacggagacgcgtaggcggcggcagcagctggtcggcgggagccgcacgacagctgggcgtctgccttcccccgggcaagatgcggtcccctccaccggatttggggcgagagcatcatgcttcggtggacgttctagtgccgcatcgttttggacggcgggtgcactgtggcggatgggtcaacagcacggtgcggagggtggcatggcgccggcgaagcggtctggtggtccgaggtgactgtcagggggagccacggtcctctcgacgttcaccttcctagacatatgtcctcttgcgacggcgactttgtcggcaaaagttggccacgtcgggcaggctagtgtgggggagagggcatccattcttctctctcaccctctccccatccaacccaactgcgtggatggagccggtgtgtgtcgaggttcgagcttccccatggcgattgactggcggcgtggcgccggtgcggtggccgtgcgtcgaaggttttcgctggtggtggctgcggagcgtgtaggagttcagttcttgggagagacaaattttgggcgaaagctctgccttcgggccggcaacaacgatgcctgtgggtgccgttttttcctcttggggtgttgccgcttttcttgtctctcccaattactttcttcatgtgaaaaccttgtcctggccctctgggacaggcgacagcggcac

SEQ ID NO: 9826 - DNA, 357 bp, Oryza sativa
  Clone ID: PAT_MRT4530_16206C.1
atgtggcggatccggctccgccggaggtggatctggccctatcgcggccagatcaggaggggcgtgccgctcttggcaggaggcggcgtgggaggcggcgaccgcgaccgttggtgggagggacgacggatccggccactctggcggcggatccagtccccctggatggctgcggccggcgggcggaggtggccgacgccgaggaggtttgtggcggaaggcagtggtgacggcgaccgacggagtcgagagggcggtgacagcagtcgacggagacgcggcacggtggctgtgctggcggcggggtgggggctggtggcggggctgagtggtggcggcggtggagcctggtggtga

SEQ ID NO: 9827 - DNA, 1176 bp, Oryza sativa
  Clone ID: PAT_MRT4530_16207C.1
atgtggcggatccggctccgccggaggtggatctggccctatcgcggccagatcaggaggggcgtgccgctcttggcaggaggcggcgtgggaggcggcgaccgcgaccgttggtgggagggacgacggatccggccactctggcggcggatccagtccccctggatggctgcggccggcgggcggaggtggccgacgccgaggaggtttgtggcggaaggcagtggtgacggcgaccgacggagtcgagagggcggtgacagcagtcgacggagacgcgtaggcggcggcagcagctggtcggcgggaccggcgacggcgtgcatggcgcggcgcgcgcgagatccggtggtgctggaggcggggtgggagatggtggcagggcacggtggctgtgctggcggcggggtgggggctggtggcggggctgagtggtggcggcggtggagcctggtggtgatggcggcagcggagcccaagctgcggtgggcagccaacgccgcacgacagctgggcgtctgccttcccccgggcaagatgcggtcccctccaccggatttggggcgagagcatcatgcttcggtggacgttctagtgccgcatcgttttggacggcgggtgcactgtggcggatgggtcaacagcacggtgcggagggtggcatggcgccggcgaagcggtctggtggtccgaggtgacacggacaacggattcgtggcggagccagcggttactctgtcagggggagccacggtcctctcgacgttcaccttcctagacatatgtcctcttgcgacggcgactttgtcggcaaaagttggccacgtcgggcaggctagtgtgggggagagggcatccattcttctctctcaccctctccccatccaacccaactgcgtggatggagccggtgtgtgtcgaggttcgagcttccccatggcgattgactggcggcgtggcgccggtgcggtggccgtgcgtcgaaggttttcgctggtggtggctgcggagcgtgtaggagttcagttcttgggagagacaaattttgggcgaaagctctgccttcgggccggcaacaacgatgcctgcgacagcggcacctttggtgtcgtacccttttcgaaggtgtcgtctcgaagaccttcagtttcgctcgtgcagtgggttttgttgtag

SEQ ID NO: 9828 - DNA, 207 bp, Oryza sativa
  Clone ID: PAT_MRT4530_16208C.1
atgggccacccgtgccttcgggccggcccggcacgacccgacagctggtgggccgtgcctgagcgggaggcgcagcccatgggccaaagtgccgatcgggccatgccggcccgatggctggtgggccgtgcctgggccgagccgtgccgggcaggccttttggccatctataaagcaagcaaggacactggtgttgtggtgccaaat

SEQ ID NO: 9829 - DNA, 285 bp, Oryza sativa
  Clone ID: PAT_MRT4530_16209C.1
atgggccaccgctatcccatggcggatccacttagttcgaggttgctcccgccatccgaggccaccgctatcacacccaccgtcttcggactgggtagatcttccactcctatgggcactggcggcggatctgcccagtccgagaccgccactcccgtcatccttggactgggcggatctatcactcctgtgggtgctgacggtgataagttatcattgtctcttaaggagatgagttatcgtttcgagctcctcgtcattaccgacatcctcttcgcctcctag

SEQ ID NO: 9830 - DNA, 624 bp, Oryza sativa
  Clone ID: PAT_MRT4530_1620C.1
atggagccgagatctccgcggccgattcctccccctccggccgctttctccccctcccggtgctatataattgttccccgtgcctctctcctccgtttccgccgctcgccgctcgctctccccgtcggattcgtgctcgcgccgtcgtcctctctctccaccgtcgccgccgagcttcggttcgccgtcgtcgtcgcctcggacttcctcccgtctcggcgtcacctccttcggcttcgccgcgtcgtcgtcgacctcgtccgctcctccgtttcgcccgccgaccgccggagcaccgtcgtcctcgccgtcccgagccgcgccgccgtcttcctccgctccggtcgtcgtttccgccgtcctcgtcgacccggggtgagccgaggaccgctcctttcgcttcccccttccctcctctctctcgggcgccgctccgccgcgccgttggtcgccggcggcgaccatcggggcgtgggtgcgccgccttccgtcggccgtgccggcgaggccgccttcgggcgcgccccgcggctgccagacgctgcagcttcggaagattcgctcttcgtggaagtagaagccgacgtttgggaaagcgagcaaggcaagtcacatcatccttga

SEQ ID NO: 9831 - DNA, 1449 bp, Oryza sativa
  Clone ID: PAT_MRT4530_16210C.1
atggccgatagaactaaagggactgaagagaagggtttaggggagcaagagcagtcccttgctgttgtggttgctctggaaccaacggtcccaccggaaggtagttccgacagcgacgtagctgacgaagacgaggagtactcgtcgccaagcgatccttgtccaagcccaagcccaaagagaagaaaaaagggcaacggtgaagaaggcgacaaggactacattccccctaaagaaggggaaacggcgccacggcgatcaaaacggcagccgaagaaaaaagttccgtcgaaagatgacgacgtaccagctaacacaaccggcacaaagaaaagcgaacggtcagcaaaagcgaagaaaaggaagggcgagagaagcgtgaatagaaaggatgaagggttccatgttgttacccatgtttcgcctaaaggagagccgctcgcccctaagacggcacgtgcgaaattcatttcacagtgtggcataatagtaagggaaaagatccccatcacggtcaaggactgtcattatgtatcgaatggggataaggaagtcctatggaaagagttgaagaaaatcttccagttcccggatggatcagaggcagcagtgaggaattgtgcactgcaaacaatggccaagtcttggtgtggttggaaaaccaccttgaacaagaaatttgtgaagacgggacgcacaccattttcgacgtatgccaacataaccccgaatcagtggaacgactttctgacgttgaagaactcctcggaagaaattcgaaggagccaaaagtatgcagagttggccaagaagaacaaatttcctcatcgcttaggctccgcgggatacgcaccaaaggtggagcagtggacaaaagaggaggaggaaatgaggaagaaggggcaaccggtaccaatggaggagtggacacagagatcaaggaactggttcacaaaaaaaagatctttcaagcctaaaagggagaaagatgtgctaagtacagcactgggtactcctgagcatgggggaagagttcgaggtatgttgagcaagatgagttggaaggaagggttcaaaaatgacccccacaagaagcgtgaagcgtacaaggataaacttagagacgaaggggctgcggagtttgaaaggcaaatgatggatttctgcgtcaagcacatgcttttgcctcaccccgaaaccaaagaacctgagccagattaccccttcaatgacctcaaggagaatacaccctgtagattgcacgttcccagattagaatgtcgaacaagctttgacgataaaggtatcacaaatgtccagcgtgatctttgccacttcatccaccatgagtgttgtcgtgtgaaaggacatttctttgacccagagggtgccctagcagcaagtgacgaattcaaggatcttcaggagtggaacactgctatgccataa

SEQ ID NO: 9832 - DNA, 5061 bp, Oryza sativa
  Clone ID: PAT_MRT4530_16211C.1
atggcggaggcggccaccggtgcaactgacacgtcactgccgccgccgccgccgcacgtcgtcctgatggccagccccggcgccggccacctcatcccgctggccgagttggcgaggcggctcgtgtccgaccacggcttcgcggtcaccgtcgtcacgatcgccagcctctccgacccggccaccgacgccgccgtgctctcctcgctgccggcctccgtggccaccgccgtgctcccgcccgtcgccctcgacgacctcccggcggacatcggcttcggctccgtgatgttcgagctcgtccgccgctccgtcccgcacctccgcccgctcgtcgtcggctcccccgccgccgcgatcgtgtgcgacttcttcggcacgccggccctggcgctcgccgctgagctcggcgtgcccgggtacgtgttcttcccgaccagcatcagcttcatctccgtcgtgcgcagcgtcgtggagctccacgacggcgccgccgccggcgagtaccgtgacctcccggacccgctcgtgctccccggatgcgcgccgctccgccacggcgacatccccgacgggttccgggattctgccgatccggtctacgcctacgtgctcgaggaggggcggcgatacggcggcgccgacggcttcttggtgaacagtttcccggagatggagccgggcgccgcggaagcgttcaggcgagacggggagaacggcgcgttcccgccggtgtacctcgtcgggccgttcgtccggccaaggtccgacgaggacgccgacgagtcggcgtgcttggagtggctggaccgccagccggcggggtcggtggtgtacgtctccttcggctccggcggcgcgctgtccgtggagcagacgcgcgagctcgccgccgggctggagatgagcggccacaggttcctctgggtggtgcgcatgccaagaaagggcgggctcctttcctccatgggcgccagctacggcaacccgatggacttcctccccgagggcttcgtggagaggacgaacgggcggggcctcgccgtggcgtcgtgggcgccgcaggtgcgcgtgctggcgcacccggcgacggcggcgttcgtgtcgcactgcgggtggaactcggcgctggagagcgtgtcctccggcgtgccgatgatcgcgtggccgctgcacgccgagcagaagatgaacgcggccatcctgacggaggtagccggggtggcgctaccgctaagtccggtggcgcccggcggcgtggtgtcgcgggaggaggtggcggcggcggtgaaggagctcatggatccaggggagaaggggagcgccgcgcgtcgccgggcgagggagctgcaggcggcggcggcggcgagggcgtggtcgccggacggggcgtcgcgccgcgcgctcgaggaggtggccggcaaagatatggaaagtcgggaatggatgtatcattggccgaggtttttgtctacatatagaaacgaagtggctaaatttattggtattgctaaggcacaccctgagaagaacaatatgaggaagataatttgtccatgtgctgactgtaagaatgaaatagcctgggactttgacgatgcttttaaagtgaaggagcacttagtaactcgtggatttatggacaagtacgaaatatggacacgtcatggtgaagaacaagtggacgggcctgaaaatgtagttccgacacaagttgaagacatggtgcatgacgatggttctgttgaggacaaaatcgacctagaggaaatgttacgtcatgcagaacccgagggaccccgtcagtctggtattgatattgacgtgtttcttaaaccattgttggaagatatggctgatttatggaaagagggattgaaagtgtgggacgagtacttaagggaatacttcacagtgaaggccatcatcttcatgaccattaacgattatccaacaatgttttcagtttcaggtcaaattaaaggtaaaacaggatgtgtgatctgcttgaatggaacgtactataggtatctcccgggttacaacaagcttgtgtacatgcggcaccggcggttcctacgcacaaatcacaagtaccgcaagatgaaggcagagttcgatggtactgaagagactgatcctgcaccaaaacctacatcgggagaaaaggtgtgtgcaatgacagagaaaattgtttgcgagtttggaaaaatgactaagaaaccatcaaaggggacaaagcgcaagaaacctgagaagaaaacgaagggaggggatagtaagaagcaagatgacagttcgaagccagatgataaactccctcccccattcaataagcattccatattttttaagtacctcccgtactggaaagatctggaggttcagcatgccatagacgtcatgcatctagagaagaatgtgtttgacaacatagttggaacattgttggacatgccgaagaagactaaagatggtctgcaatcaaggatgaacctagtcgagatgggaatcagggaagagttacaccctcaagaaggagaaaagaatggcaaaatggttgcgcttggcccattgtacctccatcaaatgtggtcatacgagcgttacatggcggttctgaagggttacgtccgaaatcgtgcacatccagtgttatcaatggttgagggttatagtactgaagaggttgtcgacggtgtccgtgtggaggcaattgatgaagccgggaaaaaacaatcatacttcgggtttattgaagaaatatgggaaatcgactatgggcacacaatgcaattccctatatttaagtgccagtgggtaaaatacccgaacggggtcaatgttgataagttcggttttactgttgttgacctggcgagtgtgggtcacaaggatgacccttggaagattaagaatgtcgagacatctactcaaaagaccgtgaagccttacatgcgcacggacggctgccgaaattttttgctgccgcacgcctccgccgtcctccgccgccgcccgcctgcgaccttcactctccgaacgtcgtcctccgccgccgccgaccgtcgtcgtccaggcgctgtcaccgagaccaccgccccttgctgccgctccaccgcgcgcgacctccaccactctgccgccgccgccgccgacccctccaccgcgcgcccgctccaccgccgccagctcctccaccgccaccagctcctccaccgccaccggcccctccaccgcgcgcgcggccaccggtggcccctacactgccgccagcccctctaccgcgcgcacggcatgtgggtgcataggtttgaaacgatggccgatagtactaaagggactgaagagaagggttcaggggagcaggagcagtcccttgctgttgtggttgctccggaaccaacggtcgcaccggaaggtagttccgacagcgacgtaggtgacgaagacgaggagtactcgtcgccaagcgatccttgtccaagcccaagcccgaagagaaggaaaaagggcgacggtgaagaaggcaacaaggactacattccccctaaagaagggtgtggcataatattaagggaaaagatccccatcacggtcaaggactgggatcatgtatcaaatggggataaggaagtcctatggaaagagttgaagaaaatcttccagttcccggatggatcagaggcagcaccgcaagtggttcacgaagggtttgagtcctacgacattgacttcccgactgcagatggtgtatccgtacttggggatgcggtcgatcttgtaattctctggcacaagaatgacatatcctttggattgggcaccgacgccatgcaaaaacctgtggtgcctaaaccggggttgggaaaaccttcgaggcctcctaagaggaaggtgactgataaggcggaggaaccagagatgcaaaaggaaaatccagtgctggaagtgccacttgagattacattgccggaggcagccatggagattgcaccgccggaggcagccatggagattccagtgccggatgtgcccatggagattacagtggcagaaccagaggtgagccatgactccaagtccaaagatgagaacaaggagaagttcatggtaaccgtctttagagggggtaaggaacgtgccaagctcagagatgacgacccccagaaggctgctgaactagccgggccaacatacttcgcaaccgatgattgcccggaaaagtacgaacatgggaaagcactcttgctggaatgggcactgaaagaagcaccatgggagatgagaaggttacataacttctatatggaggccagcaaaaaaggcttgggcaatataacagctcgatcaccggcagattgtttcggcaaagaaggttacgtatggctagatttctcagatctccacgccatatatcgtcaggataagatggacgtcaactacgttggtatttggtgcatgatgcattacatggatgctaagaagaaaaaagaacccatcggcttcttggatccaactcggatctgccaaacacagcataccgtgaggctagcaccagggtctgaccagctgaagggcaagaatccaaaagagatagcagaatacaagaagggcttgcacaaggagaaattgattactgtcgcacagtacattggacgagccttcttgcactttcaaaataagagagtcgtcatggccgcttataattttaaggttaatggacggtacaggactaacgcggaggatgaatcacaaatgtccagcgtgatctgtgccacttcatccaccattagtgctgtcatacgaccgatggagccgttggcgagcaccacggcggaggataaccggccgcacgtcgtgctgctggcgagccccggcgccggccacctcatcccgatggccgagctggcgcggcggctcgccgaccaccacggcgtcgcgcccacgctcgtcacgctcgccggcctctccgaaccgacgccgccgtgctctcctcgctgccggcctccgtggccaccgccgttctcccgcccccggcggacgtcggcggctgtttga

SEQ ID NO: 9833 - DNA, 2168 bp, Oryza sativa
  Clone ID: PAT_MRT4530_16212C.1
tgaagatcgaaaccgatgcagctcaacccgaaagcaagaactcgtcaaaataaaactaaagcaaaaaggcccgactcagacccagccgatccaatttgtagccgatctggactcccccaaggggcatcgcctcaaagccaactgccgcaattcgacccaagcaccgcggtccaagcacccatgaccttcgcacaagccgtgccctctggctacggagcgaaccagccaatggtgtttggcacggggcatcaatcaacagctgctgctcaacctcatttgcgcccccgtacccgcagctaagctggccttctcagcaaggcgtcatgatcaagtcggatggcgaaaagggtttgccgttgagttgggggatcaagaatcatcccatcccaccccagttcaagttccctcatgtcccaaggtattcgggagaaacggatccgaaggagttcctctccatctatgagtccacaatcgaagctgcccatggtgacgagaatacaaaggcgaaggtaatagcatttactcatgggagcaattgcgcaatgtctttgttcttaactttcgaggcacttatgaggagccgaaaacacaataaggtcttctcggcattagccagaggccaggagaatcgacaagggaatacgtgcgccgcttctcgcaagcacggtgccaagtgcaagacataacagaagcctctgtcatcaacgctacttcgaccggcctacttaagggcgaactcactaggaagatcgcccgcaaggaaccaaggatgctcgaacacctctttcgcataatcgatggttatgcatgaggcgaaaaagataccaagcggcggcaagagatacaagccgaatatgacaaaacagctcacgcacaagctcaaattcaagcccaagttactagttcggcacccgttctgattcactcaacccctccggtgaatcaagggcagcctttaaggccgaaccatgccccgatgacatggaaaaatttagaactgatcgagctggcaaagcagtgatggcaggagaagaagtgcaagcccttcgcaaggagttcgacgctcagcaagcgggcggccagcaacaacaaggcaacactcaagagctcaggcagcagcaagccagggctgaagaggcaacgcgcgaagcggtcctcaaccaagcacctcaggctgaacagcgccaagatgcacagtgaagagtgatctaggtcatcacaagatcttatccccccctcgcaagtgtcgaaacgacaaaaaaagatgcaacttcgagcagtgcatagtattgtttcggcaggcgaaggggtcccaagatacttgacgcaacagatatccttcagaccgaaggatgctgaaggagtccttttcccacaccaggatcggttggtgcagagatggttggtattgaagttcggcatatcttgatttatggaggcagttcggctgatgtcatcttcgccggaacatatgccaagatgggtttgccgacactggcattgtcccaagcaccaacctcgctcaggggcttcggcacacaagaaaacaagagagaagaagagatactcttcgacattgttgacatcccatacaattacaacgccatcttcggctgaggcactttgaccaagtttgaagcagtctcttatcacaactacctcaagctcaagatgcctagcccagccggtgtggtagttgtcaagggttcccatccttcggctaccatggtggccttagtggcctccttcgacaggggagttcataccttagaagtcgaacggcaagaaagaaccaggccgacgctgaaacccgtccccacggcaaggttgtctggttgcagatagatgactctgaccccgccaaaatcatatcactcggcggagacctgagtgaacaagaagtgaatagcatccaggaaatctatgtttatgccgctaattaagatgctacaaagactcccagatgttggattttgcagagcggcgattttcttttcgtgttttgcagtggtggtcaaatctacaggaagaacaaatctacagcgacgtggaaggggatgaaagtgctgctgcgtcaacaacatgattcaccaattgagaagttggctattgtaggtgaagattttaaggcttccaagaagcaggctatacgttcttcgtggagtgca

SEQ ID NO: 9834 - DNA, 552 bp, Oryza sativa
  Clone ID: PAT_MRT4530_16213C.1
atggctcacaccgttggagacgcctccatcttcctcccaaatcagatgcgatcccaccaactatctttctctagcctcgcgtccactgcctccccgactatccctctaaagcccaacgtaactccaccatctctcaaccccaagacgctaatacatgtcttctgcgccctagcaacaaggaagatgaaccaatcattgaggggctcgcatagtcactgttggatcctacggcagggtggtttgatgcgaattgggaaggacagcgactttgaccgagcgccgatcagcggggtcgttgggttaggtaatccagtacagtacaggcctctggttcgggaaacatttcccgttccgtgcgttggcgtccgaggcgaaatcccacgctgccactgcagccgtcggatgcatgacgtgatgcatccgacgcacgtagtgacaccgaagcagaaccaatcacggctgggcagctacaccttccccaatttggatgcttcccacacacggctgtcttcgcatcaattaatcgctgacaaaggcatctctgtagcctag

SEQ ID NO: 9835 - DNA, 4263 bp, Oryza sativa
  Clone ID: PAT_MRT4530_16214C.1
atggcaggattgcgtaagggaatacgagaacatcaacttctacaccttcgacgagatatcacgacttctccacgtgatgcatatgaggtacatgactataattttgaacaagttgcatctaagttaccattctatgatgggaagtacgattctgttgcatacattgattgggagctagcagtagacaatgaatttgatatatatgatttttctgatactcaaatgattaaggctgctagtaataagtttacctcttctgcattattttggtggacttatgttagtaataaacctgaaacttgggatgaattgaaaaccatgatgagaaagcgctctgtgacatcttattacaaatgtactcttcgggagaaattagaacatctgaaacaaggtgatagaactgttagggagtacattcatgaatttaaggtctgtatcatctacagtggtctcaaagagtgcaatgaaaatacaatgcgtagatttttcaatgggcttaattctgaaattcaggttttgcttgataatgtgacatataatcatattgggcacctattcatgcttgctcgtagcattgagagtcagatcatatcaaaggcgaggatgcatgaccaatgtgatttatctcctatttctgaatccccaatatacttatgtaatgatgatgtgcaaacattggaggagcaatcttttgtctcccctgttactaacgttttgcaggaagatcagcacatccaagaaaaggagaatggtatacttgagaagaaagaggatgaagcacctgcgatgtctaaagaaagttcgcaaggtaaattaaatggtgctgagagaaatgaaggaatagggttgatctgcaccgacaagatcaataacccacggagaggtgtatcgatcgctaaggcgcaacacaacgtctcagatatggaaagtcgggaatggatgtatcattggccgaggtttttgtctccatatagaaacgaagtgtctaaatttattgctattgccaaggcacacgctgagaagaacaatatgaggaagataatttgtccatgtgctgactgtaagaatgaaatagcctgggacttcgacgatgcttttaaagtgaaggagcgcttagtaactcgtggatttatggacaagtatgaaatatggacacgtcatggcgaagaacaagtggacgggcctgaaaatgtagttccgacacaagttgaagacatggtgcatgacgatggttctgttgaggacaaaatcgacctagaggaaatgttacgtcatgcagaacccgaggtgctgatggggtcggctagagctttacagaaggcagctaaggaagttttgtacgatgagtcaaagggctgtgacagtgagttcacaacactacggtcagttcttgaacttatgaggttaaaggcgaaacatggatggtctgataccagtttcgacagtctgttagaacttctgcagaaaatgctcctgaggcctaactcactaccatccagcacatatcaagcgaagaaactcatatgtcccctttcacttggtgtggaaaagattcatgtgtgcgttaatcactgcatactgtacaggaaagagtacgcttcttttgatgaatgtccaacatgcaatgctagccagtacaaatcgaatagcaatactggcctagaaccgtctgacacaactgagggaagacagagaaaaatcccgcagcttgtgatgtggtaccttcctgtcaaagaccgcattaaacggatatactcaaacccaagagatgcggaactaatgtgctggcatgaagaagggcacaagaaggatgggatgattcgacacccggcagatgctcgtcagtggataaactttgatgctcagtatagagagtttgctaaagacccacggaacattagatttgccctgagtattgatggaggaccccgtcaatctggtattgatattgacgtatttcttgaaccattgttggaagatattgctgatttatggaaagagggattgaaagtgtgggacgagtacttaagggaatacttcacgatgaaggccatcatcttcgtgaccattaacgattatccagcaatgttttcagtttcaggtcaaattaaaggtaaaacaggatgtgtgatctgcttgaatggaacatactattggtatctcccgggttccaacaagcttgtgtacatgcggcaccggcggttcctacgcacaaatcacaagtaccgcaagatgaaggcggagttcgagggcactgaagagattgatcctgcaccaaaacctacatcgggggaaaaaaaaccatcaaaggggacaaagcgcaagaaacccgagaagactatgtgggatagtaagaagcaagatgatagttcgaagtcagatgataaactcccttccccattcaaaaagcattccatattctttaagtacctcccgtactggaaagatctggaggttcggcatgccatagacgtcatgcatctagagaagaatgtgtttgataacatagttggaacattgttagacatgccgaagaagactaaagatggtctgcaatcaaggatggacatagtcgagatgggaatcagggaagagttacaccctcaagaaggagagaagaatggcaaaatggttgcgcttggcccactgtacctacatcaaatgtggtcatacgagcgttacatggcggttttgaagggttacgtccgaaatcgtgcacatccagagggatcaatggttgagggttatagtactggagaggttgtcgagtgctgtatcgattacctcaaagatggatatgcaattggagtacctgtgccccgacacgagggcagattgagtggtaggggaacgataggaaagaagagattcgtcacccatgatcacaaatcattccaagaagctcacttcagtgtccttcatcagtttgctatcgttgagccttacatcgatcaacatatcgagctaatacgagctaacaataagggtcgcaccaccgagtggataatgaaagaacacaagcgtctcttcatagattggttgagagacctagacttacctaagggacaaactacagatgaaataactatgaaacggttggcttgtggtccatcaactacagtaaattcttggcaaggatatgacattaatggatactcgtttagtacaagagcccgagataataaaacctgtacgcaaaacatcggtgtccgtgtggaggcaattgatgaagccagggaaaaacaatcatacttcgggtttattgaagaaatatgggaaatcgactatgggcacacaatgcaattccccatatttaagtgccagtggcaaaaatacccgaacggggtcaatgttgataagttcggtcttattgttgttgacctggcgagtgtgggtcacaaggatgacccttgggtactcgccaatcgcgtggcacaagtgttttatgtgaaagtcccttcaaatttgaagaaagatatagtgctacccgggaaacaaaagatattgggagtggatggggttgaagatgtcgaagattacaatcaatacgatagtatgacactttatagtcagtttgtacagaagattaagaatgtcgagacatctactcagaagaccgtgaagccttacatgcgcatggacgatggtgtatccttacttagggatgcggtggatcttgtaattctctggcacaagaatgacatatcctttggattgggcaccgatgccacgcaaaaacctgtggtgccaaaaccggagttgggaaaacctccgagacctcctaagaagaaggtgactgataaggcggaggatcccgagatgcataaggaaaatccagtgccggaagtgccaccagagattgaagtgctggaggtgcccatggagattccagtgctggatgtccaaatggagattaaagtggctgaattagaggtgcaatttgtggcatcagtagggacagaaatagaagaagtaccaggattggaatggaacggtacagagtcagaaatatttgaaaacccttctcctacgaaagaccccgaggtgcaagacaccacggttcctgagaaggccactaccagttctgaggtgcctagagtgcttaggagccacgactccaagtccaaagatgagaacaaggagaagttcatagtaaccgtcttcagagggggtaaggaacgtgccaagctcagagatgatgacccccagaaggccgctgaactagccgggccaacatactatgttggtgtttggtgcatgtga

SEQ ID NO: 9836 - DNA, 159 bp, Oryza sativa
  Clone ID: PAT_MRT4530_16215C.1
atggcgtccacacccagcatgaacccctctacccttctacccttaagaggggcccctgaaaacagcgtgaagacgggggggagattggagaagattgtgctacaaaagtggcagcttcactttgtgtcgctggaggaggcatggcaccctggggtctaa

SEQ ID NO: 9837 - DNA, 6610 bp, Oryza sativa
  Clone ID: PAT_MRT4530_16216C.1
atggaaagtcgggaatggatgtatcattggccgaggtttttgtctccatatagaaacgaagtgtctaaatttattggtattaccaaggcacacgctgagaagaacaatatgaggaagataatttgtccatgtgctgactgtaagaatgaaataacctgggactttgacgatgcttttaaagtgaaggagcacttaataactcgtggatttatggacaagtacgaaatatggacacgtcatggcgaagaacaagtggacgggcctgaaaatgtagttccaacacaagttgaagacatggtgcatgacaatggttctattgaggacaaaatcgacctagaggaaatgttacgtcatgcagaacccgaggtgctgatggggtcggctagagggttaaataactttgaagctttacagaaggcatcaaaggaagttttgtacgatgagtcgaagggctgtgacagtgagttcacaacactccggtcagttcttgaacttatgaggttaaaggcaagacatggatggtctgataccagttttgacagtctgttagaacttctgcagaaaatgctcccggggcctaactcactaccatccagcacatatcaagcaaagaaactcatatgccccctttcacttggtgtggaaaagattcatgcgtgcgtaaatcactgtatactgtacaggaaagagtatgcttctttagatgaatgtcaaacatgcgatagattgaaagtgtgggacgagtactcaagggaatacttcacagtggaggccatcatcttcgtgaccattaacgattatccagcaatgttttcagttttaggtcaaattaaaggagagagagggcggcaccgacatgcgggccccacacgtcagcggctgcgggcgctggtccatggtggatcgagtccatggaccagggagaaggggcgcaccacgtggcgcacacgcggcacacacgcggcactcacgcggcggccacgtggcggccacgcggcggccgaaccgacggccccgatctacccaacggcggcggagagctcgcggccggcgcgcgcgagcggctcaagccaacccggggccatggcgcgacggcggcgcggcaccggcgacgaccagtggacggcagcgcggcaccggcggacggcagttaagcggctaagcggtgacgcgaccacggaaagggaggaggaagaaggaagggggaatcgtcctcaccgagggagcccgaccggcgaggagaggggcgacggcgaccggcgacgaggagcgacggagggaggtcgacaagcggcggacggggtccgggacgacctaaggaacgaaatggaaaggattagagagggagagagggaccatagagggcgggaacgccggcctaaggcggcggccatggcggctcttaccagtgcgcggcggggatgaggctccggcggggaacctcgatgggggagtggtggacgaggtggacctcggccacgcgaacccgacgatggagacgaaaagtgaagaggaggatgcggggatggattttataggggcggagaggtcgggaacggccgggggtggcccgatttcgtcggccgatgttggagaggtggaggtggagagagaggcgggattcgaatttcgaatcctggccatctcgggcgcgggcgcgggcgagagggagggggagtgggtgcgggaggcgcggcgcatgcgcgggcgtggccgacgtggcacggaggaggcggggacgtgggcgcggcggcacgggcgcgaggtgggagacgggcccgacaagtgggccccacctgtcggcgaccctgggtatctcccgggttccaacaagcttgtgtacatgcggcatcggcggttcctacgcacaaatcacaagtaccgcaagatgaaggcggagttcgatggtactgaagagactgatcctgcactaaaacctacatcggaagaaaaggtgtgtgcaatgacagagaaaattgcttgcgagtttggaaaaatgactaagaaaccatcaaaggggacaaagcgcaagaaacccgagaagaatacgaaacaaggggatagtaagaagcaagataatagttcgaagccagatgataaactccctcccccattcaagaagcattccatattttttaagtacctcccgtactggaaagatctggaggttcggcatgccatagacgtcatgcatctagagaagaatgtgtttgacaacatagttggaacattgttggacatgccgaagaagactaaagatggtctgcaatcaaggatggacctagtcgagataggaatcagggaagagttacaccctcaagaaggagaaaaaaatggcaaagtatatcttccaccagcctgtttcacactgacacctgaggagaagaagtcattttgcaactcactccgtgatgtcagagtgcccataggtttctcatcaaacatcaatcgactagtttcaatgaaagatttgtcggtatctggttataattcacacgactgtcatgtcttgctcaccgtgtttcttgcaattgcaataagggccgtaaaaccggagcatttaaaggttgctattacaaggttgtgctactttttcaacgcagtgtcacagaaggtcattagtctcgaagagttaggaaatctccgcacattcgcacatgagacacagtgccaacttgagatgtgtttccctccgtcattttttgatatgatggagcacctcattgctcacatagtgccgcagatggttgcgcttggcccattgtacctccatcaaatgtggtcatacgagtgttacatggcggttctgaagggttatgtccaaaatcgtgcacatccagagggatcaatggttgagggttatagtactgaagaggttgtcgagtgctgtatcgattacctcaaagatggatatgcaattggagtacctgtgccccgacacgagggcaggttgagtggcaggggaacgataggaaagaagagattcgtcacccatgatcacaaatcattccaagaagctcacttcagcgtgcttcatcagtttgctatcgttgagccgtacatcgatcaacatatcgaactaatacgagctaacaattggttgcgagacctagacttacctgagggacaaactaccgatgaaataactatgaagcggttggcttgtggtccatcaactacaataaattcttggcagggatatgacattaatggatactcgtttagcacaagagcccgagataataagacctgtacgcaaaacagcagtgtccgtgtggaggcaattgatgaagccggggaaaaacaatcatacttcggatttattgaagaaatatgggaaattgactatgggcacacaatgcaattccccatatttaagtgctatcagtttgtacataagattaagaatatcgagacatctactcagaataccgtgaagccttacatgcgcacggacggtgtgggcaaaaatgttaaaggggtttacatcttcgcagtcggacgatcttcgcaggcggaccacccgcctgcaaagatcattgccctatataagggcaagcccgcggcgccaaaatttctaagtccaggcgggaaccctagaaattttggcgccactgccgccccttgccgccgctccaccgtgcgcgagctccacaactctaccgccgatgccgccgacccctccaccgcgcgcacggcctctgctggcccctccaccgcgtgcacggccgcccctccaccaccgccggctgccacctctctctctatctcgctcacggccgaacggcttcatcggccgatcgtcgtccacgagcgaagacgtcctcggccgaacgacgtcttcggccggtcgtcgtccacggccgaacctcgtcgtcggcccttccttcgtcgtccacgaccgaagctcgtcgttggtcgttcgtcgaacacggacaggtttgaaacgatggccgatagtactaaagggactgaagagaagggtttaggggagcaagagcaatcccttgctgttgtggttgctccggaaccaacggtcccaccggaaggtagttccgacagcgacgtagctgacgaagacgaggagtactcatcgccaagcgatccttgttcaagcccaagcccgaagagaaggaaaaaggacgacggtgaagaaggcgacaaggactacattccccctaaagaaggggactgggatcatgtatcgaatggggataaggaagtcatatggaaagagttgaagaaaatcttccagttcccggatggatcagaggcagcagtgaggaattgtgcactgcaaacaatggccaagtcttggcgtggttggaaaaccaccttgaacaagaaatttgtgaagacgggacgcacaccattttcgacgtatgccaacataaccccgaaccagtgggacgactttctgacgtcgaagaactccccggaagaaattcaaaggagccaaaagtatgcagagttggccaagaagaacaaatttcctcatcgcttaggctccgcaggatacgcaccaaaggtggagcagtggacaaaagaggaggaggaaatgaggaagaagaggcaactggtaccaatggaggagtggacacagagatcaaggaactggcatgggggaagggttcgaggtgtgtcgagcaagatgagttggaaggaagggttcaaaaatgacccccacaagaagcgtgaagcgtacaaggataaacttagagacgaaggggctgcggagtttgaatggcaaatgatggatttctgcgtcaagcacatgcttttgcctcgccccgaaaccaaagaacctgagccagattaccccttcgatgacctcaaggagaatacaccctgcagattgcacgttcctattggacgctccgggaaaactcttgaggccgctacaaccattgttatccctgggagaacatacaatgaagagttcatacccgatgcgtatgtcaaggtgcagccgcaagtggtccacgaagggtttgagtcctacgacattgacttcccgactacagatggtgtatccgtacttggggatgcggtcgatcttgtaattctctggcacaagaatgacatatcctttggattgggtaccgacgccacacaaaaacctgtggtgcctaaaccggggttgggaaaacctccgggacctcctaagaggaaggtgactgataaggcggaggaacccgagatgcaaaaggaaaatccagtgccggaagtgctaccggagattgcattgccggagaaagccaaggagattgcaccgccggaggcagccatggagattccagtgccggatgtgcccatggagattacagtggcagaaccagaggtgcaatttgtggcatcagtcgggtcagaaatagaagaagtatcaggattagaatgggacggtacagagccagaaatatttgaagacccttctcctgcgaaagaccccgaggtgcaagagaccacggtccctgagaaggccactaccagttctgaggtgccacgagtgcttaggagccacgactccaagtccaaagatgagaacagggagaagttcatggtaaccgtcttcagagggggtaaggaacatgccaagcttagagatgacgacccccagaaggctgctgaactagccgggccaacatacttcgcaatcgatgattgcccggaaaagtacgaacatgggaaagcattcttgccggaatgggcactgaaagaaggaccatgggagatgacaaggttacataccttctacatggaggccagcaagaaaggcttgggcaatataacagctcgatcaccggcagattgtttcgacgaagaaggttacgtatggctagatttctcagatctccacgccatatatcgtcgggataagatggacgtcaactacgtcggtgtttggtgcataatgcaatacatggatgctaagaagaaaaaagaacacatcggcttcttggatccaactcggatctgccaaacacagcatacgatgaggctagcaccagggtctgaccagctgaagagcaagaatccaaaagagatagcagaatacaagaagggcttgcacaaggagaaattgattactgtcgcacagtacattggacgagccttcttgcactttcaaaataagagagtcgtcatggccgcttataattttaacgatcattatatctgtttactcatccaccctaaagacggaaccgtggtagtcttggaccctctcgattacagtcacaagcaatataaagaatttctaataattttacagtatgcataccaatactataagttcaagggtggagaacagacccgaataagggagaagctgctatgtcacaagcaaccgcgaggaacggtcctttgcggatattatgcgtgtgaattccttagggttaatggacggtacaggactaacgcggaggatttgccaagattagaatgtcgaacaagctttgacgatacaggtatcccaaatgtccagcgtgatctgtgtcacttcatccaccatgagtgctgtcatgtgaaagaagatttcttcgacccagagggtgtcccagcgacaagtgacgaattcaaggatcttcgggagtggaacactgctatgcca

SEQ ID NO: 9838 - DNA, 6102 bp, Oryza sativa
  Clone ID: PAT_MRT4530_16217C.1
atggaaagtcgggaatggatgtatcattggccgaggtttttctctccatatagaaacaaagtggctaaatttattggtattaccaaggcacacgctgagaagaataatatgaggaagataatttatccatgtgctgactgtaagaatgaaatagcctgggactttgacgatgcttttaaagtaaaggagcacttagtaactcgtggatttatggacaagtacgaaatatggacacggcatggcaaagaacaagtggacgggcctgaaagtgtagttccgacacaagttgaagatatggtgcatgacgatagttctgttgaggacaaaatcgacctagaggaaatgttacgtcatgcagaacccgaggtgctgatggggtcggctagagggttaaataactttgaatctttacagaaggcagcaaaggaagttttgtacgatgagtcgaagggctgtgacagtgagttcacaacactccggtcagttcttgatcttatgaggttaaaggcgagacatggatggtctgataccagtttcgacagtctgttagaacttctgcagaaaatgctaccgaggcctaactcactaccatccagcacatatcaagcaaagaaactcatatgccccctttcacttagtgtggaaaagattcatgcatgcgtaaatcactgcatactgtacaggaaagagtacgcttctttagatgaatgtccaacatgcggtgcaagccgatacaagtcgaatagcaatactggcctagaaccctctgaagcaactgagggacgacagagaaaaatcccgcagcttgtgatgtggtaccttcctgtcaaagaccgcattaaacggatatactcaaaccctcgagatgcggaactaatgcgctggcatgaagaagggcgcaagaaggatgggatgattcgacacccggcagatgctcgtcagtggataaactttgatgcttacggaacattagatttgccctgagtactgatggagttaattcttttggagacatgagcagttcacatagtacttggccagtgcttctcaccatgtataatcttcctacctggctttgtcaaaagcgaaaatacgtactactctgtatcctcatacagggaccccgtcagcctggtattgatatagacgtatttcttgaaccattgttggaagatatggctgatttatggaaagagggattgaaagtgtgggacgagtacttaagggaatacttcacagtgaaggccatcatcttcgtgaccattaatgattatccagcaatgtttttcagtttcaggtcaaattaaaggtaaaacaggatgtgtgatctgcttgaatggaacgtactataggtatctcccgggttccaacaagcttgtgtacatgcggcaccggcggttcctacgcacaaatcacaagtaccgcaagatgaaggcggagttcgatggtactgaagagactgatcctgcaccaaaacctacatcgggagaaaaggtgtgtgcaatgacagagaaaattgtttgcgagtttggaaaaatgactaagaaaccatcaaaggggacaaagcgcaagaaacccgagaagaatacgaaaggaggggatagtaagaagcaagatgacagtacgaagccagatgataaactccctccccattcaagaagcattccatattttttaagtacctcccgtactggaaagatctggagattcggcatgccatagacgtcatgcatctagagaagaatgtgtttgacaacatagttggaacattgttggacatgccgaagaagactaaagatggtctggaatcaaggatggacctagtcgagatgggaatcagggaagagttacaccctcaagaaggagaaaagaatggcaaagtatatcttccaccagcctgtttcacactgaccctgaggagaagaagtcattttgcaactcactccgtgatgtcagagtgcccataggtttctcatcaaacatcagtcgactagtttcaatgaaagatttgtcggtatctggttataattcacacgactgccatgtcttgctcactgtgtttcttgcaattgcaataagagccatacaaccggagcatttaaaggttactatcataaggttgtgctactttttcaacgcagtgtcacagaaggtcattagtctcaaagagttaggaaatctccgtacattcgcacatgagacccagtgccaacttgagatgtgtttccctccgtcattttttgatatgatggagcacctcattgttcacattgtgccgcagatggttgcgcttggcccattgtacctccatcaaatgtggtcatacgagcgttacatggcggttctgaagggttacgtccgaaatcgtgcacatccagagggatcaatggttaagggttatagtactgaagaggttgtcgagtgttgtatcgattacctcaaagatggatatgcaattggagtacctgtgccccgacacgagggcagattgagtggcaggggaaaaaaaggaaagaagagattcgtcacccatgatcacaaatcattccaagaagctcacttcagcgtgcttcatcagtttgctatcgtcgagccgtacatcgatcaacatatcgaactaatacgagctaacaattggttgcgagacctagacttacctgagggagaaactaccgatgaaataactatgaagcggttggcttgtggtccatcaactacagtaaattcttggcagggatatgacattaatggatattcgtttagcacaagagcccgagataataagacctgtacgcaaaacagcaatgtccgtgtggaggcaattgatgaagccggggaaaaacaatcatacttcaggtttattgaagaaatatgggaaatcgattatgggcacacaatgcaattccccatatttaagtgccatcagtttgtacagaagattaagaatgtccagacatctactcagaagaccgtgaagccttacatgcgcacggacggtgtgggcaaaaatgttaaagggtaatgattgttgaattaaaaaagatcttcgcaggcggaccgcacgcctgcgaagatctttgccctatataagggcaagcccacggcgccaaaatttctaagtccaggcggaaaccctagaaattttggtgccgtcaggctgccgtcggcccgctccagcgccgccggctcctccaccacgcacgcggccgccggtggcccctccaccgcgcgcccggccgccgctggcccttccaccgccgccggcccctctaccgccccctccaccgccgtcggccacccctccacgcaaaggcgaacggcttgatcggccgatcgtcgtccacgagcaaagacgtcctcgaccgaacgacgtcttcggccgatcgtcgtccacggccgaacctcgtcgtcggccgttcgtcgtccacggccgaagccggtcgtcgtccacgaccgaagctcgtcgtcagccgttcatcaaacatggacaggtttgaaacgatggccgatagtactaaagggactgaagagaagggtttaggggagcaggagcagtcccttgctgttgtggttgctccagaaccaacggtcccaccggaaggtagttccaacagcgacgtaggtgacgaagacgaggagtacttgtcgccaagcgatccttgtccaagcccaagcccgaagagaaggaaaaagggtgacggtgaagaaggcgacaaggactacattccccctaaagaaggggactgggatcatgtatcggatggggataaggaagtcctatggaaagagttgaagaaaatcttccagttcccggatggatcagaggcagaagtgagaaattgtgcactgcaaacaatggccaagtcttggggtggttggaaaaccaccttgaacaagaaatttgtgaagacgggacgcacaccattttcgacgtatgccaacataacccccaatcagtgggacgactttttgaccttgaagaactccccggaagaaattaaaaggagccaaaagtatgcagagttggccaagaagaacaaatttcctcatcgcttaggctccgcgggatacgcaccaaaggtggagcagtggacaaaagaggaggaggaaatgaggaagaaggggcaaccggtaccaatggaggagtggacacagagatcaaggaactagcatgggggaagggttagaggtgtgtcgagcaagatgagttggaaggaagggttcaaaaatgacccccacaagaagcgtgaagcgtacaaggataaacttagagacgaaggggctgcggagtttgaaaggcaaatgatggatttctgcgtcaagcacatgattttgcctcgccccaaaaccaaagaaactgagccagattaccccttcgatgacctcaaggagaatacaccctgcagattgcacgttcccattggacgctccggtaaaactcttaaggccgcaacagccattgttatccctgggagaacatacaatgaacagttcatacccgatgcatatgccaaggtgcagccacaagtggtccacaaagggtttgagtcctacgatattgactacccgactgcagatggtgtatccgtacttggggatgcagtcgatcttgtaattctctggcacaagaatgacatatcctttggattgggcaccgacgccatgcctaaaccggggttgggaaaacctccgaggcctcctaagaggaaagtgactgataaggcggatgatccagagatgcaaaaggaaaatccagtgccggaagtgccaccggagattgcattgccggaggcagccatggagattgcaccgccagagacagccatggagattccagtgccggatgtgcccatggagattacagtggcagaaccagaggtgcaatttgtggcatcagtcgggtcagacaaagaagaagtaccaggattggaatgggacggtacagagccagaaatatttgaagacccttctcctgcaaaagaccccgaggtgccacgagtgcttaggagccacgactccaagtccaaagatgagaacaaggaaaagttcatggtaaccgtcttcagagggggtaaggaacgtgccaagctcagagatgacgacccccagaagactgctgaactagccgggccaacatacttcgcaaccgatgattgcccgaaaaagtacgaacatgggaaagcactgttgccggaatgggcactggaagaagcaccatgggagatgagaaggttgtataacttctacatggaggccagcaagaaaggcttgggcaatataacagctcgatcaccggcagattgtttcggcgaagaaggttacgtatggctagatttcttagatctccacgccatatatcgtcgggataagatggacgtcaactatgtcggtgtttggtgcatgatgcaatacatggatgctaagaagaaaaaagaacccatcggcttcttggatccaactcagatctgccaaacacagcataccgtgacgctagcaccaggatcagaccagctgaagggcaagaatccaaaagagatagcagaatacaagaagggcttgcacaaggagaaattgattactgtcgcacagtacattggacgagccttcttgcactttcaaaataagagagtcgtcatggccgcttataattttaacgatcattatatctgtttactcatccaccctaaagacggaaccgtggtagtcttggatcctctcgattacaatcacaagcaatacaaagaatttctaacaatcttacagtatgcataccaatactacaagttcaagggtggagaacagacccgaacacgggagaagctgctatgtcacaagcaaccgcgaggaacggtcctttgcgggtattatgcgtgcgaattccttggggttaatggacggtacagggctaacgcggaggatttgccaagattagaatgtcgaacaagcttcgacgatacaggtatcacaaatgtccagcgtgatctgtgccacttcatccaccatgagtgctgtcatgtcaaaggagatttctttgacccagagggtgccgtagtggcaagtgacgaattcaaggatcttcgggagtggaacactgctatgcca

SEQ ID NO: 9839 - DNA, 2064 bp, Oryza sativa
  Clone ID: PAT_MRT4530_16218C.1
atggccgatagtactaaggggactgaagagaagggtttaggggagcaagagcagtcccttgctgttgtggttgctccggaaccaatggttccaccagaagatagttctggcagcgatatagctcacgaagcgatccttgtccaagcccaagcccgaatagaaggaaaaagggcgacggtgaagaaggcgacaaagactacattccccctaaagaagcgttcacagtgtggcataatagtaacagaaaagatccccatcacggtcaaggactgggatcatatatcgaatggggataaggaagtcctatggaaagagttgaagaaaatctttcagttcccggatggatcagaggcagcagtgaggaattgtgcactgcaaacaatggccaagtcttggcatggttggaaaaccaccttgaacacgaaatttgtgaagacgggacgcacaccgttttcgacgtatgccaacataaccccgaatcagtgggacgactttctgacgttgaagaactccctggaagaaattcaaaggagccaaaagctccgtgggatacgcaccaaagttgagcagtggacaaaagaggaggaggaaatgaggaagaaggggcaaccggtaccaatggaggaatggacacagagatcaaggaactgggcaagagctagaactcctaagatcacggatgaaggaaaagtatcgtttgaagatccggtgctgcagagcgttgccgataaaatagagaatttatccagttcacagaagaaaggatttttcaagcctaagagggagaaagatgtgctaagtacggcgctgggtactcctgagcatgggggaagggttcgaggtgtgtcgagcaagatgagttggaaggaagggttcaaacatgacccccacaagaagcgtgaagcgtacaaggataaacttagagacgaaggggctgcggagtttgaaaggcaaatgatggatttctgcgtcaagcacatgattttgcctcaccccgaaagcaaagaacctgagccagattaccccttcgatgacctcaaggcgaatacaccctgcagattgcatctgcaagtggtccacgaagggtttgagtcctacgacattgacttcccgactgcagatggtgtatccgtacttggggatgcggtcgatcttgtaattctctggcacaagaatcacatatcctttggattgggcactgacgccacgcaaaaacctgtggtgccaaaaccggggttgggaaaatctccgagatctcctaagaggaaggtgactgataaggtggaggaacccgagatgcaaaaggaaaatccagtgcggaaagtgccaccgaagattgcagtgccagaggcagccatggagattccagtgccggaagtgcccatggagattacagtggcagaaccagaggtgcaatttgtggcatcagtcgggatgcaatacatggatgctaagaagacaaaagaacctatcggcttcttggatccaactcggatctaccaaacacatcataccgtgaggctagcaccagggttagaccagctgaaggacaagactccaaaagagatagctgaatacaagaagggcttgcacaaggagaaattgattactgtcgcacacgatcattatatctgtttactcatccaccctaaagacagaaccgtggtagtcttggaccctctcgattacaaacaccagtcatacaaagaatttctaacaatcttacagtatgcgtaccagtactacaagttcaagggtggagaacagacccgaacaagggagaagctgctatgttacaagcaactgcgaggaacggtcctttgcgggtattacgcttgcgaattccttagagttaatgggaggtacaggactaacgcggaggatttgccaagattagaatgtcgaacaagctttaacgatacatgcatcaaaaatgtccagcgtgatctgtgtcacttcatccaccatgagtgctgtcatgtgaaaggatatttcttcgacccagagggtgcctgtcacgcccggaatttctatccaaaattccaaacgcttacatgtatgtaa

SEQ ID NO: 9840 - DNA, 3564 bp, Oryza sativa
  Clone ID: PAT_MRT4530_16219C.1
atggggtcggctagaggtttaaataactttgaagctttacagaaggcagctaaggaagttttgtacgatgagtcgaaggactgtgacagtgagttcacaacactacgggaccccgtcagcctggtcatcatcttcgtaaccattaatgattatccagcaatgttttcagtttcaggtcaaattaaaacaggatgtgtgatctgcttgaatggaacgtactataggtatctccaggattccaacaagcttgtgtacatacggaaccagcggttcctacgcacaaatcacaagtaccgcaagatgaaggcgaagttcgatggcactgaagagactgatcctgcaccaaaacctacatcgggggaaaaatacctcccgtactggaaagatcgggaggttcggcatgccatagacgtcatgcatctagagaagaatctgtttgacaacataattggaacattgttggacatgccgaagaagatgagaatcaaggatggacctagtcgagatgggaatcagggaagagttacaccctcaagaaggagagaagaatggcaattgttacaaaaggtcattaatctcgaagagttaggaaatctccgtacgttcacacatgagacacagtgccaacttgagatgtgtttccctccgtcattttttgatatgatggagcacctcattgttcacatagtgccgcagatggttgcgcttggcccattgtacctccatcaaatgtggtcatacgagcgttacatggaggttttgaagggttacgtccgaaatcgtgcacatccagagggatcaatggttgagggttatagtactgaagaggttgtcgagtgttgtatcgattacctcaaagatggatatgccactagagtcgtaccagtgccccgacatgagggcagattgagtggcaggggaacgataggaaagaagagattcgtcacccatgatcacaaatcattccaacaagctcacttcagcgtgcttcatcagtttgctatcgttgagccttacatcgatcaacatatcgaactaatacgagctaacaataaaggtcgcaccaccgagtggataatgaaagaacaaaagcatctcttcatagattggttgcgagacctagacttacctgagggacaaactaccgatgaaataactatgaagtgcggtgtccgtgtggaggcaattgatgaagccagggaaaaacaatcatacttcgggtttattgaagaaatatgggaaatcgactatggacacataatgcaattccccatatttaagtgccagcggaagattaagaatgtcgagacatatactcagaagaccgtgaagccttacatgcgcacggacggctgccgaattttttcaccgccacacgcctccaccgtcctccggcgccgcccgcctgcgaccttcgctctccgaccgtcatactccaccgccgccaaccgtcgttgtccgcgcgccgccgaccttcgagctcgcgccggccgctccaccgagaccaccgccccttgccgccgctccaccgaccgcctctgccggcccctccaccgctccgccgccgccgagccgacccattcaccatgcatgaactccaccaccgcgcacgtgcgagctatacgccacccgttccaccgccggcggcccctccaccgcgccgccggccgccacctctctctctctatctcgctcgtggctgaacggcttcatcggccggtcgtcgtccacgagcaaagacgtcctcggccgaacgacgtcttcggccggtcgtcatccacggccgaacctcgtcgtcggcccttccttcgtcatcgccgaccgttcgtcgtcggccgttcatcgtccaccgacaagtttgaaacgatggccgatagtactaaagggactgaagagaagggtttaggggaggaagagcagtcccttgctgttgtggttgctccggaaccaacggtcccaccagaagatagttccgacaacgacgtagctgacgaagacgatgagtactcgttgccaagtgatccttgtccaagcccaagcccaaagagaagggaaaagggcgacggtgaagaaggcgacgaggactaccttccccctaaagaagggataagtacacttaataaggaaaagatccccatcacagtcaaggactgggatcttgtatcaaatggggacaaggaagacctatggaaagagttgaagctctgtgggatacgctccaaaggtggagcagtggacaaaagagaaggaaatgaggaaggcggggcaactggtaccaatggagcaatggacacagagatcaaggaactggggttcaaacatgacccccacaagacgcgtgaagcatacaaggataatacaccctgcagattgcacgttcccatcggacgctctgggaaaactcttgaggccactacagccattgctatccctggaagaacatataatgaagagttcatacccgatgcgtatgccaaagtgcagccgcaagtggtccacgaggggtttgagtcctacgacatagacttccctactcaagatggtgtatccgtacttggggatgcggtcgatcttggaaaacctctgagacctcataagagggaggtgactgataaggcggaggaacccgagatgcataaggaaaatctagtgccggaagtgccaccggagattgcagtgccggaggtgcccatggagattcaaatggcggatgtgcccatggagattacagtggtagaaccagaggtgcaatttgtggcatcagtcgagacagaaattgaagaagtaccaggattggaatgggatagtacagagccagaaatatttgaagacccttctcctgcgaaagaccccgaggtgcaagagaccacggtccctgagaaggccactaccagttctgacgtgcctagagtgcttaggagccacgactccaagtccaaagatgagaacaaggagaagttcatggtaactgtcttcagagggggtaaggaacatgccaaactcagagatgatgacccccagaaggccgctaaactagccgggccaacatacttggcaactgatgattgcccggagaagtacgaacatgggaaagcactcttgccggattgggcactaaacgaaggaccatgggagatgagaaggttacataccttctacatggatgccagcaagaaagacttgggcaatataacagctcgatcaccgttgccaagattagaacatcgaacaagcttcgacgatacaggcatcaaaaatgtccagcgtgatctgtgccacttcatccaccatgagtgctgtcatgtgaaaggagatttcttcgacccagagggtgccctagctacaagtgacgaattcaaggatcttcgggagtggaacctatgccataatgcggccgattcctattttcgcaggtggaccggactagccaacgtccgcctgcgaaaattatcttcgcaggcggacggccgccccgcctaccaagatcggcgatcttcacagtcgttggcttacatgcagacggccgccccgcctgtgaagaccgttttcagccacttgcgataa

SEQ ID NO: 9841 - DNA, 287 bp, Oryza sativa
  Clone ID: PAT_MRT4530_1621C.1
tttctttgtaaggaggagctcccacgtgagcggtgggcttttttaaagacgggcgccttctaacaacttagccgaacatggcggcggattacaacacaaagccgcttgctgagaaggaccactcctcgtaatgcacggtggacaaagacaccggttggctcgtcaacaacatcgccgtgcactgcaatcccaactgcagttcgaactctctcgccccatccagaaaacatttcttcaatgtccacaagggaaccctcatgtatcatcagcccaaccttaagtacatt

SEQ ID NO: 9842 - DNA, 249 bp, Oryza sativa
  Clone ID: PAT_MRT4530_16220C.1
atggcaatgatgcgtcgtggcgggctcacctccccagatcgtgcacgagatccacatcgcgcagtagctggcaggtgtgcgggtgcggatgtggtgccagaaaggaagttccgcggggtgaggaagcagccgtggaggaagtacggggcagagatccacatctcgcagcagagcgtgcgcatgtggcttggcgtgttcgacaccaccgaggaggccacgcgggataaaaccgggatcaaaactgcctaa

SEQ ID NO: 9843 - DNA, 330 bp, Oryza sativa
  Clone ID: PAT_MRT4530_16221C.1
atgggttacagcttgaagaagcaaatggcaacagtggtggaagggtcagcgaggcagcggtgcaccttcgagtggaacacgagcgacatagaaatggcggggcggtggagaatgcttatcatgctgctttggcggcggagacggggaacacggaaggggaaagagagcacttgggggcaccacacaggcagggcatttcagacatcatcgcagtggatgcggaattgcgccggcgaggtggagccgttcaaggacagggtattctccgcgcagttaccggctttcctgactccaccggcgatgatgctggccatcaaccgggtctcttaa

SEQ ID NO: 9844 - DNA, 460 bp, Oryza sativa
  unsure (1)..(460): unsure at all n locations
  Clone ID: PAT_MRT4530_16222C.1
tttggatgcaccgactgtccaacctcaggtgctcaaggagctcgaggaggccaagaaggcgtaccctgatgcattctgtccagtatcatcaggctttcgacanacgtcaggcaggtgcaagcgtcaatcaagcttcatcagcctagcaagcccccgggctgcgaggagtctggtggcaactaagccgtcatcgtgcatatgatgagcctcgtgttaattggttcatctgctggattgcgatggatggtctgcccaccttgtttgcgtggtgttcccacgtttggttgcatcgtctgtttgattttaccaggccgtgctctgcttttgtttttgtttcacctgatctctctctgacttgatgtaagagtggtatctgctacgactatatgttgatgggtgaggcatatgtgaatgaaatctatgaaagctccggctatatatatttaaaaaaaaaaaaaaa

SEQ ID NO: 9845 - DNA, 2178 bp, Oryza sativa
  Clone ID: PAT_MRT4530_16223C.1
atggccgatagtactaaagggactgaagagaagggtttaggtgagcaagagcagtcccttactgttgtggttgctccggtaccaacggtcccaccggaagatagttccgataacgacatagctgacgaagacgatgagtactcgttgccaagcgatccttgtccaagcccaagcccgagcccgaagagaaggaaaaaggtcgacgatgaagaagacgacaaagactacattccccctaaagaagggcccgagctaattcgaaactttcatgtataccttctcgtaggaaacggcgccacggcgatcaaaacggtagccgaagaaaaaagttatgtcgaaagacgacgagaaggagagctgctcgcccctaacactgcacgtgcaaaattcagttcacagtgtggcataatagtaagggaaaagatccccatcacggtcaaggactgggatcatgtatcgaatggggataaggaagtcctatggaaagagttgaagaaaatcttccagttcctagatggatcagagatagcagtgtggaactgtgcactgcaaacaatggccaagtcttggcgtggttggaaaaccaccttaagcaagaaatttgtgaagacgggatgcacaccgttttggacgtatgccaacataaccccgaatcagtgggatgactttctgacgttgaagaactccccggaagaaattcaaaggagccaaaagctccgcggaatacgcaccaaaggtggagcagtggacaaaagaggaggaggaaatgaggaagaaggggcaaccggtactaatggaggaatggacacaaagatcaaggactgggtaagagctagaactctgaagatcacggatgaaggaaaagtatcgtttgaagatccgaaactgcagagcgttgccgataaaatagagaatttatccagttcagagaagaaaggacttttcaagcctaagagggagaaagatgtgctaagtacggtgctgggtactcctgagcatgggggaagggttcgaggtgtgtcgagcaagatgagttggaagaaagggttcaaacatgacccccacaagaagcgtgaagcgtacaaggataaacttagagacgaaggggctgcggagtttgaaaggcaaatgatggatttctgcgtcaagcacatgattttgcctcaccccgaaaccaaagaacatgagccagattaccccttcgatgacctcatggagaatacaccctgtagattgcacgttcccattggacactccgggaaaactcttgaggccgctatagccattgctatccctgggagaacatacaatgaagaattcatacccgatgcgtatgccaaggtgcagccgcaagtggtccacgaagggtttgagtcctacgacattgacttctcgactgcagatggtgtatccgtacttggggatgcggtcgaccttgtaattctctggcacaagaatgacatatcctttggattgggcaccgacgccacgcaaaaacctgtggtgccaaaaccggggttgggaaaacctccgagacctcctaagaggaaggtgactgataaggcggaggaacccaagatgcaaaaggaaaatccagtgctgcaagtgccaccggagattgcagtaccggcggtagccatggagattccagtgccgaatgtgcctatggagattacagtggcagaaccagaggtgcaatttgtggcatcagttgggtcagaaatagaagaagtaccaggattggaatgggacggtacaaagctagaaatatttgaaaacccttctcctgcgaaagaccctgaggtgcaagagaccacggtccctgagaaggccactaccagttctgaggtgcctagagtgcttaggagccacgactccaagtcaaagatgagaacaaggagaagttcatggatgcaatacatggatgctaagaagaaaaaagaacctatcggcttcttggatccaactcggatctaccaaacacaacataccttgccaagattagaatatcgaacaagttttgatgatacaggcatcaaaaatgtccagcgtgatctgtgccacttcatcaaccatgagtgctgtcatgtgaaaggagatttcttcgacccagagggtgccctagccacaagtgacgaattcaaggatcttcgggagtggaacagtgctatgccataa

SEQ ID NO: 9846 - DNA, 1797 bp, Oryza sativa
  Clone ID: PAT_MRT4530_16224C.1
atggccgatagtactaaagggactgaagagaagggttcaggggagcaggagcagtcccttgctgttgtggttgctccggaaccaacggtcgcaccggaaggtagttccgacagcgacgtaggtgacgaagacgaggagtactcgtcgccaagcgatccttgtccaagcccaagcccgaagagaaggaaaaagggcgacggtgaagaaggcaacaaggactacattccccctaaagaagggaactctccaaaagaaattcaaaggagccaaaagtatgcagagttggccaagaagaacaaatttcgtcatcgcttaggctccgcgggatacgcaccaatggtggagcagtggactaaagaggaggaggaaatgaggaagaaggggcaaccggtaccaatggaggagtggacacagagatcaaggaactggccgcaagtggttcacgaagggtttgagtcctacgacattgacttcccgactgcagatggtgtatccgtacttggggatgcggtcgatcttgtaattctctggcacaagaatgacatatcctttggattgggcaccgacgccatgcaaaaacctgtggtgcctaaaccggggttgggaaaaccttcgaggcctcctaagaggaaggtgactgataaggcggaggaaccagagatgcaaaaggaaaatccagtgctggaagtgccacttgagattacattgccggaggcagccatggagattgcaccgccggaggcagccatggagattccagtgccggatgtgcccatggagattacagtggcagaaccagaggtgagccatgactccaagtccaaagatgagaacaaggagaagttcatggtaaccgtctttagagggggtaaggaacgtgccaagctcagagatgacgacccccagaaggctgctgaactagccgggccaacatacttcgcaaccgatgattgcccggaaaagtacgaacatgggaaagcactcttgctggaatgggcactgaaagaagcaccatgggagatgagaaggttacataacttctatatggaggccagcaaaaaaggcttgggcaatataacagctcgatcaccggcagattgtttcggcaaagaaggttacgtatggctagatttctcagatctccacgccatatatcgtcaggataagatggacgtcaactacgttggtatttggtgcatgatgcattacatggatgctaagaagaaaaaagaacccatcggcttcttggatccaactcggatctgccaaacacagcataccgtgaggctagcaccagggtctgaccagctgaagggcaagaatccaaaagagatagcagaatacaagaagggcttgcacaaggagaaattgattactgtcgcacagtacattggacgagccttcttgcactttcaaaataagagagtcgtcatggccgcttataattttaaggttaatggacggtacaggactaacgcggaggatgaatcacaaatgtccagcgtgatctgtgccacttcatccaccattagtgctgtcatacgaccgatggagccgttggcgagcaccacggcggaggataaccggccgcacgtcgtgctgctggcgagccccggcgccggccacctcatcccgatggccgagctggcgcggcggctcgccgaccaccacggcgtcgcgcccacgctcgtcacgctcgccggcctctccgaaccgacgccgccgtgctctcctcgctgccggcctccgtggccaccgccgttctcccgcccccggcggacgtcggcggctgtttga

SEQ ID NO: 9847 - DNA, 431 bp, Oryza sativa
  Clone ID: PAT_MRT4530_16225C.1
ggatcccatgatgtatcgcaatgcatagacatacgtctatacgccttcgtcaagccaccactgtgcagggaaaaacctgctagtgattccgtgccctgcacaagttggatggtagtggtctaatgcgtgtatcgcatctgcaagggagcaagcccgaagcctcaagaacaacaggggagaagagcaccggtggccttgcactgcctagatgtgtcaacaacaatgactacccaggattatcgaatggagtgccgaaagcgagacttgcagagtgaatggaattggagaactagatcggcgtgagagtaaaataaaccccacaagtatgacacttggtggtgattctattcgatatcagtagtaaataaaggctacaaaatttcttaaaaaaaaaaaaaaaaaaaaaaaaaaaaataaaaaaaaaaaaaaaa

SEQ ID NO: 9848 - DNA, 1563 bp, Oryza sativa
  Clone ID: PAT_MRT4530_16226C.1
atggagagggagagcagcacaccggcgagcagctggctggggatcgacgaggcggcgccgttcgcggggaagaaggcgacgaaggacgccgccgccgccgacgccttcgtccggcgatggcccaaggtggtgaacgccacgctggtggcgttcatcatgacgatgccgccgctcctcatcctcctcggcggcggccggcccggcgcgccggcggtgtggatcaagtcgaccgttgccagcctagccgcacgaggggaacccaagaaagacgtgcttctcggtggcctgctcctcccaggattcgacgagcaatcgtgcgtcagccggtaccaatccgtctactaccgcaagaacatgacgcggccgccgtcgccgcacctcctccgccggctccggcagcaggaggcgctgcaacggcggtgcggcccgggcacggagccgtaccggcgggcgtccgagcggctcaggtccggccagaacgccggcgacgacttcgtcgccacggtcgacggctgcggctacctcgtgctgatatcctaccgcggcctcggcaaccgcatcctcgccatcacctccgccttcctctacgccatgctcaccggccgcgtcctcctcctcgacccgggcaagaccatggccgacctcttctgcgagccgttccaggccacgtcgtggatgctgcccggcgacttcccgctcgagcacttccgggacctcggcgaggacgcgccggagagctacgggaacgtggcggtgaaccggagcggctccgtcgccggcctgcggttcgtgtacgcgcacctcgaccacgcggcgacgccggcgaacaggctgctgtactgcgacgaccaccgccagttcctccaccgcgtgcagtgggtgatcctgaggacggacagctacatcgcgccggggatcttcctcaacccggcgtacaaggaggagctcgacatgatgttccccaacaaggacgccgtcttctacctcctctcccggtatctcctccacccgaccaacgacgtctggggtatggtcaccaggttctaccactcctacctcaagaacgccgacgagcggctgggcgtccagatcagggtgttcgacggcgacgagccgttccagcacatcctggaccagatcctggagtgcacgtcgcaggagcacctcctccctggagtcgtcgtggtgagcgtgcaccagccgagccacgagctgcaccagcacttcttccggagcacccacgacatgaaggccctcgccgagatgtacctgctgagcttgacggacaagatcgtcaccagcggctggtcgacgttcggctacgtcggcgccggcctcggcggcctcacgccgtacatcatgatcaagccggagaaccacacggtgccgaacccgccgtgcgtcagggccatgtccatggagccctgcgaccacgggccgccgtacttcgagtgcaccaagaaagagatcgacaagatcatcgacaccggcaacctggtgcctcatgtccgatcatgcgaggacgtgccatggggacgcaaactggctgatcctattagctaa

SEQ ID NO: 9849 - DNA, 1167 bp, Oryza sativa
  Clone ID: PAT_MRT4530_16227C.1
gcaaacggctccaatttagccccactccgcagtgtctccctcggatcctcgattccgggaggtcgtcctcgtcctcgtccatggcggcggcggcggcggcgaagacgacgacgaggcggcggcggcgaggggtgctggacctggaggcgcagttcgccttcttccggtcgcagcaccggcacccggtgaacgccgcggcgcacgcgctcctcgcgtggcccatcctcttcaccggcctcctcgtcctccacttcctcccctccccgcccgcgctcccgctcgacccggcgctcgccctcgccctcgcctacgccgccgcctacgtcgcggccgaccgccgcgcgggggcgctcgcggggctcctcctcgccgccggctgggctgccagccgcgccctcgccgcgcgcctcgggttcgcgctcgcctggaaggccgcgctcgccacccagctcttctgctggacctggcagttcctcggccatggcctcttcgagaagagagggccggctgtgggtgatctccctgaggtgttcttgatggagccattcctcatcttgttgcagatactcaacaagcagtttggctatgagccatacccaggtttcagcaagaatgtggacaagaaaatggaggccattctcagggagaacagggaggagctcaagcagaggaaggccacctgattgattttgattcggaatcgattcgagaggaagtgttacacatgtagaacttagcatctttcgattattacctacgacgattcgtgttgatcatgtagtcatacagtaaaacccgaactgtctgaatatgattgtgatggtgttgtttgaggcttgctctgccgattgctaggaacaatatacaagatgcagagatatgttataaatcctacgcaaatgcgggcatattcagatttgcaagtccaaatgttcacagcgaggttactcttcggcagagcatttcgccaaacagctcaggaacaccactgcagcatgtcttgcattgctcgatctcgttttagcattttgtactgattgtgtcgtttgtatgcatgatgtttcgatgtgatatgtaaattactgaactagcggttgcgctgctgctgtttgtaaaaaactaacgcctgttcatattctcgagactagttctctctctccctcgtgc

SEQ ID NO: 9850 - DNA, 1698 bp, Oryza sativa
  Clone ID: PAT_MRT4530_16228C.1
atggagagggagagcagcacaccggcgagcagctggctggggatcgacgaggcggcgccgttcgcggggaagaaggcgacgaaggacgccgccgccgccgacgccttcgtccggcgatggcccaaggtggtgaacgccacgctggtggcgttcatcatgacgatgccgccgctcctcatcctcctcggcggcggccggcccggcgcgccggcggtgtggatcaagtcgaccgttgccagcctagccgcacgaggggaacccaagaaagacgtgcttctcggtggcctgctcctcccaggattcgacgagcaatcgtgcgtcagccggtaccaatccgtctactaccgcaagaacatgacgcggccgccgtcgccgcacctcctccgccggctccggcagcaggaggcgctgcaacggcggtgcggcccgggcacggagccgtaccggcgggcgtccgagcggctcaggtccggccagaacgccggcgacgacttcgtcgccacggtcgacggctgcggctacctcgtgctgatatcctaccgcggcctcggcaaccgcatcctcgccatcacctccgccttcctctacgccatgctcaccggccgcgtcctcctcctcgacccgggcaagaccatggccgacctcttctgcgagccgttccaggccacgtcgtggatgctgcccggcgacttcccgctcgagcacttccgggacctcggcgaggacgcgccggagagctacgggaacgtggcggtgaaccggagcggctccgtcgccggcctgcggttcgtgtacgcgcacctcgaccacgcggcgacgccggcgaacaggctgctgtactgcgacgaccaccgccagttcctccaccgcgtgcagtgggtgatcctgaggacggacagctacatcgcgccggggatcttcctcaacccggcgtacaaggaggagctcgacatgatgttccccaacaaggacgccgtcttctacctcctctcccggtatctcctccacccgaccaacgacgtctggggtatggtcaccaggttctaccactcctacctcaagaacgccgacgagcggctgggcgtccagatcagggtgttcgacggcgacgagccgttccagcacatcctggaccagatcctggagtgcacgtcgcaggagcacctcctccctggagtcgtcgtgagcggccacggcggcggcgtcgcgccgccgccgatcgcgcggtccaaggccgtcctgacgacggggctcaactcgtggtaccacgacagcatccgggacatgtactggcggtcgccgtcggccaccggcgaggtggtgagcgtgcaccagccgagccacgagctgcaccagcacttcttccggagcacccacgacatgaaggccctcgccgagatgtacctgctgagcttgacggacaagatcgtcaccagcggctggtcgacgttcggctacgtcggcgccggcctcggcggcctcacgccgtacatcatgatcaagccggagaaccacacggtgccgaacccgccgtgcgtcagggccatgtccatggagccctgcgaccacgggccgccgtacttcgagtgcaccaagaaagagatcgacaagatcatcgacaccggcaacctggtgcctcatgtccgatcatgcgaggacgtgccatggggacgcaaactggctgatcctattagctaa

SEQ ID NO: 9851 - DNA, 123 bp, Oryza sativa
  Clone ID: PAT_MRT4530_16229C.1
atggyktcgaactggggacaaccgactaactccagcatgcctccgacagcatttgcccaggtcgacaatgtggggatgttgatctttggcaccatcatccatcaggagcgcctcattggctga

SEQ ID NO: 9852 - DNA, 1515 bp, Oryza sativa
  Clone ID: PAT_MRT4530_1622C.1
tcaggccgagccgcagctcgcgtagccttcatttgcctcagagatatccatcgtcgcaacgacttcatccatctctatccgtgtccttttgttcaggacggtccttatagtggccgaggtgctactagcaaaaccctgcacctcgagcccagcgggcgcggcggagacggacggcgagggaacgacttcggcggcgatccttggacgaaggcgagacgcggccggcacaaggcttgatgacgcggaggcgaggacgaagacgacgacggggctgctgcggcacacttgacggacgcggacgacggagaagaacggcttgatggagggacaaacgccacgacgaccgggaacgacgggaggacgacgacgaccggggccggcgaggaggcaacgagggtagccggcagcagctgcacggatgcgaggacggcgtggaacacgccgcagcgatgcccacgacggaggcggcgccgcgagacgacgagccggcgaggaggaacggtgaagacgacgacggacaccggcggcgttcggtcgaaggggaggcgaggccgaggacgaccttgccgctgtgatgccgaaggaggagatggcgacgttggacggtgcacgggcacggcggaagggactgccggaggagatgtcgatgaggaggaaggagaggccagcgcggcggcggcggtgtgtggcggcttccgggcgaaaccggggagcagccggaggagaggacgacgatgcgacgtcgacggaggagacggcgacgttggctgccacaccgacgatggacagtagccggccggagggagtacagtggcaccaatgccactggttgctggcgggggcaccgttccggcgagtttccggcgaggagacggtgagaccggtgaaggggacggcgttgcagagccgagggaggcgacggcacggccggacggcgcgcgggcgaggcgggagaggcggctggaggcggccggcggcacgggagagagaggaagacggcggggagaggtggtacgacgtcggggaggctcgggatgaggctatctttttttgcagctccggtgagtattctcgcgtgtgagcatactcctggtcgctcagcatgtagtaggcttgtctctcccgatcactgacaaggtcgaggtcggtgtcgttcaggagtcgtcgcggagctttgtcgtcttccatcgagacatctgctgatgaacgagtgctagactcgtcatgacgacttgatgaagagtcggactccttgaactgacgagacagtcgcctcctcattccgtactgagctgtcaccatcagcggcccacctctcatccgcaatatataaccccaaataatgatatcccgtaatctagacaccacgcctaaactaccagatactactctaatatcatcgtcatgacatagagtaattgcataagcaaacattatacccacaccaaagcatctcccagataggctagccgtatattcagtataacatgaacataatgtaaaataggtattcat

SEQ ID NO: 9853 - DNA, 132 bp, Oryza sativa
  Clone ID: PAT_MRT4530_16230C.1
atggcgatggttcaagaggaactgaggaggaaggaggccaagctacgcatcggtactagagtgttagccctgccgctctaccaccctgaccgcccttgcaacctctccacgctgaccgtgcgtcgccactag

SEQ ID NO: 9854 - DNA, 261 bp, Oryza sativa
  Clone ID: PAT_MRT4530_16231C.1
gctctaaaacaatggtatatgggggctatccaatgcacggggattcttcagcctttcaataatagaaagtattgccgatccagacatgcccatattcacgaagacatatagggtctgatctgctataaaagacaatgcatctcacacattcataaccctcaaaaagggtgacttatacaccgaaaaaggcatgatgctattacatacaatgcgacagtgagtgtacatataatctggaaacacaaagtgaacatggtataa

SEQ ID NO: 9855 - DNA, 559 bp, Oryza sativa
  Clone ID: PAT_MRT4530_16232C.1
gtaattaatttttttggtaaaccatacacactgttttgttgggcaccgtcccatggcctaacgtgaaaaacatatcccaagagagttttacaatttacaggagcagaaacaaaacaccctaaaaaaaacactcaccactcatcggcacagcacaagcactaagtttttggccatgcaaaggaaagaaatttccccaaagctagcaccaaaaacctttttccgtttcggaggaaaacaaaaaaagttttctgacggggaaggggtccaacaaggtttcttgcttgtttctgcaaaaaaaaccaggcatggccctcatggagaaaaccaaatttacaatgacaggcttggaggcgactaaaagaggggggggaaggcttttttttacggggggatcattgaacacagttcatggggcggattgctgaagcaaaaaaatcaatcttccatcttctctttgcaaaaacagggcctgattctggaagcttaaagggccccaggtgctttggcgggggggaacaagaaaccatcctcggaattggccaagcagtgttcaagcacc

SEQ ID NO: 9856 - DNA, 198 bp, Oryza sativa
  Clone ID: PAT_MRT4530_16233C.1
cgcggcaagcccgagaagacgacgcccagcgcctggctccccgcctcgatgccgggcgacgggcccaacggtctcccccgctgcgtcccccgttattctggtactcatggacgatcccaagctctgcccgacacacccacggcccgctccggcgcgcccggccctcccccccccgccctcgccaccctacacgcctag

SEQ ID NO: 9857 - DNA, 183 bp, Oryza sativa
  Clone ID: PAT_MRT4530_16234C.1
tgtgtcgtgaaaagtctgcaggtcagtcgtgccccaaaacgtgaggtatgtggtacgtcgtcgtagtaggtaaggtaacgtggggcgtgaaacgtgaagtgccgttccgtggggtcgtgtgagtgagtacgtgtccgtgtgtatgtcaatcactagttgcttcaaaaaaaaaaaaaaaaaaaa

SEQ ID NO: 9858 - DNA, 174 bp, Oryza sativa
  Clone ID: PAT_MRT4530_16235C.1
atggaacttgtagaaactaggacgccgccacaagaggatgagaatctagagtgtgcttgcaccaattgctcggggggtttcggcaaggggatgcctagacgacgtctccaacgagagaagcgacggaacaccaccaccgccatccgtcaaggtctcaaagagaaccaagactaa

SEQ ID NO: 9859 - DNA, 165 bp, Oryza sativa
  Clone ID: PAT_MRT4530_16236C.1
atggcggccgccgaggaagccatgggcggcgagcgagcggatccaagcagggcgagctgtgcggcggcggtcggcattggcaatagggcgagggagctaggagctacagcttatcctcaccttgggaaccagaagacggtgtcctcactgggaaagaaggggtag

SEQ ID NO: 9860 - DNA, 150 bp, Oryza sativa
  Clone ID: PAT_MRT4530_16237C.1
atggcgagggcgagctcaagcctgagagccatcgtggtgacatcgagctttagagccattgccaccgcaaagttcacgagagtggagtgggagggccgccacattcatgggatggaggaggagagcaatggggacggcttaaagcaatag

SEQ ID NO: 9861 - DNA, 169 bp, Oryza sativa
  Clone ID: PAT_MRT4530_16238C.1
attcataattctacttggaaagtcaacggccagaagggccattgttgccagtgccatgggcaacggcgccctgcacaccaatggcgccggcgccgacaccaaagggaagccgatcaaatgcaaagcggcagtggcgcacggtcccggcgaggcgctgctgatggaggag

SEQ ID NO: 9862 - DNA, 267 bp, Oryza sativa
  Clone ID: PAT_MRT4530_16239C.1
atggcgcgtaaggctatcatcgtgttcgctcttctgctcgttgctgcgctctgcttcgtcgcctccgcccaggaccctcaggccaacaagcagggcggtggtggtgggggtggtggcggcggaccaccaggctatggccactacccgccgtggaacggcggttacccaggccgtgacccgtggcgccatgacgacccgtggcgccatggctgtcgctggggatgctgccaccgcggccaccacggcgagtgcttccgctgctgctaa

SEQ ID NO: 9863 - DNA, 300 bp, Oryza sativa
  unsure (1)..(300): unsure at all n locations
  Clone ID: PAT_MRT4530_1623C.1
atgtcgacctcagccattgaaggtggagtagagaagggggagagggaaggggaagagatgaggtggagcacgaccaagtacggtctgtttgcaatttatggtgaccctcgtacagaaaaatcagtgtttttaagaccccccccaagagtccgcgacacgacgtccggcacacgcaccaggccggcgctacagctcaacgcgtcaagccatacaatacgccctactcagcggggatctaaaacggagaagacacgtggggccacagaacttngccgtaacatcggcgcagacgctcagctg

SEQ ID NO: 9864 - DNA, 468 bp, Oryza sativa
  Clone ID: PAT_MRT4530_16240C.1
atgggtctgcaggaggattttgaggagtacgctgagaaggtgaagaccttgccggagagcactagcaacgaggacaagcttatcctctatggactctacaagcaggccaccgttggagatgtgaatacttctcgtcctggcatattcgcccagagggacagggcgaaatgggatgcatggaaggctgttgaaggcaaatcaaaggaggaagcaatgagcgactacatcaccaaggtgaagcaactccaggaggaggctgctgctctcaaggctgtgtttagggcctatttagttggtgaaatgaatatttttgagtgtcacatcggacgtttgaccagatgtcgaaggggttttcggacacaaatgaaaaaacaaattgtatactcgcctggaacccgcgagatgaatcttttgagcctaattaagccgtcattagcacatgtgggttactgtagcacttatggctaa

SEQ ID NO: 9865 - DNA, 222 bp, Oryza sativa
  Clone ID: PAT_MRT4530_16241C.1
caacaacgaaagatggcactaactgcaatacgctctttgactcgaattcacttattctgatcccgtttcatgggcaaccctgtcactgtgccccaggcatagcacaggccttagacctggaactgttattcaatcaagatgctagcatgctgatgcacgcaaagacagcactgtccgctggagctgtaggccgctacctctgtgatcatggctccgcttatc

SEQ ID NO: 9866 - DNA, 4581 bp, Oryza sativa
  Clone ID: PAT_MRT4530_16242C.1
atgtatcattggccgagatttttgtctccatatagaaacgaagtgtctaaatttattggtattgccaaggcacacgctgagaagaacaatatgaggaagataattggtccatgtgctgactgtaagaatgaaatagcctgggactttgacgatgcttttaaagtgaaggagcacttagtaactcgtagatttatggacaagtacgaaatatggacacgtcatggcgaagaacaagtggacgggcctgaaaatgtagttccgacacaagttgaagacatggtgcatgacgatggttctgttgaggacaaaatcgacctagaggaaatgttacgtcatgcagaacccgaggtgctgatggggtcggctagagggttaaataactttgaagctttacagaaggcagcaaaggaagttttgtacgatgagtcgaagggctgtgacagtgagatcacaacactccggtcagttcttgaacttatgaggttaaaggcgagacatggatggtctgataccagtttcgacagtctgttagaacttctgcagaaaatgctcccgaggcctaactctctaccatccagcacatatcaagcaaagaaactcatatgccccctttcacttggtgtggaaaagattcatgcgtgcgtaaatcactgcatactgtacaggaaagattacgcttctttagatgaatgtccaacatgcggtgcaagccggtacaagtcgaatagcaatactggcctagaaccctctgaagcaactgagggacgacagagaaaaatcccgcagcttgtgatgtggtaccttcctgtcaaagactgcattaaacggatatactcaaacccgcgagatgcggaactaatgtgctggcatgaagaagggcgcaagaaggatgggatgattcgacacccggcaaatgctcatatggctgatttatggaaagagggattgaaagtgtgggacgagtacttaagggaatacttcacagtgaaggccatcatcttcgtgaccattaacgattatccagcaatgttttcagtttcaggtcaaattaaaggtaaaataggatgtgtgatctgcttgaatggaacgtactataggtatctcccgggttccaacaagcttgtgtacatgcggcaccggtggttcctacgcacaaatcacaagtaccgcaagatgaaggcggagttcgatggtactgaagagactgatcctgcaccaaaacctacatcgggagaaaaggtgtgtgcaatgacagagaaaattgtttgcgagtttggaaaaatgactaagaaaccatcaaaggggacaaagcgcaagaaacccgagaagaatacgaagggaggggatagtaagaagcaagatgatagttcgaagccagatgataaactccctcccccattcaagaagcattccatattttttaagtacctcccgtactggaaagatctggtggttcggcatgccatagacgtcatgcatctagagaagaatgtgtttgacaacatagttggaacattgttggacatgccgaagaagactaaatatggtctgcaatcaaggatggacctagtcgagatgagaatcagggaagagttacaccctcaagaaggagaaaagaatggcaaagtatatcttccaccagcatgtttcacactgacacctgaggagaagaagtcattttgcaactcactccgtgatgtcagagtgcccataggtttctcatcaaacatcagtcgactagtttcaatgaaagatttgtcggtatctggttataattcacacgactgccatgtcttgctcaccgtgtttcttgcaattgcaataagggccataaaaccggagcatttaaaggttgctatcacaaggttgtgctactttttcaacacagtgtcacagaagggatcaatggttgagggttatagtactgaagaggttgtcgagtgctgtatcgattacctcaaagatgaatatgcaattggagtacctgtgccccgacacgagggcaggttgagtggcaggggaacgataggaaagaagagattcgtcacccatgatcacaaatcattccaagaagctcacttcagcgtgcttcatcagtttgctatcgttgagccgtacatcgatcaacatatcgaactaatacaagctaacaataaaggtcgcaccaccgagtggataatgaaagaacacaagcgtctcttcatagattggttgcgagacctagacttacctgagggacaaactaccaatgaaataactatgaagcagttggcttgtggtccatcaactacagcaattgatgaagccggggagaaacaatcatatttcgggtttattgaagaaatatgggaaatcgactatgggcacacaatgcaattccccatatttaagtgccaatgggtaaaatacccgaacggggtcaatgttgataaattcggtcttactgttgttgacctgacgagtgtgggtcacaaggatgacccttggtttgtacagaagattaagaatgtcgagacatctactcagaagaccgtgaagccttacatgcgcacgaacggtgtgggcaaaaatgttaaaggcataataaggtttgaaacgatgaccgatagtactaaagggactgaagagaagggtttaggggagcaagagcagtcccttgctgttgtggttgctccggaaccaacagtcccaccggaaggtagttccgacagcgacgtagctgacaaagacgaggagtactcgtcgccaagcgatccttgtccaagcccaagcccgaagagaaggaaaaagggcgacggtgaagaaggcgacaaggactacattccccctaaagaaggggaaacggcgccacggcgatcaaaacggcagccgaagaaaaaagttccgtcgaaagacgacgacgtaccagctaacacaaacggcacaaagaaaagcgaacggtcagcaaaggcgaagaaaatgaagggcgagagaagcgtgaatagaaaggatgaagggttccatgttgttacccatgtttcgcctaaaggagagccgctcacccctaagacggcacatgcgaaattcagttcacagtgtggcataattgtaagggaaaagatccccatcacggtcaaggactgggatcatgtatcgaatggggataaggaagtcctatggaaaaagttgaagaaaatcttccagttctcagatggatcggaggcagcagtgaggaattgtgcattgcaaacaatggccaagtcttggcgtggttggaaaaccaccttgaacaagaaatttgtgaagacaggatgcacaccattttcgacgtatgccaacataacccccaatcagtgggacgactttctgaccttgaagaacttcccagaagaaattcaaaggagccaaatgtttgcagagttggccaagaagaacaaatttcctcatcacttaggctccgcgggatatgcaccaaaggtggagcagtggacaaaagaggaggaggaaatgaggaagaaggggcaaccgcctaaaagggagaaagatgtgctaagtacggcgctaggtactcctgagcatgggggaagggttcgaggtgtgtcgagcaagatgagttggaaggaagggttcaaaaatgacccccacaagaagcgtgaagcgtacaaggataaacttagagacgaaggggctgcggagtttgaaaggcaaatgatggatttctgcatcaagcacatgcttttgccttgccccgaaaccaaagaacctgagccagattaccccttcgatgacctcaaggagaatacaccctacagattgcacgttcccattggatgctccgggaaaactcttgaggccgctacagccagtgctatccctgggagaacatacaatgaagagttcatacccgatgcgtatgccaaggtgcagccgcaagtggtccacgaagggtttgagtcctacgacattgacttcctgactgcatatggtgtatccgtacttggggatgcggttgatcttgtaattctttggcacaagaatgatatatcctttggattgggcaccgacgccacgcaaaaacctgtggtgcctaaaccggggttgggaaaacctccgagacctcctaagaggaaggtgattgataaggcggaggaacccgagatgcaaaaggaaaatccagtgccggaagtgccaccggagattgcattgccagaggcagctatggagattgcaccgccggaggcagccatggagattccagtgccggatgtgcccatggagattacagtggcagaaccagaggtgcaatttgtggcatcagtcgggtcagaaatagaagaagtaccaggattggaatgggacggtacagagccagaaatatttgaagacccttctcctgcgaaagaccccgaggtgcaagagaccacggtccctgagaaggccactaccagttctgaggtgccacgagtgcttaggagccacgactccaactccaaagatgagaacaaggagaagttcatggtaaccgtcttcagagggggtaaggaacatgctaagttcagagatgacgacccccagaaggctgctgaactagccgggtgttga

SEQ ID NO: 9867 - DNA, 2960 bp, Oryza sativa
  Clone ID: PAT_MRT4530_16243C.1
atgggggcgattggcggggatgaggtggtgcagtgggacaagatggacggaggtgaggtggtcaatggcggcggcggcggcggtgtggggaagctggagaggatactggtgtcagtgaggctgaggcctctcagcgacaaggagattgcgagaggggatccgtcggagtgggagtgcatcaatgacactaccataatctcccggagcaccttccctgacaggccatcggctccgactgcatactccttcgcgagtatttttgcatatggtcaaacaagtagtggaaagacatacaccatgactggcataactgaatatacggtagcagatatttatgattacattggcaagcatgaggagagagcatttgtcttgaaattttcagcaatagaaatatataatgaagttgtaagggatctgctaagtgcagaaaacactcctcttagactttgggatgatgcagagaaaggaacctatgtagaaaacctcacagaggttgtattgagggactggaaccatctcaaggagcttatttctgtatgtgaagctcaaaggaaaaccggggagacatacttaaatgaaaacagctccagatcgcatcaaatacttaaactgacaatagaaagttctgctcgtgagttcttgggtaaggataaatcaactacacttgtggctagtgtgaattttgttgatttagcaggaagtgaacgtgcatctcaggcattatcagctggtgctaggctgaaagaaggctgtcatattaatagaagtttacttaccctaggaactgtcattcggaaactaagcaaagtaagaaatgggcacataccatacagagattcaaagctcacacgcatactgcaaccttctctgggtggtaatgcaagaactgcaattatttgtacaatgagtcctgcccgtagccatatggaacaatcgagaaacactctgctatttgcaagttgtgcaaaggaagtagttacaaatgcccaggttaatgtagtcatgtccgataaagcactagttaagcaattgcaaaaagagcttgctaggttggagagtgaattgcgatgtccagcttcctattctagtcttgaatcattggtgaaggaaaaggataaccaaatccggaagatggagaaagaaattaaggaattgaagttacagcgtgatttagctcagtccaggcttcaggatttgcttcaggttgttggagataaccatgtccatgtttcaaagcagtcctcggtttctgggaggaactttaccttcgatgttccacagacgtgtgaagatgagcaatcaacaactgagtcatcagaagttgttgacagtgtccaaaattttaggtttcaaggccggcgagtggcacagagggaacataagcctcagcaggctgaaaataatgtgcagtttactaccccatctaggtactcagtcagcagtcctccgttcagtgggatgctcccaactaacagaagtgatcatctctcacagatctctaatgaagattcagatgatatctgcaaagaagtacggtgtatagaaaccaatgaaacaggaggaaatgaatgtttggaatcgtcggctgtggggagcaatagtttgcaagacccaaatgcaggttctagtatgcatatcaacaatgattcaaattcatctatgaattctaggcttcgtgatgaatctccagttacccttgagcagcatttggaaaatgtcagaaaaccttttgccaatattgtaaaagatctgggatcttcaacacgtaattcgtcaagctctaaagtacttggtaggagcaggagctgtaggtctcttactggatctagtttgtttgaagatttggagaaggacgattgcaccccaccaaacagaagtttcatagatttcgctgggagacctcaaaattgtcaaagaaggggatctgcactgaactatgatgcagagagcgagaccctatcaagggcagggtcaatgctttctgaaattactaccacgagggatggactgaaggctaacagttctgttgcaggcgacacagaatttactggcataggtgaatttgttgctgaactgaaagaaatggcacaggttcagtatcagaagcaacttggtcatagtggaaatggagacttggcagaaggaaccatcaggagtgtaggactggatccgattacagatgccctacagtcaccttcacggtggcccctggaattcgagaagaagcaacaagagattattgacttttggcatgcatgcaatgtttctttggtccataggacctattttttcttgctattcaaaggagacccagctgattccatttacatggaagtggaacttaggaggctatcatttcttaaagataccttctccaatggagcgatagctagtatcccgaatacttctctagtttcaagtgcgaagaagttgcagcgcgaaagggagatgctctgcaggcagatgcaaagacggctctcaatcgaggaacgagagagcatgtacaccaaatggggggtttcacttgcctccaagaggagaaggctacaggttgctcgttgcctttggaccgaaaccaaagacctggagcatgtcagggagagtgcatcccttgttgccagactgatcggactccttgagccagggaaggccctgagagagatgtttgggttaagttttgcgccgcagcagttcactcggagatcctacaatagctggagatatgggcgctcttctctgaactgattgaacctacaagatgctactgacggaagggggctttccagttttcccattttgttttgttttgcttttaggtcctttgtcatgcacttctgtatgatagatgtaactcatttgctattttttattggacgatcagtagggtcgatcttaaaaaaacaaagttctatatcacctgaattgcaaggttaaaatgtatgttcaactaacacgaa

SEQ ID NO: 9868 - DNA, 823 bp, Oryza sativa
  Clone ID: PAT_MRT4530_16244C.1
accccgaggtgcaagagatcacggttctgaggtgcctagagtgcttaggagccacgactccaagtccaaagatgagaacaaggagaagttcatggtaaccgtcttcaaaggggataaggaacgtgccaagctcagagatgatgacccccagaaggccgctgaactagccgggccaacatacttcacaactcatgattgcccggaaaagtacgaacatgggaaagcactcttgcttgaatgggcactgaacgaaggaccatgggagatgaaaaggatgcaatacatggatgctaagaagaaaaaagaacctatcggcttcttggatctaactcggatttgccaaacacagcatactatgaggctagcaccaggtgatcattatatctgtttactcatccaccctgaagacggaaccgtggtagtcttggaccctctcgattatagtcacaagcaatacaaagaatttctaacaatcttacagtatgtgtaccaatactacaagttcaagggtggagaacagacccgaacaagggagaagctgctatgtcacaagcaaccgcgaggaacggtcctttgcgggttttacgcgtgcgaattcctaagggttaatgggaggtacaggactaacccggaggatttgccaagattagaacatcgaacaagctttgacgatacaggcatcaaaaatgtccagcgtgatctgtgccacttcatccaccatgagtgctgtcatgtgaaagtagatttcttcgacccagagggtgccttagccacaagtaacgaattcaaggatcttcgggagtggaacagtgctatgccataa

SEQ ID NO: 9869 - DNA, 350 bp, Oryza sativa
  unsure (1)..(350): unsure at all n locations
  Clone ID: PAT_MRT4530_16245C.1
ttttattttttttttttcttttttttttttttttgttttttggagggatctctgattaagatttataaacaaaatcactctttctttcaaaatcgtgtaaaataaacttaatgctctaacaggatactgaattctgaatgaacagtattagggctttttttcccgatcaaaacccggagatcaagaacgaaacataacaataaagcggggggtggcctaatgcggaccatggattaatttgtttagggagatcatggatgtggctcataaaaaagtgntccgaatctttggatctccagatattgtttctccagactggccccaaaggcccaaaggcatggatgaccggg

SEQ ID NO: 9870 - DNA, 3906 bp, Oryza sativa
  Clone ID: PAT_MRT4530_16246C.1
atggacatctctaggacaaatgaaggctacacgagctgcggcccggtagtcgagatgtcatggcatagggctggtgtcctgctgctaggggctcaatcctgcctacctgtcccggaggttccggccgaaggcggggctgggtcgggaccccgtcagcctggtattgatattgacatatttcttgaaccattgttggaagatatgactgatttatggaaagagggattgagagtgtgggacgagtacttaagggaatacttcacagtgaaggccatcatcttcgtgaccattaacgattatccagcaatgttttcagtttcaggtcaaattaaaggtaaaacaggatgtgtgatcttcatgaatggagcatactataggtatctcccgggttccaacaagcttgtgtacatgcggcaccggcggttcctacgcacaaatcacaagtaccgcaagatgaaggcggagttcgatggcactgaagagacagatcctgcacccaaaccaacctcgggagaaaaggtgtgtgcaatgatagagaaaattgtttgcgagtttggaaaagtgactaagaaaccatcaaaggggacaaagcgcaagaaacccgagaagaatacgaaacaaggggatagtaagaaggaagatgatagttcgaagccagatgataaactccctcccccagtcaagaagcattccatattttttaagtacctcccatactggaaacatctggaggttcggcatgccatagacgtcatgcatctagagaagaatgtgtttgacaacatagttggaacattgttggacatgccgaacaagactaaagatgccggggaaaaacaatcatacttcgggtttattgaagaaatatgggaaatcgactatgggcacacaatgcaattccccatatttaagtgccagtgggtaaaatacctgaacgggaagattaagaatgtcgagacatctactcagaagatcgtgaagccttacatgcgcacggacggcgggaaccctagaaattttggcatcgtcaggctgccaaattttttcgcctccgccgtcctccgccgccgcccgcctgcgaccttcaccttccgaccgtcgtcctccgccgccgccgaccgtcgtcctccgagcgccgccggccttcaagctgagctcgcgctggcctcgcgctcgaccgcgcggcgccggccgtcgatccagctccaccgccacccgaccgctcccgccgccagccgctccactgccgagctacaccgcctctaccgccactccactgctccgccgccgccaccgccgtccaccgcgcgcgcgcaagctcgctctctagcgctccaccgccgccaccgtccacagccgccgccgccatctctgtctctctctcgcagttgtccacgagcgaggtttgaaactatggccgatagtactaaagggactgaagagaagggtttaggggagcaagagcagtcccttgctgttgtggttgcttcggaaccaacggtcccaccagaagatagttccggcagcgacatagctcacgaagacgatgagtactcgttgccaagtgatccttgtccaagcccaagcccgaagagaaggaaaaaaggcgacagtgaagaaggcgacaaagactacattccccctaaagaagggtgtggcataatagtaagggaaaagatccccatcacggtgaaggactgggatcatgtatcgaatggggataaggaagtcctatggaaagagttgaagaaaatcttccagttcacggatggatcagagagcattgctgataaaatagagaatttatccagttcacagaagaaaggatttttcaagcctaagagggagaaagatgtgctaagtacggcgctgggtactcctgagcatgggggaagggttcgaggtgtgtcgagcaagatgagttggaaggaagggttcaaacatgacccccacaagaagcgtgaagcgtacaaggataaacttagagacgaaggggctgcggagtttgaaaggcaaatgatggatttctgcgtcaagcacatgattttgcctcgccccgaaaccaaagaacctgagccagattaccccttcgatgacctcaaggagaatacgccctgcagattgcatccgcaagtggtccatgaagggtttgactcctacgacattgatttcccgactgcagatggtgtatccgtacttggggatgcggtcgatcttgtaattctctggcacaagaatgacatatcctttggattgggcaccgacgccacggaaaaacctgtggtgccaaaaccggggttgggaaaacctccgagacctcctaagaggaaggtgactgataaggcggaggaacccgagatgcaaaaggataatccagtgccggaagtgccaccggagattgcagtgccggaggcagccatggagattccagtgccggaagtgcccatggagattacagtggcagaaccagaggtgcaatttgtggcatcagtcggatccgaaatagaagaagtaccaggattggaatgggacggtacaaagccagaaatatttgatgacccttctcctgcgaaagaccccgaggtgcaagagaccactatccctaagaaggccactaccagttctgaggtgcctagaatgcttaggagccacgactccaagtccaaagatgagaacaaggagaagttcatggtaaccgtcttcagagggggtaaggaacgtggcaagcctagagatgatgacccccagaaggccgctgaactagccgggccaacatacttcacaaccgatgattgcccggctgagtacgaacatgggaaagcactcttgccggaatgggcactgaacgaagtaccatgggagatgaaaaggttacataccttctacatgcaggccagcaagaaaggcttgggcaatataacagctcgatcaccggcagattgtttcggcaaagaaggttacgtatggctagatttctcatatctccacgccatatatcgttgggataagatggacgtcaactacgtcggtgtttggtgcatgaaaaaggacctcgctgacgtcagcaaaggggcggccggcgccgacacgcgggccccacacgtcagcggcactaagaaagggagagggggcggctggcaggcgggccccaccggcagcggctcaagggcgccggtccaccgtggaccgagaccaccgaggcggtccaccgtcggtccacgggaaccgacggcccggatcggcccaaagccgatcggacggccacgatgcggcgcggctggggcacgggcgcggccgataccgacccggccggccatggcacggcggctacgcgcacgcggccagacgaccaccggcgacggcagcgcgtcgcggtggcgggcatggggagcggcggatggggaaaaaggagaggggccggtggggattctcaccgaggacggcgacggcgagacgaccacggggaggtggccggcggcggaaaagatggcggcgaccggcacgggaggcgacgggaacggcgttccgacgacgcccgaccacggtggagccgcggccgagggccggcaagacctagggaaaatattggagcggttagggagagaaataggcgaccggaccggtgaggaccggtggtttgagacgacaacggcggtagcggagctcgggtcgacggcggaaagcggccggctgaagacggcggcggcgggggagagaggtggtgcacgaggcggcggtgttccagaggcggagaggggaaatggagtagaggccgggctgcggcacggcgccgcgaagccgacagtggtggcggattggcgcggcggtgggtggagcggcggaatcggccggccggagctcgccggaaagcggtggtgcacgggagcacggtggggaggtgtctag

SEQ ID NO: 9871 - DNA, 831 bp, Oryza sativa
  Clone ID: PAT_MRT4530_16247C.1
atggagattgcagtgccggatgtccaaatggatattaaagtggctgaaccagaggtgaaatttgtggcatcagttgggacagaaatagaagaagtaccaggattggaatgggacggtacagagccagaaatatttgaagacccttctcctgcgaaagaccccgaggtgcaacagaccacggtccctgagaaggccactaccagttctgaggtgcctagagtgcttaggagccacgactccaagaccaaagatgagaacaaggagaagttcatggtaactgtctttagagggggtaaggaacgtgccaagctcagagatgatgacccccagaaggccgctgaactagccgggccaacatacttcgcaactgatgattgcccagaaaagtacgaacatgggaaagcactcttgccggaatgggcactgaaggaaggaccatgggagatgagaaggatgcaatacatggatactaagaagaaaaaagaaacctatcggcttcttagatccaactcggatctgccaaacacaacataccgtgaggctagcaccaggtgtcacaagcaaccgcaaggaacggtcctttgtgggtattacgcttgcgaattccttagagttaatgggaggtacaggactaacgcaaaggatatgccaagattagaacgtcgaacaagcgttgaagatacaggcatcagaaatgttcagcgtgatctgtgcgatttcatccaccatgagtgctaccatgtgaaaggagatttcatcgacccagagggtgccctagccacaagtgacgaattcaaggatctttgggagtggaacagtgctatgccataa

SEQ ID NO: 9872 - DNA, 2310 bp, Oryza sativa
  Clone ID: PAT_MRT4530_16248C.1
atgtatcattggccgaggtttttgtctccatatagggatgaagtgtctaaatttactggtattgcgaaggcacacgctgaaaagaacaatatgaggaagataatttgtccttgtgctgactgtaagaatgaaatagcctgggaagatgcttctaaagtgatggagcagttagtaactcgtggatttatggaaaagtacgaaatatggacacaccatggcaaagaacaagtggacgggcctgaaaatgtagttccgacacaagttgaagacatggtgcatgacgatggttcaggtgaggacaaaatcgatctagatgaaatgttatgtcatccagaacccgaggtgctaatgggttcggttataggtttaaataactttgaagctttacagaaggcagctaaggaagttttgtacgatgaatcaaagggctatgacaaacttctgcagaaaatgctcctgaggcctaactcactaccatctagcatataccaagcgaagaaactcagatgtcccctttcacttggtgtggaaaagattcatgcgtgcgttaatcactacatactgtacaggaaagaatacgcttctttagatgaatgtccaacatgcggtgctagccattacaaatcgaatagcaatactggcctagaaccgtctgatacaactgagggaactcagagaaaaatcccgcagcttgtgatgtggtaccttcctgtcaaagaacgaattaaatggatatactcaaatccgcgagatgtggaactaatgcgttggcatcaagaagggcgcaagaaggatgggatgattcgagacctggcagatgcttgtcagtggataaactttgatgctcagtatagagagtttgctaaagaccgacggaatattaggtttgccctgagtgctgatggagttagtccttttggagaaatgagcagctcacatagtacatggccagtgcttctcaccatgtataatcttcctacgtggctttgtcaaaagcgaaaatacgtattactctgtatcctcatacagggaccccgtcagcctggtattgatattgacgtatttcttgaaccattgttggaagatatggctgatttatggaaagagggattgaaaatgtgggacgagtacttaagagaatacttcacagtgaaggccatcatcttcgtgaccattaacgattatccagcaatgttttcagtttcaggtcaaattaaagttagtaagaaaccatcaaaggggacaaagcgcaagaaacccgagaagactaagaaaccagaggatagaaagaagctagatgatagtatgaagctagatgataaactccctctcccattcaagaagcattccatattctttaagtacctcccgtactggaaagatctggaggttcggcatgccatagacatcatgcatctagagaagaatgtgtttgacaacatagttggaacattgttggacatgccgaagaagactaaagatggtcttcagtcacgaattgacctagtcgagatgggaatcagggaagagttacaccctcaagaaggagagaacaatggcaaagtatatcttccaccagcctgtttcacaatgacacctgaggagaagaagtcattttgcaaatcactccgtgatgtcagagtgcccataggtttctcatcaaacatcagtcgactagtttccataaaagatttgtcggtatctggttataattcacacgactgtcatgtcttgctcaccgtgtttcttgcaattacaataagggccataaaaccggaacttttaaatgttgctatcacaaggttttgctactttttcaacgcagtgtcacagaaggtcattagtcatgaagagttagcaaatctctgtacattcgcacatgagacacagtgccaacttgagatgtgtttccctccatcattttttgatacgatggagcacctcattattcacatagtgtcgcagatggttgcgcttggcccattgtacctccatcaaatgtggtcatacgagtgttacatggcggttttgaagggttacgcccgaaatcgtgcacatccagagggatcaatggttgagggttatagtactgaagaggttgtcgagtgctgtatcgattacctcaaagatggaaataaaattggagtacctgtgccccgacacgagggcagattgagtggcaggggaaccataggaaagaagatattcgtcacccatgatcacaaatcatttcaagaagctcacttcagcgtgcttcatcagtttgctatcgttgagccttacattgatcaacatatcgaactactatga

SEQ ID NO: 9873 - DNA, 2949 bp, Oryza sativa
  Clone ID: PAT_MRT4530_16249C.1
atggggtcggctagagggttaaataactttgaagctttacagaaggcagcaaaggaagttttgtacgatgagtcgaagggctgtgatagtgagttcacaacactccgaaaatgctcccgaggcctaactcactaccatccagcacatatcaagcaaagaaactcatatgccccctttcacttgggaccccgtcagcctggtattgatattgacgtatttcttgaaccattgttggaagatatggttgatttatggaaagagggattgaaagtgtgggatgagtacttaagggaatacttcacagtaaaggccatcatcttcgtgaccattaacgattatccagcaatgttttcagtttcaggtcaaattaaaggtaaaataggatgtgtgatctgcttgaatggaacgtactataggtatctcctgggttccaacaagcttgtgtacatgcggcaccggcggttcctacgcacaaatcacaagtaccgcaagatgaaggcggagttcgatggtactgaaaagactgatcctgcaccaaaaactacatcgggagaaaagtacctctcgtactggaaagatctagaggttcggcatgccatagacgtcatgcatctagagaagaatgtgtttgacaacatagttggaacattgttggacatgccgaagaagactaaagatggtctgcaatcaagaatggacctagtcgagatgggaatcagggaagagttacaccctcaagaaggagaaaagaatggcaaagcaattaatgaagccagggaaaaacaattatacttcgggtttattgaagaaatatgggaaatcgactatgggcacacaatgcaattccccatatttaagtgccagtgggtaaaatacccgaacggggtcaatgttgataagttcggtcttactattgttgacctggcgagtgtgggtcacaaggatgacccttggaagattaagaatgtcgagacatctactcagaagaccatgaagccttacatacgcacggacgacggcccgcttgcgaagatagtaaaaaagatcttcgcatcttcccaggcggaccgcccgcctgcgaagatcgttgcccaatataagggcaagcccgcggcgccaaaatttctaagtccaggcgggaaccctagaaattttggcaccgtcaggctgccgaaatttttcgccgccgcacgccttcgccgtcctccgccgccgcccgcctgcgaccttcactctccgaccgtcgtcctccgccgccaccgaccgtcattgtccacgcgctgtcaccgagaccgccgccccttgccgccgctccaccgcgcgcgacctccaccactctgccgccgccgccgccgacccctccaccgcgcgcccgctccaccgccgccagctcctccaccgccaccggcccctccaccgccgtcggccacccctccaccgccgccggccgccacctctccctctatctcgctcgcggccgaacggcttaatcggccgatcgttgtccacgagcgaagtcgtcctcggccgaacgacgtcttcgaccggtcgtcgtccacggccgaacctcgtcttcggccgttcgtcgtccacgaccgaagccggtcgtcgtccacggccgaacctcgtcgccggcccttccttcgtcgtccacgaccgaagctcgtcgtcggccgttcgtcgaacacggacaggtttgaaacgatggccgatagtactaaagggactgaagagaagggtttaggggagcaggagctgtcccttgctgttgtggttgctccggaaccaacggtcccaccgaaaggtagttccaactgcgacgttggtgatgaagacgaggattactcgtcgccaagcgatccttgtccaagcccaagcccgaagagaaggaaaaagggcaacagtgaagaagacgacaaggactacattccccctaaagaagggtgtggcataatagtaagggaaaagatccccatcacggtcaagtactgggattatgtatcgaatggggataaggaagtcctatggaaagagttgaagaaaatcttccagttcccggatggatcaaaggcagcagtaagaaattgtgcactgcaaacaatggccaagtcttggcgtggttggaaaaccaccttgaacaagaaatttgtgaagactggacgcacaccattttcgacgtatgccaacataacccccaatcagtgggacgactttctgaccttgaagaactccccagaagaaattcaaaggagccaaaagtatgcagagttggccaagaagaacaaatttcctcatcgcttaggctccgcgggatacgcgtgggagaaagatgtgctaagtacggcgctgggtactcctgagcatgggggaagggttcaaggtgcgtcgagtaagatgagttggaaggaagggttcaaaaatgacccctacaagaagcgtgaagcgtacaaggataaacttagagacgaagggactgcggagtttgaaaggcaaatgatggatttctgcgtcaagcacatgattttgcctcgccccgaaaccaaagaacctgagccagattaccccttcgataacctcaaggagaatacaccctgcagattgcacgttcccattggacgctccgggaaaactcttgaggccgctacagccattgctatccctgggagaacatacaatgaagagttcatacccgctgtgtatgccaaggtgcagccgcaagtggtccacgaagggtttgagtcctacgacattgacttcccgactgcagatggtgtatccgtacttggggatgcagtcgatcttgtaattctctggcacaagaatgacatatcctttggattgggcaccgacgccacgcaaaaacctgtggtgcctaaaccggggttgggaaaacctccgaggcctcctaagaggaaggtgactgataaggcggaggaaccagagatgtaa

SEQ ID NO: 9874 - DNA, 3447 bp, Oryza sativa
  Clone ID: PAT_MRT4530_1624C.1
atggtgggaccacttccagctacgcagccagagggacagcctatcacctgggcccatttcaccgccgccttccggaggacccatgtgcccgccggagtcatggcccttaagaagagggaatttcgggagttgaaacaaggcaaccgctccgtgatggagtatttgcacgagttcaataatttggcccggtacgccccagaggatgttcgtgaagatgaggagaagcaggagaaattcctggcagggatggaccctgagctatctgttcccctggtggacaagagcatccgcctggaagccaagcacaaggaattggagtcgcacaagcgtcgcttggcgaatttccgcaaccaacagggggctaaccaaaggatccgctacaccaatccctatccagggggatcctcctcgcagccgcagcagcaaccccgctccgcgctccgacctcaattcgtggtgcgcgtcccacagccgcagcagcagcagaatcagcaaggggcccatgcaccccgccctcctgcaccagccgtgcagcctggacaaggccgcagggatgctcaaggtcaacagtgtctgtgcttcaactgcttcaagcccgggcactttgcggataaatgcccaaagccgaggcgacagcaaggccaagcgcctccccgccccaacaacggtggtaaggatgtcactcggggccgtgtgaaccacgtgactgccgaggatgtgctgagaactccagacatcatcgttggtacgttcctcattcattccatccctgctaccattttgttcgactctggagcttcccactcgtttatatctgtgccattcatggggagaaatcagctgggggtagaaaggcttaggaaccctctgctcatcaccacccctggaggggttatgacagcaaagtattatagccctgccgttcctatagaaatccagggaattgctttcccctcggatttgattcttctagacaccaagaacttggatgtgatcctcgggatgaattggttggctcaattccaaggagtagtggattgcgcaaggcgcactgtcactgtgtatcggggccctgatcaaccggttgttttctttgcacccccaacttccgccggcagttcagtacttcatcagctaggattgccagaaatacccatcgtcagtgagttcggagatgtgtttccggaagaactacccggtatgccgcccaagcgagagattgagttccagatagatcttgctccaggaaccgctcctctgtacaagcgaccctaccgtatggcggcaaatgaactggccgaaccgagcacttccccctggggtgctcccgtgatttttgtggagaagaaagagaagacaaagaggatgtgtgtcgactacagagctctcaatgaagttactatcaaaaagaagtaccctcttccccggatcgatgatctgttcgatcagcttaaaggtgccactgtattctccaagattgatcttcgttccggatatcaccagttgcgcatccgtgaagaggatatcccgaagaccgcattcaccacgcaatacggactgtatgaattcacggtaatgttgttcggtctaaccaatgctcctgccttcttcatgaacttaatgaacaaagtgttcatggaatacctggataagtttgttgtggtctttattgacgacatactggtgtactcacaatcagaggaagaccatcagcagcatctccgtttagtgttgggaaagctccgggaacaccaattgtatgccaagctcagcaagtgtgagttctggttgcccgaagtcaagttcttagggcacgtgatatctgctaaaggagttgttgtggatcccgaaacgttgctgaagaaggaagaaaaatttgtgtggagccctcaatgcgagaaagcattccaaactctcaaagaaaagctggtttccttgctagtgttaatcttaccggatactcgcaaggacttcctggtgtactgtgacgcttcgcgccaaggattggggtgcgtattaatgcagaaaggtcatgtggtagcctatgcctcacgccagctacggccctatgaaggcaactatcctacccatgatttggagttagccgctgtggttcatgctctaaaaatccggcggcagtatctcattggaaatcgctgcgaaatatataccgatcataagagtttgaaatacatcttcactcagtcggatctgaatcttcggcaaagaaggtggttagagctcatcaaggattatgatgtgggaatccactatcatcctggtaaggccaacgtggtcgccgacactctaagtcgaaaaagccattgcaacactcttggcatccgtggcattccaccggaacttaatcaacagatggaagccctgaacctaagcatagttggtcgtggattcttggctacgctggaagccaagcctaccttgctcgatcgaatccgcgaggctcagaagaatgatccagatatacatgggatcctcaagaatatgaaacagcgtaaagctgctggtttcacagaagatgaacacggaaccctatggaacggaaatcgtgtatgcgtaccggacgacaaggaacttaaacggttgatacttcaggaagctcacgaaagtccttattccatccaccctggcagcacgaagatgtacttagacttgaaagagaaatactggtgggttagtatgaagcgcgtgtcaaagcagagcaccaacgaccggccggacttctccaacctctccaagtaccagaatggaaatgggatgaaattgggatggatttcatcaccggacttccaaaaacccaaggcggatatgattctatatgggtagttgtggatcgattaaccaaggtagctcgatttattcctgtgaagaccacctatggagggaacaaactagcggagctctacttcgctaggatcgtgagtctccacggcgttcccaagaaaatcgtatctgataggggaagccaattcacctctcacttttggaagaagctccaagaagagttgggtactcgattgaatttcagcaccgcctatcacccgcagacagatggacagaccgagcgtctaaatcaaatcctagaagatatgctccgcgcatgtgtactagatttcgggaagacctgggataagagtctcccctatgccgagttctcctacaataacagctatcaagccagcatacaaatggcaccatatgaagcgttgtacgggcgcaaatgccgaacaccgctcctgtgggaccaagttggggaaagccaagtgttcgggactgatatcctgagagaagctgaagctaaagtcagaatcattcgggataatctaaaggtggcacagtcacggcagaaaagttatgcagataaccgtcgccgtgacctggaattcgcagtggatgattttgtgtatcttcgagtcacgccattgcgag

SEQ ID NO: 9875 - DNA, 256 bp, Oryza sativa
  unsure (1)..(256): unsure at all n locations
  Clone ID: PAT_MRT4530_16250C.1
cccgcctcccccattctccccgccgncgccgccgccgtctcgccgccgacgaggagatgggtcgcgtgatccgcgcgcagtananggtgcggnctccgtgtncaagtcccacacccaccancgcaaggccccgcnaggttccnctccctcgtacttcgncgagcgaaacggctacctcannggcgtngtcaccgnaatcatccacgaccccggncgcggagcgccgntcntcaaagtgacgttncggcaaccgttc

SEQ ID NO: 9876 - DNA, 2567 bp, Oryza sativa
  Clone ID: PAT_MRT4530_16251C.1
aagatagttctgacagcgacgttgctcacgaagacgatgagtactcgtcgccaagcgatccttgtccaagcccaagcctgaagagaaggaaaaagggcgacggtgaagaaggcgacaaggactacattccccctaaagaagggcccgagctaattcgaaactttcatgtataccttctcgtaggaaacggcgccacagcgatcaaaaagacagctgaagaaaaagttctgtcgcaaattgacgaggtaccagctaacacaaccagctcaaagaaaagcgaacggtcagctaaggtgaagaaaaggaagcgcgagagaagcgtcaatagaaaggatgaagggttccatgttgttacccatgtttcgccaaaaggagagccgctcgccccaaagacggcacgtgcgaaattcagttcacagtgtggcataatagtaagggaaaagatccccatcacggtcaaggactgggatcatgtatcgaatggggataaggaagtcctatggaaagagttgaagaaaatcttccaattcccggatggatcagaggcagcatgggacgactttctgacgttgaagaactccccggaagaaattcaaaggagccaaaagtatgcagagttggccaagaagaacaaatttcctcatcgcttaggctccacgggatacgcaccaaaggtggagcagtggacaaaagaggaggaggaaatgaggaagaaggggcaaccggtaccaatggaggaatggacacagagatcaaggaactgggtaagagctagaactcctaagatcacggatgaaggaaaagtatcgtttgaatttccggagctgcagagcgttgccaataaaatagagaatttatccagttcacagaagaaaggatttttcaagcctaagagggagaaagatgtgctaagtacagggctgggtactcctgagcatgggggaagggttcgagatgtgtcgagcaagatgagttggaaggaagggttcaaacatgacccccacaagaagcgtgaagcgtacaaggataaacttagagacgaaggggctgcggagtttgaaaggcaaatgatggatttctgcgtcaagcacatgattttgcctcgccccgaaaccaaagaacctgagccagattaccccttcgatgacctcaaagagaatacaccctgcagattgcacattcccattggacgctctgggaaaactcttgaggccgctatagccattgctatccctgggagaacatacaacgaagagtttatacccgatgcgtatgccaaggtgcagccgcaagtggtccacgatgggtttgagtcctacgacattgacttctcgactgcagatggtgtatccgtacttggggatgcggtcgatcttgtaattctctggcacaagaatgacatatcctttggattgggcactgacgccacgcaaaaacctgtggtgccaaaactggggttgggaaaacctccgagacctcctaagaggaaggtgactgataaggcggaggaacccgagatgcaaaaggaaaatccagtgccggaagtgccaccggagattgcaatgccagaggcagccatggagattccagtgtcggaaagccagaaatatttgaagacccttctcctgcgaaagaccccgaggtgcaagagaccacggtccctgagaaggccactacctgttctgaggtgcctagagtgcttaggagccacgactccaaagtccaaagatgagaacaaggagaggttcatggtaatcgtcttcagagggggtaaggaacgtgccaagctcagagatgatgacccccagaaggccgctgaactagccgggccaacatacttcgcaaccgatgattgcccggctgagtacgaacatgggaaagcactcttgccggaatgggcactgaacgaagtaccatgggagatgaaaaggttacataccttctacatgcaggccagcaagaaaggcttgggcaatataacagctcgatcaccggcagattgtttcggcgaagaaggttacgtatggctagatttctcatatctccacgccatatatcgtcgggataagatggacgtcaactacgtcggtgtttggtgcatgatgcaatacatagatgctaagaagacaaaagaacctatcggcttcttggatccaactcggatctgccaaacacaacatactgtgagcctagcaccagggtcagaccagctgaagggcaagacttcaaaagagatagctgaatacaagaagggcttgcacaaggagaaattgattactgtcgcacagtacattggacgagtcttcttgcactttcaaaataagagagttgtcctagccgcttataattttaacgatcattatatctgtttactcatccaccctaaagacggaaccgtggtagtcttggaccctctcgattacaaacaccagtcatataaagaatttctaacaatcttacagtatgtcacaagcaaccacgaggaactgtcctttgcgggtattacgcttgctaattccttaaagttaatgggagttgccaagattagaatgtcgaacaagcgttga

SEQ ID NO: 9877 - DNA, 378 bp, Oryza sativa
  Clone ID: PAT_MRT4530_16252C.1
atggcccgtgtcacggcggtcggagatgggtacgagtacgacggggtggtcgtcggccatccagtgatccaattcggcgatggggcgccgccggccgtcgttggttacccgctgccaaaggagccgccgccaccaccgccgccggcgacattgcaacgaggacgccccgagcagcggtgctcctcccgctgcgggccctgcgagatattcacagtgacatttatggttgtcgtcgcggtcgaatcgttaacttacttcctcctcgccatgattggcatggcatccgtcacagccctcactcgtgtgcacccacgcgggaagttcaaacttctcggtcggtcacctatcccgaaattgctccagaccaagcacacttaa

SEQ ID NO: 9878 - DNA, 533 bp, Oryza sativa
  Clone ID: PAT_MRT4530_16253C.1
ttcgtcctcaactttcttttttttctctccagatcctgtctggaacttgttcgcatattcttacccataacccatgcaacaaaaatgttcgagataatgatcatgcaaaatacacaaactccaccaaaggctaacgtgaggagatcgtgatcctgaacatgattaggatgattatctaattctcttcagaaaaatgcaaagttaagtcaggcctttaagaacaagggaggacatttaaatatgtgaagcgagaaaattattgataagcttatcaggcatccatttgtcaggtttagatacttttcaaatatctgacttttatgtttgccaggtttgcgttgttgacccttttctttttagataaaccgagtggaatacatgcattccaagggatttattcaccgtgatatcaagccagacaatttccttatcggcttaggccggaaagcgaaccaggtgtacataattgattatgggcttggtagaaatacaaggatctccagacccataacacattcctacagggagacaag

SEQ ID NO: 9879 - DNA, 3192 bp, Oryza sativa
  unsure (1)..(3192): unsure at all n locations
  Clone ID: PAT_MRT4530_16254C.1
atgtgttgcaacggacttcaacatctggagaagtatggaattcctgtacccaattatgctcttgtcaatagagaatatccgtaccaagagttagactactttattgagcaagaagattttgttgaggttcatggaaagcgatttatgaagcccttcgtggagaaacctgtcaatggggatgaccatagaataatgatatattatcctaattctgctggtggtggaatgaaggaactgttccgaaaggttggtaaccgatctagtgaatttcatcctgatgtcaggagagtgaggcgtgaaggatcttacatttacgaggagttcatgcctactggtgggacggatgttaaagtttacacagttggcccaggatatgcacatgctgaggcacgtaaatcaccagttgttgatggtgttgttatgaggaaccctgatgggaaagaagtacggtatcctgtgcttttgacccctacagagaaacaaatgtcaagagacgtgtgcagtgcttttaggcagatggtttgtggttttgatctcttaaggtgtgatggaagatcatatgtttgtgacgttaatggatggagctttgtgaagaactcgtacaagtattatgacgatgctgcatgcatcttacgaaagatatttctagatgcaaaggcacctcatctttcttcaaccatccctccaagccttccttggaaatctaatgaaccagttcagcccactgaaggtcttacacgacaaggaagtggaataattggcacatttgggcagtcagaagaattacgttctgtcattgttgtgatacgccatggcgatcggacaccaaagcagaaagtgaaattgaaagttactgaggaaaaactcctgaatttgatgttgaaatacaatggtggaaagccaagagctgagacaaaactgaaaagtgccgtgcaactacaagacttgctagatgccacaaggcagcttgtaccaccaacaaggtctggccgggaaagtgacagtgatgctgaggatttggagcatattgaaaagcttcgtcaagtcaaagcagtactggaggagggtgggcatttctctggtatttatagaaaagtgcaactaaagccactgaaatggattagagttccaaagcgctgtggtgatggtgaagaggaacgaccaattgaagcactgatgattctaaaatatggcggtgtactcactcatgctgggagaaagcagaagaaaaacatatccatagaaggtcccaccaactcaataggtggtggtgggatggctgaagagttgggtaggtttttcagaaacaatatatatccaggtgaaggaactggtttgcttcgccttcatagcacgtacagacatgatttaaaaatatacagttcagatgaaggccgtgtgcagatgtcagcagcagcatttgccaaaggccttcttgatttggaagggcaactaacacctatactggtctctctagtaagtaaagactcatctatgctagatggattggaagatgctagcatcgagatggatgaagcaaaggctagattgcatgagatcatcattacaaatgctaaagcaaagaataccaatgaaccagtggagtttccatggatggttgatggtgcaggattgcctgcaaatgcttcgcagcttctccctaagatggccaagttgacgaaaccagtaactgcacaagtcaagctacttgctgaagatgaagaggagaagcttgcattaacaaactcgttgtctagatatgaccaagcaaaggcttttggaaaaacaacaattgatgtagctcgtattgctgccgggttgccttgtggtagtgagagcttcctctcgatgtttgctcgatggaaaaaacttgagagggatttatataatgaaagaaaggaccgatttgacattacacaaatcccagatgtctatgactcctgcaaatatgacctcctgcataatgcacatcttaaccttgaaggtttggaagagcttttcaaagttgctcaacttcttgctgatggcgtaattccaaacgagtatgggatcaacccaaagcaaaaactaaaaattggctcaaagatagcacgtcggttacttggaaaaattttaattgatctacggaacactcgtgaagaagcaataagtgtttcagatccaaaatttacagaagatgaagctacattcttaccaacgaaagaatcagagtaccaacaaaaacttcaaactagaaatgaggatggaagaagatctagttccacaagtgagaaatcattggatcaggaagatgaagatgatagagaaactaaataccgcttagatcctaagtatgctaatgtaaagacacctgacagacatgtccggacaaggctttatttcacatcagaatctcacatacactccttaatgaatgtccttcgctattgcaacttggatgaatgtctacaaggggaggatagccttgtctgccaaagcgctttagaccgactgcatagaaccagggagcttgactacatgagtaatattgtgcttagaatgtttgaaaatactgaggttcctttagaagatgagaaaaggttccggattgaaatgacatttagtcgtggtgctgatcttagtcctctagaggataaaaccagtgaaaatacttccttgctccaggagcacaccctgccgataatggggcctgagagactgcaggaagttggttcctgcctaacactggacaagtttgagaaaatggtgcgaccatttgcgatgcctcctgaagacttccctccagctgctgcgccacaagccttttctggctacttcaaaggctctggaatgcttgaaagactcgctagtctctggccttttcacaagggcgcgactaatgggaaataagtgaaaaagctacaaaatggtagaattgatccatgtgaatatttctcaacttttagcatctggtggcaacaccatttgcccaattttggtaactttgtcgaatgtttcagagactggatcctttataaatgctcttgcccaaaaaaaaaaaaaactgcccctgaagcacgggtatttgcccccttggccgtttcatggtcataacgtttcccgtgtaaactcgagccccctcccccgcaccccgcggccccaccagttgttaacggggtnctatgaataaccaacattaaatgctggcnccac

SEQ ID NO: 9880 - DNA, 6095 bp, Oryza sativa
  unsure (1)..(6095): unsure at all n locations
  Clone ID: PAT_MRT4530_16255C.1
atggaaagtcgggaatggatgtatcattggccgaggtttttgtctccatatagaaacgaagtggctaaatttattggtattgctaaggcacacgctgagaagaacaatatgaggaagataatttgtccatgtgctgactgtaagaatgaaatagcctgggactttgacgatgcttttaaagtgaaggagcacttagtaactcatggatttatggacaagtacgaaatatggacacgtcatggcgaagaacaattggacgggcctgaaaatgtagttccgacacaagttgaagacatggtgcatgacgatggttttgttgaggacaaaatcgacctagaggaaatgttacgtcatgcagaacccgaggtgctgatggggtcggctagagggctaaataactttgaagctttacagaaggcagcaaaggaagttttgtacgatgtgtcgaagggctgtgacagtaagttcacagcactctggtcagttcttgaacttatgaggttaaaggcgagacatggatggtctgataccagtttcgacagtctgttagaacttctgcagaaaatgctaccgaggcctaactcactactatccagcacatatcaagcaaagaaactcatatgccccctttcacttggtgtggaaaagattcacgcgtgtgtaaatcactgcatactgtacaggaaagagtacgctactttggatgaatgtccaacatgcggtgcatgccggtacaagtcgaatagcaatactggcctaaaaccctttgaagcaactgagggacgacagagaaaaatcccgcagcttgtgatgtggtaccttcctgtcaaagactgcattaaacggatatactcaaacccgcgagatgcggaactaatgcgctggcatgaagaagggcgtaagaaggatgggatgattcgacacccggcagatgctcgtcggtggataaactttgatgctcagtatagagagtttgctaaagacccacggaacattagatttgccctgagtactgatggagttaatccttttggagacgagcagttcacatagtacttggccagtgcttctcaccatgtataatcttcctacctggctttgtcaaaagcgaaaatacgtattactctgtatcctcatacagggaccccgtcagcctggtattgatatagacgtatttcttgaacaattgttggaagatatggctgatttatggaaagagggattgaaagtgtgggacgagtacttaagggaatacttcacagtgaaggccatcatcttcgtgaccattaacgattatccagcaatgttttcagtttcaggtcaaactaaaggtaaaacaggatgtgtgatctacttgaatggaacgtactataggtttctcccgggttccaacaagcttgtgtacatgcggcaccggtggttcctacgcacaaatcacaagtaccgcaagatgaaggcggagtttgatggtactgaagagactgatcctgcaccaaaacatacatcgggagaaaaggtgtgtgcaatgacagagaaaattatttgcgagtttggaaaaatgactaagaaaccatcaaaggggataaagcgcaagaaacccgagaagaatacgaagggaggggatagtaagaagcaagatgacagttcgaagccagatgataaactccctcccctattcaagtagcatttcatattttttaagtacctcccgtactggaaagatctagaggttcggcatgccatagacgtcatgcatctagagaagaatgtgtttgacaacatagttggaacattgttggacatgccgaagaagactaaagatggtctgcaatcaagtatggacctagtcgagatgggaatcaaggaagagttacaccctcaagaaggagaaaaaaatggcaaagtatatcttccaccagcctgtttcacactgacacctgaggagaagaagtcattttgaaactcactccgtggtgtcagagtgcccataggtttctcatcaaacatcagtcgattagtttcaatgaaagatttgtcggtatctggttataattcacacgactgccatgtcttgctcaccgtgtttcttgcaattgcaataagagccataaaaccagagcatttaaaggttgttatcacaaggttgtgctactttttcaacgcaatgtcacagaaggtcattagtctcgaagagttaggaaatctccgtacattcgcacatgagacccagtgccaacatgagatgtgtttccctccgtcattttttgatatgatggagcacctcattgttcacattgtgccgcagatggttgcgcttggcccattgtacctccatcaaatgtggtcatacgagcgttacatggcggttctgaagggttacgtccgaaatcgtgcacatccagagggatcaatggttgagggttatagtactgaagaggttgtcgagtgctgtatcgattacctcaaagatggatatgcaattggagtaccttgccccgacacgagggcagattgagtggcaggggaacgataggaaagaagagattcgtcacatatgatcacaaatcattccaagaagctcacttcagcgtgcatcatcagtttgctatcgtcgagccgtacatcgatcaacatatcgatctaatacgagctaacaataagttgcgagacctagatttacctgagggagaaactaccgatgaaataactatgaagcggttggcttttggtccatcaactacagtaaattcttggcagggatattcgtttagcacaagagcccgagataataagacctgtacgcaaaacagcggtgtccgtgtggaggcaattgatgaagccagggaaaaacaatcatacttcgggtttattgaagaaatatgggaaatcaactatgggcacacaatgcaatttcccatatttaagtgccatcagtttgtacagaagattaagaatgtcgagacatctactcagaagaccgtgaagccttacatgcgcacagacggtgtgggcaaaaatgttaaagggtaatgattgttgagtggcatatgatcttcgcaggcggaccgcccgcctgcgaagatctttgccctacataagggcaagcacgcggcgctaaaatttctaagtccaggcgggaaccctagaaattttggcgccaccgcgcgcctgctccaccgctgccggctcctccaccgccaccggtctctgccaccgccaccggttcctccaccgcgcgcgtggccgccggtggccccttccaccgccgccagcccctgactnnnnnnnnnnnnnnnnnnnnnnnnnnnnnnnnnnnnnnnnnnnnnnnnnncgtcgtccatgaacaaagacgtcctcggccgaacgacgtcttcggccggtcgtcgtccacggccgaacctcgtcgccggcccttccttcgtcgtccatgaccgaagctcgtcgtcggccgttcgtcgaacacggacaggtttgaaacgatggccgatagtactaaagggactgaagagaagggtttaggggagcaggagcagtcccttgctgttgtggttgctccggaaccagcggtcccaccggaaggtagttccaacagcgacgtaggtgacgaagatgaggagtactcgtcgccaagcgatccttgtccatgcccaagcccgaagagaaggaaaaagggcgacggtgaagaaggcgacaaggactacattccccctaaagaaggggactgggatcatgtatcggatggggataaggaagtcatatggaaagagttgaagaaaatcttccagttcccggaaggatcagaggcagcagtgagaaattgtgcactgcaaacaatggccaagtcttggcgtggttggaaaaccaccttgaacaagaaatttgtgaagacgggacgcacaccattttcgacgtatgccaacataacccccaatcagtgggacaactttctgaccttgaagaactccccggaagaaattaaaaggagccaaaagtttgcagagttggccgagaagaacaaatttcctcatcgcttaggctccgcgggatacgcaccaaaggtggagcagtggacaaaagaggaggagaaaatgaggaagaaggggcaaccggtaccaatggaggagtggacacagagatcaaggaactggcatgggggaagggttcgaggtgtgtcgagcatgatgagttggaaggaagggttcaaaaatgacccccacaagaagcatgaagcgtacaaggataaacttagagacgaaggggctgtggagtttgaaaggcaaatgatggatttctgcgtcaagcacatgattttgcctcgcctcgaaaccaaagaaactgagccagattaccccttcgatgacctcaaggagaatacaccctgcagattgcacgttcccattggacgctccggtaaaactcttgaggccgctacagccattgctatccctgggagaacatacaatgaacagttcatacccgatgcgtatgccaaggtgcagccacaagtggtccacgaagggtttgagtcctacgacattgactaccggactgcagatggtgtatccgtacttggggatgcggtcgatcttgtaattctctggcaaaagaatgacatatcttttggattgggcaccgacgccacgcaaaaacctgtggtgcctaaatcggggttgggaaaacctccgaggcctcctaagaggaaggtgactgataaggcggatgatccagagatgcaaaaggaaaatccagtgccggaagtgccaccggagattgcattgccggaggcagccatggagattgcaccgccggagacagccatggagattccagtgccggatgtgcccatggagattacagtggcagaaccagaggtgcaatttgtggcatcagtcgggtcagacaaagaagaagtaccaggattggaatgggatggtacatagccagaaatatttgaagatccttctcctgcgaaagaccccgaggtgccacgagtgcttaggagccacgactccaagtccaaatatgagaacaaggagaagttcatgctaaccgtcttcagagggggtaaggaacgtgccaagctcagagatgacgacccccagaaggcttctgaactagccgggccaacatacttcgcaaccgatgattgcccggaaaagtacgaacatgggaaagcactcttgccggaatgggcactgaaagaagcaccatgggagatgagaaggttacataacttctacatggaggccagcaagaaaggcttgggcaatataacagctcgatcaccggcagattgtttcggcgaagaaggttacgtatggctagatttctcagatatccacgccatatatcgtcgggataagatggacgtcaacttcgtcggtgtttggtgcatgatgcaatacatggatgctaagaagaaaaaataacccatcggcttcttggatccaactcagatctgccaaacacagcataccgtgacgctagcaccagggtcagaccagctgaagggcaagaatccaacagagatagcagaatacaagaagggcttgcacaaggagaaattgattactgtcgcacagtacattggacgagccttcttgcattttcaaaataagagagtcgtcatggccgcttataattttaacgatcattatatctgtttactcatccaccctaaagacggaaccgtggtagtcttggatcctctcgattacaatcacaagcaatacaaagaatttctaacaatcttacagtatgcataccaatactacaagttcaagggtggagaacagacccgaacacgggagaagctgctatgtcataagcaaccgtgaggaacagtcctttgcaggtattatgcgtgcgaattccttagggttaatggacggtacaggactaacgcggaggatttgccaagattagaatgtcgaacaagctttgacgatacaggtatcacaaatgtgcagcgtgatctgtgccacttcatccaccatgagtgctgtcatgtcaaaggagatttcttcgatccagagggtgccctagcggcaagtgacgaattcaaggatctttgggagtggaacactgctatgcca

SEQ ID NO: 9881 - DNA, 993 bp, Oryza sativa
  Clone ID: PAT_MRT4530_16256C.1
atggccaagtcttggcgtggttggaaagccgccttgaacatgggatttgtgaagatgggacgcacaccgttttcgatgtatgccaacataaccccgaatcagcgggacgactttctaacgttgaagaactcctcggaagaaattcaaaggagccaaaagtatgcagagttggtcaagaagaacaaatttcctcatcgcttaggctccgcaggatacgcaccaaaggtggagcggtggacaaaagaggaggaggaaatgaggaagaaggggcaatcggtaccaatggaggaatggacacagagatcaagtaactgggtaagagctagaactcctaaaatcacggatgaaggaaaagtatcgtttgaagatccggagctgcagagcgttgccaataaaatggagaatttatcaagttcacagaagaaaggatttttcaagcctaagaggaagaaagatgtgctaagtacggcgctgggtactcctgagcatgggggaagggttcgaggtgtgtcgagcaagatgagttggaaggaagggttcaaacatgacccccacaagaagcgtgaagcgtacaaggataaacttagagataaaggggctgtagagtttgaaaggcaaatgatggatttctgcgtcaagcacatgattttgcctcgccccgaaaccaaagaacctgagccagattaccccttcgatgacctcaaggagaatacaccctgcagattgcacgttcccattggacgctccgggaaaactcttgaggccgctacagccattgctatccctgggagaacatacaacgaagatttcatacccgatgcgtatgccaaggtgcagccgcaagtggtccacgaagggtttgagtcctacgacattgacttcccgactacagatggtgtatccgtacttggggttgcggtcgatcttgtaattctctggcacaagaatgacatatcctttggattgggcactgacgccacgcaaaaacctgtg

SEQ ID NO: 9882 - DNA, 3447 bp, Oryza sativa
  Clone ID: PAT_MRT4530_16257C.1
atggagtgcggcggcggcagcacggctggggatgacctaggcttcgacaggagtagtggaggaatgcggcagcaacggggacacgcaaggaggagcgaggagcgcggaggcggagtcttcgcgtgggctaaaatcatggtgaacacctccttgctggttaaggtgctgcccagcgtctggtggcgaggcccgaagcagtgccttcgcctcaaccaccgccgaccaccgccatcaaccgccacggtgtcgtcgtcctcctccattgtgtgccgccgatctgtgggctgggatggcgtggtggatggcgcacctggtggcgaccgcgccgaccgaacgagcgctagcttgtgcatgcgtcgcccgccgcaccgggcggtggggatgaaagtcgcggcacacactgagaggaacaatatgaggaagataatttgtccatgtgctgactgtaagaatgaaatatcctgggactttgatgatgcttttaaagtgaaggagcacttagtaactcgtggatttatggacaagtacgaaatatggacacgtcatggcgaagaacaagtggacgggcatgaaaatgtagttccgacacaagttgaagacatggtgcatgacgatggttctgttgaggacaaaatcgacctagaagaaatgttacgtcatgtagaacccgaggtgctgatggggtcggctagagggttaaataactttgaagctttacagaaggcagcaaaggaagttttgtacgatgagtcgaagggctgtcacagtgagttcacaacactccggaaagagtacgcttctttagatgaatgtccaacatgcggtgcaagccggtacaagtcgaatagcaatactggcctagaaccctcagaagcaactgagggacgacagagaaaaatcccgcagcttggaccccgtcagcctggtattgatatagacgtatttcttgaaccattattggaagatatggctaatttatggaaagagggattgaaagtgtgggacgagtacttaagggaatacttcacagtgaaggccatcatcttcgtgaccattaatgattatgcagcaatgttttcagtttcaggtcaaattaaaggtagaacaggatgtgtgatctgcttgaatggaatgtactataggtatctcccgggttccaacaagcttgtgtacatgcggcacaggcggttcctacgcacaaatcacaagtaccgcaagatgaaggcggagttcgatggtactgaagagactgatcctgcaccaaaacctacatcgggaggaaatgtgtgtgcaatgacagagaaaattgtttgcgagtttggaaaaatgactaagaaaccatcaaaggggacaaagcggaagaaacccgagaagaatacgaagggaggggatagtaagaagcaagatgacagttcgaagccagatgataaactccctcccccattcaagaagcattccatattttttaagtacctcccgtactggaaagatctggaggttcggcatgccatagacgtcatgcatctagagaagaatgtgtttgacaacatagttggaacattgttgaacatgccgaagaagactaaagatggactgcaatcaaggatagacctagtcgagatgggaatcagggaagagttacaccctcaagaaggagaaaagaatggcaaagtatatcttccaccagcctatttcacactgacacctgaggagaagaagtcattttgcaactcactccgtgatgtcagagtgcccataggtttctcatcaaacatcagtcgactagtttcagtgaaagatttgtcggtatctggttataattcacacgactgccatgtcttgctcaccatgtttcttgcaattgcaataagagccataaaatcggagcatttaaaggttgctatcacaaggttgtgctactttttcaacgcagtatcacagaaggaactgggtctcgaagagttaggaaatctccgtacattcgcacatgagacccggtgccaacttgagatgtgtttccctccgtcattttttgatatgatggagcacctcattgttcacattgtgccacagatggttgcgcttggcccattgtacctccatcaaatgtggtcatacgagcgttacatggcggttctgaagggttacgtccgaaatcgtgcacatccagtgggatcaatggttgagggttatagtactgaagaggttgtcgagtgctgtatcgattacctcaaagatggatatgcaattggagtacctgtgccccgacacgagggcagattgagtggtaggggaacgataggaaagaagagattcgtcacccatgatcacaaatcattccaagaagctcacttcagcgtgctccatcagtttgctatcgtcgagccgtacatcgatcaacatatcgaactaatacgagctaacaataagggtcgctccaccgagtggataatgaaagaacacaagcgtctcttcatagattggttgcgagacctagacttacctgagggagaaactaccgatgaaataactatgaagcgtggtgtccgtgtggaggcaattgatgaagccggggaaaaacaattatacttcgggtttattgaaggaatatgggaaatcgactatgggcacacaatgcaattccccatatttaagtgccagtgggtaaaatacccgaacaggttcaatgttgataagttcggtcttactgttgttgaccttgcgagtgtgggtcacaaggatgacccttggaagattaagaatatcgagacatctactcagaagaccgtgaagccttacatgcgcatggacggctgccgaaattttccaccgccgcacgcctccgtcgtcctccgccgctgcccgcctgcgaccttcactctccgaccgtcgtcctccgccgccgccgactgtcgtcatccacgcgctgccaccgagaccgtcgtcctccgccgccgccgaccgtcgtcgagcactctgccgccgccgtcgccgacccctccaccgtgcgcccgctccactgccgccggctcctccaccgctaccggcccctccaccgccaccggctcctccaccgcgcgcgcggctgccggtggcccctccaccgccaccggcccctccaccgcgcgcacggccgccgctggcccctccaccgccgccggcccctccaccgccgtcggccacctctccaccgccgtcggccacccctccgctcgcggccgaacggcttcatcggccgatcgtcgtctacgagcgaagacgtcctcggccgaacgacgtcttcggccggtcgtcgtccacggccgaagctcgtcgtcggccgttcgtcgtccacggccgaagccggtcgtcgtccacggccgaacctcgtcgctggcccttccttcgtcgtccacgaccgaagctcgtcgtcggccgttcgtcgaacacggacgtgcgtgcatgtag

SEQ ID NO: 9883 - DNA, 828 bp, Oryza sativa
  Clone ID: PAT_MRT4530_16258C.1
atggggatcagtgcccgcagaatgatcgatcgatcgatggaaaagggcacgcgtcaggcatcgcccggacctacacagatcgaggtactcctacatctggccgatcgatggatccatgtcatgtcgtgtcgccctggaaaacgatctccattattaggattaggaccgaggtatacttgtgtagctgcttccattccgtgccacatgatgcaccctgacgtgacacatgtatatgcgcgcgacggcacggttgttgccgtggtggacgactgtacgtgtgaatgttcgttgaagaacgagagatggatggacgaaaggggcatctcacatcgtcagatcacgcggggtagtggtggacgactgtacgtgcgcgtgggggggagagaaatatattactcaaccagcatcctggcttacaaaacgcgagataaaggtatttcacttaaaaatcagcgcaaaccttacaaaatcatgaccgtcagcatcttcgaacactggatcggtgtatacaaatgtctcgctttcgatatctacgacggaaagaaaatcaactgtaaacgttgggggtcaaatccacccgaacgcacgccggctgcgcccattaagaaggcggtatggtgccatcatgatgctagcttttacccgggtaatagcgagctccacgtaatagctagcattggccttcacatcgccttccgtgccgtgacgtcagtggtggttggaggttgtaacctactgaagttaaaactcaacatgcaaacatgccacctcatcatgtacccactaagtctaaaacttaacatgcaaacatatcacctcatcatctac

SEQ ID NO: 9884 - DNA, 500 bp, Oryza sativa
  Clone ID: PAT_MRT4530_16259C.1
aaacgaaggataaacaacgaccatagcccatcatatacacatacgcagacaaacaacagataacgcgaaacacaaaagggcgcatagcgcgcaaaacaagcgcgcgatatgccaaacacagacaacaagcgcacacgcggcaggaccacacacaaaagcagacacaaaacgccgatgaaataagaaaacagaaatctaaataataataataataataataataataataataataataataataataataataataataataataataataataataataataataataataataataataataataataataataataataataataataatacgacgacgaagaagaataacaatgaatcaaatgacatgaaaagaataaataattacttaaattttttgaataagacgaatggtcaaacacgtactaaaaagtcaacggcgattcccgcgtcgcgcgtcttgttcggccccctttcttttccagtgctcttgctgtg

SEQ ID NO: 9885 - DNA, 2376 bp, Oryza sativa
  Clone ID: PAT_MRT4530_1625C.1
atgccgcccaagcgagagattaagttccggatagatcttgctccaggaaccactcctctgtacaagcgaccctaccgtatggcagcaaatgaactggccgaagtcaagaaactgttggaagagttaaaagaaaagggagctctcaatgaagttactatcaaaaacaagtaccctcttccccggatcgatgatctgttcgatcagcttaaaggtgccactgtcttttcaaaaatcgatcttcgctccggatatcaccaattgcttattcgtgaagaagatatcccgaaggccgcgttcaccacgcgatatgggctgtatgaattcacggtgatgtcgttcggtctgactaatgctcctgccttcttcatgaatttagtgaacaaagtgttcatggaatacttggataagtttgttgtggtcttcatcgacgacatcctggaaggtcatgtggtagcctatgccacacgccagcttcggcctcatgaaggcaactaccctacccatgatttggagttagccgctgtggttcatgctctaaagatctggcggcactatctcattgggaattgctgtgaaatatgtactgatcataagagtttgaaatacatcttcactcagtcggatctgaatcttcggcagagaagatggttagaactcatcaaggattatgatgtgggaatccactatcatcctggtaaggccaacgtggtcgccgacgctctaagtcgaaaaagccattgcaacactcttggcgtccgtggcattccaccggaacttaatcaacagatggatgccctgaacctaagcatagttggtcgtggattcttggctacgctggaagccaagcctaccttgctcgatcgaatccgtgaggctcagaagaatgatccagatatgcatgggatcctcaaaaatatgaaacaatgtaaagccgctggtttcatagaagatgaacatggaaccctatggaacggaaatcgtgtatgcgttccggacgacaaggaacttaaacacctgatacttcaggaagctcacgaaagtccttattccatccaccctagcagtacgaagatgtacttagacttgaaagggaaatactggtgggttagtatgaagcgggaaattgcagagttcatggccctttgtgatgtgtgccagtgtgtcaaggcagagcaccagcgaccggccggacttctccaacctctccaagtaccagaatggaaatgggatgaaattgggatggatttcatcaccggacttccaaaaacccaaggaggatatgattctatatgggttgttgtggaccgactaaccaaggtagctcggtttattcctgtgaagaccacctatggagggaacaaactagccgaactctacttcgctaggatcgtgagtctccatggcgttcctaagaaaattgtatctgatcggggaaaccagttcacctctcacttttggaagaaactccaagaagagttgggtacccgattaaatttcagcaccgcgtatcacccgcagacagatggacagaccgagcgtctaaataagatcctagaagatatgctccgtgcttgtgttctagatttcgggaagacctgggataagagtctcccctatgccgagttctcctacaataacagctaccaagccagcatacaaatggcaccctatgaagcgttgtatggacgcaaatgctggacaccgctattgtgggaccaagttggggaaagccaagtgttcgggactgataacttgagagaagctgaagcgaaaacgaaagggaagctcgcacctcggttcgtgggtcctttccgtatcattgctcgacgcggagaagtcgcttaccagttggagctgcccgcatcattgggcaacgtgcatgatgtgttccatgtgtcgcaactcaagaaatgtcttcgagtgccatccgagcaggccgactcagagcaaattgaagttcgcgaagacttgacctacgtggagagaccagtgaaaatcttggacaccatggagcgcaggaccaagaaccgggcccgcccgccaccctcgctgacgggtggggcccacccgtcatcccctttctcccaccgctcccgccgcctcccccgcaccctagcgccgccgccgccgcgaatcccgccgcctcccgccgtccccgcgtgcaataaaggtgagccgtggaccgtcgcctcctttcccccttccctcccctctctcggccgccgctccgccgtgccggtggtcgccggcggcgaccatcggggcgcgggcgcgccgcctcccgccgaccgcgccagcgtggccgccctcgtgcgcgccgagtggctgccgcgtggggcccggccgtcagccgcccgcgcccttgggtgcggctga

SEQ ID NO: 9886 - DNA, 357 bp, Oryza sativa
  Clone ID: PAT_MRT4530_16260C.1
atggccctcgtcatctccgagtggcaaacaacggcagccaccggcacgatgccgctgggaatgccatcggcgaccaaggaggcaaggagcagcccagcagtccccgccgtcttcggcacaaccgtcacgttcgcagcttggggaagaatggagaaccccgcctctaggcgtcgccgctgtggcctccacgtggagctgcagtcgtcgttgctgcaggtcagagtcgccgtcgccgctgcaggttgcaggcttgcagccgccaccgttgcctccggaaatgtggaaatggaagcgtcggcagaggaggcgacggtggcgagagaagagatgaaactggcaggggcggacgcggtgtga

SEQ ID NO: 9887 - DNA, 302 bp, Oryza sativa
  Clone ID: PAT_MRT4530_16261C.1
gtaacataaaaaagaccgatgttttcattaaaacccatgaaggccctacatgcgtgatcggtagggctagccatatgacaatttactcaatgtcaaaagttagcccttccaaaaccaaatgaaaagattgctagaccaattgaacacataaaaattgctttgttttcccgaaaacagacgcctgaagaaaaataaaacgcgtacaagctgcaatggaggaagaatctaagaaaactcaaagggggaaagcccctggtaaccggacatgcttaagggtgttcttttaacctgctgaataacat

SEQ ID NO: 9888 - DNA, 114 bp, Oryza sativa
  Clone ID: PAT_MRT4530_16262C.1
atggccgctgcggggtgctttgaggacgggattaagctcactctctgctcctgctcctacaccagcattctactatctaagcgggatgccagggtgagggaggctaatggatga

SEQ ID NO: 9889 - DNA, 1095 bp, Oryza sativa
  Clone ID: PAT_MRT4530_16263C.1
atgggcccagataatggagcaaacaacaattccaacttggctgcaaggcaacgcttacggtggacaaatgagctgcacgaacgatttgttgaggctgttactcaacttggtggtcctgatagagcaactccgaaaggagttctaagaattatgggtgtacaagggttgacgatataccatgtgaaaagtcatttgcagaaatacaggcttgcaaagtacattcccgactcttcagctgatggtaacaaggctgaaaacaaagaccctggagatttgcttgctggacttgagggatcctctggcttacagatatctgaagctctgaagctgcagatggaggtccaaaagcgtctacatgaacagttagaagtacaaaggcagctgcagttgcgcattgaggcgcagggcaagtacctcaagaagatcattgaggagcagcagcgtctcggtggagtgaaatctgaaacacctgctgctggtgcttccgtcacattgccaagcgatcagttccctgattccgaaagaactgacccctcgactcctgcacctacatctgaatctccaactcaaggtgtaccttcgaatagggacaatggaggacaaaacgaagcaaccaagagcccccagcgcgatgattctctgtcccgccatgaaccactaacccctgattccaactgtcagcctggttctcctaccgctagtccaaagcatgagagggcagcaaagaggcaacgaggtaatggtgcagagttctcggaaactgacttcgcccttcctcattctatcttcgagtcgagttcggggtcagagttccaacaatgttccatgtcctactcaggtcattagcatctggtgatactcctcacagcatcttcgctagcttgttcgagacgaagtaatgatctaagatccgtgttgtagctctcagtagtatatttctaagtcccaatggagatgttggtagacaaaaatgttgtaggtgttcagatgattgtttacatgatactacatatgacagctatttaagcttgtaatttcgtggcctgtaaattttattatcagctgttgagttgggaagtttgaaggttgcgcttt

SEQ ID NO: 9890 - DNA, 1859 bp, Oryza sativa
  Clone ID: PAT_MRT4530_16264C.1
ttttagaacaaactataaacattttaatctgacatattatttacaagtaaaaatacgacataatctgtacaagaaagggggaaattgtacaaatctcaaaaaacatcggcgaaagactttatcacctaaacatcactacacaaatgatgaacaaatggaactgctctttctacagataaaactccaagcacagaagcactcatgcctaactcactacctacatctataatcttcctgctgatttagctaacactacaaagaatatcgatcaagacttcacgcccatacaaaaattttttctgtgggaagtttggatatatacattgagcttttggacaggaatgacctggaaaaaggagaacgggatccagtggctttccaaaatttacttgcagattgtgcagtcctcatgtcgatgacccttgggatatataaaaacagaatcaacgcatagaccgccttttgtatgggtacaatcaatctgcatcatggagaacttaaggttggttaactgatctgaacttgatacgacaaagtccccgacatggtaaaggatccagtttcctggctcattcagataatattgcgacgtagcttgctgatcatctgaagttgaaagctgaaaccttgtcggtttaatgttccagccgtggattgactcatagccatagactcggcggcccatgtacttgtgcggtcggcccaactggagccgaaagaaaagactgtatgaaccagcagggaagcagaaatcaatttccccagccacctcaagccaccatatttgctgaagatacgcgacatggtggaatctggactcctctgtggagaggtgactccaatatctcctatcatctatgcctgtgattgccatagcctttgaggaaatggatatgcaaagaccacccttgtcttctccatccaaaattctcgatgtccctctcttccacataaggaatgctattattcctatcaataagaacctcgatgtcctctcttcaaccttggtgcccccatcgaatggggtgggccggcacaggcgtgcgtatatctccttcttgatcatggctgcggaggagcagcgactgccattcccctccgtggcgccgtcgccgccgctgtcgtcgtcggcagcggcggcgagggcggcgaggtaccggtagttggcggggagcttggccgcccagacgcagtccgcggatgcggcgccccggaacgcccggttgaggcgggcgaccttgcagatctccggcgggtcgaggtagagcagcaccgccgcgacgcagctctccggcatgtcgcccagcgacgtctgcccccatccccggccgtacccctccggccccatcatgctcgacgcccccgcccccatgccacgctgaagaaatgccaaaactctcgaagcgattcaacgacgacggatcgccgcgattgcttccggattagccttcccaagcggataccttttcttctctgtccgggcgttagcggttggacaaccgctaattccgcttcaattcaaccgatttgcagcgaggaatacttcatccggacttccggagctaaacaaccggtcaccttatccggagcagccaattcgaattaatcagaaactcgtctccgaatcaaggcccagattcttggccattttaggcatcaaatcaagcgcaaaaaaaataaaaaaaaatccctgacctgctctaaaatgctcgtaccttcacgcggaaagctgcgaacgagggggaatggatctgaataaaatgcggaatagcgtcaaatttgtcgaattggaggagaaaagagaaggctccgcgtgccgcggccccgcaagttatagcggaagctgaagcctcgtgccg

SEQ ID NO: 9891 - DNA, 563 bp, Oryza sativa
  Clone ID: PAT_MRT4530_16265C.1
ggcagccactgtttttgccactgcgactagcgttggtggtgcggaaggtggtttggatgaggaagatgatgggttcggatgcgatattgggactattggtaacttcaagaaggctaagggaaccataaatatctcagcaacatacgagaccaggcaccatgactttgagacttcagttgttgcacgtggggacctttggaggttggagtcgtcgcgtggtggttcaaattctggcgatgaaaatgctccgcttttccttgttcagctgggacctttattatttgttcgtgactctacacttcttttgcctattcatctgtcaaagcagcaccttctttggtatggctatgatcgcaagaacaaaatgcactccttatgtccagctatctggtcaaaacatagaagatggatggtgatgtcaatgatgtgcctcaatcctgtaacctgttctttcatggatgtgcagttcccaaatggacagctaacatacgttgctggagaagggataacagcaagtggatttttcccattctttggcggtttgcttcaagctcatggaaaat

SEQ ID NO: 9892 - DNA, 348 bp, Oryza sativa
  Clone ID: PAT_MRT4530_16266C.1
atgggttgctgccggatgggcaccacggtgggcaacggcaccatcgacgcccatggcgagagctgggaggcggagcagctgtatgtgtgcaatgacagcgtgctgcccaccgcagtgggcatcaaccccatgatcaccgtacagtccgtggcgtattgcgttgccaatggcattgctgactccctgtccggatcatcgaaaagcacgacaggaagggtgcctgcgcagcaatcttctgattacaagtcgaagactgcagatcagtactactataacagcataagcagtagcaaaagccagcagctgggaggtgctggagcaaaatcaagtgagcaaaaatctatctaa

SEQ ID NO: 9893 - DNA, 370 bp, Oryza sativa
  Clone ID: PAT_MRT4530_16267C.1
aaggcatgaaggattatttccattttttgaatcaggtgttcgcattataaccggaacaaaaacatggtgttgctgatatatggcacaagacttaaaataggctggaaatcatactgggaatacaggaccgttttacctctaagagtggaaatctcatggacggccccccagcgggttcatgtcagtatcctacgcggactggacacaggtactggcccagctttaatacctgcactcggtatctttcatcaagctggcgtgagaagattggattcatgacaaccgggccaccttattgatctggacttcactttaccatcattcacaaactccggcttagggctgatcaccatatttctgcttgaaacat

SEQ ID NO: 9894 - DNA, 175 bp, Oryza sativa
  Clone ID: PAT_MRT4530_16268C.1
cgcctaggctaccgccgccaccgcggcgaggagccgaatgtcctgctggggacgataacacacccatgaaacggccaattggcagaagatcacctacacaaggattgtaaggtgcaccctgattgcggcgagcaacctgtgcaagggtctctgcaaattcgacaagcggacggcg

SEQ ID NO: 9895 - DNA, 1202 bp, Oryza sativa
  Clone ID: PAT_MRT4530_16269C.1
ctccgagacctcctccgaagaggcaggtgacaggtaaggcggaggaacccgagatgcataaggaaaatccagtgccggaagtgccaccggagattgcagtgccggaggtgcccatggagattgcagtgccggatgtccaaatagagattaaagtggcagaaccagaggtgcaatttgtggtatcagtcgggacagatatagaagaagtaccaggattgcaatgggacggtacagagccagaaatatttgaagacccttctcctgcgaaagaccccgaggtgcaagagaccccggtccctgagaaggccactaccagttctgaggtgcctagagtgcttaggagccacgactacaagtccaaatatgagaacaaggagaagttcatggtaaccgtcttcagagggggtaaggaacgtgccaaacacaaagatgatgacccccagaaggccgctgaactagccgggccaacatactggctaactgatgattgcccggaaaagatgcaaaacatggatgctaagaagaaaaaagaacctattggcttcttggatccaactcagatctgtcaaacacagcataccgtgaggctagcaccagggtcagaccagctgaagggcaagactccaaaagagatagctgaatatcagaagggcctgcacaaggagaagttgattactgtcgcacagtacattgaacgagccttcttgcactttcaaaataagagagtcgtcatggccgctcataattttgacgatcattatatctgtttactcatccaccctaaagacggaaccgtggtagtcttggaccctctcgattacaaacaccagtcatacaaagaatttctaacaatcttacagtatgtgtaccaatactacaagttcaagggtggagaacagacccgaataagagaggagctgctatgtcacaagcaacctagaggaactgtcctctgcgagtattacgcgtgggaattccttagggttaatgggaggtatagggttaacgcagaggatttgccaagattagaacgtcgaacaagctttgacgatacaggcatcacaaatgtccagcatgatctgtgccacttcatccactctgagtgctgtcatgtgaaaggagatttcttcgacccagatggtgccctagcgacaagtgacgaattcaaggatcttctggagtggaacactgctatgccataa

SEQ ID NO: 9896 - DNA, 522 bp, Oryza sativa
  Clone ID: PAT_MRT4530_1626C.1
atggggaaggggaatgcgactgggtacgatgactctggcaatgctacgcctaggggagagtgccctgttggattgactgtctctgccagccatccagccgagacaacaaatgcgccttgctgcgcgtgctgggagggctcgctgacaagtgggcccgcgcccccggttgggtcgcgccgcgagtccaccgaggccggcgcccggcagcgggcggcggcgtcgtggggttggcgcggaaaattgatgggcgtgggtgccctaagcgaggtgccgccgtgccggtgcgccgcagcagacgccgacgacgacgcggtccaagtccaacgagtcagcgaggatggcgcatacgttggcgctcaggacgtcggcgcggaggcggaggcggcggaggagcgtggcggcgaggtagaggccgaccgggcgcgcggggacgcgcggtgggcggcgggctcctcctcggcggtggcgcacggggacgcgcggtgggacaccgccgccaccgcgggctcctcctcgtcataa

SEQ ID NO: 9897 - DNA, 1136 bp, Oryza sativa
  Clone ID: PAT_MRT4530_16270C.1
cggcacgagggagagagaactagtctcgagttttttttttttttttttttttttttttttttttgaaccaagtctgtcgtcatataaatttcttatgcgatggtatctttgagtgaatggaatacactttatatatcataaataaaacaatgagatttacagtgatgagatgtctgtttacaaaatcttcacctttgcagaaactgaattgtaggggcgcataaacatccattcgtttggggttgcagcttcacttttaattcacatctctgtcagctcagaggggtccaaatcataggttatctgttcagctgatcacatcatgccgttgctaatcctcacgagtggacagcagcaatactatacatctgttcattctctggtggtcgatcatggcacattcacactcgcacatcaccaatggtcttcctctcgaattcccgcactgtgtcggctatgcgcttcatgctgtcatcgtagtaccagggcgtcttctcggaccagattaatccaccattgggtggaatgggcacaaactcgcggcatacctcgccaatcacattgatggtattgtggtagtggtagtatcggatgaggtgctccgttttgtgcgtggtgttcccgataacattctccgacatatgaactccagtagcatatgcattcttggcctgaattgcatacttccggtcacgccttaccccagtgattgaattccggaaaaccaacttctcaaatccccattcatttgagtagtccgtctccggttcgtcggggttccgtgcacataacctgctcgacatggggttctgctcgatggtgaactgcgtgtagggctcgagctcggcgaggacggcctcgagcgagcgcccgtcgggcaagaagatgtactcgtcgacgtcgaagaagaaggtccacctggcggcgtgcctgtaccggtgcaggcagtcgttgacgacgaggaactggttgtagtaccagccgtcgtactcggcctgggcgcgcacgtcctgcagcgtggcgcggccggcgcgcacccacggctccagcgcggcgcgcacggcggggctcacgccgccggcgtcgtggaagacgaagtgggagcgcaggccgaagaagcgcgcgtggtacgccat

SEQ ID NO: 9898 - DNA, 2916 bp, Oryza sativa
  Clone ID: PAT_MRT4530_16271C.1
atggccgatagtactaaagggactgaagagaagggtctaggggagcaggagcagtcccttgctgttgtggttgctccggaaccaacggtcccaccggatggtagttccgacaacgacgtaggtgacgaagacgaggagtactcgtcgccaagcgatccttgtccaagcccaagcccgaagagaaggaaaaagggcgacggtgaagaaggcgacaaggactacattccccctaaagaaggggaaacggcgccacgacgatcaaaacggcagccgaagaaaaaagttccttcgaaagatgaggacgtaccggcaagcacaatcggcacacagaaaagcgaacggtcagcaaaggcgaagagaaggaagggcaagagaagtgtaaatagaaaggatgaagggttccatgttgttacccatgtttcgcctaaaggagagccgctcgcccctaagacggcacgtgtgaaattcagttcacagtgtggcataatagtaagggagaagatctccatcacggtcaaggactgggatcatgtaacggatggggataaggaagtcctatggaaagagttgaagaaaatcttccagttcccggaaggatcagaggcagcgcgtggttggaaaaccaccttgaacaagaaatttgtgaagacgggacgcacaccgttttcgacgtatgccaacataacccccaatcagtgggacgactttctgaccttgaagaactccccggaagaaattaaaaggagccaaaagtattcagagttggccaagaagaataaatttcctcatcgcttaggctccgcgggctacgcaccaaaggtggaacagtggacaaaagaggaggaggaaatgaggaagaaggggcaaccgagcgttgccgataaaatagaaaatttatccagttcacaaaagaaaggatattttaagcctaaaagggagaaagatgtgctaagtacgacgctgggtactcctgagcatgggggaagggttcgaggtgtgtctagcaagataagttggaaggaagggttcaaaaatgacccccacaagaaacgtgaagcgtacaaggataaacttagagacgaaggggctgcggagtttgaaaggcaaatgatggatttctgcatcaagcacatgattttgcctcgccccgaaaccaaagaaactgagccagattaccccttcgatgacttcaaggagaatacaccatgcagattgcacgttctcattggacgctctggtaaaactcttgaggccgctacagccattgctatccctggtagaacatacaatgaacagttcatacccgatgcgtatgccaaggtgcagccacaagtggtccacgaagggtttgagtcctacgacattgactacccgactgcagatggtatatccgtacttggggatgcggtcgatcttgtaattctctggcacaagaatgacatattctttggattgggcaccaacgccggggaaaaacctgtgttgcctaaaccgggtttgggaaaacctccaaggcctcctaagaggaaggtgactgataaggcggatgatccagaactggataagaaaaatccagtgccggaagtgccaccggagattgcattgccggagacagccaaggagattgcactgccggagacagccatggagattgcaccgccggagacagtcatggagattcaagtgccggatgtgcccatagagattacagtggcagaaccagaggtggaatttgtggcatcagtcgggtcagacaaagatgaagtaccaggattggaatgggatgggacagagccagagatatttgaagacccttctcctgcgaaagaacccgaggagaagttcatgctaaccgtcttcagagggggtaaggaacatgccaagctcagacatgacgacccccagaaggcttctgtgctagccgggccaacattcttcgcaaccgatgattgcccggaaaagtacgaacatgggaaagcactcttgccggaatgggcactgaaagaagcaccatgggagatgagaaggttacataacttctacatggaggccagcaagaaaggcttgggcaatataacagctcgatcaccggcagattgtttcggcgaagaaggttacatatggctagatttctcagatctccacgccatatatcgtcgggataagatggacgtcaactatgtcggtgtttggtgcatgatgcaatacatggatgctaagaagaaaaaagaacccatcggcttcttggatccaactcggatctgccaaacacagcataccgttacgctagcaccagggtcagaccagctgaagggcaagaatccaaaagagatagcagaatacaagaagggcttgcacaaggagaaattgattactgtcgcacagtacattggacgagccttcttgcactttcaaaataagagagtcgtcatggccgcttataattttaacgatcattttatctgtttactcatccaccctaaagacggaaccgtggtagtcttggatcctctcgattacagtcacaagcaatacaaagaatttctaacaatcttacagtatgtcacaagcaaccgcgaggaacggtcgtttgcgggtattatgcgtgcgaatttcttagggttaatggacggtacaggactaacgcggaggatttgccaagattacaatgtcgaacaagctttgacgatacagtgcgacaaagtaccagcaaagatgatcaactacatgggtatcagatgggcaagtacctgttcttgggcgttggggcacagccgcacagatcgcacggaactggtgaggggcaggattgctgctgacccagtttcacaaaaccacgctatcaatgaatggattcacctgcaagatgacgtggttgtttcacctatgacgaggatgtggcatgtcacatcctga

SEQ ID NO: 9899 - DNA, 3278 bp, Oryza sativa
  Clone ID: PAT_MRT4530_16272C.1
ctccaccccatagggcccaaagggcaaaaggacgcctacgcggaccatattgaagaaatatgggaaatcaactatggacacacaatgcaattccccatatttaagtgccatcagtttgtacagaagattaagaatgtcgagacatctactcagaagaccgtgaagccttacatacgcacggacggtgtgggcaaaaatgttaaagggtaatgattgttgagttaaaaacgatcttcgcaagcggacggcccgcttgcgaagatcgttgtcctatataagggcaagcccgcagcgccaaaatttctaagtccaggcgggaaccctagaaattttggcgccagtcacgggccgagctccaccgccaccggccgctccaccaccgagctccgcccgcgagctccaccgccaccggccgctccaccacctcgcgccggccgccagcccgctccaccaccgccagccactccaacgctgcccctctctctctctctcaatcgcggtatcgcggccgaacggcttcttcggccggtcgtcgtccacgagcgaactcgtccttggccgaacgacgtcttcggccggtcgtcgtccacggtcgaacctcgtcgtcggccgttcgtcgtccacggacgtgtgtgcatgtgggtgcttgctttttatatgtgaagtttgaaacgatggccgatagtactaaagggatcgaagagaagggtttaggggagcaagagcagtcccttgctgttgtggttgctccggaaccaatggtcccaccggaagatagttccgacagcgacgtagctgacgaagacgatgagtactcgtcgccaaatgatccttgtccaagcccaagcccgaagagaaggaaaatgggcgactgtgcagaaggcgataaggactacattccccctaaagaaggggactgggatcatgtatcgaacggggataaggaagtcctatggaaagagttgaagaaaatcttccagttcccggatggatcagaggcagcagtgaggaattgtgcactgcaaacaatggccaagtcttggcgtggttggaaaaccactttgaacaagaaatttgtaaagacgggacgtacaccgtttttgacgtatgccaacataaccccgaatcagtgggacgactttctgacgttgaaaaactccccggaagaaattcaaaggagccaaaagtattcagagttggccaagaagaacaaatttcctcatcgcttaggctccgcgggatacgcaccaaaggtggagcagtggacaaaagatgaggaggaaatgaggaagatggggcaaccggtaccaatggaagaatggacacatagatcaaggaactggcatgggggtagggttcgaggtgtgtcgagcaagatgagttggaaggaagggttcaaacatgacccccacaagaagcgtgaagcgtacaaggataaacttagagacgaaggggttgtggattttgaaaggcaaataatggatttctgcgttaagcaaatgattttgcctcgccccgaaaccaaagaacctgagccagattacccctttgatgacctcaaggagaatacaccctgcagattgcacgttcccattggacgcttcgggaaaactcttgaggccgctacagccattgctatccttgggagaacatataatgaagagttcatacccgatgcgtacgccaaagtgcagccgcaagtggtccacgaagggtttgagtcctatgacattgacttccctactgcagatggtgtatccgtacttggggatgtggtcgatcttgtaattctctggcacaagaatgacatatcctttggattgggcaccgacgccacgcgaaaacctgtagtgccaaaaccggggttgggaaaacctccgagacctcctaagaagaaggtgactgataaagcggaggaacccgagatgcataaggaaaatccagtgccggaagtgccaccggagattgaagtgccggaggtgcccatggagattgtagtgctggatgtctaaatggagattaaagtggcagaaccagaggtgtggcatcagtcgagacagaaatagaagaagtaccaggattggaatggaacggtacagaaccagaaatatttgaagacccttctcctgcgaaagaccccgaggtgcaagagatcacggttctgaggtgcctagagtgcttaggagccacgactccaagtccaaagatgagaacaaggagaagttcatggtaaccgtcttcaaaggggataaggaacgtgccaagctcagagatgatgacccccagaaggccgctgaactagccgggccaacatacttcacaactcatgattgcccggaaaagtacgaacatgggaaagcactcttgcttgaatgggcactgaacgaaggaccatgggagatgaaaaggttacataccttctacatggaggccagcaagaaaggcttggcaatataacagctcgatcaccggcagactgtttcggcgaagaaggttacatatggctatatttcttagatctccatgccatatatcatcgggataagatggacgtcaactatgtcggtgtttggtgcatgatgcaatacatggatgctaagaagaaaaaagaacctatcggcttcttggatctaactcggatttgccaaacacagcatactatgaggctagcaccagggtctgaccagctgaagggcaagaatccaaaagagatagctaaatacaagaagggcttgcacaaggagaaattgattactgtcgcacagtacattggacgagccttcttgcactttcaaaataagagagtcgtcatggccgcttataattttaatgatcattatatctgtttactcatccaccctgaagacggaaccgtggtagtcttggaccctctcgattatagtcacaagcaatacaaagaatttctaacaatcttacagtatgtgtaccaatactacaagttcaagggtggagaacagacccgaacaagggagaagctgctatgtcacaagcaaccgcgaggaacggtcctttgcgggttttacgcgtgcgaattcctaagggttaatgggaggtacaggactaacccggaggatttgccaagattagaacatcgaacaagctttgacgatacaggcatcaaaaatgtccagcgtgatctgtgccacttcatccaccatgagtgctgtcatgtgaaagtagatttcttcgacccagagggtgccttagccacaagtaacgaattcaaggatcttcgggagtggaacagtgctatgcca

SEQ ID NO: 9900 - DNA, 840 bp, Oryza sativa
  Clone ID: PAT_MRT4530_16273C.1
atggatgtgaacgtcgtggtattgccgacggtagtcagccgtagttgccgcctgaccgtcgtggtcgagccctttgacaaggttgttgagatcaagcagaaggtggagagttgctatggcatcccggtggcggcgaggttctgctggatccacgggctggccaagtggagcggcggtgataggatgcatgacacggtccatgtcaccgcctacctccctccggctagttggggacggaaggtcacagtgttcgcccgtcgcgaggagagcgtggctgccctaaaactccgcatccacggtgcgcaaaaagtggacatgcccctgccagagtgcatgtggaacgacttcgtgtgtggcagcctcatggtgatgatggatcactggcctctaggtgcctacgtcgagttcgactccggcgtggtggaggtgacaattgttgattgcaagaagatggtggagacaggaagcagcagtggcagcaaccgcaataccaacgtggatgccaacaacaataagattgagcagctgaatgacaacttcgagggcgacccagagacgccgctgctggccgaaggggactaccactttgagctcaacggggtggccatgaacgaggagctgtcgctggaggtgtggggcccgggcccaagctgccccacacctggctccgcccctgccaacacacacacaggcacgggcggctacttcgacaacaacctgaggctcgggatggaagaacaggagcttgtcgatggccaaggcattgagtactacccgatcctccatgtctcgcacatcttgctcctcgtgcgttggctggtgatagaggcatggcactga

SEQ ID NO: 9901 - DNA, 3186 bp, Oryza sativa
  Clone ID: PAT_MRT4530_16274C.1
atgtatcattggccgaggtttttgtctccatatagaaacgaagtggctaaatttattggtattgccaaggttcacgctgagaagaacaatatgaggaagataatttgtccgtgtgctgactgtaagaatgaaatagcctgggactttgacgatgcttttaaagtgaaggagcacttggtaactcacggatttatggacaagtacgaaatatggacacgtcatggcgaagaacaagtggacgagcctgaaaatgtagttccgacacaagttgaagacatggtgcatgacgatggttctgttgaggacaaaatcgacctagagaaaatgttacgtaatgcagaacccgaggtgctgatggggtcggccagagggctaaataactttgaagctttacagaaggcagcaaaggaagttttgtacgatgagtcgaagggctgtgacagtgatttcacaacactccggtcagttcttgaacttatgaggttaaaggcgagacatggatggtctgataccagtttcgacagtcttttagaactcctgcagaaaatgctaccgaggcctaactcactaccatccagcacatatcaagcaaagaaactcatatgccccctttcacttggtgtggaaaagattcatgcgtgcgtaaatcactgcatactgtataggaaagagtacgcttctttggatgaatgtccaacatgcggtgcaagctggtacaagtcgaatagcaatactagcctagaaccctctgaagcaactgagggacgacagagaaaaatcccgcagcttgtgatgtggtaccttcctgtgaaagaccgcattacacgaatatactcaaacccgcgagatgcggaactaatgcactggcatgaagaagggcgcaagaaggatgggatgattcgacacccggcagatgctcgtcaatggagaacctttgatgcgcagtatagagagtttgctaaagacccacggaacattagatttgccctgagtactgatggagttaatccttttggagacatgagcagttcacataatatggccgatttatggaaagagggattgaaagtgtgggacgagtacttaagggaatacttcacagtgaaggcaatcatcttcgtgaccattaacgattatccagcaatgtttttagtttcaggtcaaattaaaggtaaaacaggatgtgtgatctgcttgaatggaacgtcctataggtatctcccgggttccaacaagcttgtgtacatgcggcaccggcggttcctacgcacaaatcacaagtaccgtaagatgaaggcggagttcgatggtactgaagagactgatcctgcaccaaaacctacatcgggagaaaatgtgtgtgcaatgatagagaaaattgtttgcgagtttggaaaaatgactaagaaaccatcaaaggggacaaagcgcaagaaacccgagaagaatacgaagggaggggatagtaagaagcaagatgacagttcgaagccagatgataaactccctcccccattcaagaagcattccatattttttaagtacctcccgtactggaaagatctggaggttcagcatgccatagacgtcatgcatctagagaagaatgtgtttgacaacatagttggaacattgttggacatgccgaagaagactaaagatggtctgcaatcaacgatggacctagtcgagatgggaatcagggaagagttacaccctcaagaaggagaaaagaatggcaaagtatatcttccaccagcctgtttcacactgacacctaaggagaagaagtcattttgcaactcactccgtaatgtcagactgcccataggtttctcatcaaacatcagtcgactagtttcaatgaaagatttgtcggtatctggttataattcacacgactgccatgtcttgctcaccgtgtttcttgcaattgcaataagagccataaaaccggagcatttaaaggttgctatcacaaggttgtgctactttttcaacgcagtgtcacagaaggtcattagtctcgaagagttaggaaatctccgtacattcgcacatgagacccagtgccaacttgagatgtgtttccctccgtcattttttgatatgatggagcacctcattgttcacattgtgccgcagatggttgcgcttggcccattgtacctccatcaaatgtggtcatacgagcgttacatggcggttctgaagggttacgtccgaaatcgtgcacatctagagggatcaatggttgaggattatagtactgaagaggttgtcgagtgctgtatcgattatctcaaggatggatatgcaattggagtacctgtgccccaacacgagggcagattgagtggcaggggaacgataggaaagaagagattcgtcacccatgatcacaaatcattccaagaagctcacttcagcgtgcttcatcagtttgctatcgtcgagccgtacatcgatcaacatatcgaactaatacgagctaacaataagggtcgctccaccgagtggataatgaaagaacacaagcgtctcttcatagattggttgcgagacctagacttacctgagggagaaactaccgatgaaataactatgaagcggttggcttgtggtccatcaactacagtaaattcttggcagggatatgacattaatggatattcgtttagcacaagagcccgagataataagacctgtacacaaaacagcggtgtccgtgtggaggcaattgatgaagccggtgaaaaacaatcatacttcgggtttattgaagaaatatgggaaattgactatgggcacacaatgcaattccccatatttaagtgccagtgggtaaaatacccgaacagggtaaatgttgataagttcggtcttactgttgttgaccttgcgagagtgggtcacaaggatgatccttgggtactcgccaatcgcgtggcacaagtgttttatgtgaaagacccttcaaatttgaagaaagatatagtgctaccagggaaacaaaagatattgggagtggatggggttgaagatgtcgaagattacaaccaatatgatagtatgccactttatagtcagtttgtacagaagattaagaatgtcgagacatctactcagaagaccgtgaagccttacatgcgcacggacggtgtgggcaaaaatgttaaagggtaa

SEQ ID NO: 9902 - DNA, 265 bp, Oryza sativa
  unsure (1)..(265): unsure at all n locations
  Clone ID: PAT_MRT4530_16275C.1
gctgataatgctgctgctgctgctgctgctgatgatgatgatgatgacgatgatgatttgtaaatncttgatacttgtataagtaatgctgctctgctcctctctngttttttnctccttgattcttgaaatgtttttctcctcctgatttccaaatcatgttggggattcctgatttcctgtttcatcttgattagtagtattatgctgtgattggggattagtgtgttttgccctgtgttaatcagggattataaaaaaaaan

SEQ ID NO: 9903 - DNA, 2784 bp, Oryza sativa
  Clone ID: PAT_MRT4530_16276C.1
atggaggaggaggcggatgggcagcatttgcaggtgaccgaccttgtggaaggcgaggttccgggagtggtcgccggcgatggcggcgacgcggcgcacggcgagctcggaggagttgttgaggttgtcgacgacgacggcgcggaagttgacgacgatggcgcggaagccggcgaggagcagctacagcacggcgtggctgccgatgtaccccgccccgcccatatggaaagttgggaatggatgtatcattggccgaggtttttgtcttcatatagaaatgaagtgtctaaatttattggtattgcaaaggcacacgctgagaagaacaatatgagaaagataatttgttcaagtgctgactgtaagaatgaaatagcctgggaaaatgcttctaaagtgaaggagcacttagtaactcgtggatttatggacaactacgaaatatggatacttcatggcgaagaacaagtggacgggcctaaaaatgtagttccgacacaagttgaagacatggtgcacgacgatggttctgttgaggacaaaatcgatctagaggaaatattacgtcatgcagaacccgaggtgctgatggggttggctagaggtttaaataactttgaagctttacagaaggcagctaaggaagttttgtacgatgagttcacaacactatggtcagttcttaaacttatgaggttaaaggcgagacatggatggtctgataccagtttcgacagtctgttagaacttctgcagaaaatactcccgaggcctaactcactaccatccagcacatatcaagcgaagaaactcatatgtcccgtttcacttgatgtggaaaagattcatgcgtgcgttaatcactgcatactgtataggaaagagtacgcttctttagatgaatgtccaacatgtggtgctagccggtacaaattgaatagcaatactggcttagaaccgtctgacacaactgaggaaagacagagaaaaatcccgcagcttgtgatgtggtaccttcctgtcaaagaccgcattaaacagatatactcaaatccgcgagatgcggaactaatgcgctggcatgaagaagggcacaagaaggatgggatgattcgacacccggcagatgctcatcagtggataaactttgatgctcagtatagagagtttgctaaagacccatggaacattagatttgccctgagtactgatggagttaatccttttggagacatgagcagctcacatagtacttggccagtgcttctcgccatgtataatctttctacctggctttgtcaaaagcaaaaatacgtactactatgtatcctcatacagggaccccgtcagcctggtattgatattgacgtatttcttgaaccattgttggaagatatggctgatttatggaaagagagattgaaagtgtgggacgagtacttaagagaatacttcacagtgaaggccatcattttcgtgaccattaacgattatccagcaatgttttcagtttcaggtcaaattaaaggtaaaacaggatgtgtgatctgcttgaatggaacatactataggtatctcccgggttccaacaagcttgtgtatatgcggcaccggcggttcctactcacaaatcacacgtaccgcaagatgaaggcggagttcgatggcactgaagagactgatcctgcaccaaaacctacaacgggggaaaaagtgtgtgcaatgacagagaaaattgtttgcgagtttggaaaagtgactaagaaaccatcaaaggggacaaagcgcaagaaacccgagaagactacgaaaccagaggattgtaagaagcaagatgatagttcgaagccagatgataaactccctcccccattcaagaagcattccatattctttaagtacctcccatactggaaagatctggagattcggcatggcatagatgtgatgcatctagagaagaatgtgtttgacaacatagttggaacattgttggacatgccgaagaagactaaagatggtctgcaatcaaggatggacctagtcgagatgggaatcggggaagagttagaccctcaaaggagagaagaatggcaaagtcgcaccaccgagtggataatgaaagaacacaagcgtctcttcatagattggttgcgagacctagacttacctgagggacaaagttccgatgaaataactatgaagcggttggcttgtggtccatcaactacagtaaattcttggcagggatatgacattaatggatactcgtttagtataagagcccgagataataagacctgtacgcaaaacaatggtgtccgtgtggaggcaattgatgaagtgggggaaaaacaatcatacttcgggtttattgaagaaatatgggaaatcgattatgggcacacaatgcaattccccatatttaagtgccagtgggtaaaatacccgaacggggtcaatgttgataagtttggtcttactgttgttgaccttgcgagtgtgggtcacaaggatgacccttgggtactcgccaatcgcgtggcacaagtgttttatgtgaaagacccttcaaatttgaagaaagatatagtgctaccagggaaacaaaagatattgggagtggatggggttgaagatgtcgaagattacaatcaatacgatagtatgccactttatagtcagtttgtacaaaagattaagaatgtcgagacatctactcagaagaccctgaagccttacatgcgcacggacggtgtgggcaaaaatgttaaagggtaa

SEQ ID NO: 9904 - DNA, 1980 bp, Oryza sativa
  Clone ID: PAT_MRT4530_16277C.1
atggccgatagtattaaagggactgaagagaagggtttaggggagcaagagcagtcccttgctgttgtggttgctctagaaccaacggtcccaccggaaagtagttccgacagcgacatagctaacgaagacgaggagtactcgtcgccaaacgatccttgtccaagcccaagcccgaagagaaggaaaaagggcgacggtgaagaaggcgacaaggactacattccccctaaagaagggaactccccggaagaaattcaaaggagccaaaagtatgcagagttggccaagaagaacaaatttcctcatcgcttaggctctgtgggatatgcaccaaaggtggagcagtggacaaaagaggaggaggaaatgaggaagaagaggcaacctgtaccaatggaggagtggatacagagatcaaggaactgggaagggttcaaaaatgacccccacaagaagcgtgaagcgtacaaggataaacttagagacgaaggggctggggagtttaaagggcaaatgatggatttctgcgtcaagcacatgcttttgcctcgccccgaaaccaaagaacctgagccagattaccccttcgatgacctcaaggagaatacaccctgcagattgcacgttccgattggacgctccgggaaaactcttgaggccgctacagccattgctatccctgggagaacatacaatgaagagttcatacccgatgcgtatgccaaggtgcagccgcaagtggtccacgaagggtttgagtcctacgacattgacttcccgactgcagatggtgtatccgtacttggggatgcggtcgatcttgtaattctctggcacaagaatgacatatcctttggattgggcaccgacgccactcaaaaacctgtggtgcctaaaccagggttgggaaaacctccgagacctcctaagaggaaggtgactaataaggcggaggaacccgagatgcataaggaaaatccagtgccggaagtgccaccggagattgcattgccggaggcagccatggagattgcaaccgccggaggcagccatggagattccagtgccggatgtgcccatggagattacagtggcagaaccagagagccagaaatatttgaagacccttctcctgcgaaagaccccgaggtgcaagagaccacggtccctgagaaggccactaccagttctgaggtgccacgagtgcttaggagccacgactccaagtccaaagatgagaacaaggagaagttcatggtaaccatcttcagaggaggtaaggaacgtgccaagcttagagatgacgaccaccagaaggctgctgaactagccgggccaacatacttcgcaaccgatgattgcccggaaaagtacaaacatgggaaagcattcttgctggaatgggcactgaaagaaggaccatgggagatgagaaggttacatatcttctacatggaggccagcaagaaaggcttgggcaatataacagctcgatcaccggcagattgcttcggcgaagaagagctcaagaagtgcatgccgccggagttcgagcagggtttgaaattccggatgcccctttccttccccatccccatctctctggcgactgtggcgcggcagctgcccggagacctcgatgctggttggagctgcggcctgcggcgcagcgcttctccggtgaagttgataacagcagctctctggcgacgccagcgtacttgcagctctcctgtggctggagcggaagttccacggttccgagctcgacggcagcagcagcggccgagcgacgtgcggtggctccacggctctctgcgcacggcgtcgatgtctcgtgctggcgatatgctaatctctgttggtaaaatttcctcaaatttgtacgtcaaccacgccggcctcagatccgtcgtggaggggctcgtcgccggttgcgcgccaaaccatgtggtcaagaaggccttgctagtttaa

SEQ ID NO: 9905 - DNA, 495 bp, Oryza sativa
  unsure (1)..(495): unsure at all n locations
  Clone ID: PAT_MRT4530_16278C.1
gggcgagnacntctcgcgcctcctcccatggntnccttcccnaccaccgccgcnncgccgccgcgcatgcattcgccttcgccctngcgccgaagccatcctcatccgccgccgcaccatccgcgctcttcccccgcaccgccgcggcggcggngttcccgacgctggctgtgnaaagaaacnggaagcgangcanccggtggtggccgcggcggcgggggcggggacngggancnancanaagganacnatnctgctcctcgggtgcgactacaaccactggctgattntgatngagttccccaangancnggggggacncggactnatattactctactctncntctngncntgcgntgcanatntttttttttttttntnttttctncncnanaacacnnaatggttcantcagntcganaaaancntcngagnantnntcggttatttnnggntgcttnggtnnccctgatactattttnntttttatgat

SEQ ID NO: 9906 - DNA, 5753 bp, Oryza sativa
  Clone ID: PAT_MRT4530_16279C.1
atggaaagtcgggaatggatgtatcattggccgaggtttttgtctccatatagaaacgaagtgtctaaatttattggtattgccaaggcacatgctgagaagaacaatatgaggaagataatttgtccatgtgctgactgtaagaatgaaatagcctgggacattgacgatgcttttaaagtgaaggagcacttagtaactcgtggatttatggacaagtacgaaatatagacatgtcatggcgaagaacaagtggacgggcctgaaaatatagttccgacacaagttgaagacatggtgcatgacgatggttctattgaggacaaaatcgatctagaggaaatgttacgtcatgcagaacccaaggtgctgatagggtcggctagagggttaaataactttgaagctttacagaaggcagcaaaggaagttttgtacgatgagtcgaagggttgtgacagtgagttcacaacactccggtcagttcttgaacttatgaggttaaaggcgagacatggatggtctgataccaatttcgacagtctgttagaacttctgcagaaaatgctctcgaggcctaactcactaccatccaacacatatcaagcaaagaaactcatatgccccctttcacttggtgtggaaaagattcatatgtgcgtaaatcactgcatactgtacaagaaagagtacgcttctttagatgaatgtccaacatgcggtgcaagccggtacaagtcgaatagcaatactggcctagaaccctctgaagcaactgagggacgacagagaaaaatccgcagcttgtgatatggtaccttcctgtcaaagaccgcattaaacggatatactcaaacccgcgagatgcggaactaatgcgctggcatgaagaagggcgcaagaaggatgggatgattcgacacccggcagatgctcgtcagtggatatactttgatgctcagtatatagagtttgctaaagacccacggaacattagatttgccctgagtactgatggagttaatccttttggagacatgagcagctcacatagtacttggccagtgcttctcaccatgtataatcttcctacctggctttgtcaaaagcgaaaatacgtactactccgtatcctcatatagggaccccgtcagtctggtattgatattgacgtatttcttgaaccattgttggaagatatggctgatttatggaaagagggattgaaagtgtgggacgagtacttaagggaatacttcatagtgaaggccatcatcttcgtgaccattaacgattatccagcaatgttttcagtttcaggtcaaattaaaggtaaaacaggatgtgtgatctgcttgaatggaacgtactataggtatctccctggttccaacagcttatgtacatgcggcatcggcggttcctacacacaaatcacaagtatcgcaagatgaaggcggagttcgatggtactgaagagactgatcctgcaccaaaatctacatcgggagaaaaggtgtgtgcaatgacagagaaaattgtttgcgagtttggaaaaatgactaagaaacccaagaagaatacgaaacaaggggatagtaagaagcaagatgatagttcgaagccagatgataaactccctcccccattcaagaagcattccatattttttaagtacctcccgtactggaaagatctggaggttcggcataccatagacgtcatgcatctacagaagaatgtgtttgacaacatagttggaacattgttggacatgccgaagaagactaaagatggtctgcaatcaaggatggacctagtcgagatgggaatcagggtagagttacaccctcaagaaggagaaaagaatggcaaagtatatcttccaccagcttgtttcacactgacacctgaggagaagaagtcattttgcaactcactccgtgatgtcagagtgcccataggtttctcatcaaacatcagtcgactagtttcaatgaaagatttgtcggtatctgtttataattcacacgactgccatgtcttgctcaccgtgtttcttgcaattgcaataagagctataaaaccggagcatttaaaggttgctatcacaaggttgtgctactttttcaacgcagtgtcacagaaggtcattagtctcgaagagttaggaaatctctgtacattcgcacatgagacacagtgccaacttgagatgtgtttccctccgtcattttttgatatgatggagcacctcattgttcacatagtgccgcagatggttgcgcttgacccattgtacctccatcaaatgtggtcatacgagcattacatggcggttctgaagggttacgtccgaaatcgtgcacgtccagagggatcaatggttgagggttatagtactgaagaggttgtcgagtgctgtatcgattacctcaaagatggatatgcaattggagtacctgtgccccgacacgagggcaggttgagtggcaggggaacgataggaaagaagagattcgtcacccatgatcacaaatcattccaagaagctcacttcagcgtgcttcatcagtttgcatcgttgagccgtacatcgatcaacatatcgaactaatacgagctaacaattggttgcgagacctagacttacctgagggacaaactaccgatgaaataattatgaagcggttggcttgtggtccatcaactacagtaaattcttggcagggatatgacattaatggatactcgtttagcacaagagcccgagataataagacctgtacgcaaaacagcagtgaccgtgtggaggcaattgatgaagccgggaaaaaacaatcatacttcgggtttattgaagaaatatgggaaatcgactatgggcacataatgcaattccccatatttaagtgccagtgggtaaaatacacgaacggggtcaatgttgataagttcggtcttactgttgttgacctggcgagtttgggccacaaggatgacccttgggtactcgctaatcgcgtggcacaagtgttttatgtgaaatacccttaaaatttgaagaaagatagagtgctaccagggaaacaaaagatattgggagtgtatggggttgaagatgtcgaagagtacaaccaatacaatagtatgccactttatagtcagtttgtacagaagattaagaatgtcgagacatctacttagaagaccgtgaagccttatatgcgcacggacggtgtgggcaaaaatgttaaagggtaatgattgttgagtggcatataagcatctaagaagttagtagttatgtaatggtggtatgtaagaagatgtgtgatcatatcgcaaatcgacgaacaattgtactcaacattttggtggtatgtaattagtttgtactaatttttatgtgcaattaccatttgtagtgtaaaaaatttgttaaaaaatttaaattagtaatatttgaaaagtgtacttatttgtgcaattaccatttttaccatttgtagtgtaaaaaatttgttaaaaaatttaaattagtaatatttttgtgtgcaataaccatttatacatttgaaaagtaataatactaaggtttgtatattttttgtatattttagaataaatatattcaactctgtaccaattttcgcaggcgggcggtccgcctgcgaaaattgttatacagagttgggtttacatcttcgcagtcagaaggcccgcttgcgaagatagtaaaaacgatcttcgcaggcgaacggcccgcctgcgaagatcgttgccctatataagggcaagcccgtggcgccaaaatttctaagtccaggcgggaaccctagaaattttggcgctgtcaggctgctgaattttttcaccgccgcacgcctccgccgtcctccgccaccgcccgcctgcgaccttcactctccaaccgtcgtcctccaccgccgccgaccgtcgtcgtccgcgcgctgtcaccgagaccgccgccccttgccgccactccaccgcgcgcgagctccacaactctgccgccgccgccgccgacccctccaccgcgctcgagctatagccgcccgctccaccgccgccggcccctccaccgccactggcccctctactgcgccggccaccggcccctccaccacgcgctcggccgccgctggcccctccaccaccgccggccccttcaccgccgccggccgccacctttctctctatctcgctcgcggccgaacggcttcatcggccgatcgtcgtccacgagcgaagacgtcctcggccgaacgacgtcttcggccggtcgtcgtccacggccgaacctcgtcgtcggccgttcatcgtccatgaccgaagctggtcgtcgggcgttcgtcgaacacggacgtgtgtgcatgtgggtgtttctttttatatgtgtgtgcatgtgggtgtgagggggcatatatgtgtgtgtgcatgtgggtgtgaatgggcaagaggggtgggtgatatgtgaatgaggggttatatgttgattgtgaatgtgaatttgggaatgtgggtgatatgtgaatgaaattgggagggtatgttcaattttgcaggatatgtgaatttgataaattttttaaataacatgtgggagggtatgttaacatttttttttaaaaaaatgtggaggatatgtttgccttttcaattttttttaatcaacatgtcgatgaaatgtaactgtcaattagtgcaacgttccaagctcaaagatgacgacccccagaaggctgctgaactagccgggccaacatacttcgcaaccgatgattgcccggaaaagtacgaacatgggaaagcactcttgctggaatgggcactgaaagaaggaccatgggagatgagaaggttacataccttctacatggaggcctgcaagaaaggcttgggcaatataacagctcaatcaccggcagattatttcggcgaagaaggttatgtatggctagatttctcagatctccacgccatatatcgtcgggataagatggacgtcaactacgtcggtgtttggtgcatgatgcaatacatggatgctaagaagaaaaaagaacccatcggcttcttggatccaactcggatctgccaaacacagcataccgtgaggctagcaccagggtctaaccagctgaagggcaagaatgcaaaagagataacagaatacaagaagggcttgcacaaggagaaattgattactgtcgcacagtacattggacgagccttcttgcactttcaaaataagagtcatcatggccgcttataattttaacaatcattatatctgtttactcatccaccctaaagacggaaccgtggtagtcttagaccctctcaattacagtcacaagcaatacaaagaatttctaacaatcttacagtatgcataccaatactacaagttcaagggtggagaacagacccgaacacgggagaagctgctatgtcacaagcaaccgcgaggaacggtcctttgcgggtattatgcgtgcgaattccttagggttaatggacggtacaggactaacgcggaggatttgccaagattagaatgtcgaacaagctttgacgatataggtatcacaaatgtccagcgtgatctgtgccacttcatctaccatgagtgctgtcatgtgaaagaagatttcttcgacccagagggtgccctagcggcaagtgacgaattcaaggatctccgggagtggaacactactatgcca

SEQ ID NO: 9907 - DNA, 330 bp, Oryza sativa
  unsure (1)..(330): unsure at all n locations
  Clone ID: PAT_MRT4530_1627C.1
ntcnggtgacccggaccccccctgcgggcgtgcgacccacgcgtccgctactctctctctcgcatcgcatccatcccctcgtgtcgccgccggggaggctgcggcgagccttcaccccccacccgcccaccgccggcgagccacggcgtgggcgacctcctctcctctcccgatcccctctngnccttaggtangggcttntccccantccnnaccanangcgcgtgngtggcccgacgagcanctnaggttcgnatcggatggaagaccagaagaaaaatggaaaaccaagaggggtcttntnggttcggaaagggggagtcccctngg

SEQ ID NO: 9908 - DNA, 790 bp, Oryza sativa
  unsure (1)..(790): unsure at all n locations
  Clone ID: PAT_MRT4530_16280C.1
tttttttttaggaaacatacgttacagggaggggaaacaacttaactggaccaatatatgtccaaaataaatgaatattttgacattacagggagtggaaaaaagggggaaacaacttaattggaccaatatatgtccaaaataaatgaaaattttgacattacagggagtggaaataaaaaacatgagaaacgccgttgccggggatcgaacccgggacaccggcgtgacaggcgggaatactcaccactatactacaacgaccttcttgttagcaatccatagctcagctatcactttaccatcgtaatcaagttccatttcaaagataagcacattcgcaacggttcgatcccttatattttcaggtcaaattagccggcacaaatttaacccctcttctctgtttcctgtttttttgaacaatatactggacctgctcttgttattctctcttcacagttcacagctttatggacgtactactacttgctgtaggagagttcacatgtctgaacacctaaaaaaactactagtcccgtcctatagggattttgggtggatgtttagatttattgtactaagatatgtcatatctatttaaaatcccttatattataggatggagtgagtagtacagtaaattnntctccnccgngcnacnatcaattgagggacaatatcaatatacaactgtcttgaatttacagggcgaaaaaacantctccatgctgcaatntgaccaggcaaatatgatgatatatgtgttccattggctgaaaactgacag

SEQ ID NO: 9909 - DNA, 2430 bp, Oryza sativa
  Clone ID: PAT_MRT4530_16281C.1
atgaggttaaaggcgagatatggatggtctgataccagtttcgacagtttgttagaacttatgcagaaaatgctccggaggcctaattcactaccatccagcacatatcaagcaaagaaactcatatgccccctttcacttggtgtggaaaagattcatgcgtgcgtaaatcactgcatactatacaggaaagagtatgcttctttagatgaatgtccaacatgcggtgctagccggtacaaatcgaatagcaatactggcctagaaccgtctgacacaactgagggacgacagagaaaaatcccgcagcttgtgatgtggtaccttcctgtcaaagactgcataaaacggatatactcaaacccgcgagatgcggaactaatgcgctggcatgaagaagggcgcaagaaggatgggatgattcgacacccggcagatgctcgtcagtggataaactttgatgctcagtatagagagtttgctaaagacccacggaacattagatttgccctgagtactgatggaggaccccgtcagcctggtattgatattgacgtatttcttgaaccattgttggaagatatggctgatttatggaaggagggattgaaagtgtgggacgagtacttaagggaatacttcacagtgaaggccatcatctttgtgaccattaatgattatccagcaatgttttcagtttcaggtcaaattaaaggtaaaacaggatgtgtgatctgcttgaatggaacgtactataggtatctcccgggttccaacaagcttgtgtacatgcggcaccggcggttcctacgcacaaatcacaagtaccgcaagatgaaggcggagttcgatggcactgaagagacagatcctgcacccaaaccaacatcgggagaaaaggttcggcttgccatagatgtcatgcatctagagaagaatgtgtttgacaacatagttggaacattgttggacatgccgaggaagactaaagatggtttgcaatcaaggatggacctagtcgagatgggaatcagggaagagttacaccctcaagaaggagaaaagaatggaaaagtatatcttccaccagcctgcttcacaccgacacctgaggagaagaaatcattttgcaactcactctgtgatgtcagagtgcccataggtttctcatcaaacatcagtcgactagtttcaatgaaagatttgtcggtatctggttataattcacacgactgtcatgtcttgctcaccgtgtttcttgcaattgcaataagggccataaaaccggagcatttaaaggttgctatcacaaggttgtgctactttttcaacgcagtgtcacagaaggttattagtctcgaagagttaagaaatctccgtacattcacacatgagacacagtgccaacttgagatgtgtttccctccatcattttttgatatgatggagcacctcattgttcacatagtgccgcagatggttgcacttggcccattgtatctccatcaaatgtggtcatacgagcgttacatggcagttttgaagggttacgttcgaaatcgtgcacatccagagggatcaatggttgagggttatagtactgaagaggttgtcgagtgctgtatcgattatctcaaagatggatatgcaattggagtacctgtgccccgacacgagggcagattgagtggcaggggaacgataggaaagaagagattcgtcacccatgatcacaaatcattccaagaagctcacttcagcgtgcttcatcagtttgctatcgttgagccgtacatcgatcaacatatcgaactaatacgagctaacaataagggtcgcaccaccgagtggataatgaaagaacacaagcgtctcttcgtagattggttgcgagacctagacttacctgagggacaaattaccgatgaaataactatgaagcggttggcttgtggtccatcaactacagtaaattcttggcagggatatgacattaatggatactcgtttagtacaagagcccgagataataagacctgtacgcaaaatagcggtgttcgtgtggaggcaattgatgaagccggggaaaaacaattatacttcgggtttattgaagaaatatgggaaattgactatgggcacacaatgcaattccctatatttaagtgtcagtgggtaaaatacccgaacggggtcaatgttgataagttcggtctcactgttgttgacctggcgagtgtgggtcacaaggatgacccttgggtactcgccaatcgcgtggcacaagtgttttacgtgaaagacccatcaaatttgaagaaagatatagtgctacccgggaaacaaaagatattgggagtggatggggttgaagatgtcgaagattacaatcaatacgatagtatgccactttatagtcaatttgtatag

SEQ ID NO: 9910 - DNA, 6091 bp, Oryza sativa
  Clone ID: PAT_MRT4530_16282C.1
acggaaagtcgggaatggatgtattattggccgaggtttttgtctccatatagaaacgaagtgtctaaatttattagtattgccaaggcacacgctgagaagaacaatacgacgaagataatttgttcatgtgctgactgtaagaatgaaatagcctgggactttgatgatgcttttaaagtgaaggagcacttagtaactcgtggatttatggacaagtaagaaatatggacacgtcatggcgaagaacaagtggacgggcctgaaaatgtagtaccgacacaagttgaagacatggtgcatgacgatggttctgttgaggacaaaatcgacctagagaaaatgttacgtcatgcagaacccgaggtgctgatggggtcggatagaggtttaaataactttgaagctttacagaaggcagctaaggaagttttgtacgatgagtcgaagggctgtgatagtgagttcacaacactacggtcagttcttgaacttgtgaggttaaaggcgagacatggatggtctgataccagtttcgacagtctattaaaacctctgcagaaaatgctcccgaggcctaactcactaccatctagcacatatcaagcgaagaagctcatatgtctcctttcacttggtgtggaaaagattcatgtgtgcgttaatcactacataatgtacaggaaagagtacgcttctttagatgaatgtccaacatgcggtgttagccggtacaaatcgaatagcaatactggcctacaaccgtctgatacaactgagggaagacagaaaaatcccgcagcttgtgatgtggtaccttcctgtcaaagaccgcattaaacggatatactcaaacccatgagatgcggaactaatgcgctggcatgaagaagggcgcaagaaggatgggatgattccacacccgatagatgctcgtcagtggataaactttgatgctcagtatagagagtttgctaaagactcacggaacattagatttgccctgagtactgatggagttaatccttttggagacatgagtagctcacatagtacttggccagtgcttctcatcatgtataatcttcctacctggctttgtcaaaagcgaaaatacgtactactctgtatcctcatacagggaccccgtcagcctggtattgatattgacatatttcttgaaccattgttggaagatatggctgatttatggaaagagggattgaaagtgtgggacgagtacctaagggaatacttcacagtgaaggccatcatcttcgtgaccattaacgattatctaacaatgttttcagtttcaggtcaaattaaaggtaaaacaggatgtgtgatctgcttgaatggaacgtactataggtatctcccgggttccaacaagcttgtgtacatgcggcaccggcggttcctatgcacaaatcacaagtaccgcaagatgaaggcggagttcgatggcactgaagagactgatcctgcaccaaaacctacatcgggggaaaaagtgtgtgcaacgacagagaaaattgtttgcgagtttggaaaagtggctaagaaaccatcaaaggggacaaaacgcaagaaacccgagaagactacgaaaccaggggatagtaagaagcaagatgatagttcgaagccagatgataaactccctcccccattcaagaagcattccatattctttaactacctcctgtactggaaagatctggaggttcggcatgccatagacgtcaagcatctagagaagaatgtgtttaacaacatagttggaactttgttggacatgccgaagaagactaaagatggtctgcaatcaaggatggacctagtcgagatgggaatcagggaagagttacaccctcaagaaggagagaagaatggcaaagtatatcttccaccggcctgtttcacactgactcctgaggagaagaagtcattttgcaagtcactccgtgatgtcagagtgcccataggtttctcatcaaacatcagtcgactagtttccatgaaagatttgtcggtatctggttataattcacacgactgtcatgtcttgcttactgtgtttcttgcaattgcaataagggccataaaaccggagaatttaaaggttgctatcacaaggttgtgctactttttcaacgcagtgtcacagaaggtcattagtctcgaagagttaggaagtctccatacattcgcacatgagacgcagtgccaacttgagatatgtttccctctgtcattttttgatatgatggagcacctcattgttcacatagtgccacagatggttgcggttggcccattgtagctccatcaaatgtggtcatacgagcgttacatggcggttttgaagggttacgtccgaaatcgtgcacatctagagggatcaatggttgagggttatagtactgaagaggttggtgagtgttgtatcgattacctcaaagatggatatgcaattggagtacctgtgccccgacacgagggcagattgagtggcagggaacgataggaaagaagagattcgtcacccatgatcacaaatcattccaagaagctcatttcagcgtccttcatcagtttgctatcgttgagccttacatcgatcaacatatcgaactaatacgagctaacaattggttgtgagacctagacttacctgagggacaaactaccgatgaaataactatgaagcggttggcttgtggtccatcaactacagtaaattcttggcaaggatatgacattactggatactcgtttagtgcaagagcccgagataataagacctgtacgcaaaacagcggtgtccatgtggaggcaattgatgaagcctgggaaaaacaatcatacttcgggtttattaaagaattatgggaaatcgactatgggcacataatgcaattcctcatatttaagtgccatcagtttgtacagaagattaagaatatcgagacatctactcagaagaccgtgaagccttacaagcgcacggacggtgtgggaaaaaatgttaaaggggtttacatcttcgcaagcggatcatcttcgcaggcggaccgtccgcctgcgaagatcgtttccctatataagggcaagcccggcggcgccaaaatttctaagtccaggcgggaaccctagaaattttggcgccgccgctccaccgctccgccgccgccgcgccgtccaccgcatcgccaccaccggccgcgcgcctctgccgccgctccaccactccgtcgccgccgcgccgtccaccgcatcgccgccaccggcccctcaaccgccggcggccgcttcccccccggccgatctcgcggccgaacggcttcattggcctttcgtcatccacgagcgaagacgtcctcggccgaacggcttcatcggccggtcgtcgtccaccgccgaacttcgtcgttggcctttcgttcgtcgtccacgaccgaagctcgtcgtcggccgttcgtcgtccacggacaagtttgaaacgatggccgatagtactaaagggactgaagagaagggtttaggggaggaagagcagtcgattgctgttgtggtagctgacgaagacggtgagtactcgtcgccaagcgatccttgtccaagcccaagcccgaagagaaggaaaaaaggcgacggtgaagaaggcaacaaggactacattccccctataaaaggggactgggatcatgtatcgaatggggataagaaagtcctatggaaagagttaaagaaaatcttccagttcccggatggatcagagccagcagtgaggaattgtgctctgcaaacaatggccaagtcttggcgtggttggaagaccaccttgaacaagaaatttgtgaagacgggatgtataccgttttcgacgtatgccaacataaccccgaatcagtgggaggactttctgacgttgaagaactccccgaaagaaattcaaaggagccaaaagtattcagagttggccaagaaaaacaaatttcctcatcgcttaggctctgcgggatacgcaccaaaggtggagcagtggacaaaagaggaggaggaaatgaggaaggcggggcttccggtgccaatgaaggaatggacacagagatcaaggaattggcatgggggtagggttcgaggtgtgtcgtccaagatgagttggaaggaagggttcaaacatgacccccactagaagcgtgatgcgtacaaggataaacttagagacgaaggggctgcggattttgaaaggcaaatgatggatttctgcgtcaagcacatgcttttgcctcgccccgaaaccaaagaacctgagccagattaccccttcgatgacctcaaggagaatacaccctgcagattgcacgttcccattggacgctccgggaaaactcttgaggccgctacagccattgctatccctaggagaacatataatgaagagttcatacctgatgcgtatgccaaagtgcagccgcaagtggtccacgaagggtttgagtcctacgacattgacttccctactgcagatggtgtatccgtacttggggatgcggtcgatcttgtaattctctggcacaagaatgacatatcctttggattgggcaccgacgccacgcgaaaacctgaggtgccaaaaccggggttaggaaagcctccgaaacctcctaagaagaaggtgattgaaaaggcggaggaacccgagatgcataaggaaaatatagtcccggaagtggcaccgaagattgaagtgccagaggtgcccatggagattgcactgccggatgtccaaatggagattaaagtggctgaaccagaggtgcaatttgtggcatcagtcgggacagaaatagaagaagtaccaggattggaatgggacggtacagacctagaaatatttgaagacccttctcctgcgaaggaccccgaggtgcaagagaccacggtccctgagaaggccactaccagttctgaggtgcctagagtgcttaggagccacgactccaagtccaaagataagaacaaggagaagttcatggtaactgtctttagagggggtaaggaacgtgccaagctcagagatgatgacccccagaaggccgctgaactagccgggccaacatacttcgcaactgatgattgcccggaaaagtacgaacatgggaaagcactcttgccggaatgggcactgaagaaaggaccatgggagatgagaaggttacataccttctacatggaggccagcaagaaaggcttgggcaacagctcgatcatcggcagattgtttcggcgaacaaggttatgtatggctagatttctcaaatctccacgccatatatcgtcgggataagatggacgtcaactatgtcggtgtttggtgcatgatgcaatacatggatgctaagaagaaaaaagaacctatcggcttcttagatccaactcggatttgccaaacacagcataccgagaggctagcaccagggtctgaccagctgaagggcaagaatccaaaacagatagctgaatacaagaagggcttgcacaaggagaattgattactgtcgcatagtacattggacgagccttcttgcactttcaaaataagagagtcgtcatggccgcttataattttaacgatcattatatctgtttactcatccaccctaaagacggaaccgtggtagtcttggaccctctcgattacagtcacaagcaatacaaagaatttctaacaatcctacagtatgcgtaccaatactacaagttcaagggtggagaacagacccgaacacgggagaagctgctatgtcacaagcaaccgcgaggaacggtcctttgcgggtattatgcgtgcgaattccttagggttaatggacggtacaagactaacgtagaggatttgccaagattagaacgtcgaacaagctttgacgatataggtatcacaaatgtctagcgtgatccatgccacttcatctaccatgagtgctgtcatgtgaaaggagatttcttcgacccagagggtgccctagcggcaagtgacgaattcaaggatcttcgggagtggaacactgctatgcca

SEQ ID NO: 9911 - DNA, 474 bp, Oryza sativa
  Clone ID: PAT_MRT4530_16283C.1
atgaggaagctcaggttccacgagcagaagctactcaagaagaccaacttcctcgacttcaagagggagaaaggccaccgcgacgccatcgtcacgcagcgctacctcctcgtcgagagagacgactacaagaagtacaatggcatatgcctgatggtgcaaaagctcgtcaacattataaagcaaatggacccgagagacccttacagagcggagatgacagacatgttgctcgataagctgcggaggcttgcaacagtcatggtgaagctcaagttcgcggagcaccttaaagaggccgtgacatacatacagcagggtcatgtgcgtgtaggcccagagacagtcaccgatccagcctttcttgtaaccaggaacatggaggatttcatcacctgggttgactcctcaaagatcaagagaaaggtccaggagtataatggtgaattggacgattttgatgctatggcttga

SEQ ID NO: 9912 - DNA, 3459 bp, Oryza sativa
  Clone ID: PAT_MRT4530_16284C.1
atggcaggattgcgtaagggaatacgagaacatcaacttctacaccttcgacgagatatcacgacttctccacgtgatgcatatgaggtacatgactataattttgaacaagttgcatctaagttaccattctatgatgggaagtacgattctgttgcatacattgattgggagctagcagtagacaatgaatttgatatatatgatttttctgatactcaaatgattaaggctgctagtaataagtttacctcttctgcattattttggtggacttatgttagtaataaacctgaaacttgggatgaattgaaaaccatgatgagaaagcgctctgtgacatcttattacaaatgtactcttcgggagaaattagaacatctgaaacaaggtgatagaactgttagggagtacattcatgaatttaaggtctgtatcatctacagtggtctcaaagagtgcaatgaaaatacaatgcgtagatttttcaatgggcttaattctgaaattcaggttttgcttgataatgtgacatataatcatattgggcacctattcatgcttgctcgtagcattgagagtcagatcatatcaaaggcgaggatgcatgaccaatgtgatttatctcctatttctgaatccccaatatacttatgtaatgatgatgtgcaaacattggaggagcaatcttttgtctcccctgttactaacgttttgcaggaagatcagcacatccaagaaaaggagaatggtatacttgagaagaaagaggatgaagcacctgcgatgtctaaagaaagttcgcaaggtaaattaaatggtgctgagagaaatgaaggaatagggttgatctgcaccgacaagatcaataacccacggagaggtgtatcgatcgctaaggcgcaacacaacgtctcagatatggaaagtcgggaatggatgtatcattggccgaggtttttgtctccatatagaaacgaagtgtctaaatttattgctattgccaaggcacacgctgagaagaacaatatgaggaagataatttgtccatgtgctgactgtaagaatgaaatagcctgggacttcgacgatgcttttaaagtgaaggagcgcttagtaactcgtggatttatggacaagtatgaaatatggacacgtcatggcgaagaacaagtggacgggcctgaaaatgtagttccgacacaagttgaagacatggtgcatgacgatggttctgttgaggacaaaatcgacctagaggaaatgttacgtcatgcagaacccgaggtgctgatggggtcggctagagctttacagaaggcagctaaggaagttttgtacgatgagtcaaagggctgtgacagtgagttcacaacactacggtcagttcttgaacttatgaggttaaaggcgaaacatggatggtctgataccagtttcgacagtctgttagaacttctgcagaaaatgctcctgaggcctaactcactaccatccagcacatatcaagcgaagaaactcatatgtcccctttcacttggtgtggaaaagattcatgtgtgcgttaatcactgcatactgtacaggaaagagtacgcttcttttgatgaatgtccaacatgcaatgctagccagtacaaatcgaatagcaatactggcctagaaccgtctgacacaactgagggaagacagagaaaaatcccgcagcttgtgatgtggtaccttcctgtcaaagaccgcattaaacggatatactcaaacccaagagatgcggaactaatgtgctggcatgaagaagggcacaagaaggatgggatgattcgacacccggcagatgctcgtcagtggataaactttgatgctcagtatagagagtttgctaaagacccacggaacattagatttgccctgagtattgatggagttaatccttttggagacatgagcagctcacatagtacttggccagtgctgtcaccatgtataatcttcctacctggctttgtcaaaagcgaaaatacgtactactctggatcctcatacagggaccccgtcaatctgaaaattgtttgcgaatttggaaatgtgactaagaaaccatcaaaggggacaaagcgcaagaaacccgagaagactatgtgggatagtaagaagcaagatgatagttcgaagtcagatgataaactcccttccccattcaaaaagcattccatattctttaagtacctcccgtactggaaagatctggaggttcggcatgccatagacgtcatgcatctagagaagaatgtgtttgataacatagttggaacattgttagacatgccgaagaagactaaagatggtctgcaatcaaggatggacatagtcgagatgggaatcagggaagagttacaccctcaagaaggagagaagaatggcaaaatggttgcgcttggcccactgtacctacatcaaatgtggtcatacgagcgttacatggcggttttgaagggttacgtccgaaatcgtgcacatccagagggatcaatggttgagggttatagtactggagaggttgtcgagtgctgtatcgattacctcaaagatggatatgcaattggagtacctgtgccccgacacgagggcagattgagtggtaggggaacgataggaaagaagagattcgtcacccatgatcacaaatcattccaagaagctcacttcagtgtccttcatcagtttgctatcgttgagccttacatcgatcaacatatcgagctaatacgagctaacaataagggtcgcaccaccgagtggataatgaaagaacacaagcgtctcttcatagattggttgagagacctagacttacctaagggacaaactacagatgaaataactatgaaacggttggcttgtggtccatcaactacagtaaattcttggcaaggatatgacattaatggatactcgtttagtacaagagcccgagataataaaacctgtacgcaaaacatcggtgtccgtgtggaggcaattgatgaagccagggaaaaacaatcatacttcgggtttattgaagaaatatgggaaatcgactatgggcacacaatgcaattccccatatttaagtgccagtggcaaaaatacccgaacggggtcaatgttgataagttcggtcttattgttgttgacctggcgagtgtgggtcacaaggatgacccttgggtactcgccaatcgcgtggcacaagtgttttatgtgaaagtcccttcaaatttgaagaaagatatagtgctacccgggaaacaaaagatattgggagtggatggggttgaagatgtcgaagattacaatcaatacgatagtatgacactttatagtcagtttgtacagaagattaagaatgtcgagacatctactcagaagaccgtgaagccttacatgcgcatggacggtgtgggaaaaaaatgttaa

SEQ ID NO: 9913 - DNA, 1188 bp, Oryza sativa
  Clone ID: PAT_MRT4530_16285C.1
tcaccctactcgcgaagcggaggcggaggcgtggtcgaggtcggaggaggggtcgtcatcggcgtcgaggtcgtcgaaggagtcgatgccgcaggcggcgtggccgcggccgaaggcgcggatgtggtccttgagggagcgcttgtgcttgaagtcggagccgcaggcgcagtaccagagcttgccgcagttcttctcgtgggtgcgccagtcgccgcggacggcgaacgccttgccgcacttgcggcacatgaagggcttgatcccgtgcttccgcttgtagtgcgtctgcagcgtccggaagtccttgagcggccgcgcccgcgggtggtcgatgttgttccggcaccccgccgcgcagcagtagcacggcagccgcagcatcgccgtcggctgcgtcccccgcagcgactccggccccttcctgtactgcgacccgtgcccccacatatgcatctgcatgttgttgtatcggttgaaggtcttgtagcagacggggcaggagaactgggtagggccaatgaggatctgggacggtgtggggatccagtactgccccttggtcagcttccctatccctatggacgcgcaacccagcggcagcgtcgccgtcgccgccgccgccgccgcctcgtcttcatcctcctcctctcctccttcctcctccacttgcatcctgctgcttcctccacctgctgccgatgcttctgctgctgctgctgctgcagcttggttgccggcggcggcggcggcgtcggaggggctcgggctcgggaggccgatgtgcagggccacggtcacctccgccgcctgatcatcggctgctgctgctgctgatggtgattctcgtttgtcgtcgttgttgctgcaagaagcggcgccgccgccgccatggctgttcttttcttggccttgcttgtgatggtggtgatgatcttgatcatggcggcggtggtggtgatcgtcgtcgtgggtggtggagggagtgaggctgaggagggggagggcttccctgatcggaggggaggaagggggaggtggtgggtggaggtaggaggagtagaggccggagaaggaggcggcgtagggcggaggcggcggcggcggcggcggagggaagtggagggggtggtgggagcggtggtggtggtggtagcctctcaagaagttggtgtagggatctcccat

SEQ ID NO: 9914 - DNA, 240 bp, Oryza sativa
  Clone ID: PAT_MRT4530_16286C.1
atggctgaaactttgactggagaagctaggttaattcaaacaaaagcaatgttgacaggatcatgtcatcacgatcacagctcggtaattgcggtcacaatttttacaacgttagtaattacggcatgcatactcgtcaaggctgccttcctttcccctgacctcagacacagtcgatcccaacaacaacagcaacgcaatctgaccatcaaagaaaatttgtatcctgacagtgactga

SEQ ID NO: 9915 - DNA, 935 bp, Oryza sativa
  Clone ID: PAT_MRT4530_16287C.1
cgcctcgcttctccccgactcccgcgtgctcgccgcgccgcccaccgtcaccgcctggagcgtgcgaaagctcgccggtgcggtttctccgctcagcgtgaaggatgaggaagctcaggttccacgagcagaagctactcaagaagaccaacttcctcgacttcaagagggagaaaggccaccgcgacgccatcgtcacgcagcgctacctcctcgtcgagagagacgactacaagaagtacaatggcatatgcctgatggtgcaaaagctcgtcaacattataaagcaaatggacccgagagacccttacagagcggagatgacagacatgttgctcgataagctgtacaacatgggtgtaattccaacaaaaaagagcctgttaacatgtgaaaaactttcagtgagctccttttgcaggcggaggcttgcaacagtcatggtgaagctcaagttcgcggagcaccttaaagaggccgtgacatacatacagcagggtcatgtgcgtgtaggcccagagacagtcaccgatccagcctttcttgtaaccaggaacatggaggatttcatcacctgggttgactcctcaaagatcaagagaaaggtccaggagtataatggtgaattggacgattttgatgctatggcttgagaatatcgttgagcagaatttctgggtccatcggtgtagctactcgtgtatgattttttttttggaactttttaaggtgaggtcgtgatttgctgcagagctacttgcatgtgcattgttgttgtcaatgttgtgtaatgcagctcaacgcctatgacagttcattcacttactaatacaattttgtagccgtttctctattacagtagcgctttgcttatgttcttgagtgtattttcctgtcacattacaacctgattatgcaggataattctcatggtc

SEQ ID NO: 9916 - DNA, 289 bp, Oryza sativa
  Clone ID: PAT_MRT4530_16288C.1
caaacaacatcctggtgtcgacgatcaacggcgccggctgcggtgatctgagacggctgtacgtggtggtgttcctcgtgttctgcctccacccacaagacgcggctgcgcacgctcggcctcgccgcggccgtcgcgtcggtgttcgcggcggtggcgctcgtctccctcctcgccctccacggccagcaccgcaagctcctctgcgtgcgtcgccgacaccgtctgctccatctgcatgtacgcctcccccctctccatcatgaggctggtgatcaagacgaagagc

SEQ ID NO: 9917 - DNA, 999 bp, Oryza sativa
  Clone ID: PAT_MRT4530_16289C.1
atggctgccgcgacgatcgccagcaagcacccggcggccgacggcggcggcgacgcctgctccggtgcgtcgcactgcagtacgttgacgaacatctacaactacgacagcctggggacgctcggggcgggcgcgtgcagcgtcgtccgcaaggcccgcgatcgccgcaccggcgacacggtggcgatcaagtgcttccacccgccaggtggagacctcgacgacggccagcagcagcagcagcacgacgccgtcgcgctcgccggccgggaacgcgactgcctcgccgcgtgccgcggcagcccgtccgtcgtgcagcttctcgacgtcgccgccgacccatggaacagcggcgacgtgtacctcgtcatggagttcgtcggcacccgcacgctccgcgacctcaccgtcggccgtcccttctcggaggccgagacccgcgccctgatgcggcagctcctcgctggcgccgcggcgatccacggcgccggcctgatccaccgcgacgtcaagccggcaaacatcctcgtcggcccgggctgcgtcctcaagtactgcgacttcggcgacgccacgccggtcatgccgccgtatgaggaattcttggtcggcacgctccggttcacctcgccggaggaggtcgccggcgaccggttctacggccagggcgtggacatgtgggcgctgggctgcgtgatggccgagctcctcaccggcaggttcgtgttcacctcgtcggagacgtgtgaggaccatgtcctcgacctgctggacctgcgagaatgcgacgtcggagccgaggactcgccggcgttcggtggcctgccggggctgtcgccggcggggcgcgaggtgctggctgggctgctggcgttcgaccaccgggagaggatgacggcggaggcggcgctggagcaccggtggttcacggcggcggcggactcgcctgccgtactcaggcgcctcgccgacctagcagctgggaagaacaacatgtag

SEQ ID NO: 9918 - DNA, 636 bp, Oryza sativa
  Clone ID: PAT_MRT4530_1628C.1
atgagggtgtcatcagtggttggagtaggtcaacaagggtgccgccggctgtcagaacctctctctagggcacaaacgtcgacgacgaaggagcgcgatatcgaaattgcagtgttagatctagaggcaatagaggcggggactggcacgagagtagcctctcaccggcggccgctgcccctctccgccctcccaccacgcctcttgacgccgctcgctgcgagctgccttgaaggagataggaagagtggaaaagaggtggagagagaaggaaactcgacagtaaattccccacgggaacaaatcgaccgttcccatcgctgctcgcggattcctagttggcgtgtgcgcaccggcaacgcgcacgcggcccaaccctcgcgcgatagcccacgattaacgccatttaaaaacttttcaactctgacggagctcgtggctcctcaccgggagaccgcacaggcccccctttgccggttcggccgggggcttagggtgaaatctcaagctctctcgagattacacgctagctccggcttgagacgagtgcctagaggctttcgtcttgacgggatggggcaaggcgtgcgtcagaccgccagtcgccacctaacccgtgatctgaccggtctgtga

SEQ ID NO: 9919 - DNA, 181 bp, Oryza sativa
  Clone ID: PAT_MRT4530_16290C.1
taaagtccatcaccggtccctaaacttataccgttgtgtcatcccggtccataaactcgcaaatcgaccgttcaggtcctcaaacttgttcgactatgtcatcccggtccctaaacttacagaccactcgtttaggtcttctatcttgttcagttgtgtcactccggtccctaaacaggac

SEQ ID NO: 9920 - DNA, 548 bp, Oryza sativa
  Clone ID: PAT_MRT4530_16291C.1
ctccgcaagacctaagacataaacccggggctcaccagtacaaaatcaactactttcccaattcccaaccacggccaccaaagtctcctcccgctcccggaatgcggcaaccccgacaggttcctccccccgaaacttcaaaaccctaccccgcctaccacgattcgatgatcccgccagagcgagcgcagaaatcccgctcgatcggcgcccaaattggagccagaaaaaaaaaagcaaagaggggaacgctcgcacgtcacgtaccctggggtccttccgggatcaggaggatgaggaggaagacgaggagaggaagctccccaccctggctcaggctgcctttggcctgggctgtggggattcggaggaggcgactcgaggaagctttaaaccgaggagaaagagagcgagagatggagagaggctacgggaacgggagagaagaaaccttcggtccaaaggcaaatgtggagtacgactacgagtgtatgactgactcggttcggctgcttgctgtcacgcggacgcggcgcacgacacgttag

SEQ ID NO: 9921 - DNA, 122 bp, Oryza sativa
  Clone ID: PAT_MRT4530_16292C.1
atgtcttcaggcttcagcaacaggttatgtgacacgtcactgccgcgcccttacaccgacagtttcctcaccgtcggcgcctacgagcttgtaacggggcgtgtccaatcgtcgtcggcgcg

SEQ ID NO: 9922 - DNA, 3265 bp, Oryza sativa
  Clone ID: PAT_MRT4530_16293C.1
tccccaccttaaagaccggaagaacggcaactccccaaccctcttgtttcttcgagagcgaggtgaagatttgtttcttggtttgtgttcttggagtggaggaggaggaggagttggatatggggcgcggcaagatcgagatcaagaggatcgagaactcgacgaaccggcaggtgacgttctcgaagcgccgctccgggatactcaagaaggcccgcgagatcggcgtgctctgcgaccgcgaggtcggggtcgtcatcttctccagcgccggcaagctctccgactactgcacgcccaagaccacgctgtcaaggatcttggagaagtaccagaccaactccgggaagatactctgggatgagaagcacaagagcctcagcgcagagatcgatcgtgtcaagaaggagaacgacaacatgcagatcgagctcaggcatatgaaaggggaggatctgaactccctgcagcccaaggagctgatcgcgatcgaggaggcgctcaacaacggccaggccaatctgcgggacaagatgatggaccactggaggatgcataaaaggaatgagaagatgctggaggacgagcacaagatgttggcttttagggtgcaccagcaggaggtcgagctgagcggcggcataagggagctggagctcggctaccaccacgacgacagggacttcgcggcctcgatgccgttcaccttcagggtgcagcccagccaccccaacctccagcaggagaagtaggctgctgagcactgccaatttggctgaacctcctgcttgctagctttgcatttcctcatgcgctgctagatgtatctgtggtttctctcatgcctgtctgaatgaactcacactgatgagagggtgtcagttgttttgtgctcctcccagcattagcactcagaattcagaaatgactcaatgtcagttgcttttgtgcttctcccagcattagcactcagaattcagaaatgactcaatgtcagttgcttttgtgcttctccctgcttgtttaattagccactgttcttgtttcctcgtggggaacagtcagtttgtattatctagttatcttggcaaggatcagtaaaattcacaagtagcagccaactctgataataattccatctgtttcatcgcttggaatgaattgtatgggaaaaaaaaatcaatgcaaatcaagagataacgaaacatatgattctggagttcaattgaccagaatttgcaagagcactacatccatatcggctattgttcttatctagtaggctgtatgattcttgaattcgccaagaaaaagatcacctcctcctacatcacctgagcatgtcgccattgtcaatgaacgggccactgaacgccggcgaggcgctgaagttgctcccggcctcgctgaacatggcgctgtgcccgtacggcagcggccggtccggcagctccgggatgtccatgtccccctccagcatcttcaccgcctcggtgatggtcggccggagcgccaccatgacgtgcgcgcacaggatcccgacgagcacgaacctctccatggcgccgccccgggggctgtccgcagtcgacagcgcgccgtcgagcacctccctcgcctgcccggccttgacgtgcgcccacgcccagtcggtgatcagcacggggcccgacggcgccgacatgtccaggacgcgccgcgcgctcagcacctcgagcaccagcacgccgaagctgtacacgtcgctcttctccgtcagctgcccgtacagcgcgtactccggcgccaggtagccgtgcgtgccggcgacgcgcgtcgtgaggtgggactgcccctcccggctccgcctcgccagcccgaagtccgccacccgcgcgcgcatgtcgccgtcgagcaggatgttggtcgccttgatgtccctgtggtagatcgccggcttcacgccgtagtgcaggtactccagccccttcgccacgtccatgattatgctccgccgctgcgcccatgtcagcgccggccgcttgccgtcccggaagatgaagtcctcgagcgcgccgttgggcatgaagtcgtagacgaggaacttctgcttcccttcctcggcgtcgtcgtcgacgatgcagcagccgcggagcggcaccaggttgcggtggcggaggtggctgatgatctccacctcgttggtgaactcctcgtcgccgccctccacgtccgggtcgagcatcttcttcaccgcgaccacggacccgtccgcgagcacgccgcagtagacggcgccgaacccgccgcggccgacgaggttgcggtcggcgaaggcgtccgtcgccttggagagctcggcaatgtcgtacaggatggagcccgtgttcggccgcggatgcgaccgccgcttcgccgatccctccttggagatctcgtggatcttcttcttcttcttcttcttgtcatgcctcctccagaccaagaacgcgaggagcgaggcgagcaggaggaatgcgacggggatggcggtggcgtagatgaccgtgtcgtgggatttgggcggcgcggcgggagggttggagagggcgaggccgagggtgcaggcggcggtaggtgggttggtggggccggcgacgttggagatgccggcggcgtacgtgacggtgaggtagaagcagttgcgcgtcgtcgcggcgccgtcggtggtggcgttggcggagatgttggcggcggctttgaggcgggaggtggcggcgatgcccgcgtcgaggcagcggaggcagtgcggcgtcgaggagaggtcgccgcacgcggagtccagcgcggccacggagtcgttcccgacgaccgccctgtactccgcggcggtggtgacgccggcgcagaaggacggcgaggagacgaactgctccggcgaagggaagcaggtctgcacgagggacgctcccgggagggagagcggcgccgccgacagcttcgccccgtagtccttgaggcaggccgcggactcccccaccgacgggatgcggaagtggcccgtggcgcggacctgctccgcgaggccgatggcgagcacggacagcagcgtattgcagcacctcgtcatgttccccgccccgccggcgcacaggtcggcgtcccacgggaacgtcgtcacgtagctcagatcgagcgggcacgtcgcgttcccacccccgcccgccccatccaccccctccatcgagcgggcgagcagcagcagcagcgccatggcgaccgccctgagcagcgccaggctcggcat

SEQ ID NO: 9923 - DNA, 306 bp, Oryza sativa
  Clone ID: PAT_MRT4530_16294C.1
atggatgacggtggcacccgcggtggctggggcggacaaggacgccaactgaggcggaagagggcgacgacggtggcggacgcagcggatgagggtgcatcggagacaagtgcagaggatgaggtcggcggtccaggggccacaatggactatgcggcggcggcgaacgcagttgatggcgacagcgaggcgtcggaagccatggcggcggtagcggtcacgatggcgatggtagccatagcggacgaggacggggacagcggcaatccggtgcgcctcaggcggagcgtgcagccgggcgactaa

SEQ ID NO: 9924 - DNA, 1390 bp, Oryza sativa
  Clone ID: PAT_MRT4530_16295C.1
tttggggttttgatttttttgtgttttttatgggccaatatacatcttggtttatgcttggcatgataagagggttgaattgaatacagtactgaggccccgacaagggaacgatacaatgcagtcttccatatgtaccataccttgatgcatcctggggaatttgaaccctcctcacccacaggatggggctatgtatttacaagggtgggtaaactaactcccccattattatcctaacttcctgaccaagacatttgtccgttcagttctccatataattgggtccttcacttcaccctctcgttctgatgatggttatggtgccctttcctgccgtcctgatccttgtgaggctaacaactgctttgccggacaggcctagtccatgagcgtacacagcagggctgcacgcgaactggccgactgggtgccggaccggcctggctggccgcttcaggatcctctggttgacgtcgttcagcgtcgccgcgccgccgccttctaaccccagcggcttgacaactgcaaacgggtacagcacgcccgtgtccctcttctccttccctgtcagcgacgaggagcgacgaggcgacgacgcggaggcggcacgagaggacggcgatggctgctgctgctgtttgcccacgatgacgtgctcctcgcaggagtaattgccgcggcgccctggccgccctgccgctgccgctgcgtggcccgcgcctgctgcactagttgccttttgcagctgcagttgctgcgcagcgccttgcccggtggtggtgcgagaggtggcgggcgaggagttgtggttgtggaggatgggatcagctgcctctcctcctcctcctccctgcgccgctggcacctgcactgctgatgttgctgctgctgctgctgcgctgatcgggcccctctgctcctgctcccaacccgatgcgtcgtcctcatctcctgagacaaaactgccgctctccgggatcatgatattcaattcatgcatgagacccccctcgccgccgctgctgctggaatcccagaagctctgaagaaggcagtgcaggtcctcgttcgccgccgccgccgctggccgtcgaggcggcgccgccgcctccgccatcctctgccgcttattgcaacggtcgctccagtgcgcgacggcgtcttgcaggtagccactggacgcctccgacgacgacgactccggcgactccaaacgcatggccggaagaaaggcgccatgaatgccatcttgggcggcgtctcctcctcctcctccaagtgtgtgcagctgtagctgatcccaatcccaatccagctgaggaggaggaggaggaggcagcacgaagtggtcgtcgacgtagtaggagtggtagttgtctagggccat

SEQ ID NO: 9925 - DNA, 5136 bp, Oryza sativa
  Clone ID: PAT_MRT4530_16296C.1
atggctgaaaaaccaccacagtcaccatcatcggcaggaaagcctgtggtccctcctcaaacaaggattccaaaacctactaggtccgtacttaatgaaggaaacattgttccagtcaccatagacaagttatcaccagaacaaaagaacgagtttgagctaatgatgaagaacgctcaggagcagttcatgaggtcgttcgcagcaacccgacagggaaaagttgttcaaaaacacaaagtaaaggtcgttgctactgatgaggtcggaacaagctcatctcaaggtggtaaaggtgctgaagatgcttcaggcgataaaggtgacggccttcaggatggtgcaattgaagatcttggtgaagatggcactgaagtacaggaagaacctcctaggcgcatgaatttccaagaccaagttgattacgccgtacaacatgccttgattaaccagtccggagtgcctgtcaatacattaaccaatataattaagtctgtgattgatggtacaatagctgaacaccagaccacagggccagtctttttgccagggggtgttttcccaaactacaggagcttggcgacaagtaatcaacacagtactcccaatgcaccacaagttcagccgatggcagcagcttcgactccaacaccagctgcaccatcatcggcacaaaggcagacagttaataatcctcgtctcttgtcccgagagcaaacgcaacatcctggtcagaatatcaatcggctgtcccaggagcaaattgcttcattgtttttgccaactcagccgactggtggaccagttcagcagacgccgccaaggcagctgagaatccaaccgatttggcaacagacggtgcaacagatgccgactggatttaggacacccgatagtcggcaaacatcaaaatgtgactcaaatcagtcggttgcagcccaagttatccctgagcacttggtgcgtaatattcagccgaatttccagaactatcaagggggtaatttgaattatcaataccagcctccttcgcctcatgtccagtatcagcaaggaggatcacctcagtctcagtatgctcctcagttcaatcagtttgaatcaatacagcagcaagtgcaaggggcacctcagcagagacaatgggctgatatgattgcagatgtgatgagggagcagtttgcacttaagccaaaagatactggaaatttgtatcggcatccttacactgtgtggtttgagagagttccattgcctaaccgatacaaggttccaaatttttcaaaattctcaagacaagacattgcctcgacctatgagcatgtcagccgactcttggcatcggttgttgatgctttaaaagttcgcttgtttcctttgtctttgtctggttcagcatttacatggttttcttcattgccttacaattctgttcaaggttgggttgatttggagaaacaatttcatagctacttctataacggaactcatgagatgaaactctccgatttgacagcgggcttgatagctccgatcaaggagaagtttttgtctcaggaatttgaaagtttgtctcatcatgcacagaaggtgaccttgcatgaacaaaggttcgcggaggctaagaagaatttcaaaaagatcaatcacgtgtgtccttatatatgtgattccgatgaggaggatgattccgaagtagcagcagctgagtgggtaagaagcaatgttataccgtgccaatgggtgaagaattctggaaaagaagaaaggtatgactttgatattactaaagccgatagaatttttgattttttacttcgggagaaacagatacagcttcctgccagtcacataataccatcggctgaggagctgggaaaaaggaagtattgcaaatggcacaattctggttcccattccaccaatgattgcaaggtctttaggcagcagatccaagcggctattgagggaggaaagatcaaatttgatgactccaagaagccgatgaaagttgatggtaatccttttcccgtcaacatggtacatacagcaggaagatcagccaatggagggaaaactcaaggctctcagttgaattcgaccaagattatcaataaatatcaaaggaggcatgataagcagcaggagaggtactacgagcaagaaggtgatggtttcgatcctcattggggttgtgagtttttcaggttttactggaatgaggggatgagactgccatcgatcgaagattgccctggatgtagtaatgacacaggaagttcaagccggtcatacaacagaggtaatcggctgagtcggaagagggttcccgttcatcaaaggttgggcccggtcaatcgagaatactatcaaagtgaggatgaagatagagcaacacaatggtgcccttctggtatttttatgaagaatcagaaaaggagggttcaacgaatggggaacagggagcgtttccaggaagtggagcaagaaatcaaccatcggctgaagaaagcgaagcctaagcaagaatggcgcgttaagagcaaggttgcaatggccgatgaagttgaagccgacaaagcaaaaaggttggccaaaggacaaagtgttgtaactgcatcggtaaacatggtgtttctgttacctacggaatacgaagccaaacaagccaatgttgatgaagttgaggaagcctctactagattggttttgtcgccagaacaggaagtttttgagaagccagaagggacggagaatcggcatctcaagcctttgtatattaatggttatgtcaatggaaagccgatgtccaagataatggttgagggtggggctgctgtgaatttgatgccagatgctacattcagaaagttgggcagaaattcagatgatctcatcaaaacaaacatggttctcaaagactttggtggcaatccatcggagaccaaaggagttctgaacgtagaactaacagttggcagcatgattgttcctgcaatcttttttgtcatcgatgggaaaggttcttacagcctgttgcttggaagggattggattcatgctaattgttgtattccttcaaccatgcatcagtgcttgattcaatggcaagatgacaagattgagatcgtaccagccgacagccaattgaagatggagaccccaaattattattttgagtgcgtcgtggagggttcaaacgtctacaccaaggacacggtagatgatctcgatgacaagcaaggacaagttttcatgtcggctgatgatttggaagaagttgatattggtccaggggataggccaaggccaacatttatcaggcacaagattatcagttttatggatggtaatgaaggttataatcaaattttcatggcagaggaagacattcacaagaccgctttcaggtgtctcggtgcaatcggcttgttcgagtgggttgtgatgactttcggcttgaagagcgctggagcaacatatcagagggccatgaactacatattccacgatctgatcagctggttggttgaagtttatattgatgatgtggtcattaagtcaaatgaaatagaaaatcacatagctgatttgaggaagatttttgagagaactagaaaatatagcttgaagatgaacccaacaaagtgtgcttttggcgtgtcagctagccaatttttgggattttttgttcatgagagggggattgaggtaactcaaaggagtattaatgcaattaaaaagattaaacttccggaggacaaaaagaagttacaggagttgatcggcaagattagaaccttttacacctttgttgagattgaaagccgatcaagagttcactggggggcagagcaacagaaggctttggacaatattaaagaatatcttagttcacctccagttttaatccctccacagaaggggatacctttcagattatatctatcagctagtgagaagtcaatcggctcggtttttattcaggagcttgaagggaaagagagggctattttttatttaagccgcaggctcttggatgcagaaacaaggcattctcctatggagaagttgtgtttgtgtttgtatttctcttgcacaaagttaaggcattatctattgtccaatgaatgcactgtgatatgtaaagccgatgtggttaagtacatgctgtcggctccaattttgaaaggaagggttggaaagtggatatttgctttaatggaatttgatcttcggtatgagtcaccgaaggcgattaagggacaagctatagccgattttattgtggatcatcgtgatgactcaatcggctcagtcgaaattgtggcttggactttatttttcgatggatcagtgtgcactcatgattgtggtatcggcttagttataatttctcctcgggggccaagtttcgagtttgcctatactattaagccttatgcaactaacaatcaagctgaatatgaagcagttctcaaaggcttgcagttgctcaaggaagttgaagccgatgcaattgaaattatgggtgatttattgatggtgatcagtcagttggcaggagaatatgagtgcaaaaatgatacattgataatctataatgagaagtgccgagaattgatgaatagttttcggttgtgggtggaggcaattcctttgaagaaagttgattctggagatgccatacaattcgttaaggaacatattatctaccgatttgggattcctcagactattacaaccaatcaggggtctgtctttgtgtctgacgagtttgttcagtttgccgatagcatgggtatcaaattgttgaattcttcaccatattatgcacaagccaatggacaagccgaagcgtctaacaagagtttgattaaactgatcaataggaagattttagatttccctcgacaatggcatacaaggttggctgaagcattgtggtcctatcgaatggcttgtcatggatcaatccaagttcctccttacaagcttgtttatggacatgaggcagttttaccatgggaagttaaaatcggctcaaggagaacagactacagaatgggttcacagccgatgaatattataatctcatggccgatgaaagggaagacttggctcaatctagattga

SEQ ID NO: 9926 - DNA, 210 bp, Oryza sativa
  Clone ID: PAT_MRT4530_16297C.1
atggtgaaagaggtggagcaggcaaaccccttccaccagggggtggaggaggaccaccaggcacaccaggaggcattggaggagcagctggaggtggtggagctggaggccctcctagccctccaacaggaggtggaggaggaactcctccgattccttcaggtaaaggaggtgctggtggagcttgatgcccacctagccctccaatag

SEQ ID NO: 9927 - DNA, 465 bp, Oryza sativa
  unsure (1)..(465): unsure at all n locations
  Clone ID: PAT_MRT4530_16298C.1
actagaatcatgaactccataaatcatggattcatggcagattggtagccattcctggcatttgtcaatattacagtaaaaatatttccctattgttctgtatcagttcacactcaacatacatcncggatcacttaatcaccagggtaaaattcaggcaataactagtcgccaaaatggncatgttctaaaagtgttgattttaacaggnagtaataaacaagaatactttttatacccccgggggacttgttagttctcatggacgggattataaccagaaaccaagttctgaaagaaaacacncttcaggcagtaacgggattataccagcctctgnatgattaattttgatattttgctggccaacgttctgaaactctggaactgaaacttttggggtttcctgacaataatgtctgattggtcactggctttaatttgcctcaagccgctgtcagcaag

SEQ ID NO: 9928 - DNA, 2771 bp, Oryza sativa
  Clone ID: PAT_MRT4530_16299C.1
acaaaaatccattgaaccccacacgcccggctcccgatccgacaccaaaggagagagccgcctcgccttcgtcttcgtcttccccccgccgcgctcgtgccctcgcctcgcctcgcctcgccgaaaccctaaccctagaatcgtcgatcgcccgcgagagaggagggggagggggacgagggggaaccgcgcgtgatggggaagaagaagaagcgcgtggagaaggtgttctgctactactgcgaccgcgagttcgacgacgagaagatcctcgtgcagcaccagaaggccaagcacttcaagtgccacgtctgccacaagaagctctccaccgccggcggcatggccatccacgtcctccaggtccacaaggagtccgtcaccaaggttcccaatgcaaagcctgagagggaatcaacagagattgagatctttgggatgcaagggattcctccagatgtgttggccgcccactatggagaagaggaagacccttcatcgaaggtagccaaagtggaagtgccatcgctaaggcctcctgttatgcccaatccagcgggcatggtatatcctccacgaccggcctatggtgtagctccacctatgtataaccctgcactgaatccattgatggccagacctccaatctggcctgctccacctccgcaaccttggtttacacaaccagtagtttcggttcctcaaatggcttctgggcttgcaccacaacagccactatttccaattcaaaacatgcctgctcctatgacatcagcacctgcaaatttacttcagacttcgttccctatggcccatgttggagtaccttcacctgttacccctcaggtgtcacaacctctctttcctgtcagtacatctgctggaaacggtgcagtaagttctccatatgtagcatctgttgcacctggaagcatcccaacaagctctccatcagttgctcctgcaggagtaggatatgcagctactaaccaaggtacaggaggtccagcggctgtacctccacccgcttctaataataaagcaccagccacccaacctggtgcaaatgaagtctatctggtgtgggatgatgaagcaatgtcaatggaggaaagaagattgtcgctcatcaagtatcaggtgcatgctgaaactagccaggagttccaagtaggtatttacattgttctacctggtggagcaagagtgttaaggccagatgagctactactcgatcactactactaccaccactcgtcgtcgtctgatccatactacagcacaccgatccttccaccctacggcgacgcattctcaccgccgaaccctcctccccctcctcctccgatgtcaccaagcgacctcatctctccgatcattccggcaccaacattcacatacagttctcctccaccgccgccactctactaccctccaccgccggatataagcccaagcccgccaccgtctattccctgatagatacgcctagtctaccgaagacaacagtagctcctacagtcggtgcattcccctgttcctgttctccgtttatttaactagtttcctggaggaactgtgttcagtcaaaggaatatgttgcttctgatcttggaaagctttgaatgtatctttcccacccgagtgcaagatgttagtctagaacccctatttcccattgtcgcttaaagaaaatgtgatttgttggtcaactctggatatctcatcctgaattaccaaaatcacagtttactagaaacatgcaagcagataattcgttatttctgatggcacccgagcctgtactaataacaacttattgcgcacctagtccaccgatcgttacaccgatgccacccataatctacccaagcccaccggaagtcacacccagcccgccagaaatcacaccttatccaagcccaccggaagtcacaccaggcccgccagaaatcacaccttatccaagcccacccgaaatcacacctagcccgccagagatcacgccgtatccaagcccacctgaagttgtacctagcccaccaaagatcaccccatatccaagcccgccggaagtcacacctagcccacctgagatcaccccatatccaagcccacctgacatcgtccccagcccgccaagctatgagcctagcccacctagctatgaacctagcccaccggagtacgcgccagaaccaccggtgtacgcgccgtatccaccggggatcttcccgagtccaccggagtactcgccggagccgccggcatacgtgccaagcccaccgcagtacgcgccgcagccgccgtcatacgtgccaagcccaccggagtacgcgccggagccgccggtgtacgcgccgtatccaccggggatcacaccgagcccgccggagtacgcgccggagccaccgccgggcccgcccggcggtggtggcgggtacctgccgccggtggtgttcccgccgccgtacgcgtcgcgggggccgccggggaggcgcgcggtgtggtgcgtggcgaagccgtcggtgccggaggggataatccagccggcgatggactacgcgtgcggctccggcgccgactgcgactccatccagccgtcggggccgtgcttccggccggacaccatgatcgcccacgcctcctacgccttcaacagctactggcagcgcgccaagtccaacggcgccacctgcgactttggcggcaccgccatgctcatcaccaaggatccaagttatggtggctgccattacagtacgatgtga

SEQ ID NO: 9929 - DNA, 467 bp, Oryza sativa
  Clone ID: PAT_MRT4530_1629C.1
taaagaacagcagcttcaccacaatgggtgctgagaagttgcctgatcagatgcatgatctgaagataagggatgacaatgaagttcaagtgactaatattaacggcaagggagcagaaaccggccacataattgtcacaactactggtggcagaaatggtcagccgaaactggtgatttcttgacaaaatgtaaaagtgcttgggaagacatgttgaatactgagcatgcagtgaccttctgaaagataaaacatgtttacacgcttgaatagcgaaccatttgcatcttgcagctgcgctgaactggtttgaagatgtttgcagacagaattgtggtttgtaatgagctctttccacttgtagtcctttatggtggagaagaatgccaatcatagcatccactaaatgacccatttgaaagtgtttgtcctttttgttgatgaaaattatagcccaattcacttt

SEQ ID NO: 9930 - DNA, 1163 bp, Oryza sativa
  unsure (1)..(1163): unsure at all n locations
  Clone ID: PAT_MRT4530_162C.1
gcggacgcgtgggcggacgcgtgggcggacgatggtgcttggctccccggaagtcgggatggaggattcgtcggcgactcacctctccgacgaggtgcaggatccaggtcgaggaagctcagatgcttctgttcgtacttctttgcgagattcgacaggaaaggaggctgttgcggccgttgaaccggtgagggaggagctggttcagagcgcggtcggttttctgaaacacccaaaggtagtggcctcttctgatgtccagaggcgttctttccttgagaagaaagggctcaccgtggatgaaatcgatgaggcatttcgacgtttacttagcccatcttcaaactccatgagtccaaattattgcacatatcaaggggtatctgatcattcttcaaaaatcacacaggagaatccttcaacagttacaaaatgtatggatgatgattcagggagacctgagcctgaaactgaatctgtggatcctgtggtgcctcgccacccaaaatcatatatggagatcatggaaatgatacaaaggggagagcggccagatgatatacaggacattaatgatgaccctccaaacccttatcaaccaatctcggaatcccgcatggcaccaaagcccaagccatgggaaaagcagggtcaagaaagttccatctgggagttgaaatctcagtcaatggacaccatcgaatcgagatcagaaattcaacttgacagcgccaaccaatttactgaaacggagaatagatcaaatcaaggggactcactattgctggaagaaacggttgcaggttctgaagctcacacagatgatgctgcctcgacaaagtcgtaaatgcaaaagcacgtgatgatggaattgaacatgctgggaaactatttcaacatatacttagccaaaaagctcgaatttctagtgcaacagttttctgaaattctctgaacctgctttctctgagctcactgatctgcgtacttccctattgttggaatcagatttagcaggcacaaaagacctcccaattttcgttagctggaacagttatacaatctgtataatgtaatcatgaaaaatatacaaacaacaacatgaaatgttgtgacttgtgaggctcatgtcaaaaaaaaaaaaaaaaaaaaaaaannaaaaa

SEQ ID NO: 9931 - DNA, 204 bp, Oryza sativa
  Clone ID: PAT_MRT4530_16300C.1
atggcgccagcgggtgcagaggctggacggacggcaacggcgcggtgggtgcagaggccggtgaggcgctgcggccggccgttggcgtcgtggccgggtgacggagaggaggaggccgcgcgtggatccggtggcggcggctgctcgggcgcgcggatccgggtattcccccacacggatcctgagtcggcggcggcagcgtag

SEQ ID NO: 9932 - DNA, 778 bp, Oryza sativa
  Clone ID: PAT_MRT4530_16301C.1
gcacgaggctcccgccaccagcgggtgcagaggccggacgggcggcgacggcgcggtgggtgcagaggccggtgaggcgctgcggccggccgttggcgtcgtggccgggtgacggagaggaggaagccgtgtggcggctccgtgcgatttggaggccgggacggcgtggtggggctggctgcggcctcggatggaggaggcggtggcggcagctgcggccgctcgcgcgcgcggatcctgcagcggcggctcaggcgcgtggatccggtggcggcggctgctcgggcgcgcggatccgggtattcccccacacggatcctgagtcggcggcggcagcgtagtctcacctccccacggtggcggcgtgccctctcactccctctccttcccgtccctttcccctctcttctctatcgccggcaactcccacaggccggatccggcgtaggcgtcggtggccgtcggtggcccggttgcggtgccttcccctccaccagatccggcggcgagaggggaggcggtggctgcccggtggcgggatgattatttagatgttcttgtgtgatgttttagtgaaaaatttctgtgatgtttttcaatgtttcctatgatgttttttggtttgggattgggattgattgatgcggggtggataaggtcgatgcatcagctcgattaggagaggggaatctgttgttcttgaggatttttattcaatgtgatttctttatctactaaaaaaaaaaaaaaaaaaaaaaaaaaaaaaaaaaaaaaaaga

SEQ ID NO: 9933 - DNA, 585 bp, Oryza sativa
  Clone ID: PAT_MRT4530_16302C.1
gccgaccggccgtgctaccgattcatcataagcctggagtccctggaccttgttgtaagctcgcgcgtgaccacggaagtatctagaagcggccattcatcgtcacgggcgagctcacaggtaacaaggtaggaggagaacaagctttcatcaacagattttgattcgctggagttcctctactaccacaacctggtgcggctggcgcggtgggagctgccgctggcgtggtcgccgcggctggagtcgtacgcgcggtggtgggcggcgcagcggcgcggcgactgcgcgctgcgccactcgttcccggaggggcagttcgcgctcggggagaacatcttctggggcggggccggcggcgcgtggcgccccggcgacgccgtcaaggactgggccgccgagggcgtcgactactcgtacgccgccaacgcgtgcgcggccgggcgcgagtgcggccactacacccagatcgtgtggcgcggcaccacctccgtcggctgcgcccgcgtcgcctgcgacgacggcggcgtcttcatgacctgcaactactacccgccgggtaacgtcgtcggcgagaggccgtac

SEQ ID NO: 9934 - DNA, 340 bp, Oryza sativa
  Clone ID: PAT_MRT4530_16303C.1
ttaattgggagcaatgagcactgacacgagaagctgcgatgtgaagatatgaatggcttcctgtctctcccagcctgacgaagtcttgtcatctgcagctgtagtagcctaatctgaatatttatctgatatttcttgtcgtcagaaacggcttagaattagttggtgattgacttttggtgtgtaggaaaagaagaaaaaaaaaacagaaaaggaacagatgctaaaggtgttgtggggtgtgtgtgtgtgtgtgtgagtgtgatcatggactgctcggtgtacatattattgtccggttagtgtggatctccctttctttctttctgctactgatgtt

SEQ ID NO: 9935 - DNA, 2163 bp, Oryza sativa
  Clone ID: PAT_MRT4530_16304C.1
atgcggcaagacttgcatggtagcggtgcacgggaagggccagcaggcacgcggcaagggaccgacaggcacgcgcacaaacgggagagaggaaaacgaggcgacggtagccggtggaggagcggtggcagcggtggccatccgacggcaaggcgtggacttggaattatcgctgccgccgatccgacggcgaggcgcggacttggaattgcagatcggaatcaggagtctgacgcagcagcacgtcttcgcacatggctgcaaagtggaattcgcaaggagaaaatctacactgatggtacagtaaaatggggtcttttgacctcaactggtgtgtctgaaaatttacaagatgctttgaaagataagaattggaaacttgcaatggatgctgagtatatggctttgattaaaaataatacatcgcatttagttcctcctcagaagggtagaaatgtcattgattgcaaatgggtttataagataaaaaggaaagaagatggtggagcagtggacaaaagaggaggagaaaatgaggaaggcggggcttccggtaccaatggaggaatggacacagagatcaaggaactaggcaaagtatcgtttgaagatccggagttggtggtggtggccgatacaatagagaatttatccagtgcacagaaaaaaggagcttttaagcctaagagggagaaagatgtgttaagtacggcgcttagtactcctgagcataggggtagggttcgaggtgtgtcgtccaagatgagttggaaggaagggttcaaacatgacccctacaagacgcgtgaaacattcaaggataaacttagagacgaaggggctgcagattttgaaaggcaaatgatggatttctgcgtcaagcacatgcttttgcctccccccgaaaccaaagaacctgagcctgattacccctttgatgacctcaaggagaatacaccctgcagattgcacgttcccattggacacgccgggaaaactcttgaggccgctatagccattgctatcactgggagaacatataatgaagagttcataggcaatgcgtatgccaaagtgcagccgcaagtggtccacgaaggaatgacatatccctttgaattgggcaccgacgccacgcgaaaatctgtagtgccaaaaccggggttgggaaaacctccgagacaacctaagaggaaggtgactgataaggcggaggaacccgagatgcataaggacaatccagtgccggaagtgccaccggagattgcagtgccgaaggtgcccatggagattgtagtgccagatgtccacatggagattacagtggcagaaccagaggtgcaatttgtggcatcagtcgggacagatatagaagaagtaccaggattggaatgggacggtacagagccagaaatatttgaagacccttctcctgcgaaataccccgaggtgcaagacaccccggtcactgagaaggccactaccaattctgaggtgcctagagtgcttaggagccaccattccaagtccaaagatgagaacaaggagaagttcatggtaaccgtcttcagagggggtaaggaacgtgccaaactcagagatgatgacccccagaaggccgctgcactagccgggccaacatgcttgccaactaatgattgcccggaaaagtacgaacatgggaaagcactcttgccggagtgggcactaaacgaaggaccatgggagatgagaaggttaaataccttctacatggaagcgagcaagaaaggcttgggcaatataacagctcgatcaccggcagattgtttcggtgccgaaggttacgtatggctagatatctcagatctcaacaccatatatcatcggcataagatgggcgtcaactatgtcggtgtttggtgcatgatgcaatacatggatgctaagaagaaaaaagaacctatcggcttcttggatccaactcggatctgtcaaacacagcataccgtgaggctagcaccagggtcaaaccagctgaagggcaagactccaaaagagatagctaaatacaagaagggcttgcacaaggagaaattgattattgtcgcacagtacattggacgagccttcttgcactttcaaaataagagagtcgtcatggccgcttataattttgagtaa

SEQ ID NO: 9936 - DNA, 867 bp, Oryza sativa
  Clone ID: PAT_MRT4530_16305C.1
atgtcagggtggcacgtcatcacctctcttttcccctcttctctcccttcctactctctcagtcttctctgggtaggcaggccggcagggcggggcgaggcggggcgcgtcgaggccgtccggccacacgcccacacccgaagacgcacacgtgcgaggccgggcggagaaggggcggcggggggcaccacagccgcagcgtcagcctctgcctccacattcgccgccgctcccgacgacgcacaagcgcgaggccgggcggagaaggagcggcgggggggcaccacagccgcagcgtcagcctccgcctccacctacgccgctactcccgacgacgacgcagccagcgtcgtcaccgtcgttgtatctccaaagctcgcactgctgctagtgcccgtgtcggcgtcctacctccgccgcggcgcgccgctgttcctcacgccgcgacgcgtgctgctggcgggcgtggggctcggcgtcttcaccggcgcagatgacttctatatgctgcaaggaccgaccctgccgctcgtcgagctcgcctacaagcacgccgccgccggcggccgcgccgtcacgtatgcgctggtgatggagatgcagctggtcatgggcttcttcgccaccgcgttctgcaccatcggcatggtcatcggctcgccggcctccgcccctgctcgccgcctcgaccgccctgagcctgcgcgctgccacctggatgaagctaagaccctgggagccgccgtcgccggccgcaccaccctccagccgcgcgcgccgccgtgggcaccagccctgtcaccagcatccccacgcccgtgcgagagcgaggaaggagagaagagaaagacaggagagagagactga

SEQ ID NO: 9937 - DNA, 2481 bp, Oryza sativa
  Clone ID: PAT_MRT4530_16306C.1
gagcagtcccttgctgttatggttgctccggaaccaacggtcccaccggatggtagttccgacagcgacgtaggtgacgaagacgaggagtactcgttgccaagcgatccttgtcaaagcccaagcccgaaaaaaaggaaaaagggcgacggtgaagaaggcgacaaggactacattccccctaaagaagggtgtggcataatagtaagggagaagatctccatcacggtcaaggactgggatcatgtaacggatggggataaggaagtcctatggaaagagttgaagaaaatcttccagttcccggaaggatcagaggcagcggtgagaaattgtgcactgcaaacaatggccaagtcttggcatggttggaaaaccaccttgaacaagaaatttgtgaagacgggacgcacaccgttttcgacgtatgccaacataacccccaatcagtgggacgactttctgaccttgaagaactccccggaagaaattaaaaggagccaaaagtactcagagttggccaagaagaacaaatttcctcatcgcttaggctccgcgggctacgcaccaaaggtggaacagtggacaaaagaggaggaggaaatgaggaagaaggggcaaccggtaccaatggaggagtggacacagagatcaaggaactgggtaagaggtagaactccgaagatcacggatgagggaaaagtatcgtttgaaaatccggagctgcagagcgtttccgataaaatagaaaatttatccagttcacaaaagaaaggatattttaagcctaaaagggagaaagatgtgctaagtacggcgctgggtactcctgagcatgggggaagggttcgaggtgtgtcgagcaagataagttggaaggaagggttcaaaaatgacccccacaagaaacgtgaagcgtacaaggataaacttagagacgaaggggctgcggagtttgaaaggaaaatgatggatttctgcatcaagcacatgattttgcctcgccccgaaaccaaagaaactgagccagattaccccttcgataacctcaaggagaatacaccctgcagattgcacgttcccattggacgctccggtaaaactcttgaggccgctacagccattgctatccctgatggtatatctgtacttggggatgcgatcgatcttgtaattctctggcacaagaatgacatattctttggattgggcaccgatgccggggaaaaacctgtgttgcctaaaccgggtttgggaaaacctccgaggcctcctaagaggatggtgactgataaggcggatgatccagaactggataaggaaaatccagtgccggaagtgccaccagagattgcattgccggagacagccaaggagattgcaccgccaaagacagccaatggagattgcaccgccggagacagccatggagattcaagtgccggatgtgcccatagagattacagtggcagaaccagaggtggaatttgtggcaccagtcggagatatttgaagacccttctcctgcgaaagaacccgagagggggtaaggaacgtgccaagctcagagatgacgacccccagaaggcttctgtgctagccgggccaacatacttcgcaaccgatgattgcccggaaaagtacgaacatgggaaagcactcttgccggaatgggcactgaaagaagcaccatgggagatgagaaggttacataacttctacatggaggccagcaagaaaggcttaggcaatataacagctcgatcaccgccagattgtttcggcgaagaaggttacgtatggctagatttctcagatctccacgccatatatcgtcaggataagatggacgtcaactatgtcagtgtttggtgcatgactaacgcggaggatatctttgcatcaacaactataccgatggctgggctcgaatcagatgcacctgaaaccaactaccaccgccggtccccgtcgtcgtcgttggcagtggcccccgtttgcccgccgccgcctccccaccgtccacccgccgtgcgcacgccgctcccggtcaccctctgccgcgagcttgctgtcgtgcgcacaccgctcctggtcggcgagccacgccgctcccacccaccgccactcccgccactcgccgtcgagcctgccgctgagagccgcccagaggaggaggagaaggaagcacgcgccactcccggtccgcccaccgccatcgcgagcccgccgccgagagccgcccggaggaggagaaggaggcacacggcgccacggcacaggagaaggagaagattggccggccacagccaggccaaggcatggcgcataatggaccgggtggccagcgccggcttgactgaaagtggcggttcacgtgaccagatggccgctggcagcaaccatctggcatgccggcaaaggggcttccggtggcggttcacgaaggcggaggggaggacaggctccaccatgacatag

SEQ ID NO: 9938 - DNA, 3054 bp, Oryza sativa
  Clone ID: PAT_MRT4530_16307C.1
atggaaagtcgggaatggatgtatcattggctgaggtttttgtctccatatagaaacgaagtggctaaatttattggtattgccaaggttcacgctgagaagaacaatatgaggaagataatttgtccgtgtgctgactgtaagaatgaaatagtctgggactttgacgatgcttttaaagtgaaggagcacttggtaactcgcggatttatggacaagtacgaaatatggacacgtcatggcgaagaacaagtggacgagcctgaaaatgtagttccgacacaagttgaagacatggtgcatgacgatggttatgttgaggacaaaatcgacctagaggaaatgttacgtcatgcagaacccgaagtgctgatggggtcggccagagggctaaataactttgaagctttacagaaggcagcaaaggaagttttgtacgatgagtcgaagggctgtgacagtgatttcacaacactccggtcagttcttgaacttatgaggttaaaggcgagacatggatggtctgataccagtttcgacagtcttttaaaactcctgcagaaaatgctaccgaggcctaactcactaccatccagcacatatcaagcaaagaaactcatatgcccctttcacttggtgtggaaaagattcatgcatcgcattacacggatatactcaaacccgcgagatgcggaactaatgcgctggcatgaagaagggcgcaagaaggatgggatgattcgacacccggcagatgctcgtcaatggataaactttaatgcgcagtatagagagtttgctaaagacccacggaacattagatttgccctgagtactgatggagttaatccttttggagacatgagcagttcacatagtacttggccagtgcttctcaccatgtataatcttcctacctggctttgtcaaaagcgaaaatacgtactactctgtatcctcatacaaggaccccgtcagcctggtattgatatagacgtatttcttgaaccattgttggaagatatggccgatttatggaaagagggattgaaagtgtgggacgagtacttaagggaatacttcacagtgaaggcaatcatcttcgtgaccattaacgattatctagcaatgttttcagtttcaggtcaaattaaaggtaaaacaggatgtgtgatctgcttgaatggaacgtactataggtatctcccgggttccaacaagcttgtgtacatgcggcaccggcggttcctacgcacaaatcacaagtaccgtaagatgaaggcggagttcgatggaactgaagagactgatcctgcaccaaaacctacatcgggagaaaatgtgtgtgcaatgacagagaaaattgtttgcgagtttggaaaaatgactaagaaaccatcaaaggggacaaagcgcaagaaacccgagaagaatacgaagggaggggatagtaagaagcaagatgacagttcgaagccagatgataaactccttcccccattcaagaagcattccatattttttaagtacctcccgtactggaaagatctggaggttcggcatgccataaacgtcatgcatctagagaagaatgtgtttgacaacatagttggaacattgttagacatgccgaagaagactaaagatggtctgcaatcaaggatggacctaatcgagatgggaatcagggaagagttacaccctcaagaaggagaaaagaatggcaaagtatatcttccaccagcctgtttcacactgacacctgaggagaagaagtcattttgcaactcactccgtaatgtcagagtgcccataggtttctcatcaaacatcagtcgactagtttcaatgaaagatttgtcggtatctggttataattcacacgactgccatgtcttgctcaccgtgtttcttgcaatggcaataagagccataaaaccggagcatttaaaggttgctatcacaaggttgtgctactttttcaacgtagtgtcacagaaggtcattagtctcgaagagttaggaaatctccgtacattcgcacatgagacccagtgccaacttgaaatgtgtttccctccatcattttttgatatgatggagcacctcattgttcacattgtgccgcagatggttgcgtttggcccattgtacctccatcaaatgtggtcatacgagcgttacatggcggttctgaagggttacgtccgaaatcgtgcacatccagagggatcaatggttgagggttatagtactgaagaggttgtcgagtgctgtatcgattatctcaaggatggatatgcaattggatttgctatcgtcgagccgtacatcgatcaacatatcgaactaatacgagctaacaataagggtcgctccaccgagtggataatgaaagaacacaagcgtctcttcatagattggttgcgagacctagacttacctgagggagaaactaccgatgaaataactatgaagcggttggcttgtggtccatcaactacagtaaattcttggcagggatatgacattaatggatattcatttagcacaagagcccgagataataagacctgtacgcaaaacagcggtgtccgtgtggaggcaattgatgatgccggtgaaaaacaatcatacttcgggtttattgaagaaatatgggaaattgactatgggcacacaatgcaattccccatatttaagtgccagtgggtaaaatacccgaatggggtaaatgttgataagttcggtcttactgttgttgaccatgcgagagtgggtcacaaggatgatccttgggtactcgccaatcgcgtggcacaagtgttttatgtgaaagacccttcaaatttgaagaaagatatagtgctaccagggaaacaaaagatattgggagtggatggggttgaagatgtcgaagattacaaccaatacgatagtatgccactttatagtcagtttgtacagaagattaagaatgtcgagacatctactcagaagaccgtgaagccttacatgcgcacggacggtgtgggcaaaaatgttaaagggtaa

SEQ ID NO: 9939 - DNA, 337 bp, Oryza sativa
  Clone ID: PAT_MRT4530_16308C.1
gttgggggggggggggggggccccggaatttggggggggtcattggagggcgcaacaattttctttttagagggtttaataaaagtttggggaaaaaatggaataactttttcttggggggaaattgtttgccgttacaatttccacaaaaaaaagaatccgaatgtttatggggaaatggggggggggccaattgggggggctagtaaattttttttgggaggggtatattgggtttttttgaagcaaaaaaccgggggggcctctttttttattaaaccgcccacccccttgggagggggggttcgtgttttagccccaatggtgtttttttttt

SEQ ID NO: 9940 - DNA, 3076 bp, Oryza sativa
  Clone ID: PAT_MRT4530_16309C.1
agatatagaaagtcgggaatggatgtatcattggccgaggtttttatctccatatagaaacgaagtggctaaatttattggtattgccaaggttcacgctgagaagaacaatatgaggaagataatttgtccgtgtgctgactgtaagaatgaaatagcctgggactttgacgatgcttttaaagtgaaggagcacttagtaactcgcggatttatggacaagtacgaaatatggacacgtcatggcgaagaacatgtggacgagcctgaaaatgtagttccgaaacaagttgaagacatggtgcatgacgatggttctgttgaggacaaaatcgacctagaggaaatgttacgtcatgcagaacccgaggtgctgatgggatcggctagagggttaaataactttgaagctttacaaaaggcagcaaaggaagttttgtacaatgagtcgaagggctctgacagtgagttcacaacactccggtcagttcttgaacttatgaggttaaaggtgaggcatggatggtctgataccagtttcgacagtctattagaacttttgcagaaaatgctcccgagacctaactcactaccatccagcacatatcaagcaaagaaactcatatgccccctttcacttggtgtggaaaagattcatgcgtgcgtaaatcactgcatactgtacaggaaagagtacacttctttagatgaatgtccaacatgcggtgcaagccggtacaagtcgaatagcaatactggcctaaaaccctctgaagcaactgagggacgacagagaaaaatcccgcagcttgtgatgtggtatcttcctgtcaaagaccgcattaaacggttatactcaaacccgcgagatgcggaactaatgcgctggcatgaagaagggcgcaagaaggatgggatgattcgacactcggcagatgctcagatggctgatttatggaaagagggattgaaagtgtgggacgagtacttaagggaatacttcacagtgaaggccatcatcttcgtgaccatcatcttcacagtttcaggtcaaattaaagtctcatttggatatgaaagtaaaaatgatgagagtctcatttacattgagaacatggagatcatgaaggccggtctgaccggtcctgttagccggtctgactggcgtgataaggccggtctgaccggccccactgagccgccagagtcgcaaccggtcagaccgagccgatggcggtctgaccgagcggtggacggtctgaccggctactacactgcgttcctacgcacaaatcacaagtaccgcaagatgaaggcggagttcgatggtactaaagagactgatcctgcaccaaaacctacatcgggagaaaaggtgtgtgcaatgacagagaaaattgtttgcgagtttggaaaaatgacaaagaaaccatcaaaggggacaaagcgcaagaaacccgagaagaatacgaaacaaggggatagtaagaagcaagatgatagttcaaagccagatgataaactccctcccccattcaagaagcattccatattttttaagtacctcccgtactggaaagatctggaggttcggcatgccatagacgtcatgcatctagagaagaatgtgtttgacaacatagttgtaacattgttggacatgccaaagaagactaaagatggtctgcaatcaagaatggacctagtcgagatgggaatcagggaagagttacaccctcaagaaggagaaaagaatggcaaagtttatcttccactagcctatttcacactgacacctgaggagaagaagtcattttgcaactcactccgtgatgtcagagtgcccataggtttctcatcaaacatcagtcgactagtttcaatgaaagatttgtcggtatctggttataattcacacgactgccatgtcttgctcaccgtgtttcttgcaattgcaataagggccataaaaccggagcatttaaaggttgctatcacaaggttgtgctactttttcaacgcagtgtcacagaagatggttgcgcttggcccattgtacctccatcaaatgtggtcatatgagcgttacatggcagttctgaagggttacgtccgaaatcgtgcacatccagagggatcaatggttgagggttatagtactgaagaggttgtcgagtgctgtatcgattacctcaaagatggatatgcaattggagtacctatgccccgacatgagggcaggttgagtggtaggggaacaataggaaagaagagatttgtcacccatgatcacaaatcattccaagaagctcacttcagcgtgcttcatcagtttgctatcgttgagccgtacatcgatcaacatgtcgaactaatacgcgttaacaataagggtcgcaccaccgagtggataatgaaagaacacaagcgtctcttcatagattggttgcgagacctagacttacctgagggacaaactaccgatgaaataactatgaagcggttggcttttggtccatcaactacagtaaattcttggcagggatatgacattaatggatactcatttagcacaagagcccgagataataagacatgtacgcaaaacagcggtgtccgtgtggagacaattgatgaagccggggaaaaacaatcatacttcgggtttattgaagaaatatgggaaatcgactatgggcacacaatgcaattccccatatttaagtgccagtgggtaaaatacccgaacggagtcaatgttgataagttcggtcttactgttgttgacctggcgagtgtgggtcacaaggatgacccttgggtactcgccaatcgcgtggcacaagtgttttatgtgaaagacccttcaaatttgaagaaagatatagtgctaccagggaaacaaaagatattgggagtggatggggttgaagatgtcgaagattacaaccaatacgatagtatgccactttatagtcagtttgtacagaagattaagaatgtcgagacatctactcagaagaccgtgaagccttacatgcgcatggacggtgtgggcaaaaatgttaaagggtaa

SEQ ID NO: 9941 - DNA, 696 bp, Oryza sativa
  Clone ID: PAT_MRT4530_1630C.1
atggcgtgcattatttttgagtgtgccaatgcccacgaacctaagggttttatatgttgtccatgcaaaaagtgcaaaaaccagaagaagtattcttcatcaagaactcttcatatccaattgttgaagacggtattcatgcctagctataattgttggacctcgcacgaagagttaggagttccaatggaagaagatgaagaagaaggcgacaacattccggactgggctcaatacgatagatttgtagaaaatacaataggcgaggcggaaggagttattgaagaaaacgacggttcggatgatcttggtcagatgttgtatgatgtaaaaaaagattgcgaaagtgaaaaggaggtccggaaattggagcatacatgtcttatcaaagagcaattgatggggaaagcgcctatcaagaaagccatggaagaagatctaaaacactcatacgcaatcggcgcaccacttgtcaagccagagctggtcaaggaactaagtacacagatgtatagatgtatcgattccataaatggtacatggatcaatcaactcatggtagggttatgttcgctgaaagatttaaaaataaagacttctgtgggatgtacgatgtggatcaagttcaaggatgtgtacaatgtataccaacaagacgcccttgacgtctctcttgtcaattgctgggttctgtaa

SEQ ID NO: 9942 - DNA, 6149 bp, Oryza sativa
  Clone ID: PAT_MRT4530_16310C.1
atggagagtcgggaatggatgtatcattggccgaggtttttgtctccatatagaaacgaagtgtctaaatttattggaattgccaagtcacacgctgagaagaacaatatgaggaagataatttgtccatgcgctgactgtaagaatgaaatagcctgggacatcgacgatgcttttaaagtgaaggagcacttagtaactcgtggatttatggacgagtacgaaatatggacacgtcatggcgaagaacaagtggacgggcctgaaaatgtagttccgatacaagttgaagacatggtgcatgacaatggttctgttgaggacaaaatcgacctagaggaaatgttacgtcatgcagaacccgaagtgctgatggggtcggctagagggttaaataactttgaagctttacagaaggcagcaaaggaagttttgtacgatgagtcgaagggctatgacaatgagttcataatactatggtcagttcttgaacttatgaggttaaaggcgagacatggatggtctggtaccagtttcgacagtctgttagaacttatgcagaaaatgctcccgaggcctaactcactaccatccagcacatatcaagcaaataaactcatatgtcccctttcacttggtgtggaaaagatacatgcgcgcgtaaatcactgcatactgtacaagaaagagtacgctcctttagataaatgtccaacatacggtgctagccggtacaaatcgaatagcaatactggcctagaaccgtctgacacaactgagggacgagagagaaaaatcccgcagcttgtgatgtggtaccttcctgtcaaagaccgcattaaacgtatatactcaaacccgcgagatgcggaactaatacgctggcatgaagaagggcgcaagaaggatgggatgattcgacacccggcagatgcttgtcagtggataaactttgatgctcagtatagagagtttgctaaagacccacgaaacattagatttgccctgagtactgatggagttaatccttttggagacatgagtagctcacatagtacttggccagtgcttctcaccatgtataatcttcctacctagctttgtcaaaagtgaaaatacgtactactctatatcctcatacagggaccccgtcagcctggtattgatattgacgtatttcttgaaccattattggaagatatgactgatttatggaaagagggatcgaaagtgtgggacgagtacttaagggaatacttcacagtaaaggccatcatcttcgtgaccattaacgattatccaacaatgtttttagttttaggtcaaattaaaggtaaaacaggatgtgtgatctacttgaatggaacatactataggtatctcctgggttccaataagcttgtgtacatgcggcaccggcggttcctatgcacaaatcacaagtaccgcaagatgaaggcggagttcgatggcactgaagagactgatcctgcaccaaaacctacattgggagaaaaggtgtgtgcaatgacagagaaaattgtttgcgagtttgcaaaagtgactaagaaaccatcaaaggggacaaaacgcaagaaacccgagaagaatacgaaacaaggggatagtaagaagcaagatgatagttcgaagccagatgataaactccctcccccattcaagaagcattccatattttttaagtacctcttgtactggaaagatctggaggttcggcatgccatagacgtcatgcatctagagaagaatgtgtttgacaacatagttggaacattgttggacatgccgtagaagactaaagatggtctgcaatcaaggatggacctagtcgagatgggaatcagggaagagttaaacccttaagaaggagagaagaatggcaaagtatatcttccaccagcctgtttcacactgacacctgaggagaagaagtcattttgcaactcactctgtgatgtcagagtgcccataggtttctcatcaaacatcagttgactagtttccatgaaagatttgtcggaatctggttataattcacacgactgtcatgtcttgctcaccgtgtttcttgcaattgcaataagggccataaaactggagcatttaaaggttgttatcacaaggttgtgcttctttttcaacgcagtttcatagaacatcattagtctcgaagagttaggaaatctccatacattcgcacatgagacacagtgccaacttgagatgtgtttccctccgtcattttttgatatgatggagcacctcattattcacatagtgctgcagatggttgcgcttggcccattgtacctccatcaaatgtggtcatacgagcgttacatggctgttttgaagggttacgtccgaaatcatgcacatccagagggatcaatggttgagggttatagtactgaagaggttgtcgagtgctgtatcgattacctcaaagatggatatgcaattggagtacctatgccccgacacgagggcagattgagtggcaggggaatgataggaaagaagagattcgtcacccatgatcacaaatcattccaagaagctcacttcagcgtgcttcatcagtttgctatcgttgagccgtatatcgatcaacatatcgaactaatacgagctaacaattggttgcgagacctagacttacctgagggacaaactaccgatgaaataactatgaagcggttggcttgtggtccatcaactacagtaaattcttggcagggatatgacattaatggatactcgtttagtacaagagcctgagataataagacctgtatgcaaaacagcggtgttcgtgtggaggcaattgatgaagctgaggaaaaacaatcatacttcgggtttattgaagaaatatgggaaatcgactatgggcacacaatgcaattccccatatttatgtgccatcagtttgtacagaagattaagattgtcaagacatctactcagaagaccgtgaagccttacatgcgcatagacggtgtgggaaaaaatgttataggggtttacatcttcgcaagcggaccgtcagccggacgggaccgtccgcctgcgaagataatttccctatataagggcaagcccgcggcgccaaaatttctaagtccaggcgggatccctagaaattttggcgccagctccacctcgtgcgcgcgagctagcgctccaccgctggcaccgtccaccgccgccggccgcttccccctggcccctccaccgtgccgccaacctctccaccgccgccggtcgctccacagccgccgccgccatctatctctctctctctctctctctcgcagtcgtccacgagggccttcattggcctttcatcgtccacgagcaaagacatcctcggccgaacatcttcatctgccagttgtcgtccacggccgaacctcgttgtcggcccttccttcatcgtccacgaccgaagctcgtcgtcggccgttcgtcgtccacggacaggtttgaaacgatggccgatagtgctaaagggactgaaaagaagggtttaggggagcaagagcagtcccttgctgttgtggttgctccggaaccaacggtcccaccggaagatagttccgacagcgacgtagctgacgaagatgatgagtactcgtcgccaagcgatccttgtccaagcccaagcccgaagagaaggaaaaagggcgacggtgaagaaggcgacaaggactacattccccctaaagaaggggaatgggatcatgtatcgaatggggataaggaagtcctatggaaagagttgaagaaaatcttccagttcccggatggatcagaggcagcagtcaggaattgtgcactgcaaacaatggccaagtcttggcgtggttggaaaaccaccttgaacaagaaatttgcgaagatgggacgtacaccgttttcgacgtatgccaacataaccccgaatcagtgggacaactttctgacgttgaagaactccccggaagaaattcaaaggagccaaaagtatacaagagttggccaagaagaacaattttcctcatcgcttaggctccgcgggatacgcaccaagggtggagcagtggacaaaagaggaggaaatgaggaagaaggggcaaccggtaccaatggaggaatggacacagagatcaaggaattggcatgggggaagggttcgaggtgtgttgagcaagatgagttggaaggaagggtttaaacatgacccccacaagaagtgtgaagcgtacaaggataaacttagagacgaaggggctgcggagtttgaaaggcaaatgatggatttctgcgtcaggcacatgcttttgcctcgccccgaaaccaaagaacctgagccagaataccccttcgatgacctcaaggagaatacaccctgcagattgcacgttcccattggacgctccgggaaaactcttgaggccgctacaaccattgctatccctgggagaacatataatgaagagttcatacccgatgcgtatgccaaggtgcagccgcaagtggtccatgaagggtttgagtcctacgacattgacttcccgactgcagatggtgtatccgtacttggggatgcggtcgatcttgtaattctctggcacaagaatgacatatcctttggattgggcaccgacgccacgcaaaaacctgtggtaccaaaaccggggttgggaaaacctccgagacctcctaagaggaagctgactgataaggcggaggaactagaggtgcataaggaaaatccagtgccagaagtgccaccggagattgcactaccggagctgcccatggagattccagtggcagatgtccaaatggagattacagtggcagaaccagaggtgcaattgttcgcatcagtcgggactgaaatagaaaaagtaccaggattggaatgggacggtacagagccagaaatatttgaagacccttctcctacgaaagaccccgaggtgcaagagaccacggtctctgagaagaccactaccagttctgaggtgcctagagtgcttaggagccacgactccaaatccaaagatgagaacaaggagaagttcatggtaaccgtcttcagaggacgtaaggaacgtgccaagctcagagatgatgacccccagaaggccactgacctagccgggccaacatactttgcaacttatgattgctcggaaaagtacgaacatgagaaagtactcttgccggattgggcactatatgaaggaccatgggagatgaaaaggttacataccttctacatggaagccagcaagaaaagcttgggcaatataacagctcgatcaccggcagattgtttcagcgaagaaggttacgtatggctagatttctcagatctccacgccatatatcgtcgggataggatggacgtcaactatgtcggtgtttggtgcatgatgcaatacatggatgctaagaagacaaaagaacctatcaacttcttggatccaactcggatctaccaaacacagcatactgtgaagctagcaccagggtcagaccagctgaagggtaagactccaaaagagatagctgaatacaggaacggcttgcacaaggagaaattgattactatcgcacagtacattggacgagccttcttgcactttcaaaataagagagtcgtcatggctgcttataattttaacgatcattatatctgtttactcatccaccctaaagacggatctgtggtagtcttggaccctctcgattacagtcacaagcaatacaaagaatttctaacaatcttatagtacgcgtacgagtactacaagttcaagggtggagaacagacccgaacaagggagaagctgctatgtcacaagcaaccgtgaggaacggtcctttgcggctattacgcgtgcgaattccttagggttaatgggaggtacaggactaacgcagaggatttaccaagattagaacatcgaacaagctttgacgatacaggcatcaaaaatatccaacgtgatctgtgccatttcatctaccatgagtgttgtcatgtgaaaggagatttcttcgacccagagggtgccctagcgacaagtgacgaatttaaggatcttcgggagtggaacactgctatgcca

SEQ ID NO: 9943 - DNA, 351 bp, Oryza sativa
  unsure (1)..(351): unsure at all n locations
  Clone ID: PAT_MRT4530_16311C.1
gtgccgttgtggtcggagcaagccggcggcaagaaggccccctctccctccttgcccaacgatgacgactacgagagccgcgcaccgccacctcatcaggagatgacgaggatggagatgagatagcggagagggaggatgcggggaggccgacgagtgtggcggagaggcctcccggcgctcaccgccaagctcaaggccgtcggcgccgccgtcgcgctcgagtaatcccgagcagaagaaggggttcgcccttttttttggttcctattcattatccttagatcgaagatgctacgcttgtggatgccttgatttgtttggattgaaattagatgcaattggggcana

SEQ ID NO: 9944 - DNA, 492 bp, Oryza sativa
  Clone ID: PAT_MRT4530_16312C.1
atggacgacgaccggcttcggtcgtggacgacgaacggccgacgacgtggttcggccgtggacgacgaccggccgaagacgttgttcggccgaggaccggcggccgtgcgcgcggtggaggggccggcggcggtggaggggccagcggcgaccgcacgcgcggtggaggggccggtggccggcgcggtagaggggccggtggcggtggaggggccggcggcggtggagcgggcggcctatagctcgcgcgcggtggaggggtcgatggcggcggcggcagagttgtggagctcgcgcaaggtggagcggcggcaaggggcggcggtctcggtgacagcgcgcggacgacaacggtcggcggcggcagaggacgacggtcggagagtgaaggtcgcaggcgggcggcggcggaggacggcggaggcgtgcggcggcgaaaaaattcggcagcctgatggcgtcaaaatttcgagggttcccgcctggacttag

SEQ ID NO: 9945 - DNA, 509 bp, Oryza sativa
  Clone ID: PAT_MRT4530_16313C.1
cctttgagaagaagtatcctaacctttacaatctagttagaaataaaaatgaggtagtggccaaggtaatgagtagaatcccgttaaatgtgtctttcagaagatcaatactgggaagaaacttgaagcctggtatgagctagtgtcgaaggtattaagctagtgtcgaaggttgttaatactgttttgacagattagaaagatcgcttcttttggaaaaacaataaagatggcctttccacagtaaaatctatgtacaagttgctcatgtatgaaggggtggttcctaagaagaatttcatttggaagctcaagattccacttaaaatcaaaattttcttgtggtaccttaaggaaggggtaattctcactaaggataatctagcaaagagaaggtggaagggtagtctaagttgtttttgtaactcaaaggtaacaatataacaccttttgtttgattgctcaatggctaggtatatttggagtgcgctcctttttacatttgagat

SEQ ID NO: 9946 - DNA, 2751 bp, Oryza sativa
  Clone ID: PAT_MRT4530_16314C.1
atggtgcacgatgatggttctgttgttgacaaaatcgatatagaggaaatgttacgtcatgcagaacccgaggtgctgatggggtcggctagaggtttaaataattttgatgctttacagaaggcagctaaggaagttctgtacgatgagtcgaagggctgtgacagcgagttcacaacactacgaaaatgctcccgaggcctaactcactaccatctagcacatatcaagcgaagaaactcatatgccccctttcacttgggaccctgtcagcctggtattgatattgacgtatttcttgaaccattgttggaagatatggcagatttatggaaggagggattgaaagtgtgggacgagtacttaagagaatacttcacagtgaaggtcatcatctttgtgaccattaacgattatccagcaatgttttcagttttaggtcaaattaaaggtaaaacaggatgtgtgatctgcttgaatggaatgtactatacgtatctcccgggttccaacaagtttgtgtacatgtggcaccggcagttcctacgcacaaatcacaggtaccgcaagatgaaggcggagttcgatggcactgaagagactgatcctgcaccaaaacctacatctggagaaaaagtgtgtgcaatgatagagaaaattgtttgcgaatttggaaaagtgactaagaaaccatcaaaggggacaaagcgcaagaaacccgagaagactaagaaaccagaggatagtaagaagcaagatgatagtacgaagctagatgataaactccctcccccattcaagaagcattccatattctttaagtacctctcgtactggaaagatctggaggttcggcatgccatagacatcatgcatctagagaagaatgtgtttgacaacatagttggaacattgttggacatgccgaagaagactaaagatggtctgcaatcacggatggacctagtcgagatgggaatcagggaagagttacaccctcaggaaggagagaagaatggcaaagtatatcttccaccaacctgtttcacactgactcctgaggagaagtcattttgcaaatcactccacgatgtcagagtgcccataggtttctcatcaaacatcagtcgacttgtttccatgaaagatttatcggtatctggttataattcacatgactatcatgtcttcctcaacgtgtttcttgcaattgcaataagggccataaaaccggaacatttaaaggttgctatcacaaggttgtgctactttttgaacgcactgtcacagaagatggttgcacttggcccattgtacctccatcaaatgtggtcatacgagcgttacatggcggttttgaagggttacgtccgaaatcgtgcacatccagagggatcaatggttgagggttatagtactgaagaggttgtcgacggtgtccgtgtggaggcaattgatgaagccgaggaaaaacaatcatacttcgggtttagtgaagaaatatgggaaatcgactatgggcacacaatgcaattccccatatttaagtgccagtgggtaaaatacccgaacggggtcaatgttgataagttcagtcttactgttgttgaccttgcgagtgtgggtcacaaggatgacccttggaagattaagaatgttgagacatctactcagaagactgtgaagccttacatgcgcacggacggcgggaaccctagaaattttggcgccgtcaggctgccgaattttttcaccgccgcccgcctgcgaccttcactctccgaccatcgtcctccgccgccgccgatagtcgtcgtccgcgcgccgccgaccttcgagccccttcccgagctcccccgtggccgcaccacctctccccgccttctccttctctctctccggtgtcggccggcctccagccgcctctccctcctcgcccgagcgccgtccggccgtgccgtcgcctcctccagcgtcgcagccgcctcctctccaccggcctgccctccgtttcgcgcggtgaccgccggaggcgcgttcccgccgtcgtccagtggcgttgccgccactgtaccacctccagccgcccctgccgcgccgctcagcggcaaggtcgccctcggcctcgcctcccctttgtccaaacccctccgcggtccatcgtcgtcgtctccgttcgttctcgtcgtcgacgtcccgtcgctcgcccggctcgtcgtctggctgcgctgccatcgtcgtgggcattgctgcggcgtgtccctcgccgtcctcacctccgtgcagctgctgccggctgccctcgtcgcctcctcgccggccccggtcgtcgtcgtcgtcgtcctctcgtcgttccgggtcgctgcagcccccgtcgtcgtcttcgtcctcggctccgcgtcgtcaagcctcgtgccggccgcgtctcgccttcatccaaggatcgccgccgaagtcgttccctcgccgtccgtctccgccgcgcccgttcgtcgttgtcgttccctcgcctcgtcgcgtggtggtaaggatctctcctctcgctgccccgtcctcatcctttcggtgtcgcccgtgcccgtcgtgcggttgtcgaccccgcttctgtcgttccggaggttccagaagcgtggttcgcggtcgtcgccgaaggagctgcggcctggtagtcgagatgtcatggcacagggctggtgtcctgctgctagggggctcaatcctgcctgcctgtcccgggggttccggccgtag

SEQ ID NO: 9947 - DNA, 2595 bp, Oryza sativa
  Clone ID: PAT_MRT4530_16315C.1
atgcggcaagacttgcatggtagcggtgcacgggaagggccagcaggcacgcggcaagggaccgacaggcacgcgcacaaacgggagagaggaaaacgaggcgacggtagccggtggaggagcggtggcagcggtggccatccgacggcaaggcgtggacttggaattatcgctgccgccgatccgacggcgaggcgcggacttggaattgcagatcggaatcaggagtctgacgcagcagcacgtcttcgcacatggctgcaaagtggaattcgcaaggagaaaatctacactgatggtacagtaaaatggggtcttttgacctcaactggtgtgtctgaaaatttacaagatgctttgaaagataagaattggaaacttgcaatggatgctgagtatatggctttgattaaaaataatacatcgcatttagttcctcctcagaagggtagaaatgtcattgattgcaaatgggtttataagataaaaaggaaagaagatggtggagcagtggacaaaagaggaggagaaaatgaggaaggcggggcttccggtaccaatggaggaatggacacagagatcaaggaactaggcaaagtatcgtttgaagatccggagttggtggtggtggccgatacaatagagaatttatccagtgcacagaaaaaaggagcttttaagcctaagagggagaaagatgtgttaagtacggcgcttagtactcctgagcataggggtagggttcgaggtgtgtcgtccaagatgagttggaaggaagggttcaaacatgacccctacaagacgcgtgaaacattcaaggataaacttagagacgaaggggctgcagattttgaaaggcaaatgatggatttctgcgtcaagcacatgcttttgcctccccccgaaaccaaagaacctgagcctgattacccctttgatgacctcaaggagaatacaccctgcagattgcacgttcccattggacacgccgggaaaactcttgaggccgctatagccattgctatcactgggagaacatataatgaagagttcataggcaatgcgtatgccaaagtgcagccgcaagtggtccacgaagggtttgagtcctacgacatagacttccctactcaagatgctgtatccatacttggggatgcggttgatcttgtaattctttggcacaagaatgacatatcctttgaattgggcaccgacgccacgcgaaaatctgtagtgccaaaaccggggttgggaaaacctccgagacaacctaagaggaaggtgactgataaggcggaggaacccgagatgcataaggacaatccagtgccggaagtgccaccggagattgcagtgccgaaggtgcccatggagattgtagtgccagatgtccacatggagattacagtggcagaaccagaggtgcaatttgtggcatcagtcgggacagatatagaagaagtaccaggattggaatgggacggtacagagccagaaatatttgaagacccttctcctgcgaaataccccgaggtgcaagacaccccggtcactgagaaggccactaccaattctgaggtgcctagagtgcttaggagccaccattccaagtccaaagatgagaacaaggagaagttcatggtaaccgtcttcagagggggtaaggaacgtgccaaactcagagatgatgacccccagaaggccgctgcactagccgggccaacatgcttgccaactaatgattgcccggaaaagtacgaacatgggaaagcactcttgccggagtgggcactaaacgaaggaccatgggagatgagaaggttaaataccttctacatggaagcgagcaagaaaggcttgggcaatataacagctcgatcaccggcagattgtttcggtgccgaaggttacgtatggctagatatctcagatctcaacaccatatatcatcggcataagatgggcgtcaactatgtcggtgtttggtgcatgatgcaatacatggatgctaagaagaaaaaagaacctatcggcttcttggatccaactcggatctgtcaaacacagcataccgtgaggctagcaccagggtcaaaccagctgaagggcaagactccaaaagagatagctaaatacaagaagggcttgcacaaggagaaattgattattgtcgcacagtacattggacgagccttcttgcactttcaaaataagagagtcgtcatggccgcttataattttgacgatcattatatctgtttactcatccaccctaaagacggaaccgtggtagtcttagacccactcgattacagacaccagtcatacaaagaatttctaacaatcttacagtatgcgtaccaatactacaagttcaagggtggagaacagacccaaacaagggagaagctgctacaacttagaggaactgtcctttgcgggtattatgcgtgcgaattccttagggttaatgagaggtacagggttaacgcagaggatttgccaagattagaacgtcgaacaagctttaacgatacaggcatcacaaatgtccagtgtgatctgtgcaacttcatacaccatgaatgctga

SEQ ID NO: 9948 - DNA, 595 bp, Oryza sativa
  unsure (1)..(595): unsure at all n locations
  Clone ID: PAT_MRT4530_16316C.1
cctctcgataccctcgtgtctctccctacagatggcgacggctggtgggagaatcgagttcggcgttggaacgcgggtgatcgacgacgagcgagccangcggcacagaataatgagtcgtcacgctggcgcctggcacccacccggatgggaccggctggagtctcggactcagcaccggatgcggtttccttcggcgagcgttntccccctcccccgtcgtcgtcgttcggctttcttgctatggatttggatgcggcgagttcctgttctctgacaaaaaggtcatgtgtgtgtctctgatgggctctcgcggagccacaagaagtatgcgcgaacccggtgaagtcaccaggccccacccccgtctctcctccacgcatgtatttttccaaggtggataaagattgccacacgtcacctcaccgtattgtgaatggccatagggataactgcagttacaggtggaccgcttatccctccgctcgtttccttttctccgttgtatagatgtaaagagaatttattttccagtgatttgccatgggtacttgatgtcccaagaatggtcaaacacatgcaaaaaaaaaaaaaa

SEQ ID NO: 9949 - DNA, 528 bp, Oryza sativa
  Clone ID: PAT_MRT4530_16317C.1
atgcacacacatataaaaagcaagcacccacatgcacacacgtccgtggacgacgaacggccgacgacgaggttcgaccgtggacgacgaccggccgaagacgtcgttcggccaaggacgagttcgctcgtggacgacgaccggccgaagaagccgttcggccgcgataccgcgattgagagagagagagaggggcagcgttggagtggctggcggtggtggagcgggctggcggccggcgcgaggtggtggagcggccggtggcggtggagctcgcgggcggagctcggtggtggagcggccggtggcggtggagctcggcccgtgactatggagctcggcggtggagcagccggtggcggtggtgggccggtggagcggccggcgcgagctcgacggtcggcgcgtggcgcgcggaggacgacggtcggccgcggcggaggatggcggtcggagggcgatggtcgcaggcgggcggcggcggaggacggcggcggcgtgggacggcgaaaaaattcgacagcctga

SEQ ID NO: 9950 - DNA, 444 bp, Oryza sativa
  Clone ID: PAT_MRT4530_16318C.1
atgcataaggaaaatccagtgccggaagtgccaccagagattgaagtgctggaggtgcccatggagattccagtgctggatgtccaaatggagattaaagtggctgaattagaggtgcaatttgtggcatcagtagggacagaaatagaagaagtaccaggattggaatggaacggtacagagtcagaaatatttgaaaacccttctcctacgaaagaccccgaggtgcaagacaccacggttcctgagaaggccactaccagttctgaggtgcctagagtgcttaggagccacgactccaagtccaaagatgagaacaaggagaagttcatagtaaccgtcttcagagggggtaaggaacgtgccaagctcagagatgatgacccccagaaggccgctgaactagccgggccaacatactatgttggtgtttggtgcatgtga

SEQ ID NO: 9951 - DNA, 254 bp, Oryza sativa
  Clone ID: PAT_MRT4530_16319C.1
atgtctttcgtgattagtttcacacttctcaccataataaaagatgctataactggtaataatttgattagctcctggtttggaatggtatattcctggtttggagatagaactgtgcagccgggattggttgtacagaatggttgggcctatgcaacagggtatgttgtatagcgttggattaatattgtttaattaaatactttactgttttatgaaattctgaaatgtttattaaatgctatttatgcaaa

SEQ ID NO: 9952 - DNA, 297 bp, Oryza sativa
  Clone ID: PAT_MRT4530_1631C.1
atggccgtaggaggtggcaacccggcggtgggcggtggcagcattatcaaagccgcggggtcgaaagctggcagtgcgccgatgaaagaagaggaggagagggaggggaaggagaaggggaggaggctggctgggagggggggcggcctcaccggcaccgttggcacctttgggccagccggcgtagtgggcggcagcgcgatggcggtgggggatcgggcggggcgagatggaacccgcgaggggagtgggtccaacttcaagccatctgcaaaagcttcacaagcttttccatag

SEQ ID NO: 9953 - DNA, 621 bp, Oryza sativa
  Clone ID: PAT_MRT4530_16320C.1
cggccggcaggcggcccgcgcccggcctcctgccgctactccgccttcgcggggtggtctctggttcgcccgtcgtggtggagcccgccgcggggcgcgccccacccccggcgctccggcctcgctgagccagctcctacatcatctacctcgccgttgagggttgttcccatgatctaccctctttgatgtaccaacatccaggaggggtaccaccacgcatatccaggagatttggcactccttctagagcgaagatctatgggaacaggttgctcgacggtagcttccctcgtccacgtaaaagggctctagaactgtccctttggactcgctgctgcgtccttgcactcgtctgcctatgcggagtagatgaaaagaagaagattcagaaaactaaggccagctatgagccagaaaaagcggtcaagatggccttcattcaagttatcagggatccaacccggattatcatctcgagttgtaaaatatgaaaccagggtcagtatgaatgaactaagatagcttccaagcgaccaccgtaacaagagcgaaagcggagcaccaagcttctcatgcaatctggagactgatcgtagaagaactcggcttggccaatgg

SEQ ID NO: 9954 - DNA, 174 bp, Oryza sativa
  Clone ID: PAT_MRT4530_16321C.1
atggaggaggacgacggcaccgtggcagttgaggcgaagatgatggatggctgctacttcgcatcatcaagctcatctctataccacgccgctacatccttctatgattccatcatcgactaccgctcaccacccagttgccctatccactaccagtcacaagacatagactaa

SEQ ID NO: 9955 - DNA, 587 bp, Oryza sativa
  Clone ID: PAT_MRT4530_16322C.1
atcacaattaaagtcacagcatagtaaccaaccgaaccaatcatcagccatggcgcgaaggctctcgctgctggccgtcgtgctggcgatggtggcggccgtgtcggcgagcacggcggcggcgcagagctgcgggtgcgcgtcggaccagtgctgcagcaagtgggggttctgcggcaccggcagcgactactgcggcacggggtgccaggcgggcccctgcgacgtgccggccaccaacgacgtgtccgtggcgagcatcgtcacgccggagttcttcgcggcgctcgtcgcccaggccgacgacggctgcgccgccaagggcttctacacccgcgacgccttcctcaccgccgccggtggctacccttccttcggccgcaccggctccgtcgacgactccaagcgcgagatcgccgccttcttcgcccacgccaaccacgagaccataaagttctgctacatcgaggagatcgacggaccgagcaagaactactgcgacgagacgagcacgcagtggccgtgcatggcgggggaagggtactacgggcgcgggccggctgagatctcgtggaacttcaactacg

SEQ ID NO: 9956 - DNA, 1426 bp, Oryza sativa
  Clone ID: PAT_MRT4530_16323C.1
ggcgggagtcacgaggcgacggaaccggaaccctagctagcgcgcggcgtccatggggaaggcggaggcgaggtccagggagcacggcgggggcggaggaggaggcagcggcagcgcggggaagatcttcgtcggtggactgccccgtgacaccacggaagcggattttgtgaagcattttggccagtatggagaaatagttgattcagtgataatgagggataagcacacatctcagccaaggggctttggctttattacatattctaaccctgccgttgtggatagagtgatggatgatatccatgaattcaatggaaagcaagttgaaatcaagagaaccattccaaaagattctgtgcaatcaaaggatttcaaaactaaaaagatatttgttggtgggcttcctcaagcactgacagaagatgatttcaagcatttcttccagaaatatggccctgtggtggaccatcagattatgcgtgatcatcaaaccaagcgttcacgaggctttggatttatagtttttagttctgatcaggttgtagatgatttattagcaaatggaaatatgattgatcttgctggtgcaaaggtggagatcaagaaagcagaaccaaagaaatcctcaaatccaccaccatcatcacatggtagtgcctctagatcagcatatggtagggattctaggggtcattcttctggcaatgactatggtggactggccaatgcttatagcaactacaacagtggtggatttgggccttataggaaccatggagtttatggtggtggtagtctcagtggttatggtgggataggtgaatatggtgttcagtatggccgttactatccaggattaggaggatctggaagcatgccttcttttggttatgctagtcgtgttgggccgtatggaggaggttttgatggaccttacgctggtgggaacttaagtggatacaggcgtggtggtgatgagagctttggtggcctcagtagttctagctttggtggcgctatgtatggcggcgcagcatatgatcctgcactaggtggttatgcatctggtagcacacctgaaagaagcaggggaaatttggctggtggttcaggccggtacaatccatatggacgatagagatgcccttgaaggattcgacccatgataatattctcagcaatcttacttcctcattgccttcttttagcttcttatatggtgggcatcttagcaatgctagtacccttattagattgagcgtgtgcacaagtaatttattctgtacatgtttgctagttctcctgagcttaaagctttaatcggtaccatgtagtgatcagactagatgttgtaatgatggttttgtttgggatgaacggaattctggtattgttagttttatatcatctacgaagtaagttt

SEQ ID NO: 9957 - DNA, 375 bp, Oryza sativa
  unsure (1)..(375): unsure at all n locations
  Clone ID: PAT_MRT4530_16324C.1
cgtcggctgcggtaggagcacgaagccagtgtccatccaggattcggcaggcagcagccgcctcgagcngtgttctcgaagtggctcatggtgctggaaggcagcagaagagacaccgggagcaggactccggcgacgacgaggaggagcccgagcgagaagacgacgacgagtgctccaatgcagcacccgtccagccccaccggcgaacgcgctgctgctcatgcgtgccgtcggcaccgcgaaaggactagcaaggagacgaacagagagccaccaccaccggtcggcgagcggtgcacaacgaggaagccgccagctctagagtatccctcgaggcccaagcttaccgtacccacttctgtacaaatgtcc

SEQ ID NO: 9958 - DNA, 389 bp, Oryza sativa
  Clone ID: PAT_MRT4530_16325C.1
gccactcctactacatctgatggcgtacacattactgaacagtttacaagagacccgcgcgagggagatgtcgtcaaaatgatgaccatcttctgatcttgctgatagtacgggccctgttgtactatgtacagggacctgcttaaccaaatcagcaccgccattactactgatacctctgatctcggtgttgcacctgatatggcacacaatgaggtcgatgtgttgtcatacgcacattactctgcggaggctatccatggctgtaaataagactccaactagaagtgcaacccctacgactgataatgacatgagcatctatgacagaattgacatatgcccatcctgtctacatattgaataaactgacagtccatccacagcgt

SEQ ID NO: 9959 - DNA, 467 bp, Oryza sativa
  Clone ID: PAT_MRT4530_16326C.1
aaaaaacttatctaaaaaatagtcattttcggggtgccaaagtctctagtgccgtcctcctgccaccgtggctaggggtgaaacggacggaaaccatctttatcgttttcttttcaaacttaggagcacacaagaaccaactatagagaaaataaactcaaatggatgaaatatgtgacttgtagaattttcgaaagctctaccaaaaagcttctcgcctcaaaaatacaatcttgcaagcagaatttggaggttttaatttcgacgaacctggcgaagatgggtagaatcggatgtaactttctctgtagatgtccgtggatatattatttgcctgattccgagtctaaggagagagctggggggccgcggggggggggggggggagggtgggtgggtgggggcaggaggacaacaccagataggcgggatgacgccgccagcgactctggcgccccaataaggac

SEQ ID NO: 9960 - DNA, 369 bp, Oryza sativa
  Clone ID: PAT_MRT4530_16327C.1
atgacggagcgtggggctcctcaccgggagaccgcgcaggcccccctttgccagttcggccgggggccctggcctggcatatatctgaccgggtccaacgtgccacctccaggagctaacacgccgaccccggctagggatgagtgcttggaggctctcatcctgacgggatggggcgaggcctccggcggaccgcctgccgccgccgcacaatgggtcgacgtccccaaattaacacaagtcggatgttcttgcgagttgagggtcgacgacgccaaggtgatagcagcagcggcgatggcgcacggcaggctgaggccgggaccggtttgggcggtggagtcgaactgcgacaacacggatgcgtga

SEQ ID NO: 9961 - DNA, 549 bp, Oryza sativa
  Clone ID: PAT_MRT4530_16328C.1
atggacctcgacgccgacatgatcccctcctccccctccgccgactactcctcgccctcctcctccgatctcgacaccgagtcgacggggtcgttctttcccgaccggagcacgacgctggggacgctgatgggcgtgtcggcgttcggcggcggcgggcagcgtcgcgcggcgaggacgccggcgaggacggagagggagagggccccgcttgcggcgcgaccggcgggggaggaggaggaggggaggcgcgcgggcgggtggcggcggcggcggaggaggcgccagcgccggggcagccgcagcctcggcgggagctggtggcggctctgccgcgacgacgccggtgggccgccgacgtcgctgggggagttcctcgacatggagaggcagctcgccggcgcggacttcctctgcgacggcttcggcggctgcggttcggatcgggaggcttttgttgctgttgcaccgcaactacagttccttcaattccgtggcactgccgtatacaagctgcagcattggcagttgcagtcgctgctagcttaa

SEQ ID NO: 9962 - DNA, 135 bp, Oryza sativa
  Clone ID: PAT_MRT4530_16329C.1
ggggacaaaaaaatttaattattgaggggtggggtttgaaaagtatctaggtgaatgcaccccagcatcggggtgatccttcttgttttggggcacgccagttaagcctagtgctgggcggtggaaaaatgctga

SEQ ID NO: 9963 - DNA, 7605 bp, Oryza sativa
  Clone ID: PAT_MRT4530_1632C.1
agctttcccatcacgaacatgtttgactctttgatcacagtctacgtcctgatagtgcttgtgctcttcttgtaatgccatgacccgatccggtttagcatttgcaccatcttccttccaaaagcatgtcttcatgttcttcatagacaattgtggtaggttgacttgagttgattgaggttgatcaagtagtccaccttggtcatcatggacttcttgtggtcacacccgtgattcttacacggatggataacatttaagtatgcatgttcttgtgaacttggagcctctggcctagatccttcgggtgaccaaggaatcttcccggagtctccggggtatctttccagagcctccgggctccaatgcatggtgatagatgagcttcattgcaaatcgagcggtcttaccgaagcctttggttccactataaaattttagcacattttggtccccaacaacattgggtccataaaggttagtcacaagagacttagacacccaaatggcctttatgctagtgtgtggcgaacaaatcaccctagtagcacaaatatcatttttggcattcctaagcaaattatgatcaaatgagagacttgtcttaggaatgttacccatgggaaaatttttaccaatatgtccctttgcccggcaattatagcaaagtcgacttttgcttctatattgcttttcggtttgcttgttgccggtttgcctctcacttgatgttttgcattgttcatccaatgtacaaggagaccttgaggcaaagtgtcccacttcggtgcacttgaagcacttgatgtgaggaatgtctttcttcttgctcaacttatttcctttcttccaagggcaatctctagcatgatgtcccactttcttgcacttgaagcaagtaatggaactcttgatcatcttttgatttcgtcccttggtataagcattgatggacttgctatccctttgatggatcctggtgcaagccacggttgatccctcctcaagattcttcaccatgccttcacagttatcttgagaaggttgagcaatgcacacaagtccatgatctatttgcttctcccttttgcctacacaatccaagtcatatatagtgctcggggaaatatttgcttgggcgcaacaagggttagtacaagtaagatcaacttgaacatgaggctcgtaggattttaccgttgcaattatcacctcatgagatacctctagcattgcatgagaatccacaagattctcatgagaacacaaaagttcatcatgtctttcttgtaaatccacatacttgttagtgatctcatcaagttgagatttgagctcttgattttgcttctccaaagatgctacacaagcaatagaattagtggcacaagcaaattcattttccaatttttcatacctcatagtcaatgaagaatgaaaatccttaagtttcttgtgttcttcggttagactcatgatttcttcattcttcttgatagtgcatgcttgttgcttctcaatggcttccatgagcttgatcaccattgttatatccttcttgctcaagtgatcaaactcggagtcaccatcttcactcataaagcaagcataatcttcggaaatagaagatgagcatcttggtgaggtggattcttcacttgtccattggtgcttatttacttctcccttcttcaatgtagtcatgtgttgatgataaggtggttgtgggatgattatcttttctcctttggaaatatcggctaaatcggtttggaatgtgtttgattcgagttcgaatcggatcggtctctttccttcaaaccccgatctttccttctcgtcgccggccgccgtgggccttcttcgtcgcctcctagcccctttaaaaggacccccaagctcttctctacccgccgccaccttcgccttcgcctctcgtcgtccgtagcgccatagcgccgcgtagccctagcgccgccgtcgccgccgtcgctccagtcgtgcgccgccgccgttctagacgtcgccgtcgctcgggaagaccgccgtcgtggtcgccgtcgcgtcgccgtcctcgttcgccctttcgccgtcgccgaagatcaccggagcgccatcgccgccgtcgacccgaagaccgccgccgctttcttcgtcgtcgccgtcgccgtccgttggtcttccgccgctcctttggttaccggtgagttcgccgcgtcgcgctctacccgttggtgctctccgttcgtgccgaagtgccgccgttcgccggcgagcatgcgccgcccgagccgccgagccgccgccgccggtggtgacgtcaccgccgacgtcatagtcgtcctcttccgtgagccggtcgtggacccgatcgatctcggccgtccgttttggatggatcgatctcggccgtccgttcgcgtgaaccgccgcccgtgcgcccggtccaccgaaaccctagccgctgacgcaataaaccctcttttccgtgccaaccacaagccagcatgggcaacggctttatcttttgtatagcatggttcattgcggggcaccagactgagaagtggcggagataagcccacgggggtcgctggggagtccatgcctctggtttttgagggggtgattatgatccaggaagctcctggtttggaatggttaattcctggtttggaggtagaactgtgcagccgggatggttgttcagaatggttgggcctatacaacaggatgccgcgctacaagcatgagtacctgtttggtgttgagggttttgttcaggagttgcgtacgatgtcctttgtcattggatttgggactgcccctttttatgctcagattcctcatgatcgtcatgaagaaaagtgccgagtcaaagtcaccttgaacagcaatagtgaagatgtcccctcagtgatgtttgaagctggaggaaggaactacatccatgcatgtcaggaggtggcaaggatagccataggagagctccgtgatcgctacagtgatcagttggccgacaccgagtatcgctaccatcctcgtcaaccccagggaagtgaccgtggcagctacctagagattgaaggaattgagaatgatgctaccacaaggcatttggttgagatgttgtgggctatggatgaaagtcgtgcggagactgtgttagcagcccaagatcgtgaagatcggaatcgtggtaagatttgcaagctagaagacaaggtggatcgtttggaaaaggaattagccgcattgaagggagaagcaccaccgcagaaggccaggattcgtctcaccgcaaggaagagagctctatttgtccctcgctatcaattggcgccaaagatggtgaatactcgcagcaatgggaatggccccaaccaccccaataacaataacaatggagagaacccaactctggcccaagttcttgctcaacagactcagctaatgaacatgatgatgcagcaatttcagaatcagcagaaccaaggaaataaccatgtacctccccagaacaagttagcagaatttcttcgtgtgaggccgcctgttttctctagcaccactaatcctgttgaagctggtgattggctgcatgccatagagaagaagttggatttgcttcaatgcactgatcaggagaaggtctcatttgcatcacatcagttgcatggccctgcatctgaatggtgggatcacttccgcttgaataggattaatgctgaacctatcacttggcttgaattcgccgctgctttccggaagacgcatataccatcgggagtggtgtctcttaagaagaaggagttcaggtcgcttactcagggatctcgctctgtcacggagtatttacatgagttcaatcgtcttgctcgttatgctccggaagatgtgcgcaatgatgaagagcgccaggagaagtttttgggaggactcaatgatgagctttcttatccactcatgggaggttcttcatctgttgttcgtccgcaacgtcagttcttcaacaacaatgctggcaacaacatccgcaatcaagctccacgccccgttgcagctccaacccagcaacagcctaccaagagggagcaaggcagcaagcccgtggtgtgtttcaactgtggagacccaggacattatgctgacaagtgtccgaagccccgacgcgtgaaggttgtccctgcccaaaataactctgctgtaccagcatcaaaagcccgtgtcaatcacgtcgctgctgcagaagctcaagatgctccagatgtgattttgggtacgtttcctgttaactcagttcctgcaacagtgcttttcgattctggtgctacacattcatttttatcaatgagttttgcgggaaataatgggatggaagtagaagatcttagacgtcctttgatggttagtaccccgagtaatcaagcactctctttgcaatgtagcccctctgtcagaatagaaattcaaggaataccctttctagccaatcttatcttgttagaatccaaagaccttgatgtcatcctagggatggactggttagccagacatagaggagtgatagactgtgctaacagaaaagtaactctcaccagtaatgatggtcgagttgtaactgttcatgcattgtcttcggagtctttaaggtcaagactgaaccagataactttggaagagattcctatagttcgggaatatcccgatgtgttcccagatgatttacctggtatgccgccaaaaagggatatagagttcagaatagatcttgtacctggaacaactccgatccataagagaccttatagaatggcagccaatgagttggcagaagtcaaaaggcaagtagatgatttgcttcagaaaggatacatcagaccaagttcatcaccatggggagctccagttatttttgtggaaaagaaagaccatacccagaggatgtgtgtggactatcgtgcattaaacgatgtgactatcaagaataagtatccgctaccccgaattgatgatttgtttgatcagcttaaaggtgccactgttttctccaaaatagatcttcgatcagggtatcaccagttgagaatcaaagaggaagatatacccaagaccgcttttaccactaggtatgggttgttcgaatgtactgttatgtcttttggacttaccaatgcccccgctttcttcatgaacttgatgaataaagtatttatggaatacctagacaagttcgtggtggtctttattgatgatattcttatctactcccgaaccaaagaagagcatgaagaacatcttcgccttgctttggagaagctacgagaacatcaactgtatgctaagtttagcaagtgtgaattttggttgtctgaagtgaagttccttggtcacgtcatctcagcaggaggagttgccgtcgatcctagtaacgtggaatctgtaaccaactggaaacaaccaaagacagtttcagagattcgcagtttccttggcctcgcaggatattatcggaggtttatagagaatttttccaagattgctaagcccatgactcgattgcttcagaaagatgtgaagtacaagtggtcagaagaatgtgagcaaagttttcaagagttgaaaagccgcttaatatcagctcctattttgattttgcctgatccaaagaagggttttcaagtgtattgcgatgcatccaaatttgggttaggttgtgtcctgatgcaagatgggaaggtggttgcctatgcatctcgtcagttacgtccgcatgagaagaactaccctactcatgatcttgagttagctgcagtagtacatgcgtttaagatttggcgtcattatcttttcggtactcgtacagaggtgtacaccgatcataagagtttaaagtatatctttactcagccggatctgaacatgagacaaaggagatggttggaattaattaaggattatgacatgggaattcattatcacccgggaaaggctaatgttgtagcagacgctcttagtaggaaaagctattgcaatgctacggaagggcgacagttaccattggaattatgcaaggaatttgaaagattaaatttgggaattgtcagtagaggtttcgttacagccttagaagcgaagcccactctaattgatcaagttagagaagcccaaattaatgatcctgatattcaagagatcaagaagaatatgagaagaggaaaagctatcggtttcttggaggatgagcaaggaactatatggttgggcgagagaatctgtgtccctgacaacaaagatttaaaggatgcaattctgaaagaagctcatgatactttatactccattcaccctggtagtactaagatgtaccaggatctcaaggaaagattttggtgggcaagtatgaagcgtgaaatcgcagagtacgtagcagtatgtgatgtttgtcagcgagtcaaggcagaacatcagaaacctgccggtttgctgcagcctttgaagattcctgaatggaaatgggaagaaatcggtatggattttatcactggtttacccagaacgtcatcaggccatgattctatttgggtaatagtcgatagacttaccaaagtggctcattttattccggtaaagacaacttattccgaaagtcggttggcagaattgtatatggcaaggattgtgtgttcgcatggcgtccctaagaaaatagtgtctgatcgaggcagtcagtttacttcaaatttttggaagaaacttcaggaagagatgggttctaagctgaactttagcactgcttatcatccacagacagacggacaaaccgaaagggtgaatcagattttggaagacatgttgagagcttgtgctttagatttcggtggaaattgggataagaatctaccttatgcagaattttcgtacaacaacagttatcaagctagtatacagatggctccttacgaagcactgtatggtcggaagtgccgcactccgcttttgtgggatcaaacgggagaacgtcaggttttcgggactgatatcctgagggaagcagaagaaaaggtaaagatcattcaagaaagattgcgagtggctcagtctcgtcataagagttatgccgacaatcgccgtagagatttgagttttgaagaaggagattatgtgtatcttcgtgtcacgccttttcgaggagttcatcgttttcacaccaaaggaaaattagcaccgcgttttgtgggaccttataagaacgttagtagaagaggagaggttgcttatcagttagagttacctcaatctttggcaggagtccataatgtgttccatgtgtcgcaattaaagaagtgtttaagagtacctaccgaagaagctaatcttgaacagatcgaagtccaagaggatctgacctatgttgagaaaccaatccgtatcttggaaacaaatgagagaagaaccaggaatcgagttatccgtttttgcaaagttcaatggagtaatcattcggaagaagaatcaacttgggaacgagaagatgaattgaagtcagctcatccgcatctattcgccagttcttccgaatctcgaggacgagattctgtttaa

SEQ ID NO: 9964 - DNA, 267 bp, Oryza sativa
  Clone ID: PAT_MRT4530_16330C.1
atggccgacggcggcgagcagctatgcggcaggggcggcaatggcgctatgggtgtgaggcgagcgaaaaacaagaggaatgaggagggcttgggctttatagaggtggcgatgtcgaaccaggacgacatagaagagtcgaagcaggcgacgtacggcggtccagggcgtccggggccagggccgagggattcttggaagactggctgtggaagcatctcttgctatatgggggttcctgtgttggcctccagttcagctacaatt

SEQ ID NO: 9965 - DNA, 528 bp, Oryza sativa
  Clone ID: PAT_MRT4530_16331C.1
atggatcccggcgtcggggaggtcggggaggcggtggtcggcagtgcagttgctggcgtcgtggctcccgacgtcgtcttgggaggtcggggacacggcgaggacgacagccttgatggtcggcggtgcaggccggtgtcgtggatcccggtgtcggggaggtcggggaggcggtggtcgacggtgcagttgtcggcgtcgtggatcccgacgtcgtcttgggaggtcggggacgcggcgaggatgacggccttgatggtcggcggtgcaggccggcgtcgggaaggtcggggtcgcggtcggtggagagggcgagcggcgtacacacgagggcgtagagggcggaggtggagaggtcgaggcggcggtggagaagagggcgtagagggcagcggagagggcggcggcgagggcggcggtggagaggagggcgtagagggcgacggagagggtggagagggcggcggatttgacggcggcgagggcggcggtggagaggtcgaggcggcggtggagaggagggcatag

SEQ ID NO: 9966 - DNA, 287 bp, Oryza sativa
  Clone ID: PAT_MRT4530_16332C.1
ataaggtgtagtcctgaagagctttccggcataaggtgttctagcgtggcagctaagaatctaccgggggcaccgactcctacatcgtcgctgccgatgttgttcccgactttggttactgatatatcctcatgaactgatcagaccctataagatgtcatccatgtttgaataacaatcatgatcatgcctgcatagagtatgcagaagctatcaggaagagaatgtaaaaatattactgtggcaaagttttttctaccaaaaaaatcttataattttagtattca

SEQ ID NO: 9967 - DNA, 509 bp, Oryza sativa
  Clone ID: PAT_MRT4530_16333C.1
agattgtgaacatctctctttaaaaagaaacatagtgagatcatcgaaatcactaacaatttcaagaatcctaaaacagatatgccgaatcacactgaaaaaacatatattgaacatgtggtatacaccgcaacaaaaaaacaatcatactaatgtaaatgtggtcttaatcacgattccagaagaatacaccacatcacacaagatggtattttgtcagcacatacttcaaaggcgatgacaataaaagaaggtatgtatgatcaaaggatcgtatatacttcgagctatagggcccaatgaagctgaccaggtgcaggcaccataccacaacatgagaacagacccttaatatcatgggaaccattcagctatggaatgcgcctgtgacatggacccctcttaaccctgtccctctgaagagaacctaagcatacattacgatctttctggtactgacatctaacagcggatcctccctcgacagtagactatcgtgcagtcagcgt

SEQ ID NO: 9968 - DNA, 685 bp, Oryza sativa
  Clone ID: PAT_MRT4530_16334C.1
gcttccaatttagcactcactccacattgcttggatccaactcggatatgccaaacacaacatactgtgaggctagcaccagggtctgaccagctggagggtaagactccaaaagagattgctaaatacaagaagggcttgcacaaggagaaattgattattgtcgcacagaacattggacgaggcttcttgcactttcaaaacaagagagtcgtcatggctgcttataattttaacgatcaattatatctgtttactcatccaccctaaagacggaaccgtggtagtcttggaccctctcgattacggtcacaagcaatacaaagaatttctagcaatcttacggtatgcgtaccaatactacaagttcaagggtggagaatagacccgaacaagggagaagctgctagcacacaagtaaccgcgaggaatggtcctttgcgggtattatgtgtgtgaatttcttagggttaatgggaggtacaagattaacgcggaggatttgccaagattagaacgtcgaacaagctttgacgatacagacatcacaaatgtccagcgtgatctgtgccatttcatccaccatgagtgctgtcatgtgaaaggagatttcttcgacccagagggtgccctagcgacaagtgacgaattcaaggatctttgggagtggaacactgctatgcca

SEQ ID NO: 9969 - DNA, 1341 bp, Oryza sativa
  Clone ID: PAT_MRT4530_16335C.1
atggagcaatttgtaactcgtggatttatggataagtatgtaatatggacacgtcatggcgaagaacaagtggacgggactgaaaatatagttccgacaaaagttgaagacatggtgtacaatgatggttctggtgaggacaaaatcaatctagaggaaatgctacgtcatgcagaacccgaggtgccgatggggtcgggaccccgtcagcttggtattgatattgacgtatttctggaaccattgttggaagatatggctgatttatggaaagagggattgaaagtgtgggacgagtacttaagagaatacttcacagtggaggccatcatcttggtgaccatcaatgattatccagcaatgtttttagtttcaggtcaaattaaaggtaaaacaggatgtgtgatctacttgaatggaacgtactataggtatctcccgggttccaacaagcttgtgttcatgcggcaccggtggttcctatgcacaaatcacaagtaccgcaagatgaaggcggagttcgatggcactaaagagagtgatcctgcaccaaaacctacatctggggaaaaagtgtgtgcaatgacagagaaaattgtttgcgaatttggaaaagttactaagaaaccatcaaaggggacaaagcgcaagaaactcgagaagactaagaaaccaaaagatagtaagaagccagatgatagtatgaagccagatgataaactccctcccccattcaagaagcattccatattctttaagggtctgtttggcacagctccagctccagctccagctccacccctcctagagctggagctcagccaaacagtttcagctccactaaaactgggagtggagttgggtggagctctctcacaagatggcagattgagtggcaagggtactataggaaagaagagattcgtcacccatgatcacaaagcatttcaagaaactcacttcagcacgcttcatcagtttgctatcgttgagccttacaccgatcaacatatcaaactactacgagctaccaataaaggtcacacaaccgagtggataatgaaagaaaacaagagtctcttcatagattggttgcgagacctagacttacctgatggacaaacaaccgatgaaataactatgaagcggttggcttgtggtccatcaactacagtaaattcttgggagggatatgacattaatggatactcgtttagtacgagagcccgagatagtaagaccttaactgaaaacagcggtgtccgtgtggaggcaattgattcaccgggtgaaaaacaatcatacttcggatttattgaagaaatatgggaaatcgactaa

SEQ ID NO: 9970 - DNA, 1295 bp, Oryza sativa
  Clone ID: PAT_MRT4530_16336C.1
ttttttttttttttttttacattttttttttcatgccagcacttttgagtattggattagaaactgatgaaaggtaaggtacagttactacattagttgcaaatcacctaccaaatcacaatcttttttttttctactgctgccatagcagagcagaactaacattaggaaagcctaagacctaatcagattacccgtttcagccaacaatcatgggaatagttttgacaagagcactgagttttagaggccctaagttcacaggacaatgtatatcaatgtcacaacttcactgtatcatctttagctactttctggcagagagtgctgctcttcaggggcctcttcctgttgctcttgaggctgctgccacacatacgtcaccgggtgaccttgctgtccaccgtacatcattcctgatccaggcccctgctgcgctggcacgtagtaatatggatatgtgtctgctgcgccccccacattaggcggtaggccaaccctcggaagcccaagcccttcttctttcatttcatccctgggaactatgtccaccaagaagtcatagatatcagtcctggtgatggcagctgcaatgtcattcttctgcaaggtccggcgcttgttctcctccgtgtgcatccacgacctcaatgttaactctaatatgaatacctcgcatgcctttgcgaagacaacgggggcttctgccgagatcatccggacatcctcatcagccttcattatcttctttatccttgcgagtggcaagctgtggttcttgaagtcggttgtttgctcaatctcttccatttggttagcccagaactcacggagttgctgctgttgctgttgctgcagctgctgatgaaattgctgggcttgttggtagactagctggtgctgagcactgagttgagctggattagtggggaatggtgctgatggctgtgagccaggaggaacaacagcaggagctccaggaaccatggcttgaggtggatatgcagcagcaggaggaggatatgcttgtgacccaccagtggcaacacccatcacaggctgaggctgtgaggatggttccatgtcagctcttgtccgtccaaagccaaaggcccgagagacgacgcccggatctcccgcgccggcgggagcgggagcggcggcggcggagagcgctccctccggcgaagggccgcgccgcccacctccctctcgtggagccctcggcgtcggcggcggagagagagagagagagggagacgcggtcgccctcgggccgattcctgcagcccggg

SEQ ID NO: 9971 - DNA, 332 bp, Oryza sativa
  Clone ID: PAT_MRT4530_16337C.1
tcgcccacgcgtccgcccacgcgtacggtcagccgcagcagcaccgaggacgaggacgagctgataatactaggcgatgccgaaatacaagcgcagctgacctggaacgttatccaagaccaatatgaggcctggattagagcgcacgggctgagctcgtaccgatatcaaagatgcctgagagcactacgctaatgcctatgtctctgcctactgtaacatgaggaatcagaggctaaagggcctcatagagtagatctcgtactccagcaggatattccttgctggatagaaggtcatgcagatagcgttggggcacacagctgctgatg

SEQ ID NO: 9972 - DNA, 732 bp, Oryza sativa
  Clone ID: PAT_MRT4530_16338C.1
atgaggaagaaaggaagaggggagaggggcatcgagctcggcggaggccaggagggcattgcagacgcgcaacagggagaaggggatggacctcggcgtggacggctggctgttgccatggacaccaccacgagcacccacaatgtaggctgcctcgacagagagaaaaaagagaggggtgaggtagccttctttatttatttatttttggattggtttatcagacaccacgcggtaggacaaaaccactctggattgggtcaaggggacgcagtcgtcggggtagcggacggggtcggtggtgggggtgccgaagttgatgcgggtggcgagggagaggaagaaggcaccctcgaagatgaaggggtgaccgttggtggtgttgatgaggaggccgagaacgagcagatgcacctcatgaccttcatggaggtggccaagctgaggtgtattgatgtcacgatttttttcgtggcaacaaatgatttttctagtagtgactcctacaccgagtacctcaaggacatcgaggccggcaagattgagaacgtccccacgccaccgatcgccatcgactactggcggctccctgccgacgccacgctcaaggacgtcgtcgtcgttgtctgcgccgatgaggcgcaccaccgcgacgtcaaccatttcgcatcggatgtgcatttccaggggatggatctcaaggatacgcctgccctgctcgattatcactga

SEQ ID NO: 9973 - DNA, 6123 bp, Oryza sativa
  Clone ID: PAT_MRT4530_16339C.1
tggcatagcagtgttccactcccaaagatccttgaattcgtcacttgccgctagggcaacctctgggtcgaagaaatctcctttcacatgacagtacttatggtggatgaagtggcacagatcacgctggatatttgtgatgcctgtatcgtcaaagcttgttcgacattctaatcttggcaaatcctccgcgttagtcttgtacctcacattaaccctaaggaattcgcacgcataatacttgcaacggaccgttcctcgcagttgcttgtgacatagcagcttctcccttgttcgggtctgttctccacccttgaacttgtagtattggtacgcatactataagattgttagaaactctttgtattgcttgtgactgtaatcgagagggtccaagactaccacggttccgtctttagggtggatgagtaaacagatataatgatcgttaaaattataagcggccatgacgactctcttattttgaaagtgcaagaaggctcgtccaatgtactgtgtgacactaatcaatttctccttgtgcaagcccttcttgtattcagctatctcttttggattcttgcccttcagctggtcagaccctggtgctaacctcacggtatgctgtgtttggcagatccgagttggatccaagaagtcgataggttcttttttcttcttagcatccatgtattgcatcatgcaccaaacaccaacatagttgatgtccatcttaccccgacgatatatggcgtggagatctgagaaatctagccatacgtaaccttgttcgctgaaataatctgccggtgatcaagctgttatattgcccaagcctttcttgctagcctccatgtagaaggtatgtaaccttctcatctcccatggtccttccttcagtgcccatttcggcaagagtgatttcccatgttcgtacttttccgggcaatcatcagttgtgaagtatgttggcccggttagttcagcggccttctggggttcatcatctctgagcttggcacgttccttaccacctctacagacggttaccatgaacttctccttgttctcatctttggacttggagtcgtggctcctaaccactctaggcacctcagaactggtagtggccttctcagggaccgtggtctcttgcacctcggggtctttcgcaggagaagggtcttcaaatatttctggctctgtaacatcccattccaatcctagtacttcttctatttctgtcccgactgatgccacaacttgcacctctggttcggtcactttaatctccatttggacatctggcactgcaatctccatgggcacctccggcacttcaatctccggtggcacttctggcactagattttccttatgcatctcgggttcctccgccttatcagtcaccttcttcttaggaggtcttggaggttttcccaaccccggttttggcaccagaggttttcgcgtggcgtcggtgcccaatccaaaggatatgtcattcttgtgccagataattacaatatcgaccgcatccccaagtacggatacaccatctgcagtagggaagtcaatgtcataggactcaaacccttcgtggaccacttgttgctgcactttggcatacgcatcgggtatgaactcttcattatatgttctctcagggatagcaatggctgtaacggcctcaagagttcaagagttttcccggagcgtccaatgggaacgtgcaatctgcagggtgtattctccttgaggtcatcgaaggggtaatctagctctggttctttggtttcggggcgaggcaaaagcatgtgcttgacgtagaaatccatcatttgcctttcaaaatccgcagccccttcatctctaagtttatccttgtacgcatcacgcttcttgtgggggtcatgtttgaacccttccttccaactcatcttggacgacacacctcaaaccctacccccatgccaattccttgatctctgtgtccatttctccattggtaccggaagccccgccttcctcatttcctcaccctcttttgtccactgctccacctttggtgcgtatcccgtgaagcctaagcgatgaggaaatttgttatttttggccaactctgaatacttttggctcctttgaatttcttccggggagttcttcaacgtcagaaagtcctcccactgattcggggttatgttggcatacgtcgaaaacggtgtacgtcccgtcttcacaaatttcttgttcaaggtggttttccaaccatgccaagacttggccattgtttgcagagcacaattcctcactgctgcctctgatccatctgggaactggaagattttctttaactctttccataggacttccttatccccattcgatacatgatcctagtccccttctatagggggaatgtagtcattgtcgccttcttcactgtcgccctttttccttctcttcgggcttgggcttggacaaggatcgcttggcgacgagtactcatcgtcttcgtcagctacgtcgctgtcggaactatcttccggtgggaccgttggttctggagcaactacaacagcaagggactactcttcctcccctaaacccttctcttcagtccctttagtactatctgccatcgtttcaaacttgttcgtagatgacgaacggccgacgacgagcttcggtcgtggacaacgaacgaaaggccgatgacgaggttcggccgtggacgacgaccggctgatgaagccattcggccgaggacatcttcgctcgtggacgacgataggccgatgaagccgttcggccgcgagaccgcgactgcgagagagagaagcggctggcggcggtggagaggccggcggcgcggtgaaggggcctggggggaagcggccggaggcggttgatgggccgacggcggcgatgcggtggacggcggcggcgacggagcggtggagcggcggcaaaggcgcacggttacgccaaaatttctagggttcccgcctggacttagaaattttggcgccgtggtcttgcccttatatagggaaaggatcttcgcaggtggacggtccgcctccaaagatgtaaacccctttaacattttttcccacaccgtccgtgcgcatgtaaggcttcacggtcttctgagtagatgtctcgacattcttaatcttccgtacaaactgatggcacttaaatatggggaattgcattgtgtgcccatagtcgatttcccatatttcttcaataaacccgaagtatgattgtttttccccggcttcatcaattgcctccacacggacatcactgttttgtgtataggtgttattatctcgggcccttgtactaaacgagtatccattaatgtcatatccctgccaagaatttactgtagttgatggaccacaagccaaccgcttcatagttatttcatcggtagtttgtccctcaggtaagtctaggtttcgcaaccaattgttagctcgtattagttcgatatattgatcggtgtaaggctcaacaatagcaaactgataaaggacgttgaagtgagcttcttggaatgatttgtgatcatgggtgacgaatctcttctttcctatcgttcccctgccactcaatctgccctcatgttggggcacaggtactccaattgcatatccatctttgaggtaatcgatacagtactcgacaacctcttcagtactataaccctcaactattgatcgctctggatgtgcacgattttggatgtaacccttcaaaaccgccatgtaacgctcgtatgaccacatttgatggaggtacaatgggccaagcgcaaccatctgcggcactatgtgaacaatgaggtgctccatcatatcaaaaaatgacggagggaaacacatctcaagttggcactgtttctcatgtgcgaatgtacggagatttcctaactcttcaagactaatgaccttctgtgacactgcgttgaaaaagtagcacaaccttgtgatagcatcctttaaatgctcctgttttatggcccttattgcaattgcaagaaacatggtgaccaagacatgacagtcgtgtgaattataaccagataccgacaaatctttcatggaaactagtcgactgatgtttgatgagaaaactatgggcactctgacatcacggagtgacttgcaaaatgacttcttctcctcaggagtcagtgtgaaacaggccggtggaagatatactttgccattcttctctccttcttgagggtgtaactcttccctggttcccatctcgactaggtccatccttgattgcagaccatctttagtctttttcggcatgtccaacaatgttccaactatgttgtcaaacacattcttctctagatgcatcacgtctatggcatgccgaacttctagatctttccagtacgggaggtacttaaagaatatggaatacttcttgtatgggggagggagtttatcatcttgcttcttactatcccctggtttcgtagttttctcgggtttcttgcgctttgtcccctttgatggtttcttagccacttttccaaactcgcaaacaattttctttgtcattgcacacactttttcccccgatgtaggctttggtgcaggattagtctcttcagtgccatcgaactccgccttcatcttgcggtacttgtgatttgtgagtaggaaccgtcggtgccgcatgtacacaagcttgttggaacccgggagatacctatagtacgttccattcaagcagatcacacatcctgttttacctttaatttgacctgaaactgaaaacattgttggataatcgttaatggtcacgaagatgatggccttcactgtgaagtattcccttcggtactcgtcctacactttcaatccttcttttcataaatcagccatatcttccaacaatggttcaagaaatatgtcaatatcaatacaaggctgacggggtccctgtatgaggatacagagtagtacgtattttcgcttttgacaaagccaggtaggaagattatacatggtgagaagcactggccaagtactatgtgagctgctcatgtctccaaaagggttaactccatcagtactcagggcaaatctaatgttccatgggtgtttagcaaactctctatactgagcatcaaagtttatccactgacgagcatctgccgggtgtcgaatcatcccatccttcttgcgcccttcttcatgccagcgcattagtaccgcatctcgtgggtttgagtatatccgtttaatgcggtctttgacaggaaggtaccacatcacaagctgcgggatttttctctgtcttccctcagttgtgtcagacggttctaggccagtattgctattcgatttgtaccggctagcaccgcatgttggctattcatctaaagaagcgtactatttcctgtacagtatgcagtgattaatgcacgcatgaatcttttccacaccaagtgaaaggggacatgagtttcttcgcttgatatgtgctggatggtagtgagttaggcctcgggagcattttctgcagaagttctaacagactatcgaaactggtatcagaccatccatgtctcgcctttaacctcataagttcaagaactgaccgtagtgttgtgaactcgctgtcacagcccttcgactcatcgtacaaaacttccttagctgccttctgtaaagcttcaaagttatttaaacctctagccgaccccatcagcacctcgggttctgcatgacataacatttcctctaggtcgattttatcctcaacagaaccatcgtcatgcaccatgtcttcaacttgtgtcggtactacattttcaggcccgtcgacttgttctttgccatgatgtgtccatatttcgtatttgtccataaatccacgagttactaagtgctccttcactttaaaagcatcatcgaagtcccaggctatttcattcttacagtcagcacatggacaaattatcttcctcatattgttcttgtcagcgtgtgccttggcaataccaataaatttagacacttcgtttctatatggggacaaaaacctcggcaaatgatacatccattcccgactttccat

SEQ ID NO: 9974 - DNA, 3109 bp, Oryza sativa
  Clone ID: PAT_MRT4530_1633C.1
ccacgcgtccgatccaggcaaagtcaacggaaaaaggccgaagatcctagctcaatattcaaggaatagattcccttcattactcatgttaatgttgggaggggcaacccactatactcagctcgtggatcttcatgaatggagctgccagcatcataatgacaaccaaataggagtacaagataaggaataatactccgagtctctgatccaactcttctgctcatgaaacttacaaacaccaagtcagttgactgctgcaagcagtatggtctctgtagccaatgcacatatagctctcccatgagtgtttcatgctggtggtcatatactcgtattaacaatgcgtgttagatgcaccgagttgctagcagtgtgaaggagtaatccttctcgtttgctgcttgcattgtaaaccttgcggtttcacttttaactgatgttttgttgttgacgatctcgcaggtcgactgatagatgcattgcggaattctgtgtggatgcaaagctgactcaacattgtttagcttttataacagatggcttcaataggggctgcgctatctgggttaaagaacagcagcttcaccacaatgggtgctgagaagttgcctgatcagatgcatgatctgaagataagggacgataaggaagttgaagcgactattattaacggcaagggaacagaaaccggccacataattgtcacaactactggtggcagaaatggtcagccgaaacagacagttagctacatggctgagcgtattgtagggcaaggttcatttgggattgtcttccaggcaaaatgtctggagacaggtgagacagttgctatcaagaaggttcttcaggataagcgctacaagaaccgtgagcttcagaccatgcgccttcttgaccacccaaatgttgtagctctgaagcactgtttcttctctacaactgagaaggatgaactgtatctaaacttggttcttgagtatgtgcctgaaactgttcatcgtgttgtgaagcattacaacaagatgaaccagcgtatgccacttatctatgtgaagctgtatatgtaccagatttgtagggcattagcttacatccataatagcatcggagtttgccacagagatatcaagccacagaatcttctggtaaacccacatacccatcaactcaagctatgtgactttgggagtgcaaaagttctggtcaagggagaaccgaacatatcgtacatttgctcccgatactatagggctccggagctcatatttggtgccaccgaatacactacagctattgacatctggtctgctggatgtgttcttgctgaacttatgttagggcagcctctgtttcctggtgaaagtggtgtagaccaacttgtggaaatcatcaaggtccttggaacacctacaagggaggaaattaaatgcatgaatccaaactataccgagttcaagtttccacagattaaagcacacccatggcacaaggtgcaaagtctatctatttctgttgttatactttcagcaatcgtccagtatcaggtggaagcacttgttcacccattctttgatgagcttcgagaccctaatgctcgccttccgaatggccgctttttgcctcctctcttcaacttcaagcctcatgaactgaaaggaatcccatcagatattatggcgaaattgatcccagaacatgtgaagaagcaatgctcctatgcaggatctcttttcgcccaacagcagaaactgctggagggagaagatcagaattcagaagagttgtcgagagagagaagagaagccgcggaagggggaaaaaagggaggcggcggaaggggatcggagatgccgctgggcaagtactactgcgactactgcgagaagcagttccaggacacccccgccgcccgcaagcgccacctcgacggcgcccagcaccaccgcgcccgcgccctctggggacgtgcaagtttggggattcatgtagatacttccacccgaagccacctcctgctaatccaggaccagctccttctggccctgtctctggaccaatggcgcagcagtctaatattcaaggaagtcaacccaattttgttggatatcaggcagcagatggaagttctttctcagcatgttttccatccagtcacctgtcatgccatgaataggacactttgcacctgccaggttgccatgcaatcattggatgtactcctttatccatggaacattctagggggtcacacctcatggggcaacttgcctccatcactgcggccacctcctgaaggcggctatcctccatttccttttgtagactgggggagaagactaaaggattttactcacctccctccaagaaaaagaactacaataggcctcaactatagaccagtggctgctcgatctggaccttcctccagccttaggctggacaacggagctggtcagccagctaatcaatgtctggagtgcggtacacaacgtacatttcacagaaaatgaggaggacaagatagtgtggaagctcactggccatggtgaatatacggtgacgtcggcctacaaagcgcagctcttaggtactacagccaccaacttcaacatcataatatggaagccgtgggcaccacgcaagtgcaagacctttgcctagttgattatccaaaatagagtttggacctccgacagactggcaaccagaggttggcagaacgattatttctgccccttatgtagacacacccaagaaactgctctccaccttcttgcagaatgcagatacaccaagaaaatctgggcggcgttatctgattggactgggtgtggtcaactaaatcccggtcaatggcaactagctcaatcggtgttagagtggtgggaggccaccgccaacttgaaggaagccccaaagaaagcacttcacacgttaacacttctggtcaactgggaaatctggaatgagagaaatcgtagaatttttcagcacaaagagttatctaccggaagtctgttggccaaaattaaaaaggaggccaaaacaatggtctcgggcgggggcgaggcatcttggtagctggcttgctttttatttttag

SEQ ID NO: 9975 - DNA, 687 bp, Oryza sativa
  Clone ID: PAT_MRT4530_16340C.1
atggggagctcttttggtgagacgccagcggtggcggtaatggaagaagatgttccagtgacaaagctccgtgggagttgcgacatggtggctgtgggaggtgacgataaggccgcgttggagactggcgggtctggactggccgacaatggggcactgccgtgcgccgccgtcgctccagccgtcgccgtcgctcggggaggtcgtcatcgtggtcgccaagtcgccgccgtcctcgtccgccccttcgccgccgccgaagaccgccggagcaccgccgtcaccgtcgacccgaagaccgccgccgtttcttcctcgtcgccggcgctgtccgttgctcttccgccgcttctttggtcaccgagcgcggcgaggaaggtggggcagagccgggcggagtgtggcgcgccggtgggcgagggaggccggggatccggcaccgcggtggccggatctggccgcacggcgcagggctgcggctgcagtggcgcgagggctgcgcggcggtggacggggcggtggcgcgagggccgcgcggcggcggaggaggcggcgttgcgagggccacgcggcggcagaggcggcggcacgagggccacgcggcagcggaggcggcgtcagcgcgagggccacgcggcggcggcggcggcggtgacagcgccggctccagtgcaagaacgagaatga

SEQ ID NO: 9976 - DNA, 4223 bp, Oryza sativa
  Clone ID: PAT_MRT4530_16341C.1
ttgtttgcgagtttggaaaagtgactaagaaaccatcaaaggggacaaagcgcaagaaacccgagaaaactatgaaaccaggggatagtaagaagtaagatgatagttcgaagccagatgataaactccctcccccattcaagaagcattccatattctttaagtacctcccgtactggaaagatctggaggttcggcatgccataaatgttatgcatctagaaaagaatgtgtttgacaacatagttggaacattgttggacatgccgaagaagactaaagatgttctgcaatcaaggatggtcctagtcgagatgggaattagggaagagttacaccctaaagaaggagagaagaatggcaaagtatatcttccaccggcctgtttcacactaactcctgcggtgaagaagtcattttgcaagtcactccgtgatgtcagagtgcccataggtttctcatcaaacatcagtcgactagtttccatgaaagatttgtcagtatctggttataattcacacgactgtcatgtcttgctcactgtgtttcttgcaattgcaataaaggccataaaaccggagcatttaaaggttgctatcacaagattgtgctactttttcaacgcagtgtcacagaaggtcattagtctcaaagagttaggaagtctccgtgcattcgcacaagagacacagtgccaacttgagatgtgtttccctctgtcattttttgatatgatggagcacttcattgttcacatagtgccgcagatggttgcccttggcttattgtacctccatcaaatgtggtcatacgagcgttacatggtggttttgaagggttatattcgaaatcgtgcacatccagaaggatcaatggttgagggttataatactgaagaggttgtcgagtgctgtatcgattacctcaaagatggatatgcaattggagtacctgtgccccgacacgagggcagattgagtggcaagggaacgataggaaagaagagattcatcacccatgatcacaaatcattccaagaagctcacttcagcgtccttcatcagtttgctatcgttgagccttacatcgaacaacatatcgaactaatacgagctaacaattggttgcgagacctagacttgcttgagggacaaactaccgatgaaataactatgaagcggttggcttgtggtccatcaactacagtaaattcttggcagggatatgacattaatggatactcgtttagtacaagagcccgagataataaaacatgtacacaaaatagcggtgtccgtgtggaggtaattgataaagccggggaaaaacaatcatactttgggtttattgaataaatatgggaaatcgactatgggcacacaatgcaattcaccatattcatgtgccatcagtttgtacagaagattaagaatgttgagacatctacttagaagaccatgaagccttacatgcgcacggacggtgtgggaaaaaatgttaaaggtgtaaaaatcttcgcaggcgggcgatcttcgcaggcggaccgtccgcctacgaagatcgtttccctatagaaggacaagctcgcggcaccaaaatttctaagtccaggcgggaaccctagaaattttggcaccaccgcgcgcctctgccgccgctccaccgctacgccgccgccggcccatcaaccgccgccggccgctcccccccccggcccctccaccacgccgccggtctctccaccgccgccggccgctccacggccgccgccaccatctctctctctctctcgcagtagcagtctcacggccgaacggcttcatcggcctttcatcgtacacgagtgaagacgtcctcggccgaacggcttcatcggctggtcgtcatccatggccgaacctcgttgtcggcctttcgttcgtcgtccacgaccgaagctcgtcgtcggccattcgtcgtccacagacaagtttgaaacgatggccgatagtaataaagggactgaagagaagagtttaggggaggaagagcagtcgcttgctgttgtggttgctccagaaccaacggtcccaccggaagatagttccgacagcgacgtagctgatgaagacaatgagtactcattgccaagcgatccttgtcaaagcccaagcccgaagagaaggaaaaagggcaacggtgaagaaggcgacaaggactacattccccctatagaaggggactgggatcatgtatcgaatagggataaggaagtcctatggaaagagttaaagaaaatcttccagtccccggatggattagaggcagcagtgaggaattgtgctctgcaaacaatggccaagtcttggcatggttggaaaaccaccttgaacaagaaatttgtgaagacgggacgtacaccgttttcgacgtatgccaacataaccccgaaacagtgggaggactttctgacgttgaaaaactccccggaagaaattcgaaggagccaaaagtattcagagttggccaagaaatacaaatttcctcatcacttaggctccacgggatacgcaccaaaggtggagcagtggacaaaagaggaggaggaaatgaggaaggcggggcttccggtaccaatggaggaatggacacagagatcaaggaattggcatgggggtagggttcgaggtgtgtcgtccaagatgagttggaaggaagggttcaaacatgacccccacaagaagcgtgatgcgtacaaggataaacttagagatgatggggctgcggattttcaaaggcaaatgatggatttctgcgtcaagcacatgcttttacctcgccccgaaaccaaagaacctgagccagattaccccttcgatgacctcaaggagaatacaccctgcagattgcacgttcccattggacgctccgggaatactcttgaggccgctacagccattgctatccctgggagaacatataatgaagagttcataggcaatgcgtatgccaaagtgcagccgcaagtggtccacgaagggtttgagtcctacgacatagacttccctactcaagatgctgtatccatacttggggatgcggttgatcttgtaattctttggcacaagaatgacatatcctttgaattgggcaccgacgccacgcgaaaatctgtagtgccaaaaccggggttgggaaaacctccgagacaacctaagaggaaggtgactgataaggcggaggaacccgagatgcataaggacaatccagtgccggaagtgccaccggagattgcagtgccgaaggtgcccatggagattgtagtgccagatgtccacatggagattacagtggcagagccagaggtgcaatttgtggcatcagtcgggacagatatagaagaagtaccaggattggaatgggacggtacagagccagaaatatttgaagacccttctcctgcgaaataccccgaggagccaccattccaagtcaaagatgagaacaaggagaagttcatggtaaccgtcttcagagggggtaaggaacgtgccaaactcagagatgatgacccccagaaggccgctgcactagccgggccaacatgcttgccaactaatgattgcccggaaaagtacgaacatgggaaagcactcttgccggagtgggcactaaacgaaggaccatgggagatgagaaggttaaataccttctacatggaagcgagcaagaaaggcttgggcaatataacagctcgatcaccggcagattgtttcggtgccgaaggttacgtatggctagatatctcagatctcaacaccatatatcatcggcataagatgggcgtcaactatgtcggtgtttggatgcaatacatggatgctaagaagaaaaaagaacctatcggcttcttggatccaactcggatctgtcaaacacagcataccgtgaggctagcaccagggtcaaaccagctgaagggcaagactccaaaagagatagctaaatacaagaagggcttgcacaaggagaaattgattattgtcgcacagtacattggacgagccttcttgcactttcaaaataagagagtcgtcatggccgcttataattttgaggttaatgagaggtacagggttaacgcagaggatttgccaagattagaacgtcgaacaagctttaacgatacaggcatcacaaatgtccagtgtgatctgtgcaacttcatacaccatgaatgctga

SEQ ID NO: 9977 - DNA, 178 bp, Oryza sativa
  Clone ID: PAT_MRT4530_16342C.1
tgacaaaggcacagtgcaattgactgcagaggatcctgatctaccgatcattccccaggcaatccctctccctcctctaccactttgtggaggcagttatgggcttgcgacagagactgaggcgacaacctactgtggatctgttgtatggctgtgctccttcttgaagcgcggctag

SEQ ID NO: 9978 - DNA, 4203 bp, Oryza sativa
  Clone ID: PAT_MRT4530_16343C.1
atggccggagcaccgacgagcttagggttctccgtcaggcgccgcgagcgcgagctggtggcgccggcgagaccgacgccgtacgagttcaagatgctgtcggacatcgacgaccaggacatcctccgcttcaaccgctccggcatcagcttctaccgccacaaccccaatcaggacggcgtcgatcctgtcacggtgatcagggcggcgctctctgaggcgctcgtacacttctacccgctcgccggccggctccgcgagctgcggcccaccaggaagctcgtggtggagtgcaccggcgagggcgtcgtgttcgtcgaggccgacgccagcttccgcatggatgacctcggggacggcacgtcgacgtcgtcgccgctgcttgcgccgccggtgccgtgctacgacatgctgctgtgcgaggcggagagcccgacggcagatgtcgtcgaccgccccctgctgtttgttcagatgactcggctggcgtgcggcggcttcgtgttcgggatgcacatatgccactgcatggcggacggctccgggatggtgcagttcctgacggcggtgaccgagttcgcccgtggcgtgccgggcgccccgacggtgccgccggtgtgggagcgcgaggcgctcaccacccgatcgtggccgccgaccgtcacgcgcgaccacgtggagtacgcgcccctgcccgtcgacgacgacgacgacgacgtgctgctctccctctccccgtcgaccaacgcgtacgcgcaccacgtcttcttcttcggagatcgggagatcgcggcgctccggtcgcaggtagtggcggcctgctcgcggttcgacctggtgggcgcgttcatgtggcggtgccgcaccgccgcgctgcggcacggccggggcgacgtcgtccgcctgaacatgttcgtgaacgcccgcgtgaggaaccggcccgtgccaaggggctactacggcaacgcgatcgtgttcgccagcgcgtcggcgccggcgggggagctgtgcgggaggccactcggccacgcgctgcggctgctcgtggaggcgaaggcgcgggcgtgggaggacgggtacgtgcagtcggtggccagcttcaacgctgctcgccggaggccggcgttccccaagggcgccaggacctacttcatctcggacatgacgcgggcagggatgacggacatcgacttcggctggggaaagccggtgtacggagggccggcgacgacgatgctggccacgtttcacctccaggggaggaacgaggctggcgaggcaggcatcgtggtgcccataagtttgcccagtccggtgatggagaggctgatccaggaggtggacaaggggctcaatgccggagctgctgccgtgctagacgacgcaaaagcaagggtgagatatggaaagtcaggaatggatgtatcattggccgagggaccccgtcagcctggtattgatattgacgtatttcttgaaccattgttggaagatatggttgatttatggaaagagggattgaaagtgtgggatgagtacttaagggaatacttcacagtaaaggccatcatcttcgtgaccattaacgattatccagcaatgttttcagtttcaggtcaaattaaaggtaaaataggatgtgtgatctgcttgaatggaacgtactataggtatctcctgggttccaacaagcttgtgtacatgcggcaccggcggttcctacgcacaaatcacaagtaccgcaagatgaaggcggagttcgatggtactgaaaagactgatcctgcaccaaaaactacatcgggagaaaagtacctctcgtactggaaagatctagaggttcggcatgccatagacgtcatgcatctagagaagaatgtgtttgacaacatagttggaacattgttggacatgccgaagaagactaaagatggtctgcaatcaagaatggacctagtcgagatgggaatcagggaagagttacaccctcaagaaggagaaaagaatggcaaagcaattaatgaagccagggaaaaacaattatacttcgggtttattgaagaaatatgggaaatcgactatgggcacacaatgcaattccccatatttaagtgccagtgggtaaaatacccgaacggggtcaatgttgataagttcggtcttactattgttgacctggcgagtgtgggtcacaaggatgacccttggaagattaagaatgtcgagacatctactcagaagaccatgaagccttacatacgcacggacgacggcccgcttgcgaagatagtaaaaaagatcttcgcatcttcccaggcggaccgcccgcctgcgaagatcgttgcccaatataagggcaagcccgcggcgccaaaatttctaagtccaggcgggaaccctagaaattttggcaccgtcaggctgccgaaatttttcgccgccgcacgccttcgccgtcctccgccgccgcccgcctgcgaccttcactctccgaccgtcgtcctccgccgccaccgaccgtcattgtccacgcgctgtcaccgagaccgccgccccttgccgccgctccaccgcgcgcgacctccaccactctgccgccgccgccgccgacccctccaccgcgcgcccgctccaccgccgccagctcctccaccgccaccggcccctccaccgccgtcggccacccctccaccgccgccggccgccacctctccctctatctcgctcgcggccgaacggcttaatcggccgatcgttgtccacgagcgaagtcgtcctcggccgaacgacgtcttcgaccggtcgtcgtccacggccgaacctcgtcttcggccgttcgtcgtccacgaccgaagccggtcgtcgtccacggccgaacctcgtcgccggcccttccttcgtcgtccacgaccgaagctcgtcgtcggccgttcgtcgaacacggacaggtttgaaacgatggccgatagtactaaagggactgaagagaagggtttaggggagcaggagctgtcccttgctgttgtggttgctccggaaccaacggtcccaccgaaaggtagttccaactgcgacgttggtgatgaagacgaggattactcgtcgccaagcgatccttgtccaagcccaagcccgaagagaaggaaaaagggcaacagtgaagaagacgacaaggactacattccccctaaagaagggtgtggcataatagtaagggaaaagatccccatcacggtcaagtactgggattatgtatcgaatggggataaggaagtcctatggaaagagttgaagaaaatcttccagttcccggatggatcaaaggcagcagtaagaaattgtgcactgcaaacaatggccaagtcttggcgtggttggaaaaccaccttgaacaagaaatttgtgaagactggacgcacaccattttcgacgtatgccaacataacccccaatcagtgggacgactttctgaccttgaagaactccccagaagaaattcaaaggagccaaaagtatgcagagttggccaagaagaacaaatttcctcatcgcttaggctccgcgggatacgcgtgggagaaagatgtgctaagtacggcgctgggtactcctgagcatgggggaagggttcaaggtgcgtcgagtaagatgagttggaaggaagggttcaaaaatgacccctacaagaagcgtgaagcgtacaaggataaacttagagacgaagggactgcggagtttgaaaggcaaatgatggatttctgcgtcaagcacatgattttgcctcgccccgaaaccaaagaacctgagccagattaccccttcgataacctcaaggagaatacaccctgcagattgcacgttcccattggacgctccgggaaaactcttgaggccgctacagccattgctatccctgggagaacatacaatgaagagttcatacccgctgtgtatgccaaggtgcagccgcaagtggtccacgaagggtttgagtcctacgacattgacttcccgactgcagatggtgtatccgtacttggggatgcagtcgatcttgtaattctctggcacaagaatgacatatcctttggattgggcaccgacgccacgcaaaaacctgtggtgcctaaaccggggttgggaaaacctccgaggcctcctaagaggaaggtgactgataaggcggaggaaccagagatgtaa

SEQ ID NO: 9979 - DNA, 1395 bp, Oryza sativa
  Clone ID: PAT_MRT4530_16344C.1
atggcggctctaccgaggcgaaagcgtaagcgcgggttaggcaaagccgcgggagcacgaaagagggctcgcgagcagcaccccggtgtcgccaagctacgaaagcagcatggaagcacattcgaagataggataagcgaactacctgatgacctcttgatcacaattttaggtcacctggacacaagatcatcagcagcaacaagcgtgctgtcaagaaggtggcaacacttgtggaagagcgtcccaaagcttcgattctcacagcatgacatagtgccacaaacagagctatctcgtttcttgagagcccacgaatacgttttcttcaagccgtcattgtgctcatggaagcggcgggtccgagttaatttagaccgtcgtatcaggcttactgacatgtatagaacacgcatattctctagctcattaactggcttcctacacaaatcaaatgctggcgacaagaacaacacaaaaatctcgagccttttcttgtcttgcaccatggaggatcgttatgtcaacctggttgacaaattggtcagcattgcagtctgccgaggagttgaagatctgaatctgacaacgagtttttattacgatggtcaaagacgtagcaccactccgtatgaattccctttatccttgttcactgacggcaagggattatctctaacagaactaaaactttgcgagtgcaccctcaatattcccataggactcgatgggttcaaatctttggtcaagctatcattaactcgaatgcctatctctgaagacatgattcacacactttttgaaaattgtctgaaactggagtgctttcacctcaaccattgctggggtgctaaccatcttttcgccgggccgggtgctaaccatctcaagattgcatcacatgatttgcagctcagagacattatggtaaacagttgcgaacagatcacacacatggagcttgttgcacctaaattgcatcagttcagatacagaggtccatccatatcaatgatgcttggctcagtgccctccattgagcatgcctgtctacactacgaagatagcagggatggtgaatctgtcaagtacattttaggaaagttgtctcaagactttcccctacttacaagcttaagcatagattttgacacttacgagttgaagaatccagtaattcctggaggccttcccacagcatttaagaacctgagaagtctcatgctgagagtgacaatgcactctaacgacgaccttgcttgggcaactatgctgttggaggtggcacctgccctcgaaagttttcagatagaactcatttccaacaagaaacgagagcacccaggcggcgtgctgtgggagccatcagacttcgagcaccatcgtttgaggcag

SEQ ID NO: 9980 - DNA, 2468 bp, Oryza sativa
  Clone ID: PAT_MRT4530_16345C.1
atgccgggaacggttttcgttgtctcacgtgagtcgtgcttctcggcagccattcaaatggtcacggagatcactggtgccgcggggtggaagggcacggatctcagcttgtgcgttgagaaaaacccagcaagcttgcaaggacaagatttagccgcactaggatcctcctcgggcttggatgtcgtcgacgttccgttctccgctcctacgggaggatccttcgacatggagtcgtccgaggttgtagccacggcgttctcgcttccggtcaatgatggaccagtcgagaccggcactgtggaatccgactattggcgacgtgataattctcttaagggcataccaaatttcaatgttaacaagtgcggccacttcttccatgcgggatgcatcgaccgttggctccgcaagtatcggcggtgcccgctgtgccgcggcgggctgtcgtcattgccgctgcttccgaaacctgacttcgtggcgtcgtatttgttgttcattgagacctactacgtgttcctccagtccggcggcggcggcgcgttccaggctgtggtgtacaaatcggcagggcagcaggaccggtgctacctcgccatggtgcgcgcgccgtccaagatcagatatggcagtaatatatgtgagcaggttacgtcgtgcgcctgcaaagatcaatcttcgcaggcgacgcttatatggcccgcctgcgaagatatggaaagtcgggaatggatgtatcattggccgaggtttttgtctccatatagaaacgaagtggctaaatttattggtattgccaaggttcgcgctgagaagaacaatatgaggaagataatttgtccgtgtgctgactgtaagaatgaaatagcctgggactttgatgatgcttttaaagtgaaggagcacttagtaactcgcggatttatggacaagtacgaaatatggacacgtcatggcgaagaacaagtagacgagcctgaaaatgtagttccgacacaagttgaagacatggtgcatgacgatggttctgttgaggacaaaatcgacctagaggaaatgttacgtcatgcagaacccgaggtgctgatggggtcggcaagagggctaaataactttgaagctttacagaaggcagcaaaggaagttttgtacgataagtcgaagggctgtgacagtgatttcacaacactccgaaaatgctaccgaggcctaactcactaccatccagcacatatcaagcaaagaaactcatatgccccctttcacttgggaccccgtcagcctggtattgatatagacgtatttcttgaaccattgttggaagatatggccgatttatggaaagagggattgaaagtgtgggacgagtacttaggggaatacttcacagtgaaggcaatcatcttcgtgaccattaacgattatccagcaatgttttcagtttcaggtcaaattaaaggtaaaacaggatgtgtgatctgcttgaatggaacgtactataggtatctcccgggttccaacaagcttatgtacatgcggcaccggcagttcctacgcacaaatcacaagtaccataagatgaaggcggagttcgatggtactgaagagactgatcctgcaccaaaacctacatcgggagaaaatgtgtgtgcaatgacagagaaaattgtttgcgagtttggaaaaatgactaagaaaccatcaaaggggacaaagtacaagaaacccgagaagaatacgaagggaggggaaagtaagaaacaagatgacagttcgaagccagatgataaactccctcccccattcaagaagcattccatattttttaagtacctcccgtactggaaagatctggaggttcggcatgccatagacgtcatgcatctagagaagaatgtgtttgacaacatagttggaacattgttggacatgccgaagaagactaaagatggtctgcaatcaaggatggacctagtcgagatgggaatcagggaagaattacaccctcaagaaggagaaaagaatggcaaaatggttgcgcttggcccattgtacctccatcaaatgtggtcatacgagcgttacatggtggttctgaagggttacgtccgaaatcgtgcacatccagagggatcaatggttgagggttatagtactgaagaggttgtcgacggtgtctgtgtggaggcaattgatgaagccgaggaaaaacaatcatacttcgggtttattgaagaaatatgggaaattgactatgagcacacaatgcaattccccatatgtaagtgccagtgggtaaaatacccgaacggggtaaatgttgataagttcggtcttactgttgttgaccttgcgagagtgggtcacaaggatgatccttggaagattaagaatgtcgagacatctactcagaagaccgtgaagccttacatgcgcacggacggtgtgggcaaaaatgttaaagg

SEQ ID NO: 9981 - DNA, 2368 bp, Oryza sativa
  Clone ID: PAT_MRT4530_16346C.1
gtacaaagtgctggaccggagtaatgctcgctccctctctctcctccgtgggaacgttggtgagcaaaatgctcgatcgctgtattctgtgcaaggttgtttgcactttgcaccagaaagctgaggcgatggagccgccggccctcgctagtggcatgcacacatttttttagagatatggaaagtcgggaatggatgtatcattgaccgaggtttttgtctctatatagaaacgaagtggctaaatttattggtattgccaaggcacacgctgagaagaacaatatgaggaagataatttgttcatgtgctgactgtaagaatgaaatatcctgggactttgacgatgcttttaaagtgaaggagcacttagtaactcgtggatttatggacaagcacgaaatatggacacgtcatggtgaagaacaagtggacgggcatgaaaatgtagttccgacacaagttgaagacatggtgcatgacgatggttctgttgaggacaaaatcgacctagaggaaatgttacgtcatgcagaacctgaggtgctgatggggtcagctagagggttaaattactttgaagctttacagaaggcagcaaaggaagttttgtacgatgagtcgaagggctgtgacagtgagttcacaacactccagtcagttcttgaacttatgaggttaaaggcgagacatggatggtctgataccagtttcgacagtctgttagaacttctgcagaaaatgctaccgaggcctaactcactaccatccagcacatatcaagcaaagaaactcatatgccccctttcacttggtgtggaaaagattcatgcgtgcgtaaatcactgcatactatacaggaaagagtacgcttctttagatgaatatccaacatgcggtgcaagccggtacaagtcgaatagcaatactggcctagaaccctcagaagcaactaagggacgacagagaaaaatcccgcagcttgtgatgtggtaccttcctgtcaaagaccgcattaaacggatatactcaaacccgcgagatgtggaactaatgcgctaacatgaagaagggcgcaagaaggatgggatgattcgacatccggcagatgctcatcagtagataaactttaatgctcagtatagagagtttgctaaaaacccacggaacattagatttgccctgagtactgatggagttaatccttttggagacatgagcagttcacatagtacttggccaggaccccatcaacctggtattgatatagacgtatttcttgaaccattgttggaagatatggctgatttatggaaagagggattgaaagtgtgggacgagtacttaagggaatacttcacagtgaaggccatcatcttcgtgaccattaacgattatccagtaatgttttcagtttcaggtcaaattaaaggtaaaacaggatgtgtgatctgcttgaatggaacgtactataggtatctcccgggttccaacaagcttgtgtacatgcagcaccggcggttcctacgcacaaatcacaagtaccgcaagatgaaggcggagttcgatggtactgaagagactaatcctgcaccgaaacctacatcgggagaaaaggtgtgtgcaatgacagagaaaattgtttgcaagtttggaaaaatgactaagaaaccatcaaaggggacaaagcgcaagaaacccgagaagaatacgaagggaggggatagtaagaagcaagatgacagttcgaagccagatgataaactccctcccccattcaagaaacattccatattttttaagtacctcccgtactggaaagatctagaggatcggcatgccatagacgttatgcatctagagaagaatgtgtttgacaacatagttggaacattgttggacatgccgaagaagactaaagatggtctgcaatcaaggatggacctagtcgagataggaatcagggaagagttacaccctcaagaaggagaaaagaatggaaaagtatatcttccaccagcctatttcacactgacacctgaggagaagaaatcattttgcaactcactccgtgatgtcagagtgcccatagtgtcacagaaggtcattagtctcgaagagttaggaaatctccgtacattcgcacatgagacccagtgccaacttgagatgtgcttccctccgtcattttttgatatgatggagcacctcattgttcacattgtgccgcagatgattgcgcttggcccattgtacctccatcaaatgtggtcatacgagcgttacatggcgattctgaagggttacgtccgaaatcgtgcacatccagagggatcaatgattaaggattatagtactgaagaggttg

SEQ ID NO: 9982 - DNA, 1361 bp, Oryza sativa
  Clone ID: PAT_MRT4530_16347C.1
atgtcgtttcgtgttgactcttgttacaatgtaccccaataccctcaaaacatggtctatgattataacccatcgacagtggcacgctaggtagggggacttggtgctcaaggtctcgctgagatggcttcaagctcaagaccttctaacaatgatagctaaaattgtcttggcctgggagatcctacccagccggcgtttgcatggactcaagtcgaatccttctgctttcccatcttcgccgcaactccaatcttgccttccctaataccagtcgggatcgagatcgccgccacgaggatgacggaaaataaccctcaaccgtctcctcctcctgtccaattagaaaagaaggcgctgatgacttcagcttctcggggaactcctaaggtggccaaacccccgaacatctgttaaggatcacgtgccaacaaggaaatcttcgcccaatcaccacacctggtgcttgatccgcaaggcgtctcaacactctctggtcgagtgtcgggtgatacttaatgtgaaggctgaacttgatgcttgtaaagatcgagctatccagcacacatctccatacaaggcatggtgcccgatccacaaatcgaaaagttacccccttaccggtagggagattactggatccatgatccatgtcccttgctatccgatccaccaacgccgagagcaaccttgagatgcatccgtggaagatatgcgaaatgggaactgcagatcgcctggtcggattcatcgacatcgatccttccgtccttcacaacttagatgaccaggaatcttcaggatccaactccccatgcgaagtgaatgtgatcgaaagagtcgtcgaggacatacacgaagagggcgagattctcgagccggttcgaactcctgccaaacacttcaccgtgcgtggtcaactctctactgaggtaaactccgttcgacccagtaaccttcccggaggcggacaactaggtcagacatatatagtcgacaatagccaacctcaactctgctttcttgaccgcagccgaaccaaccccgcaaggtcctgctcgagatccccgacaacataccgatgacagagtaacggagaacgaagttgccgaggacgcccacggtccccaccctagtcgagacctggaccgtactcctcaaaatgcatcatcaagaaggcccatcaacctcatccccgtctagatgaccgcgatcgtcacaaccacttgaacgggaggaggcaggagctcgaggaggaggtctggcgaggagcaacgacggatatggttttcaccacctgccgcctatgtcactttccatggggtttacctagggatgtcaattgggcgagaaccgttccc

SEQ ID NO: 9983 - DNA, 3138 bp, Oryza sativa
  Clone ID: PAT_MRT4530_16348C.1
aacctacggttcatatttatgaagtcttgttcggttaacaatcaaactagtgggtttgaaaaagattgaggagcataattccacagatatggaaagttaggaatggatgtatcattggccgaggtttttgtctccatatagaaatgaagtgtctaaatttattggtattgccaaggcacacgctgagaagtataatatgaggaagataatttgtccatgtgctgactgtaagaataaaatagcctgggacttcgatgatgcttttaaagtgaaggagcacttagtaactcgtggatttatggacaagtacgaaatatggacacgtcatggcgaagaacaagtggacgggcctgaaaatgtagatccgatacaagttgaagacatggtgcatgacgatggttttgttgaggacaaaatcgacctagaggaaatgttacgtcatgcagaacccgaggtgctgatggggtcagctagaggtttaaataactttgaagctttacaggaagctaaggaagttttgtacgatgagtcgaagggctgtgacagtgagttcacaacactacggtcagttcttgaacttatgaggttaaaggcgagacatggatggtctaataccagtttcgacagtctgttagaacttctgcagaaaatgctcccgaggtctaactcactaccatccattcacttggtgtggaaaagattcatgcgtgcgtaaatcactgcatagtgtacaggaaagagtacgcttctttagatgaatgtccaacatgcggtgctagccggtacaaatcgaatagcaatactggcctagaaccgtctgacacaactgagggaagacaaagaaaaatctcgcagcttgtgatgtagtaccttcctgtcaaagaccgtattaaacgggtatactctaacccatgagatgcggaactaatgcgctggcacgaagaagggcgcaagaaggatgggatgattcgacacccggcagatgctcgttagtggataaactttgatgctcagtatagagagtttgctaaagacccacggaacattagatttgccatgagtactgatggagttaatccttttggagatataagcagctcacatagtacttggccaggacctcgtcagcctggtattgatattgacgtatttcttgaactattattagaagatatggctgatttatggaaagagggattgaaagtgtgggacgagtacttaagggaatacttcacagtgaaggccatcatgttcgtgaccattaacgattatccagcaatgttttcagtttcaggtcaaattaaaggtaaaacaggatttatgatctgcttgaatggaacgtactataggtatctcccgggttccaacaagcttgtgtacatgcggcaccggcggttcctatgcacaaatcacaagtaccgcaagatgaaggcggagttcgatggcactgaagagactgatcctacaccaaaaccaacatcgggagaaaaggtgtgtgcaatgatagagaaaattgtttgcgagtttggaaaagtgactaagaaaccatcaaaggggacaaagcgcaagaaacccgagaagaatacgaaacaaggggatagtaagaagcaagatgatagttcgaagccagatgataaactccctcccccattcaagaagcattccatattttttaagtacctcccatactgaaaagatctggaggttcggcatgccatagacgtcatgtatctagagaagaatgtatttgaaaacatagttggaacattgtcggacatgctgaacaagactaaagatggtctgcaatcaaggatggacctagtcgagatggaaatcagggaagagttacaccctcaagaaggagaaaagaatggcaaagtatatcttccaccagtctgtttcacactgacacctgaggagaagaagtcattttgcaactcactccgtgatgtcagagtgcccatagtgtcatagaaggtcattagtctcgaagagttaggaaatctccgtacattcgcacatgagacacagtgccaacttgatatgtgtttccctccgtcattttttgatatgatggagcacctcattgttcacatagtgccgcagatggttgcgcttggcccattgtacctccatcaaatgtggtcatatgagcgttacatggcggttttgaagggttatgtccgaaatcgtgcacatccagagggatcaatggttgagggttatagtactgaagaggttgtcgagtgctgaatcgattacctcaaagatggatatgcaattagagtacctgtgccccaacacgagggcagattgagtggcagaggaacgataggaaagaagagattcgtcacccatgatcacaaatcattccaagaagctcacttcagcttgcttcatcagtttgctatcgttgagccgtacatcgatcaacatatcgaactaatacgagctaacaataagggtcgcaccaccgagtggataatgaaagaacacaagcgtctcttcatagattggttgcaagacctagacttacctgagggacaaactaccgatgaaataactatgaagcggttggcttgtggtccatcaactacagtaaattcttggcagggatatgacattaatggatactcgtttagtacaagagcccaagataataagacctgtacgcaaaacagcggtgtccgtgtggaggcaattgatgaagccggggaaaaacaatcatacttcgggtttattgaagaaatatgggaaatcgactatgtgcacacaatgtaattccccatatttaagtgccagtgggtaaaatacccgaacggggtcaatgttgataagttcggtcttactgttgttgacctagcgagtgtgggtcacaaggatgacccttgggtactcgccaatcgcgtggcacaagtgttttacgtgaaagacccatcaaatttgaagaaagatatagtgctaccagggaaacaaaagatattgggagtggatggggttgaagatgtcgaagattacaatcaatacgatagtatgccactttatagtcagtttgtacagaagattaagaatgtcgagacatctactcagaagatcgtgaagccttacatgtgcatggacggtgtgggaaaaaatgtt

SEQ ID NO: 9984 - DNA, 387 bp, Oryza sativa
  Clone ID: PAT_MRT4530_16349C.1
atgtcccttgctatccgatccaccaacgccgagagcaaccttgagatgcatccgtggaagatatgcgaaatgggaactgcagatcgcctggtcggattcatcgacatcgatccttccgtccttcacaacttagatgaccaggaatcttcaggatccaactccccatgcgaagtgaatgtgatcgaaagagtcgtcgaggacatacacgaagagggcgagattcgttttggagatgaaccgcgagctcctgttccaccacgtgaaccagtcgagccggttcgaactcctgccaaacacttcaccgtgcgtggtcaactctctactgagccgaaccaaccccgcaaggtcctgctcgagatccccgacaacataccgatgacagagtaa

SEQ ID NO: 9985 - DNA, 4599 bp, Oryza sativa
  Clone ID: PAT_MRT4530_1634C.1
atgtcatggcacagggctggtgtcctgctgctaggggctcagtcttgcctacctatcctggaggttccggccgtaggtagggttgggtcggtactcttgtctatggctaggatgggttggaaactatgtcacgtcttccgtccgtataccgtggtgatggccggcagcctcaaccgtcgtggcctggacctgactggcttcgttttggagctgcggggcatgtgcgttgtcctggggtatccgcatggagtggactaccagggcaagcagctcccggagcaggagggtgacgatgcagagccccacgctgcttgggaggtcactgcagtgatcctcactggctcacccgagaggacttcgttggcagtcaccgcgggtggagattctttctccgccgcttgccagaacgccgcactccttgccatcggcactcttcaccagcgctacccggacgagttgcagcactcgccctaccgctaccacccttgtcgaggaggagcccgcgactacgccaccttcagggatgctagctcggaggatgatgctaccatcatgcatctggcgcgcatggtggaggcgtacaacgcggcccgtatcgacttccatcgtatgctgaagaaggacttggacgcggtggaggcgcagctgtgtcagctcaagatcgcccagggagagatggtgacaaccaggagaagcgcggttaccggcgaaggcaatcaccccgaaggcagcaaccacagcaaccatggcagcccacctccacctcctcccccgccaccaccaccaccacctgacaccaaccccatcctcacccaaatcctcgcccagcaggccaacatgatggctgctttcctccaccacatccaaaatccgccacagcataatgctccacctccaccaccacccccgcaacattctaaactcgccgagttcctccgcatccgcccgcctaccttctctagctccaataaccccgtggatgccttggattggttgcatgccgcggggaaaaagttagacaccgtgcagtgcaacgatgaggagaaagtcatctttgccacccaccagctgcaggggcccgcatctctatggacccatgtgcccgccggagtcatggcccttaagaagagggaattccgggagttaaagcaaggcaaccactctgtgatggagtatttgcatgagtttaacagcctggcccggtacgccccagaggatgtttgggaagatgaggagaagcaggagaaattcctggcagggatggaccctgagctgtctgtgcgtctggtctccggggattatccggatttccagcgtctggtggacaacagcattcgcctggaagccaagcacaaggaactggagtcgcacaagcgtcgcttggcaaatttccgcaatcaacagggggctaaccaaatgatccgatacaccaatccctatccagggggatcctcctcgcagcagcagcagcaaccacgctccgcgccccgacctcaattcgtggtgcgtgtcccacagtcgcagcaacagcagagtcagcaaggtacccgtgcgccccgtcctcctgcgccagccgtgcagcttggacaaggccgcagggatgctcaaggtcaacaacgtctgtgcttcaactgcttcgagcccgggcactttgcggataaatgcccaaagccgaggcgccagcaaggccaagcgcctccccgacccaacaacggtggtaaggatgtcactcggggtcgtgtgaaccacgtgactgccgaggatgtgctgacaactccagacgtcatcgttgacaccaagaacttggatgtgatcctcgggatgaattggttggctcaattccaaggagtagtggatcgcgcaagacgcactgtcactctgtatcgggggcctgatcaaccagttgttttctttgcacccccaacttccgccggcagttcagtacttaatcagctaggattgccagaaatacccatcgtcagtgagttcggtgacgtgtttccggaagaactacccagtatgccgccccagcgagagattgagttccagatagatcttgctccagggaccactcctctatacaagcgaccctaccgtatggcagcacatgaactggccgaagtcaagaaacagttggaagagttgaaagaaaaggggtatatacggccgagcacttccccctggggttctcccgtgatttttgtggagaagaaagacaagacaaagaggatatgcgttgactacagagctctcaatgaagttactatcaaaaacaagtacgctcttccccggattgatgacctgttcgatcagcttaaaggtgccactgtattctccaagatcgatcttcgctccggatatcaccaattgcgtattcgtgaagaagatatcccgaagaccgcgttcaccacgcattatggactgtatgaattcacggtgatgtcgttcggtctaaccaatgcgcctgccttcttcatgaacttaatgaacaaagtgttcatggaatacttggataagtttgttgtggttttcattgacgacatcctggtgtacttacaatcagaggaagaccatcagcagcacctccgtctggcattgggaaagttgcgggaacatccattgtatgccaagcttagcaagtgtgagttctggttgtccgaagtcaagttcttagggcacgtgatatctgctaaaggagttgctgtggatcccgaaacggtgactgccgtcactgattggaagcaacccaagacagtcactcaggttcgcagctttttgggtttggcaggatactaccgaagattcatcgagaatttctccaaaattgctagacccatgacgcagttgctgaagaaggaagaaaaatttgtatggagcccgcaatgcgagaaagcattccaaactctcaaagaaaagctagtttcctcgccagtgttaatcttactggatactcgcaaggacttcctggtgtactgtgacgcttcgcgccaaggattggggtgcgtgttaatgcaggaaggtcatgtggtagcctatgcctcacgccagccacggccccatgaaggcaactaccctacccatgatttggagttggccgctgtgagaaggtggttagagctcattaaggattatgatgtgggaatccattatcaccctggtaaggccaacgtggtcgcagacgcgctgagtcgaaaaagcagttgcaacactcttggcgtccgtggcattccaccggagcttaatcaacagttggaagccctgaacctaagcatcgttagccatggattcttggctacattggaagccaagcctaccttgctcgatcaaatccgcgaggcccagaagaatgatctagatatgcatgggatactcaagaatatgaaacagggtaaagccgctggtttcacagaagatgaacacggaaccctatggaacggaaatcgttgtgtcaaggcagagcaccaacgaccggccagacttctccaacctctccaagtaccagaatggaaatgggatgaaattgggatggatttcatcaccggacttccaaaaacccaaggcagatatgattctatatgggtagtcgtggaccgactaaccaaggtagctcggtttattcctgtgaagaccacctatggagggaacaaattagctgaactctacttcgctaggatcgtgagtctccatggcgttcctaagaaaattgtatctgatcagggaagccaattcacttctgacatctggaagaagctccaagaagagttgggtacccgattaaattttagcaccgcgtatcacccgcagacagatgggcagaccgagcgtctaaatcagatcctagaagatatgctccatgcatgtgttctagattttgggaagacctgggataagagtctcccctatgccgagttctcctacaataacagctaccaagccagcatacaaatggcaccttatgaagcgttgtatggccgcaaatgccagacaccactattgtgggaccaagttggggaaagccaagtgttcgggactgatatcctgagagaagctgaagctaaagtcagaaccattcgggataatctaaaggtggcacagtcccggcagaagagttatgcagatacccgacgccgtaacctggaattcgcagtggacgattttgtgtaccttcgggtcacgccattgcgaggagtacacaggtttcagatgaaagggaagctcgcacctcggtttgtgggtcctttccgcatcattgctcgacgcggagaagtagcttatcaattggagctgcccacatccttgggcaacgtgcatgatgtgttccatgtgtcgcaactcaagaaatgtcttcgagtgccgtccgagcaggccgattcagagcaaattgaagttcacgaagacttgacctacgtggagagaccagtgaaaatcctggacaccatggagcacaggaccaggaatcgggtaatccgtttttgcaaggtccaatggagcaaccacgccgaggaagaagctacttcggaacgtgaagacgagctgaaggcagcccatctagatctcttcgccagttcttccgaatctcgtggtcgagattccgtttaa

SEQ ID NO: 9986 - DNA, 505 bp, Oryza sativa
  Clone ID: PAT_MRT4530_16350C.1
atggaaagagttgaagaaaatcttccaattcccggatggatcagaggcagcagtgaggaattgtgcactgcaaacaatggccaagtcttggcgtggttgaaaaaccaccttgaacacgaaatttgtgaagacaggacacacactgttttcgacgtatgccaacataaccctgaatcagtgggacgactttctgacgttgaagaactccccggaagaaattcaaaggagccaaaagtatgcagagttggccaagaagaacaaatttcctcatcgcttaggctccacgggatacgcaccaaaggtggagcagtggacaaaagaggaggaggaaatgaggaagaaggggcaaccggtaccaatggaggaatggacacagagatcaaggaactgggtaagagctagaactcctaagatcacggataaaggcaaagtatcatttgaagatccggagctgcagggggtggccgataaaatagagaatttatccagtgcacagaagaaatga

SEQ ID NO: 9987 - DNA, 3024 bp, Oryza sativa
  Clone ID: PAT_MRT4530_16351C.1
agatatggaaagtcgggaatggatgtatcattggccgaggtttttgtctccatatagaaacgaagtgtctaaatttattggtattgccaaggcacacgctgagaagaacaatatgaggaagatagtttgtccatgtgctgactgcaagaatgaaatagcctgggacttcgacgatgcttttaaagtgaaggagcacttagtaactcgtggatttatggacaagtacgaaatatggacacgtcatggcgaagaacaagtggacgggcctgaaaatgtagttccgacacaagttgaagacatggtgcatgacgatggttctgttgagaacaaaatcgacctagaggaaatgttacatcatgtagaacctgaggtgctgatggggtcggctagagggttaaataactttgcagcaaaggaagttttgtacgatgagtcgaagggctgtgacagtgagttcacaacactccggtcagttcttgaacttatgaggttaaaggcgagacatggatggtctgataccagtttcgacagtttgttagaacttctgcagaaaatgctcccgaggcctaactcactaccatacagcacatatcaagcaaagaaactcatataccccctttcacttggtgtggaaaagattcatgcgtgcgtaaatcactgcatactgtacaggaaagagtacgcttctttagataaatgtccaacatgcggtgctagccggtataaatcgaatagcaatactggcctagaaccgtctgacacaactgagggatgacagagaaaaatcccgcagcttgtgatgtggtaccttcctgtcaaagaccgcattaaacggatatactaaaatccgcgagatgcggaactaatgcgctggcatgaagaagggcacaagaaggatgggatgattcgacacccggcagatgctcgtcagtggataaactttgatgctcagtacagagagtttgctaaagacacacggaacattagatttgccctgagtactgatggagttaatccttttggagacatgagcagctcacacagtacttggccaggaccccgtcagcctggtattgatattaacgtatttcttgaaccattgttggaagatatggctgatttatggaaagagagattgaaagtgtgggacgagtacttaagggaatacttcacagtgaaggccatcatcttcgtgaccattaacgattatccagtaatgttttcagtttcaagtccaattaaaggtaaaacaggatatgtgatctgcttgaatggaacgtactataggtatctcccggattccaacaagcttgtgtacatgcggcaccggcggttcctacgcacaaatcactggtatcacaagatgaaggcggagttcgatggcactgaagagactgatcctgcagcaaaacctacattgggggaaaaagtgtgtgcaatgacagagaaaattgtttgcgagtttggaaaagtgactaagaaaccatcaaaggggacaaagcgcaagaaacccgagaagcaagatgatagttcgaagccagatgataaactccctccaccattcaagaagcattccatactctttaagtacctcccgtactggaaagatctagaggttcgacatgccatagacgtcatgcatctagagaagaatgtgtttgacaacatagttggaacattgttggacatgccgaagaagacaaaagatggtctgcaatcaaggatggacctagtcgagatgggaatcagggaagagttacacccttaggaaggagagaagaatgaaaaagtatatcttccaccagcctgtttcacactgacacctgaggagaagaagtcattttgcaagtcactccgcgatgtcagagggcccatagtgtcacagaaggtcattagtctcgaagagttaggaaatctccgtacattcgcacatgagacacagtgacaacttgagatgtgtttccctccgtcatttttcacatagtgccacagatggttgcgcttggcccattgtacctccgtcaaatgtggtcatacgagcattacatggctgctttgaagggttacatccgaaatcatgcacatctagagggatcaatggttgaggattatagtattaaagaggttatcgagtgctgtatcgattacctcaaagatggatatgcaattggagtacctgtgccccgacaagagggcagattgactggcaggggaacgataggaaagaagagatttgtcatccatgatcacaaatcattccaagaagctcacttcagcgtgcttcatcagtttgctatcgttcagccttacatcgatcaacatatcgaactaatacgagctaacaataagggtcgcaccaccaagtgcataatgaaagaacacaagcgtctcttcatagattggttgcgagacctagacttacctgagggacaaactatagataaaataactatgaagcggttggcttgtggtccatcaactacagtaaattcttggcaatgatatgacattaatggatactcgtttagtacaagagcccgagataataagacttgtacgcaaaactgcggtgtccgtgtggaggcaattgatgaatccggggaaaaacaatcatacttcgggtttattgaagaaatatgggaaatcgactatgggcacacaatgcaattccccatatttaagtgccagtgggtaaaatacccgaacggggtcaatgttgataagttcggtcttgctgttgttgaccttgcgagtgtgggtcacaaggatgaccctggggtactcgccaatcgtgtggcacaagtgttttatgtgaaagacccttcaaatttgaagaaagatatagtgctaccagggaaacaaaagatattgggagtggatggggttgaagatgtcgaagattacaaccaatacgatagtatgccactttatagtcagtttgtacagaagattaagaatgtcgagacatctactcagaagaccgtgaagccttacatgcgcacggacggtgtgggaaaaaatatt

SEQ ID NO: 9988 - DNA, 429 bp, Oryza sativa
  Clone ID: PAT_MRT4530_16352C.1
atgatcgccgtggtgcagctcgccgtggcacagcccaaccgcccaaataaaccagacggccagatcgacgaggaacgcacgccgcgacgacggacgaacgccacaatcaatggacgcagtgggttccgagagacgcatcgtgcgttccctgcttcgatcggaaccctcatctccggcgggcgctggtacgcgaggagccacccacgcgcgcggccaccgacacgcgccggcatacaggaagaagcaccaaccctgctggctgctgccgtcatggtgatcctgtcagcgagtgatgtgaacctgattctcgccacgccacgtcaagccgcgcacgcccatgacagccggattcgcgaccatgctcaggcaggctcgcgccatgatcccatgagcacgcagccgcgcaacgtgcaagatcgcacaccctga

SEQ ID NO: 9989 - DNA, 2358 bp, Oryza sativa
  Clone ID: PAT_MRT4530_16353C.1
atgccggaggctgcggcggcggcggcgggccacatggatccggttggcgacgaggcggcggagaggagggagatggaggagaaggaggaggaggaggaggaggatgaggagttctacgagtcgctggatcggatcctgtcgtcgtcgtgctcgtccacgtccgcctccgacgacgacgaccagcagcaccggcggaggcggcggcaccacccgcagccgcagcagctgtcgtcgtccgcgacgttctccgcgtacgaggtctggatctccgagccgacatccgtcgaggagcgccgccgcgtgctgctgcgtcggctcggcctcgcccacgactccgagcccctgccgcacccgtccccacgcgtatcatcctcctcccctcgttcgccgaccccttcccccccgtcctcgtcgccgccacggccggctcccgtggtggccgccgcggaggagcccagatccagcggccacgggaagccgccgcttgcgaggaacccgagcggcggcgcggagcaatgccggatccggaacctggacgacggtacggagttcgaggtcggggaggttcacgatgaggtggtccgggaggtcggcactggccggcagctcaccttcgaggagttcgagctctgcattggccgctccccgatcgtccaagagctcatgcgccgggccaccacagccgcatcatcctccacctccgaccaggccgccccagcatccaagccacggaggaagcctggaggctggctgcgtggcatccggcacctggcgggaagcgttgcatacgggcgcagcagcaccgatgagagggacaaggagaaagagaaggagaagaaggagagggaagcgcggcgcctgagctccgccaccgatgacagccttgacggcaacggctcgcgcaatgcagggagggtcagggtgcggcagtatgggaaggcgtgcaaggagctcaccgggctgttcatgacacaagaattggctgcccattcgggctcaatctggtgtatcaacttcagcttggatggacgataccttgcaagcgctggcgaggaccgtgtcatccatgtgtgggaggtatcagagggagaaagaaagggagaactgctcggggaaggtacggtggcaagggagaacggtggtggctgcagcccgtttcttgcagctgttgggaatggatcgccggagctggcaacattgtcattgagctgtgctgacgggggttttgtggagaagaagaggaggccaaggatgcaaagcagccggaagtctgttggctctgatcatctagttgtgcctgaatgtgtgtttgggttcagagataaaccagtatgctctctattgggtcacgccgccgatgttcttgatctatcatggtccaaatctcagtacttgctttcatcctcaatggacaaaactgttaaactatgggacattactactagtacctgtctgaaaacattttcacacacagactatgtgacttgcatccagttcaatcccgtggatgataacttcttcattagtggatcactggatgaaaaagttgcactggtgggatcacacaagggaagctgtcatttatttgatacaactgaaaagaagcttcagtacaaaagtcagatagaactaagaatcaggaagaagaagtctggccagaagaagataactggcttccagtttgctcctggaagctcgtcggaagtcctgattacctctgcagattcaagaatccgtgttgttaatggtgatgaactcgttcacaaatttaaagggttccgaaatacaagtagccaaatatccgcttctgtagctccaaacgggaaatatgtggtctgtgccagtgaggactcccacgtgtatgtctggaggcatgacaatacttcccatccgagcagaagcaggagtgcagttgatgtaaccaactcatatgagcatttccattgccatgatgtcactgtggctatcacatggcccggcgctgaatcccgtggctcattcgggtcccgtagcagcagaaacagtgattcagacgatgcagtgatgaacacgggtcgggatgcccctgtagagaacagtgagcatgatctgaatggcactgtcaatagatgcaccaagcgcccagtttgtgaaggtgttgcaagcacaagcaatcctccagcggatggagtatcaacgtcctggcctgacgagaaacaatcgtctgccaagagcagtcctggtcactgctcatccgacctttgcattggagctttggatgttcagcgccggtcagcttggggattggtgattgtcactgcaggaaggggtggtgaaattagggtgttccagaatttcggcttcccggttcaagtgtaa

SEQ ID NO: 9990 - DNA, 457 bp, Oryza sativa
  unsure (1)..(457): unsure at all n locations
  Clone ID: PAT_MRT4530_16354C.1
tcgcgcgccggttgccatcggcggganatcgtcggagctcctctgcgcctcaccccggccntcgccgagccgcccgctgccgtcccggctcgggccggccnacgacntgcgccgagccgtgcctctgcctcgctcggtaacgggcgagaggaagaagaagatgaggagagagagaaaccgtgtgggacccacatgtgattagcgcacagtaatcctatcctaacggtgattatcccactcaatggcaggtggggtccctatagttaaaatctaagaaaacacaattatatattttgttcctatgacaggcgggacccaatggtaattaaacaagcaggtttgaccctaagtcaaccagggccggtcccacatgtcaaccacagtgggttttggataatgtttccgattaaaaataaatcatttatgaacagtgcatttttacaaaaaaaaaaaaaaa

SEQ ID NO: 9991 - DNA, 1405 bp, Oryza sativa
  Clone ID: PAT_MRT4530_16355C.1
gggtcgacccacgcgtcgaaatcatttgagcttgtgggtctcctcaaccatattcgattcgtgagggaggggatcgagctctgttgcggtgttgtagatcattatcactcttggtttgtgattctcggaagtcggaagtgttcttcgcaagctcgattttcttttttttgcgatatttttttgtatcgttaaatctcgaatcccgacgggggaggtggttgagtccgagttcgatgctccgggggcctcaagatccagtctcgacgccgttcttgagctctccgtgttgatgtcgtcgcagccggtggcgcgtgtcctcccccgcggcggcggcggcgggttccgcgccttcccggagtccgccccggcttccctccgcttctccgtcggccgccgccgcgccgctcgcctaggggcgcgggcgcgggggtgcccccccgagggggagttcccgccgtcggcgcacccgcaacactacccggggtggcctgggtctctgggcgcgccgcacccttgcggattgcagccggccatgctgacgccgtacgtcgagcaccagaaggctatcacaatccgcaacgacgtcaacctcaagaaggagactcttcggattgagcctgatgaggagtgcccgggccgcttcctcgtcgccttcacctttgacgccacccttgctggaagcatgactgtttacttctttgcaaaagaagagctcaactgcaatctaacggcggtgaaagaagacctgattaagcctgttactgtaagcttcaaagagggtcttggtcagaagttcagacagccttctggcactggaatcaacttctccgtgtttgaggattccgagttattgaagcagggggacatggatgtatatccacttgcagttaaagctgaaacaaccatgcctgttgatcaaaagttggaaggagaagatcaaaagatgaaaactccaaactcacagatcacacaggctctgtttgaaaagaaagaaagcggtgattatcaagttcgagttgctagccagatcctttgggtcaatggaactaggtatgagttgcaggaaatatatggaataggaaactcggtggaaggcgatgctgatgccaatgatcctgggaaagaatgtgttatttgcctctcggagccaagggatactaccgttctcccatgtaggcatatgtgtatgtgcagcgagtgtgccaaggtcctgaggtaccagacgacccggtgcccgatctgccgacagcccgttgagcggctacttgagatcaaagtcaacaacaaagctgaagagcagcagcagccgtcacccgattcaccgatcaaagtcaacagcaaagccgaagagcatcagcagcagccatcccaatcgctgccaatcccacacagggaagaggtgtag

SEQ ID NO: 9992 - DNA, 504 bp, Oryza sativa
  unsure (1)..(504): unsure at all n locations
  Clone ID: PAT_MRT4530_16356C.1
atgattgatacaattatcattagcttaattgctttttctatctcagttagtctttggcgaggatttataagtgaagtactttctctttcaggatggattctgcttctttgtcgcgagtacgtctcttctnatttgagcagtcacttaaatgaaattgattcagtttattttcaaaattcagaatacttacgtaatggtatagaggcggctatcttatttattatcacattaattttatgtgggattgttaatgcattactaagtaaaattattaacaccacaggtttatctgcgacagatcgagtattgggcattgctttcggagcattacgcggtattttgattgtagccgctattttatttttcatagatacttttacaacatcaaaccaaactgaattatggcaggaatctcaacttattccgcatttcgattttattgtgaaatggttctttgaacaattacaagctaattcaagttttttaaattctacgactactact

SEQ ID NO: 9993 - DNA, 379 bp, Oryza sativa
  Clone ID: PAT_MRT4530_16357C.1
cccgggctgcaggaattcggcacgaggcccctcgcgccgcggggcgaccagtggcggcttctccccgttagctttcccgcatcgggggggcccgcctgccccccgcccgccatgcgcgcccttcgctcccgcttccttccggtattttcgctaaatctctctctctctcctcacacaccacactgtgctgcgtcgtcgtcactctctccggtcaaccttccccaatcagccacagccaggagagccgggctggggggggggggggggggggcgtccttagctttacaataatcatcgccgccacttgtaaactaaaatatctcgcgcgctggactaaccacgccacctttccgatcgataaatactactcccgcttccg

SEQ ID NO: 9994 - DNA, 453 bp, Oryza sativa
  Clone ID: PAT_MRT4530_16358C.1
ggctgctaacatataagacccatgtgggtctcacgctgactcaaccagattgataactgccggctcgtcacgttagttaaaactggatgttatactatcatgtgacctcggttacaccgattttgcaaattggtggaaggacacaatctaaactcatagtcaataagagagacctaaagtgaacttattataatgaatattgactattgagttggcccagcagcccaccatgttcataagaataaggtccatgacaactgctgctcacctactctccgcctctcccagtctcctgttcgttcctctctcccaagtctagggatgaaagtggttggaaatggtcggaaacggcatcattattttattattttttaaaaaacaagcagaaacggtcgaaaaattctcatattcatgaattcatctatttagtgtcaacttcaatgccacgccgat

SEQ ID NO: 9995 - DNA, 150 bp, Oryza sativa
  Clone ID: PAT_MRT4530_16359C.1
atggagttacctcgtcccgacaataagtatgttatcgtcggtaaccgcagcaaactgccgactgcgacggctacggctgtggctgcggctgcgcatagtgagtgcggcactgttcgtgccggggctgccggcagccgaacatgcccatga

SEQ ID NO: 9996 - DNA, 2794 bp, Oryza sativa
  Clone ID: PAT_MRT4530_1635C.1
attggggtaccccctcgagggccggcccgggaaaaaaaaaaaaaaaaaaaaaaaaaaaaaggcaccaggaggcattcggcacgagggagtgagagagaggatttttttttccttcggcttatgtagtattgcgctgcgtcccgacaagcaaaagcaagaggaggaggccgcggctagcgagcgagcgagagagaggggagaagaagaggtgggacagccgggagatccatccctgtggagaggagggagggaggaaggaggcgttggaggaggagaggttgaccgatagatccattgcggagttgagtgttgatgcaaagctgattcgccatcgtttagctttttataagagatgggttcagtaggggttgcgccgtctgggttaaagaacagcagtagcaccagcatgggtgctgagaagttgcctgatcagatgcatgatctgaagataagggacgataaggaagttgaagcgactattattaacggcaagggaacagaaaccggccacataattgtcacaactactggtggcagaaatggtcagccgaaacagacagttagctacatggctgagcgtattgtagggcaaggttcatttgggattgtcttccaggcaaaatgtctggagacaggtgagacagttgctatcaagaaggttcttcaggataagcgctacaagaaccgtgagcttcagaccatgcgccttcttgaccacccaaatgttgtagctctgaagcactgtttcttctctacaactgagaaggatgaactgtatctaaacttggttcttgagtatgtgcctgaaactgttcatcgtgttgtgaagcattacaacaagatgaaccagcgtatgccacttatctatgtgaagctgtatatgtaccagatttgtagggcattagcttacatccataatagcatcggagtttgccacagagatatcaagccacagaatcttctggtaaacccacatacccatcaactcaagctatgtgactttgggagtgcaaaagttctggtcaagggagaaccgaacatatcgtacatttgctcccgatactatagggctccggagctcatatttggtgccaccgaatacactacagctattgacatctggtctgctggatgtgttcttgctgaacttatgttagggcagcctctgtttcctggtgaaagtggtgtagaccaacttgtggaaatcatcaaggtccttggaacacctacaagggaggaaattaaatgcatgaatccaaactataccgagttcaagtttccacagattaaagcacacccatggcacaaggtattccataaaaggttgcctccagaagctgttgatcttgtctctaggctgctccagtactcacccaacctaagatgcactgctgtggaagcacttgttcacccattctttgatgagcttcgagaccctaatgctcgccttccgaatggccgctttttgcctcctctcttcaacttcaagcctcatgaactgaaaggaatcccatcagatattatggcgaaattgatcccagaacatgtgaagaagcaatgctcctatgcaggagtatgagacagcttccgcacgacccccctggaaatttccatgacaagtgcccatttcctcccccctggacgacgatggatcgtcagcatatgcgtgcatgatggttggtgaagatgtgaagttacgttgttgttgtatgaccaccttgttgaccagtgtagttgagtagcagtatgttgcgatggcgaaactttgacatgtaaccggtgcacccacaccatccctcccctactaaccctcacccacctgagaattgagaattcccatagctgatgatctgtaatatgttctagagcagtttaagaatgtatttattatggtgtagttgatccatatgttgggatcctcctcgtcgattttcttggttctttgtgccctagactgctacctggtttttagactgttctgaaaatgctgctagtaccttctatctactgtaaaagattacaaaaaaataaaaaaaaaaaacaacgatgaacctcctcacccctgcgtggtccttcctcgttgcccttatgttcgccccgcgactcgcccctaagctccctcatctcgtcaaactggtgcctcccgtcactctctgttattcttctaccgtcgagctacattaattttctagatcggattctgccattttcacgttttggcttaggtaacttctcggtttgatctcttgcgcccttatgctgttcttttgcccagtctgccactctccccctactacctttaattctaaattactcccatcctacacaacccagacaaaaaaaaaagccctggtgatttcttgacaaaatgtaaaagtgcttgggaagacatgttgaatactgagcatgcagtgaccttctgaaagataaaacatgtttacacgcttgaatagcgaaccatttgcatcttgcagctgcgctgaactggtttgaagatgtttgcagacagaattgtggtttgtaatgagctctttccacttgtagtcctttatggtggagaagaatgccaatcatagcatccactaaatgacccatttgaaagtgtttgtcctttttgttgatgaaaattatagcccaattcacttttttattgttcatctttgttggtgtgttgtcttctattaagccacctaatggattcacaaggactacttatactttattgtactctgtttattaaacaaatgtagaccgtatttatcaaaatattatctactatctaaccattttatgc

SEQ ID NO: 9997 - DNA, 386 bp, Oryza sativa
  Clone ID: PAT_MRT4530_16360C.1
caatcaaaaaatatcccggcggtattttcttccctgggcgaccatttgtgggggccttatgcccagaaccaatacccaacagggggggccctaagggagggcccttttttttatagtaaaaagcacccgtttttttttttacatggaaatataaaagaggtccattgaaatgggccaagaagagatgtaggacccccctcagggggggggatttttagaagtcccatggcggggttccacaggttatgcaaggcccatcctacttttttttagcgggaatattcccaaaactagttccaagaaaggcggggatgcccatggccattgatatgggtgggggaggaaaagatccacgaaatttgaagggggggctcattaaacttttg

SEQ ID NO: 9998 - DNA, 696 bp, Oryza sativa
  Clone ID: PAT_MRT4530_16361C.1
tttttgttaaggattcaagggtggaaaaggcacatgccttcagaagctggaacaattacattagtattgagtacattcatcagtgataaacatgggagatcattaaaatcttatcctaaacaggaacagctggtagctctctcaggatcgcagatttgtacagtctcatcgcaaaatatagactttcttcctctttttacacctaaccgacttatacaaaacgcctatcttctctgcagcgtcatcaggtaaataaactctgagcctcacccctgacatgactataagcaaaaactacaaaatgtacaatcttcttagtacaacacgtttatttttaaagttggcttgtagcagcccaaagcaggagacacagggtagatctggctagccatggttagctgtacattgtcattttcatgccattatgaaggatattgtgcctgaagcccaatcctcctctcaccggcagcaacaagtttttctacccgggcaactatgtgcttcccatatgtatatttcttcagtgcacttaaatgaacctttactcgtgacaggatcaactcacgctgctgatcatcacaagtctccagtactttctgtacaacatagttaccaaactgatccttcatcatggcctgaagaggctcattctcgtcagtagttccgagcatttcatttataagaacttcccgctct

SEQ ID NO: 9999 - DNA, 2797 bp, Oryza sativa
  unsure (1)..(2797): unsure at all n locations
  Clone ID: PAT_MRT4530_16362C.1
ccccccgcgcccccccacccaggcccccgccccggccccccaccgccggacccccggccagccgcgccaccgccagcgccagtcccccgggcgggcgcaagctcgcacaagttgccccccccgacccctccaccgcgccgcctacctcctttngcagtcgtccacgagcggctttgtcatcggcctttcgtcgtccacgggcgaagacgtactcggccgaacggtttcgtcggccggttcgtcgtccacggccgaacctcgtcgtcggcccttccttcgtcgtccacgaccgaagctcgtcgtcggccattcgtcgtccatggacaggtttgaaactatggccgatagtactaaagggactgaagagaagggtttaggggagcaagagcagtcccttgctgttgtggttgctctggaaccaacggtcccaccagaagatagttccggcaacgacgtagctcacgaagacgatgagtactcatcgccaagcgatccttgtccaagcccaagcccgaagagaaggaaaaaaggcgacagtgaagaaggcgacaaagactacattccccctaaagaaggggaaacggcgccacggcgatcaaaatggcagccgaagaaaaaagttccgtcgcaaattgacgaggtaacagctaacacaaccggctcaaagaaaagcgaacggtcagctaaggcgaagaaaaggaagggcgagagaagcgtgaatagaaaggatgaaggtttccatgttgttacccatgtttcgccaaaaggagagccgctcgcccctaagacggcacgtgcgaaattcagttcacagtgtggcataatagtaagggaaaagatccccatcacggtgaaggactgggatcatgtatcgaatggggataaggaagtcctatggaaagagttgaagaaaatcttccagttcacggatggatcagaggtagcagtgaggaattgtgcactgcaaacaatggccaagtcttggcgtggttggaaaaccaccttgaacacgaaatttgtcaagacaggacgcacaccgttttcgacgtatgccaacataacctcgaatcagttggacgactttctgacgttgaagaactccccggaagaaattcaaaggagccaaaagctccacgggatacgcaccaaaggtggagcagtaaacaaaagaggaggaggaaatgaggaagaaggggcaactggtaccaatggaggaatggacacaaagatcaaggaactgggaaaagtatcgtttgaagatccggagttgcagagcattgctgataaaatagagaatttatccagttcacagaagaaaggatttttcaagcctaagagggagaaagatgtgctaagtacggcgctgggtactcctgagcatgggggaagggttcgaggtgtgtcgagcaagatgagttggaaggaagggttcaaacatgacccccacaagaagcgtgaagcgtacaaggataaacttagagacgaaggggctgcggagtttgaaaggcaaatgatggatttctgcgtcaagcacatgattttgcctcgccccgaaaccaaagaacctgagccagattaccccttcgatgacctcaaggagaatacgccctgcagattgcatccgcaagtggtccatgaagggtttgactcctacgacattgatttcccgactgcagatggtgtatccgtacttggggatgcggtcgatcttgtaattctctggcacaagaatgacatatcctttggattgggcaccgacgccacggaaaaacctgtggtgccaaaaccggggttgggaaaacctccgagacctcctaagaggaaggtgactgataaggcggaggaacccgagatgcaaaaggataatccagtgccggaagtgccaccggagattgcagtgccggaggcagccatggagattccagtgccggaagtgcccatggagattacagtggcagaaccagaggtgcaatttgtggcatcagtcggatccgaaatagaagaagtaccaggattggaatgggacggtacaaagccagaaatatttgatgacccttctcctgcgaaagaccccgaggtgcaagagaccactatccctaagaaggccactaccagttctgaggtgcctagaatgcttaggagccacgactccaagtccaaagatgagaacaaggagaagttcatggtaaccgtcttcagagggggtaaggaacgtggcaagcctagagatgatgacccccagaaggccgctgaactagccgggccaacatacttcacaaccgatgattgcccggctgagtacgaacatgggaaagcactcttgccggaatgggcactgaacgaagtaccatgggagatgaaaaggttacataccttctacatgcaggccagcaagaaaggcttgggcaatataacagctcgatcaccggcagattgtttcggcaaagaaggttacgtatggctagatttctcatatctccacgccatatatcgttgggataagatggacgtcaactacgtcggtgtttggtgcatgatgcaatacatggatgctaagaagacaaaagaacctatcggcttcttggatccaactcggatctgccaaacacaacataccctcagaagcactacacttctgaaaagggggaataatagcaaggctgagtacaaccaccgtactcagcaagccacaccaacgatgcggacgtgcaaggggatacaaggatggtctgtggctatttgcataaaggcggttgtaaaacattttattgggcaaaacagtaaaactgttgagtaa

SEQ ID NO: 10000 - DNA, 205 bp, Oryza sativa
  unsure (1)..(205): unsure at all n locations
  Clone ID: PAT_MRT4530_16363C.1
tcccggcgtcgccccgcgtccggttgttgcnttgtngtngtntcctacggggtgaggatcnttttcgtgtttgctctccttgctgttgttgcgtggcgcgcttctgcgcggtttggtgctcttggtcgtgtgttgtgtcgtgtcttctgcggtcgcttcttctgctttgcttcnngtgctctgnccttgctgtgggttcgtgtgg

SEQ ID NO: 10001 - DNA, 386 bp, Oryza sativa
  Clone ID: PAT_MRT4530_16364C.1
caaatagtagattctttgtgcgatggtgaacacgtggattgcaacaatttgctatctgcgattacaggggaaaactgttgcttcaatacatcaaggattgattattatttggagtatgaacctcatccatcatcgacaaaaaatctgcaccatctttttcagatgatcaggaaaggcactttcgcaaagtatgactatgggttattgggaaacctaaggcgctacggtcatttgcgtcctcccgcatttgacctaagcagcataccagaatcactgcccatatggatgggataatcgggtcttgatgcattggctgatgtaaccgatgttcagcgtactatcaaagagctgggatctacaccagaacttctgtacattggtgacta

SEQ ID NO: 10002 - DNA, 3033 bp, Oryza sativa
  Clone ID: PAT_MRT4530_16365C.1
atgtatcattggccgaggtttttgtctccatatagaaacgaagtggctaaatttattggtattgccaaggttcacgctgagaagaacaatatgaggaagataatttgtccgtgtgctgactgtaagaatgaaatagcctgggactttgacgatgcttttaaagtgaaggagcacttggtaactcacggatttatggacaagtacgaaatatggacacgtcatggcgaagaacaagtggacgagcctgaaaatgtagttccgacacaagttgaagacatggtgcatgacgatggttctgttgaggacaaaatcgacctagagaaaatgttacgtaatgcagaacccgaggtgctgatggggtcggccagagggctaaataactttgaagctttacagaaggcagcaaaggaagttttgtacgatgagtcgaagggctgtgacagtgatttcacaacactccggtcagttcttgaacttatgaggttaaaggcgagacatggatggtctgataccagtttcgacagtcttttagaactcctgcagaaaatgctaccgaggcctaactcactaccatccagcacatatcaagcaaagaaactcatatgccccctttcacttggtgtggaaaagattcatgcgtgcgtaaatcactgcatactgtataggaaagagtacgcttctttggatgaatgtccaacatgcggtgcaagctggtacaagtcgaatagcaatactagcctagaaccctctgaagcaactgagggacgacagagaaaaatcccgcagcttgtgatgtggtaccttcctgtgaaagaccgcattacacgaatatactcaaacccgcgagatgcggaactaatgcactggcatgaagaagggcgcaagaaggatgggatgattcgacacccggcagatgctcgtcaatggagaacctttgatgcgcagtatagagagtttgctaaagacccacggaacattagatttgccctgagtactgatggagttaatccttttggagacatgagcagttcacatagtacttggccagtgcttctcaccatgtatctcccgggttccaacaagcttgtgtacatgcggcaccggcggttcctacgcacaaatcacaagtaccgtaagatgaaggcggagttcgatggtactgaagagactgatcctgcaccaaaacctacatcgggagaaaatgtgtgtgcaatgatagagaaaattgtttgcgagtttggaaaaatgactaagaaaccatcaaaggggacaaagcgcaagaaacccgagaagaatacgaagggaggggatagtaagaagcaagatgacagttcgaagccagatgataaactccctcccccattcaagaagcattccatattttttaagtacctcccgtactggaaagatctggaggttcagcatgccatagacgtcatgcatctagagaagaatgtgtttgacaacatagttggaacattgttggacatgccgaagaagactaaagatggtctgcaatcaacgatggacctagtcgagatgggaatcagggaagagttacaccctcaagaaggagaaaagaatggcaaagtatatcttccaccagcctgtttcacactgacacctaaggagaagaagtcattttgcaactcactccgtaatgtcagactgcccataggtttctcatcaaacatcagtcgactagtttcaatgaaagatttgtcggtatctggttataattcacacgactgccatgtcttgctcaccgtgtttcttgcaattgcaataagagccataaaaccggagcatttaaaggttgctatcacaaggttgtgctactttttcaacgcagtgtcacagaaggtcattagtctcgaagagttaggaaatctccgtacattcgcacatgagacccagtgccaacttgagatgtgtttccctccgtcattttttgatatgatggagcacctcattgttcacattgtgccgcagatggttgcgcttggcccattgtacctccatcaaatgtggtcatacgagcgttacatggcggttctgaagggttacgtccgaaatcgtgcacatctagagggatcaatggttgaggattatagtactgaagaggttgtcgagtgctgtatcgattatctcaaggatggatatgcaattggagtacctgtgccccaacacgagggcagattgagtggcaggggaacgataggaaagaagagattcgtcacccatgatcacaaatcattccaagaagctcacttcagcgtgcttcatcagtttgctatcgtcgagccgtacatcgatcaacatatcgaactaatacgagctaacaataagggtcgctccaccgagtggataatgaaagaacacaagcgtctcttcatagattggttgcgagacctagacttacctgagggagaaactaccgatgaaataactatgaagcggttggcttgtggtccatcaactacagtaaattcttggcagggatatgacattaatggatattcgtttagcacaagagcccgagataataagacctgtacacaaaacagcggtgtccgtgtggaggcaattgatgaagccggtgaaaaacaatcatacttcgggtttattgaagaaatatgggaaattgactatgggcacacaatgcaattccccatatttaagtgccagtgggtaaaatacccgaacagggtaaatgttgataagttcggtcttactgttgttgaccttgcgagagtgggtcacaaggatgatccttgggtactcgccaatcgcgtggcacaagtgttttatgtgaaagacccttcaaatttgaagaaagatatagtgctaccagggaaacaaaagatattgggagtggatggggttgaagatgtcgaagattacaaccaatatgatagtatgccactttatagtcagtttgtacagaagattaagaatgtcgagacatctactcagaagaccgtgaagccttacatgcgcacggacggtgtgggcaaaaatgttaaagggtaa

SEQ ID NO: 10003 - DNA, 763 bp, Oryza sativa
  Clone ID: PAT_MRT4530_16366C.1
tcgttcccggcctgggcggcgtagagggaacgagaagaggcgagttcttgacccttccaccgttgcgcgcttcgtctgagttttgcgcctctcctcgagaccggcatggatgcaaagaacttaggcaacagacgacaaaatcatgagaagagtacaatgacagaagatgcacggagccgagatcaggagaccttgcagcggtttgcagattcagatattactgtgagtccagtcaacagtcatgaatctggagatgtgaacatggaagctgccatctctgctgaggatgtcttgcgagctggtggtttcggagcaaaagatgacatcggcagcctccttcccacagccgtagattcgactgatttcgaggcctcgctacgggatgctcgcgactttgaaggcgagagtgaaaaaccatcgcatcctggactaggatacaaagcaaatgaaactgacagtggaggcaaaccatcagatgtgcagcagcagcagcagcagcagtgatccttagtgttctcttctcctccatgcaattttagctttggataacatgacattcgccgcgttcctctagtgctccgaagacctatcctgttctgactttgtgctaaggtatgtggcatttctgttgtttccctgatgtaccatgtatgaacgtgaccatgatgattctgctgtatgaaccagatcgtttcaccttgtatacctaagtattagtggtagtagtttgtgccagttttttcaaaaaaaaaaaaaaaaaaaa

SEQ ID NO: 10004 - DNA, 3374 bp, Oryza sativa
  Clone ID: PAT_MRT4530_16367C.1
atggagcccttcaccagcgcagcagtggagccagcgccgcccaccgccgacgaccagcgggacgcgccgcggccgcacgtcgtcctgatggccagccccggcgccggccacctcatcccgctggccgagttggcgaggcggctcgtgtccgaccacggcttcgcggtcaccgtcgtcacgatcgccagcctctccgacccggccaccgacgccgccgtgctctcctcgctgccggcctccgtggccaccgccgtgctcccgcccgtcgccctcgacgacctcccggcggacatcggcttcggctccgtgatgttcgagctcgtccgccgctccgtcccgcacctccgcccgctcgtcgtcggctcccccgccgccgcgatcgtgtgcgacttcttcggcacgccggccctggcgctcgccgctgagctcggcgtgcccgggctacgtgttcttcccgaccagcatcagcttcatctccgtcgtgcgcagcgtcgtggagctccacgacggcgccgccgccggcgagtaccgtgacctcccggacccgctcgtgctccccggatgcgcgccgctccgccacggcgacatccccgacgggttccgggattctgccgatccggtctacgcctacgtgctcgaggaggggcggcgatacggcggcgccgacggcttcttggtgaacagtttcccggagatggagccgggcgccgcggaagcgttcaggcgagacggcggagaacggcgcgttcccgccggtgtacctcgtcgggccgttcgtccggccaaggtccgacgaggacgccgacgagtcggcgtgcttggagtggctggaccgccagccggcggggtcggtggtgtacgtctccttcggctccggcggcgcgctgtccgtggagcagacgcgcgagctcgccgccgggctggagatgagcggccacaggttcctctgggtggtgcgcatgccaagaaagggcgggctcctttcctccatgggcgccagctacggcaacccgatggacttcctccccgagggcttcgtggagaggacgaacgggcggggcctcgccgtggcgtcgtgggcgccgcaggtgcgcgtgctggcgcacccggcgacggcggcgttcgtgtcgcactgcgggtggaactcggcgctggagagcgtgtcctccggcgtgccgatgatcgcgtggccgctgcacgccgagcagaagatgaacgcggccatcctgacggaggtagccggggtggcgctaccgctaagtccggtggcgcccggcggcgtggtgtcgcgggaggaggtggcggcggcggtgaaggagctcatggatccaggggagaaggggagcgccgcgcgtcgccgggcgagggagctgcaggcggcggcggcggcgagggcgtggtcgccggacggggcgtcgcgccgcgcgctcgaggaggtggccggcaaagatatggaaagtcgggaatggatgtatcattggccgaggtttttgtctacatatagaaacgaagtggctaaatttattggtattgctaaggcacaccctgagaagaacaatatgaggaagataatttgtccatgtgctgactgtaagaatgaaatagcctgggactttgacgatgcttttaaagtgaaggagcacttagtaactcgtggatttatggacaagtacgaaatatggacacgtcatggtgaagaacaagtggacgggcctgaaaatgtagttccgacacaagttgaagacatggtgcatgacgatggttctgttgaggacaaaatcgacctagaggaaatgttacgtcatgcagaacccgagggaccccgtcagtctggtattgatattgacgtgtttcttaaaccattgttggaagatatggctgatttatggaaagagggattgaaagtgtgggacgagtacttaagggaatacttcacagtgaaggccatcatcttcatgaccattaacgattatccaacaatgttttcagtttcaggtcaaattaaaggtaaaacaggatgtgtgatctgcttgaatggaacgtactataggtatctcccgggttacaacaagcttgtgtacatgcggcaccggcggttcctacgcacaaatcacaagtaccgcaagatgaaggcagagttcgatggtactgaagagactgatcctgcaccaaaacctacatcgggagaaaaggtgtgtgcaatgacagagaaaattgtttgcgagtttggaaaaatgactaagaaaccatcaaaggggacaaagcgcaagaaacctgagaagaaaacgaagggaggggatagtaagaagcaagatgacagttcgaagccagatgataaactccctcccccattcaataagcattccatattttttaagtacctcccgtactggaaagatctggaggttcagcatgccatagacgtcatgcatctagagaagaatgtgtttgacaacatagttggaacattgttggacatgccgaagaagactaaagatggtctgcaatcaaggatgaacctagtcgagatgggaatcagggaagagttacaccctcaagaaggagaaaagaatggcaaaatggttgcgcttggcccattgtacctccatcaaatgtggtcatacgagcgttacatggcggttctgaagggttacgtccgaaatcgtgcacatccagtgttatcaatggttgagggttatagtactgaagaggttgtcgacggtgtccgtgtggaggcaattgatgaagccgggaaaaaacaatcatacttcgggtttattgaagaaatatgggaaatcgactatgggcacacaatgcaattccctatatttaagtgccagtgggtaaaatacccgaacggggtcaatgttgataagttcggttttactgttgttgacctggcgagtgtgggtcacaaggatgacccttggaagattaagaatgtcgagacatctactcaaaagaccgtgaagccttacatgcgcacggacggctgccgaaattttttgctgccgcacgcctccgccgtcctccgccgccgcccgcctgcgaccttcactctccgaacgtcgtcctccgccgccgccgaccgtcgtcgtccaggcgctgtcaccgagaccaccgccccttgctgccgctccaccgcgcgcgacctccaccactctgccgccgccgccgccgacccctccaccgcgcgcccgctccaccgccgccagctcctccaccgccaccagctcctccaccgccaccggcccctccaccgcgcgcgcggccaccggtggcccctacactgccgccagcccctctaccgcgcgcacggcatgtgggtgcatgtgggtgtgagggggtatatatgtgcgtgcatgtgggtgtga

SEQ ID NO: 10005 - DNA, 252 bp, Oryza sativa
  Clone ID: PAT_MRT4530_16368C.1
gtatggagttcttccgagatgaaacagactgtcagctcacctggggatattgctattctatgtgattacttttgttcttaatttggcatttgcactgaccttctatgtttcattggaatgcacgcatctcttgttacaagtaatacgacttctatagaggtccatgagcgaaggaattcagtttcatggaagtatgacctgggatggagaaaaaacttggagcaggtttttggcacccaaaagttgctctgg

SEQ ID NO: 10006 - DNA, 6064 bp, Oryza sativa
  Clone ID: PAT_MRT4530_16369C.1
atggaaagtcgggaatggatgtatcattggccgaggtttttgtctccatatagaaacgaagtgtctaaatttattggtattgccaaggcacacgctgagaagaacaatatgagaaagataatttgtccatgtgctgactgtaagaatgaaatagcatgggacttcgacgatacttttaaagtgaaggagcacttagtaactcgtggatttatggacgagtacgaaatatggacacgtcatggtgaagaacaagtggacgggcctaaaaatgtagttccgacacaagttgaagacatggtgcatgacgatggttctgttgaggacaaaatcgacctagaggaaatgttacgtcatgcagaacccgaggtgttgatggggtcggctagagggttaaataactttgaagctttacagaaggcagcaaaggaagttttgtatgatgagttgaagggctgtgacagtgagttcacaacactacgatcagttcttaaacttatgaggttaaaggcgagacatggatggtctgataccagtttcgacagtctgttagaacttctgcagaaaatgctcccgaggcctaactcactaccattcagcacatatcaagcaaagaaactcatatgccccctttcacttggtgtagaaaagattcatgcgtgcgtaaatcactgcatactgtataggaaagagtacgctcctttagatgaatgtccaacatgcggtgctagccaatacaaatcgaatagcaatactggcctagaaccgtctaacacaactgagggacgacagagaaaaatcccgcagcttgtgatgtggtaccttcctgtcaaagaccgcattaaacatatatactcaaacccgcgagatgcggaactaatgcactggcatgaagaagggcgcaagaaggatgggctgattcgacaaccggcagatgctcgtcagtggataaactttgatgctcagtacagagagtttgctaaagacccacggaacattagatttgccttgattactgatggagttaatccttttggagacatgagcagctcacatagtacttggacagtacttctcaccatgtataatcttccttgtcaaaagcgaaaatacgtactactaggtatcctcatacagggaccccgtcagcctggtattgatattgacgtatttcttgaaccattgttggaagatatggctgatttatgaaaagagggattgaaagtgtgggacgagtacttaagggaatactttacagtgaaggccatcatcttcgtgaccattaacgattatccagcaatgttttcagtttcaggtcaaattaaaggtaaaacatgatgtgtgatctgcttaaatggaacgtactataggtatctcccgggttccaacaagcttgtgtacatgcggcaccggcggttcctacgcacaaatcacaagtatcgcaagatgaaggcggagttcgatggcactgaagagactgatcctgcaccaaaaccaacatcgggagaaaatgtgtgtgcaatgacagagaaaattgtttgcgagtttggaaaagtgactaagaaaccatcaaaggggacaaagcgcaagaaacccgagaagaatacgaaacaaggggatagtaaggagcaagatgatagttcaaagccagatgataaactccctcccccattcaagaagcattccatattttttaagtacctcccgtactggaaagatctggaggttcggcatgccatagacgtcatgcatctagagaagaatgtgtttggcaacatagttggaacattgttggacatgccaaacaagactaaagatggtctgcaatcaaggatggacctagtcgagatgggaatcagggaagagttacaccctcaagaaggagagaagaatggcaaagtatatcttccaccagcctgtttcacactgacacctgaggagaagaagtcattttgcaactcactccgtgatgtcagagtgcccataggtttctcatcaaacatcagtcgactagtttcaatgaaagattttggtatctggttataattcacacgactgtcatgtcttgctcaccgtgtttcttgcaatttcaataagggccataaaatcagagcatttaaaggttgctatcacaaggttgtgctactttttcaacgcagtgtcacagaaggtcattagtctcgaagagttaggaaatctccctacattcgcacatgagacacagtgccaacttgagatgtgtttccctccgtcattttttgatacgatggagcacctcattgttcacatagtgccgtagatggttgcgcttggcccattgtacctccatcaaatgtggtcatacgagcgttacatgacggttttgaagggttacgtccgaaatcgtgcacatccagagggatcaatggttgagggttatagtactgaagaggttgtcgagtgctgtatcgattacctcaaagatgaatatgcaattggagtacctgtgccccgacacgagggccgctccaccggctccgctgccactgaccgctaccccgccggcccctccaccgcgccgccgacctctccaccgctgccggccgctccacagccgccgccgccatctctctccctctctcgcagtcgtccatgagcggcttcattatcggcctttcatcgtccacgagcgaagacgtcctcggccgaacggcttcgtcggccggttcgtcgtccacggccgaacctcgtcgtcggtccttccttcgtcgtccacgaccgaagctcgtcatcggccgttcgtcgtccacagacgtgtgtgcatgtgggtgttcctttttatatgtgtgtgcatgtgggtgtgagggggtatatattaagtataattaattacattctgcaatttcattttgtttttactaattaatttagcataatagtaagtactaattaatagcataagtactaattaataacatatctattctagcataatagtaagtagtaactaaattcgcaatttaattttgtttgtactaattaatttagcataatagtaagtactaattaatagcataagtactaattaataacatatctattctagcataatagtaagtactccctccgtcccataatataaggaattttgaggttttgattgcactgtttgaccactcgtcttattcaaaaaatttgtgcaaatataaaaatcgaaaagttgtgcttaaagtactttggataataaagcaagtcacaaaaaaataaataataattcaaaattttttttgaataagacgagtaatcaaagagtgcaaacaaaaactcaaaatcccttatattatgggacggagggagtagtaattaatttcgcaatttaaagttgtttgtactaatttgagtaatttaaaatgtggaggataacattttattttatgttagaggtttgatacgatggccgatagtactaaagggactgaagataagggtttaggggagcaagagcagtcccttgctgttgtggttgctccggaaccaacggtcccaccagaaaatagttccgacagcgacgtagctcacgaagaatatgagtactcgtcgccaagcgatccttgtccaagcccaagccttgaagagaagggaaaagggcgacggtgaagaaggcgacaaggactacattccccctaaagaaggggactaggatcatgtatcgaatgggaataaggaagtcctatggaaagagttgaagaaaatcttccagttcccggatggatcagaggcagcagtgaggaattgtgcactgcaaacaatggccaagtcttggcgtggttggaaaaccaccttgaacatgaaatttgtgaagatgggacgcacaccgttttcgatgtatgccaacataaccccgaatcagcgggacgactttctaacgttgaagaactcctcggaagaaattcaaaggagccaaaagtatgcagagttggtcaagaagaacaaatttcctcatcgcttaggctccgcaggatacgcaccaaaggtggagcggtggacaaaagaggaggaggaaatgaggaagaaggggcaatcggtaccaatggaggaatggacacagagatcaagtaactggcatgggggaagggttcgaggtgtgtcgagcaagatgagttggaaggaagggttcaaacatgacccccacaagaagcgtgaagcgtacaaggataaacttagagataaaggggctgtagagtttgaaaggcaaatgatggatttctgcgtcaagcacatgattttgcctcgccccgaaaccaaagaacctgagccagattaccccttcgatgacctcaaggagaatacaccctgcagattgcacgttcccattggacgctccgggaaaactcttgaggccgctacagccattgctatccctgggagaacatacaacgaagatttcatacccgatgcgtatgccaaggtgcagccgcaagtggtccacgaagggtttgagtcctacgacattgacttcccgactacagatggtgtatccgtacttggggttgcggtcgatcttgtaattctctggcacaagaatgacatatcctttggattgggcactgacgccacgcaaaaacctgtggtgccaaaactggggttgggaaaacctccgagaccttctaagaggaaggtgactgataaggcggaggaacccgagatgcaaaagaaaaatcatgtgccggaagtgccatcggagattgcagtgcctgaggcagccatggagattccagtgccggaagtgcccatggagattacagtggcagaaccagaggtgcaatttgtggcatcagtcgggtcagaaatagaagaagtaccaggattggaatgggacggtacagagccagaaatatttgaagaccattctcctgcgaaagaccccgaggtgcaagagaccacggtccctgagaaggcctctaccagttctgaggtgtctagagtgtttaggagccacgactccaagtccaaagatgagaacaaggagaagttcatggtaaccgtcttcagagggggtaaggaacatgccaagctcagagatgatgacccctataaggccgctgaactagtcgggccaacatacttcgcaaccgatgattgcgcggctgagtacgaacatgggaaagcactcttgctggaatgggcactgaacaaaggactatgggagatgaaaaggttacataccttctacatgcaggccagcaagaaaggcttgggcaatataacagcccgatcaccggcagattgtttcggcgaagaaggttacgtatggctagatttctcagatctccacgccatatatcgtcgggataagatggacgtcaactacgtcggtgtttggtgcatgatgcaatacatggatgctaagaagacaaaagaacctatcggcttcttggatccaactcggatttgccaaacacaacataccgtgaggctagcaccagggtcagaccagctgaagggcaagactccaaaagagatagctgaatacaaaaagggcttgcacaaggagaaattgattactgttgcacagtacattggacgagccttcttgcactttcaaaataagagagtcgtcatggccgcttataattttaacgatctttatatctgtttactcatccaccctaaagatggaaccgtagtagtcttggaccctatcgattacaaacaccagtcatacaaagaatttctaacaatcttacaatttgcgtaccagtactacaagttcaagggtggagaacagacccgaacaagggagaagctgctatgtcacaagcaaccacgagagacggtcctttgcgggtattacgcttgcgaattccttagagttaatgggagatataggactaacgcggaggatttgccaagattagaatgtcgaacaagctttgacgatacatgcattaaaaatgtccagcgtgatctgtgccacttcatccactatgattgctgtcatgtgaaaggagatttcttcaacccagagggtgccctagccacaagtgacgaattcaaggatcttcgggagtggaacagtgctataaca

SEQ ID NO: 10007 - DNA, 513 bp, Oryza sativa
  Clone ID: PAT_MRT4530_1636C.1
acagcgacagcgctcgccctttttttttttttttttttttttttttttttttttttttttttttttgtttttgtatgattgatattgattgattttttattaaagggtttttatttctagggtttgcacacgatagtatgcaacatcttattactgagttcccgttatccttgtttgttcaacaacaaccaaaggaaaaaaggggaagttttcaaggaccgggttgcaaatgtatggggtttgcaaagcaaactaaaaaacccgctggtggcaaagccaaaaaaaaaaagggggtgcatgccccgcaacaccaaaaaaagggggaacaggggcacggacgcatcatgcaagtggaagtgcacgcaccactgcttctaaaagagcggggggggcggcaaaaaaaaaaaaactggggagcgacccatgccaaacggtggaatgggggccaagctacacggaaacatggtgcccatggttaagggggaaaaaaaatactggaaaaaggcgattgca

SEQ ID NO: 10008 - DNA, 509 bp, Oryza sativa
  Clone ID: PAT_MRT4530_16370C.1
ggaaggcgggggtaaattttataaaaaacccggccccgcaggggggaagggggcaggagtccaggaggaaacccccggggggatagaggacccacccaagctggctggggacccccccaaaatggaaggacccccccccccccggacaacgacgacgagggtttttttaaggcgtaaaaaaaaaaggcgaggccggccaaaaaaaaaggggggaccaaaggcaagcaaaaaaaggccccgaccaaacctcgggaccacagagggagcacccatacaaaaaacccttgtgcagccggggaaagacaagaaaagtattctgttggagggaacagagaaagacccggtgggacggggcccacccttgcaggtggggaaacgcgaacgcgcggtttcgggccgcttctccacggccatttccattcccagcaaaactcgcccttggagagagggagacccgaggaacaaaggttctggggggggggttgggcgccccccaaaaaggagaaaaa

SEQ ID NO: 10009 - DNA, 6203 bp, Oryza sativa
  Clone ID: PAT_MRT4530_16371C.1
atggaaagttgggaatggatatatcattggccgaggtttttgtctccatatagaaacgaagtggctaaatttattggtattgccaaggttcacgctgagaagaacaatatgaggaagatgatttgtccgtgtgctgactgtaagaatgaaatagcctgggactttgacgatgcttttaaagtgaaggagcacttagtaactcgtggatttatggacaagtatgaaatatggacacataatggcgaagaacaagtggacgagcctgaaaatgtagttccgacacaagttgaagacatggtgcatgacgatggttctgttgaggacaaaatcgacctagaggaaatgttacgtcatgcagaacccgaggtgctgatggggtcggccagagggctaaataactttcaagctttacagaaggcagcaaaggaagttttgtacgatgagtcgaagggctgtgacagtgatttcacaacactccggtcagttcttgaacttatgaggttaaagacgagacatggatggtctgataccagtttcgacagtcttttagaactcctgcagaaaatgctaccgaggcctaactcactaccatccaacacatatcaagcaaagaaactcatatgccccctttcacttggtgtggaaaagattgatgcgtgcgtaaatcactgcatactgtacaagaaagagtacgtttctttggatgaatgtccaacatgcggtgcaagccggtacaagtcgaatagcaatactagcctagaaccctctgaagcaactgagggacgacagagaaaaatcccgcagcttgtgatgtggtaccttcctgtgaaagaccgcattacacgaatatactcaaacccgcgagatgcgaaactaatgcgctggcataaagaaggacgcaagaaggatgggatgattcgacacccggcagatgctcgtcaatggataaactttgatgcgcagtatagagaatttgctaaagacccacgaaacattagatttgccctgagtactgatggagttaatccttttggagacatgagcagttcacatagtacttggccagtgcttctcgccatgtataatcttcctacctggctttgtcaaaagcgaaaatatgtactactctgtatcctcatacagggaccccgtcaacctggtattgatatagacgtatttcttgaaccattgttggaagatatggccgatttatggaaagagggattgaaagtgtgggacgagtacttaagggaatacttcacagtgaaggcaatcatcttcgtgaccattaacgattatccagcaatgttttcagtttcaggtcaaattaaaggtaaaacaggatgtgtgatctgcttgaatggaacgtactataggtatctcccgggttccaacaagcttgtgtacatgcggcaccggcagttcctacgcacaaatcacaagtaccgtaagatgaaggcggagttcgatggtactgaagagactgatcctgcaccaaaacctacatcgggagaaaatgtgtgtgcaatgacagagaaaattgtttgcgagtttggaaaaatgactaagaaaccatcaaaggggacaaagcgcaagaaacccgagaagaatacaaagggaggggatagtaagaagcaagatgacagttcgaagccagatgataaactccctcccccattcaagaagcattccatattttttaagtacctcccgtactggaaagatctggaggttcggcatgccatagacgtcatgcatctagagaagaatgtgtttgacaacatagttggaacattattggacatgccgaagaagactaaagatggtctgcaatcaaggatggacctagtcgagatgggaatcagggaagagttacaccctcaagaaggagaaaagaatggcaaagtatatcttccaccagactgtttcacactgacacctgaggagaagaagtcattttgtaactcactccgtaatgtcagagtgcccataggtttctcatcaaacatcagtcgactagtttcaatgaaagatttgtcggtatctggttataattcacacgaatgccatgtcttgctcactttgtttcttgcaattgcaataagagccataaaaccggagcatttaaaggttgctatcacaaggttgtgctactttttcaacgcagtgtcacagaaggtcattagtctcgaagagttaggaaatctccgtacattcgcacatgagacccagtgccaacttgagatgtgtttccctccatcattttttgatatgatggagcacctcattgttcacattgtgccgcagatggttgcgtttggcccattgtacctccatcaaatgtggtcatacgagcgttacatggctgttctgaagggttacgtccgaaatcgtgcacatccagagggatcaatggttgagggttatagtactgaagaggttgtcgagtgctgtattgattatctcaaggatggatatgcaagtacctgtgccccgacatgagggcagattgagtggcaggggaacgataggaaagaagagattcgtcacccatgatcacaaatcattccaagaagctcacttcagcgtgcttcatcagtttgctatcgtcgagccatacatcgatcaacatatcgaactaatccgagctaacaattggttgcgagacctagacttacctgagggagaaactaccgattaaataactatgaagcggttggcttgtggtccatcaactacagtaaattcttggcagggatatgacattaatggattttcgtttagcacaagagcccgagataataagacctgtacgcaaaacagcggtgtccgtgtggaggcaattgatgaagccggggaaaaacaatcatacttcgggtttattgaagaaatatgggaaattgactatgggcacacaatgcaattccccatatttaagtgccatcagtttgtacagaagattaagaatgtcaagacatctactcagaagaccgtgaagccttacatgcgcacggacggtgtgggcaaaaatgttaaagggtaatgattgtatgtaagaagattatcttcgcaggcggaccgctcgcctgcgaagatctttgccctatataagggcaagcccgcggcgccaaaatttctaagtccaggcgggaaccctagaaaatttggcgccgtcaggctgccgaaatttttcaccgccgcacgccccctccaccgcgcgcacggccaccgccggcacccctccaccgcgcgcacggccgccgccggcccctccaccgctgtcgccggcccttccatcggcgacggccgtcggcccctccaccaccgtcgcccacccctccgctcgcggccgaacggcttcatcggccgatcgtcgtccacgagcgtcgtcgtccacggccgaacctcgtcgtaggccgttcgtcgtccacggccgaacctcgtcgccggcccttccttcgtcgtccacgactgaagctcgtcgtcggccgttcgtccaacacggacaggtttgaaacgatggccgatagtactaaagggactgaagagaagggtttaggggagcaggagcagtcccttgctgttgtggttgctccggaaccaacggtcccaccggatggtagttccgacagcgacgtaggtgacgaagacgaggagtactcgtcaccaagcgatccttgtccaagcccaagcccgaagagaaggaaaaagggcgacggtgaagaaggcgacaaggactacattccccctaaagaaggggactaggatcatgtaacggatggggataaggaagtcctatggaaagagttgaagaaaatattccagttcccggaaggatcagaggcagcggtgagaaattgtgcactgcaaacaatggccaagtcttggcgtggttggaaaaccaccttgaacaagaaatttgtgaagacgggacgcacaccgttttcgacgtatgccaacataacccccaatcagtgggacgactttctgaccttgaagaactccccggaagaaattaaaaggagccaaaagtattcagagttggccaagaagaacaaattttctcatcgcttaggctccgcgggatacgcaccaaaggtggaacagtggacaaaagagaaggaggaaatgaggaagaaggggcaaccggtaccaatggaggagtggacatagagatcaaggaactggcatgggggaagggttcgaggtgtgtcgagcaagataagttggaaggaagggttcaaaaatgacccccacaagaaacgtgaagcgtacaaggataaacttagagacgaaggggctgcggagtttgaaaggcaaatgatggatttctgcatcaagcacatgattttgcctcgccccgaaaccaaagaaactgagccagattaccccttcgatgacctcaaggagaatacaccctgcagattgcacgttcccattggacgctccggtaaaattcttgaggccgctacagccattgctatccctggtagaacatacaatgaacaattcatacccgatgcgtatgccaaggtgcagccacaagtggtccacgaagggtttgagtcctacgacattgactacctgactgcagatggtatatccgtacttggggatgcggtcgatcttgtaattctctggcacaagaatgacatattctttggattgggcaccgacgccggggaaaaacctgtgttgcctaaactgggtttgggaaaacctccgaggcctcctaagaggaaggtgactgataaggcggatgatccagaacttggtaaggaaaatccagtgccggaagtgccaccggagattgcattgccggagacagccaaggagattgcaccgccggagacagccatggagattcaagtgccggatgtgcccatagagattacagtggcagaaccagaggtggaatttgtggcatcagtcgggtcagacaaagatgaagtaccaggattggaatgggatggtacagagccagagatatttgaagacccttctcctgcgaaagaacccgaggtgccacgagtgattaggagccacgaatccaagtccaaagatgcgaacaaggagaagttcatgctaaccgtctttagagggggtaaggaacgtgccaagctcagagatgacgacccccagaaggcttctgtgctagccgggccaacatacttcgcaaccgatgattgcccggaaaagtacgaacatgggaaagcactcttgccggaatgggcactgaaagaggcaccatgggagatgagaaggttacataacttctacatggaggccagcaagaaaggcttgggcaatataacagctcgatcaccggcagattgtttcggcgaagaaggttacgtatggctagatttctcatatctccacgccatatatcgtcgggataagatgaacgtcaattatgtcggtgtttggtgcatgatgcaatacatggatgctaagaagaaaaaagaacccatcggcttcttggatccaactcggatatgccaaacacagcataccgttacgctagatccagggtcagaccagctgaagggcaagaatccgaaagagatagcagaatacaagaagggcttgcacaaggagaaattgattactgtcgcacagtacattggacgagccttcttgcactttcaaaataagagtcttcatggccgcttataattttaacgatcattatatctgtttactcatccaccctaaagacggaaccatggtagtcttggatcctctcgattacaaacacaagcaatacaaagaatttctaacaatcttacagtatacataccaatactacaagttcaagggtggagaacagacccgaacacgggagaagctgctatgtcacaagcaaccgcgaggaacggtcctttgcgggtattatgcgtgcgaattccttagggttaatggacggtacaggactaacgcggaggatttgccaagattagaatgtcgaacaagctttgacgatacaggtatcacaaatgtgcagcgtgatctgtgccacttcatccaccatgagtgctgtcatgtcaaaggagatttcttcgacctagagggtgcccttgcggcaagtgacgaattcaaggatcttcgggagtggaacactgctatgccataatataactagatgacgttatttgaagtgacaatgtaaaaaaatattgtaatatatatattttggcaac

SEQ ID NO: 10010 - DNA, 1769 bp, Oryza sativa
  Clone ID: PAT_MRT4530_16372C.1
atggaaagtcgggaatggatgtatcattggccgaggtttttgtctccatatagaaacgaagtggctaaatttattggtattgccaaggcacacgctgagaagaacaatatgaggaagataatttgttcatgtgctgactgtaagaatgaaatatcctgggactttgacgatgcttttaaagtgaaggagcacttagtaactcgtggatttatggacaagcacgaaatatggacacgtcatggtgaagaacaagtggacgggcatgaaaatgtagttccgacacaagttgaagacatggtgcatgacgatggttctgttgaggacaaaatcgacctagaggaaatgttacgtcatgcagaacctgaggtgctgatggggtcagctagagggttaaattactttgaagctttacagaaggcagcaaaggaagttttgtacgatgagtcgaagggctgtgacagtgagttcacaacactccagtcagttcttgaacttatgaggttaaaggcgagacatggatggtctgataccagtttcgacagtctgttagaacttctgcagaaaatgctaccgaggcctaactcactaccatccagcacatatcaagcaaagaaactcatatgccccctttcacttggtgtggaaaagattcatgcgtgcgtaaatcactgcatactatacaggaaagagtacgcttctttagatgaatatccaacatgcggtgcaagccggtacaagtcgaatagcaatactggcctagaaccctcagaagcaactaagggacgacagagaaaaatcccgcagcttgtgatgtggtaccttcctgtcaaagaccgcattaaacggatatactcaaacccgcgagatggaccccatcaacctggtattgatatagacgtatttcttgaaccattgttggaagatatggctgatttatggaaagagggattgaaagtgtgggacgagtacttaagggaatacttcacagtgaaggccatcatcttcgtgaccattaacgattatccagcaatgttttcagtttcaggtcaaattaaaggtaaaacaggatgtgtgatctgcttgaatggaacgtactataggtatctcccgggttccaacaagcttgtgtacatgcggcaccggcggttcctacgtacaaatcacaagtaccgcaagatgaaggcggagttcgatggtactgaagagactgatcctgcaccaaaacctacatcgggagaaaatgtgtgtgcaatgatagagaaaattgtttgtgagtttggaaaaatgactaagaaaccatcaaaggggacaaatcggaagaagcccgagaagaatacgaagggaggggatagtaagaagcaagatgacagttcgaagccagatgataaactccctcccccattcaagaagcattccatattttttaagtacctcccgtactggaaagatctggaggttcggcataccatagacgtcatgcatctagagaagaatgtgtttgacaacatagttggaacattgttggacatgccgaagaagactaaagatggtctgcaatcaaggatggacctagtcgagatgggaatcaaggaagagttacaccctcaagaaggagaaaagaatggcaaagtatatcttccaccagcctgtttcacactgacagcctgtttcaattttgcaggatatgtgaatttgtcaaggattttaaataacatgttggagggtatgttaacatcaacatgttgatgaaataggaagtcaattagtgc

SEQ ID NO: 10011 - DNA, 2686 bp, Oryza sativa
  Clone ID: PAT_MRT4530_16373C.1
atggcagcgggggagcagtgcaagacaatgacagagttgaacggcaagcggtcgccggccaccgccaccgtcacgacaacccggcatgtgggtctcagagatatggaaagtcgggaatggatgtatcattggccgaggtttttgtctccatatagaaacgaagtgtctaaatttattggtattgccaaggcacacgctgagaagaacaatatgaggaagataatttgtccatgtgctgactgtaagaatgaaatagcctgggacttcgacgatgcttttaaagtgaaggagcacttagtaactcgtagatttatggacaagtatgaaatatggacacgtcatggcgaagaacaagtggacgggcctgaaattaatgtagttccgacacaagttgaagacatggtgcatgacaatggttctgttgaggacaaaatcgacctagaggaaatgttatgtcatgcagaacccgaggtgctgatggggtcggctagagggttaaataactttgaagctttacagaaggcagcaaaggaagttttgtacgatgagtcgaagggctgtgacagtgagttcacaacactctggtcagttcttgaacttatgaggttaaaggcgagacatggatggtctgataccagtttcgacagtttgttagaacttctgcagaaaatgctcccgaggcctaactcactaccatccagcacatatcaagcaaagaaactcatatgccctctttcacttggtgtggaaaagattcatgcgtgtgtaaatcactgcatactgtacaggaaagagtacgcttctttagatgaatgtccaacatgcggtgctagccggtacaaatcgaatagcaatactggcctagaaccgtctgacacaactgagggacgacagagaaaaatcccacagcttgtgatgtggtaccttcctgtcaaagaccgcattaaacggatatactcaaacccgcgagatgcggaactagtgtgctggcatgaagaagggcgcaagaaggatgggatgattcgacacccggcagatgctcgtcagtggataaactttgatgctcagtacagagagtttgctaaagacccatggaacattagatttgccctgagtactgatagagttaatccttttggagacatgagcagctcacatatttcaggtcaaattaaaggtaaaacaggatgtgtgatctgcttgaatggaacgtactatatgtatctcccgggttccaacaagcttgtgtacatgcggcaccagcggttcctatgcacaaatcacaagtaccgcaagatgaaggcggagttcgatggcactgaagagacagatcctgcacccaaaccaacctcgggagaaaaggtgtgtgcaatgacagagaaaattgtttgcgagtttggaaaagtgactaagaaaccatcgaaggggacaaagcgcaagaaactcgagaagaatacgaaacaaggggatagtaaaaagcaagatgatagttcgaagccagatgataaactccctcccccattcaagaagcattccatattttttaagtacctcccgtactggaaagatctggaggttcgacatgccatagacgtcatgcatctagagaagaatgtgtttgacaacatagttggaacattgttggacatgccgaacaagactaaagatggtttgcaattaaggatggacctagtcgagatgggaatcagggaagagttacaccctcaagaaggagaaaaaaaatggcaaagtatatcttccaccagcctgtttcacactgacacttgaggagaagaagtcattttgcaactcactccgtgatgtcagagtgcccatagtgtttcttgcaattgcaataagggccataaaaccggagcatttaaaggttgctatcacaaggttgtgctattttttcaacacagtgtcacagaagggcagattgagtggcaggggaacgataggaaagaagagattcgtcacccatgatcacaaatcattccaagaagctcacttcagcgtgcttcatcagtttgctatcgttgagccgtacatcgatcaacatatcgaactaatacgagctaacaataagggtcgcaccaccgagtggataatgaaagaacacaagcgtctcttcgtagattggttgcgagacctagacttacctgaggaacaaactaccgatgaaataactatgaagcggttggcttgtggtccatcaactacagtaaattcttggcagggatatgacattaatggatacttgtttagtacaagagcccgagataataagacctgtacgcaaaacagtggtgtccgtgtggaggcaatttatgaagccggggaaaaacaatcatacttcgggtttattgaagaaatatgggaaatcgactatgggcacacaatgcaattccccatatttaagtgccagtgggtaaaatacctgaacggggtcaatgttgataagttcggtcttacttttgttgaccttgcgagtatgggtcacaaggatgacccttgggtactcgccaatcgcgtggcacaagtgttttatgtgaaagacccttcaaatttgaagaaagatatagtgctaccagggaaacaaaagatattgggagtggatggagttgaagatgtcgaagattacaaccaatacgatagtatgccactttatagtcagtttgtatag

SEQ ID NO: 10012 - DNA, 120 bp, Oryza sativa
  Clone ID: PAT_MRT4530_16374C.1
atggagttttgcttggagcttaaggtgacctatgtgcttgctcttgcccgccgccaacaggagctactcctactcgacgtgtgcatccttctcctgcgcctcaacaacagtattgattga

SEQ ID NO: 10013 - DNA, 1020 bp, Oryza sativa
  unsure (1)..(1020): unsure at all n locations
  Clone ID: PAT_MRT4530_16375C.1
ccggccgggggatgggggccacgcggcctccaccccccatatcaacccaatccccatccccaaccccagttgctgcttttgcttcggtcacccggtcagtgctgcagacaagccacccccttcctcgcgtagactgctccccccacaaacaaaagcaatcctaatctcggattcgaggcgaacgagcggcggcgagggagggggactagcggcgatcgcgattggagtcgggtggacaccgatcgcggcggcgctctgggggatcggggtgtggaatcgagggggagggaggaggagacggaggcgatggggcggctgttcgtgatgcacctggaagggaaggtgtacagctgcaagcactgccacacgcacctcggcctctcctccgacatcatctccaagtccttccattgcaagcacgggaaggcgtacctcttcaataaggttgtcaatgtgacttctggagtaaaagaggatcgcatgatgataaccggaatgcatactgtgtctgatatcttctgtgttggctgcggatccattgttggatggaaatatgaagctgcacatgagaagagccagaggtacaaggaagggaaatttattttagagaggtataaggtgtctggtcctgatggcagccactactttgttacacatgatgctcatgttgggggaagcgacgtggacgacgtatgaagcacaactcgacatgctcaagccttatccatgtaatccatgtaaataacccaagtgtttgtgggtcttagttacccggggatttgcttccattcagagcaaccccagggtaattgttgtcctaaatgacctaatatcctatcatcttccttcaggagttccggttattattgggtgttaccgtctgtatatgcatgtaaccagtgatgcctgtagtagccccctaaaagctgttgtaatcctggaatgtatctcaggccctaatgactaaataaaattctgcttccccagaaaccannnnnnnnnnnnaanagagggcgcaaa

SEQ ID NO: 10014 - DNA, 436 bp, Oryza sativa
  Clone ID: PAT_MRT4530_16376C.1
gccatagcaaaggagtatatcatagagatttgaagcctgaaaacctgcttcttgactcacgtggaaacttgaaagtttctgattttggacttagcactttggcccagaaaggagtaggccttcttcacacaacttgtggaacaccaaattatgttgctcctgaggtgcttagcaacaatggttatgatggatctgcagcagatgtttggtcatgtggtgttattctctatgttttgatggctggataccttccttttgaggaagatgatcttccaacactgtatgataagattactgcaggtcagttttcatgcccttattggttctctccaggtgctacatcgcttatccacagaatactcgacccaaatccaaaaactcgtatcactattgaacagataagggaagacacatggtttaagaagacttatgtagc

SEQ ID NO: 10015 - DNA, 2818 bp, Oryza sativa
  Clone ID: PAT_MRT4530_16377C.1
acccggtcagtgctgcagacaagccacccccttcctcgcgtagactgctccccccacaaacaaaagcaatcctaatctcggattcgaggcgaacgagcggcggcgagggagggggactagcggcgatcgcgattggagtcgggtggacaccgatcgcggcggcgctctgggggatcggggtgtggaatcgagggggagggaggagcccacgcgtccgcccacgcgtccgagcccccccaaagccgagctcgcgcgcggcggcgtcgtcgtcttcctcctcttccccccgagttggattcgtggccgcgcggcggatgggaggggaggagggaatggcggcggggaggaagaagcgggtggggaggtacgaggttgggcggaccatcgggcaggggacgttcgccaaggtcaagttcgccgtggacgccgacaccggcgccgccgtcgccatgaaggtgctcgacaaggacaccatcctcaaccaccgcatgctccaccagatcaaaagggagatatcaataatgaagattgtaagacaccccaatatagttagactaaacgaggttctagctggaaagacgaagatatacataatcttggagcttatcactggaggcgaattgttcgataaaatagctcgccaagggaagcttcgtgaaaatgaagcaaggaagtacttccagcagcttattgatgccatcaattattgccatagcaaaggagtatatcatagagatttgaagcctgaaaacctgcttcttgactcacgtggaaacttgaaagtttctgattttggacttagcactttggcccagaaaaagtgttctgattgggatttcttttttgagggatttcagggagtaggccttcttcacacaacttgtggaacaccaaattatgttgctcctgaggtgcttagcaacaatggttatgatggatctgcagcagatgtttggtcatgtggtgttattctctatgttttgatggctggataccttccttttgaggaagatgatcttccaacactgtatgataagattactgcaggtcagttttcatgcccttattggttctctccaggtgctacatcgcttatccacagaatactcgacccaaatccaaaaactcgtatcactattgaacagataagggaagacacatggtttaagaagacttatgtagccattaaacgtggtgaagatgaaaatgttgatctggatgatgtacaggctgtttttgacaatattgaggacaagtacgtttctgagcaagtgactcataatgatggtggccctcttgtgatgaatgccttcgagatgattacattatctcaaggtttggatctttcagcattatttgatagacagcaggagtttgtcaaacgtcaaactcgttttgtctcaaggaaaccagcaaagactatagtagctacaattgaagttgttgctgagactatgggtcttaaggtccactctcagaattacaagttgcgtcttgaaggtgtatcttcaaacagaatgagcccgtttgctgttgttctacaggttttcgaagttgctccttctctgttcatggttgatgttcgaaaggttgctggtgacacactggaataccacaggttctacaagaacttgtgcaacaagatggaaagcataatctggagaccgattgaagtttcagcgaaatccgcactgctgaggacagccacatgctagcctggcgctaacgcagctgcaactcctgcatcagtgggattttcaggttttcaggttgtcaactcctagcccgtccaccgaagttgctcttgcaggcgctgcatgtaccacatagctgagtcagttcttcagtagatcagtgtaccattctagtttcatgcaccagatgttttggtagtattgttaatatagaactgtagatagtccatatagcggccaattgtgcagtctgtatgtaacatggatatagataggtttcttgtgtagtagtagtaaataagctggttattttgctgccatgaaactggaatgacttgtgaacgtcgaaatgctctcgtgtatgtcggatcttcttcacttagccgttctcaaggatgagagcaattaatcttgtgatataatcctatatgtatttccagggcagaaatggaaaagaaaagggaaacccggctcccccaaaagtaaacagtgtgatcttatacttaaaaataattgaaacggaggcaatggggcggctgttcgtgatgcacctggaagggaaggtgtacagctgcaagcactgccacacgcacctcggcctctcctccgacatcatctccaagtccttccattgcaagcacgggaaggcgtacctcttcaataagctaaagctacttgcatacaacacagtactaagaataattaataccaggaaatacatgtttgttgatttgtgggtagtggaagtcgatttgggggctattatagcaaaggggtttaaatggaaaagtctagctaccgtggaggaagctgcacatgagaagagccagaggtacaaggaagggaaatttattttagagaggtataaggtgtctggtcctgatggcagccactactttgttacacatgatgctcatgttgggggaagcgacgtggacgacctgattggctaccctcaccatccattagttgagcgacacgtggcgagatacaatcggtggaaagaggcgagatacaatcggtggaaagagcaccagggtgaagtatctgttgtaacggttgctcatgacctagtgaaattagaagagaatagtgaaattaaaagagaagggagtgttagttaa

SEQ ID NO: 10016 - DNA, 1039 bp, Oryza sativa
  Clone ID: PAT_MRT4530_16378C.1
atggaggcaaatgctcctgctgtactgcccatggacgccaaactgatggtggccacagcccatggcgactgccagcagctgaaggatgtcgtgaacaaggaggatgctgccatgatggtgctggtgatggcgtcaagcaacggcacgccggcttccgccgcggcggcaagtcctccggtggccatgcatccgctgctgcacgcctcagcttcctccggggattggaagggtgtgaattttcttctcaacagggaagaagcatatgcagattcatctgttcagcccagtaaaaagtttctgaagtccctagaagcatgcatccccggcaactgcaccaacggaaggtgccgacctcgccgcaagcttttaatgacatacaagaagtcgcttctggagggtgtcaccatcgagggagacactgcgctccatgtggtggccacacatggggatggccacaactacttgaaatgtgttgacacaatctgtgccaagggcaagcacctcctgtttaagccaaacaataaggatgatacacccttgcactgtgctgccagggctgggaatcacgaaatggtcaataagcttattggtctagctattggacctagtagaagggaggaaagtgttgacagcatagcgaataacctgatccttaaaagtgataatctttctacagagacattcttgagcgatgatgtccgtgttgcaaataatcttacagtcggagatagtattagcataagtgaagacaatgtccacaggggagtggaatatctcagaatggaaaatgacagtaatgaaacggccttgcatgcggcaattcgcattggtcatagtcctatagtaacggagctattgacatatgattctgaattggcgctatttccgcaagaaggcacatcaccattgtacctagctatcttgctgaagcaatttgacatcgcgcggacattataccagatgagtagacaaaatattctctcatattctgggccaagtggacaaaatgcattgcatgttgcagttctccgaagcagag

SEQ ID NO: 10017 - DNA, 2175 bp, Oryza sativa
  Clone ID: PAT_MRT4530_16379C.1
atggaggcaaatgctcctgctgtactgcccatggacgccaaactgatggtggccacagcccatggcgactgccagcagctgaaggatgtcgtgaacaaggaggatgctgccatgatggtgctggtgatggcgtcaagcaacggcacgccggcttccgccgcggcggcaagtcctccggtggccatgcatccgctgctgcacgcctcagcttcctccggggattggaagggtgtgaattttcttctcaacagggaagaagcatatgcagattcatctgttcagcccagtaaaaagtttctgaagtccctagaagcatgcatccccggcaactgcaccaacggaaggttgccgactccgccgcaagcttctaatgacatagaagaaggtgcaaacatgccattgttgttgtctcccgagtcgcttctggagggtgtcaccatcgagggagacactgcgctccatgtggtggccacacatggggatggccacaactacttgaaatgtgttgacacaatctgtgccaagggcaagcacctcctgtttaagccaaacaataaggatgatacacccttgcactgtgctgccagggctgggaatcacgaaatggtcaataagcttattggtctagctattggacctagtagaagggaggaaagtgttgacagcatagcgaataacctgatccttagaagtgataatctttctacagagacattcttgagcgatgatgtccgtgttgcagataatcttacagtcggagatagtattagcataagtgaggacaatgtccacaggggagtggaatatctcagaatggaaaatgacagtaatgaaacggccttgcatgcggcaattcgcattggtcatagtcctatagtaacggagctattgacatatgattctgaattggcgctatttccgcaagaaggcacatcaccattgtacctagctatcttgctgaagcaatttgacatcgcgcggacattataccagatgagtagacaaaatattctctcatattctgggccaagtggacaaaatgcattgcatgttgcagttctccgaagcagagttggtgagaaacggaccatcgagatttttgttcagaagtatcccagcagtgctggcctgcgcgataaaagaggaagaacatttcttcatgttgctgttgagaacaggagagtgaatgtagtcggctatgcttgcagaaatcggtctttccttatttttcagagcaccgaagaaatggtacgctttgtattgacacaagctggtgctatgaatgacagttgccgccacgatcactttagagaaaaacacaaagacactcacaacctaaaatcagatagtgaaagcaaagaattagaaaagctaaaggacgcaacggaaacaatggccattggctcagttctaatagcaactgtgacgttcggtgcaactttcgcattgcccggaggttacagagcagatgaccactcaaacggtggcacaccaacacttgttgggaggaccggagcggcggcgggcggagacggcggcgagcggcggaggcgcgggtgtggcgtggcggcctgcgagcagcagagacatgggagtggcggcggcaggcactggagtggcgacggcggtggcgcctgggctgagctccaccgcctcctcaccgacggtgaccaggcgttggagcaggaggacggcgggcggcggcaagacaaacaagcagcagcagatcgccaggagcggaggcggcggcggccgtggtggtacatggtccagatcaatgtcaaacgatggctacacaggaggaccatgctgcttctgagagacaatggcggcatgaattcactgtgcgaggataggtacatcaagctcacatgcctgggcactcatcgcatcctcatccattacgccaggcagatgcagtgcttgtactacaacgtcctcatgaacgaggttgggatggatagctgggaggagtacaccgagcaggacagggaggatgtccgggcgctgatagacaagatcgtcgatctctgccggagttcgattcccaggccgccgcacgacggttttgtgtggttctctctcttttgcgatttgtacttgtcgccagaaattgttttgatcttggaccttcaaggatctgaagacgaagacttgagggaagtcaccctttga

SEQ ID NO: 10018 - DNA, 1716 bp, Oryza sativa
  Clone ID: PAT_MRT4530_1637C.1
atgatgatgcagcaactccagaaccagcagaaccagggaaataaccatgcacctccccagaacaagttagcagaatttcttcgtgtgaggccgcctattttctctagtaccactaatcctgttgaagctggtgattggttgcacgccatagaaaagaagttggatttgcttcagtgcactgatcaggagaaggtctcatttgcatcacaccagctgcatggccctgcctctgaatggtgggatcactcccgccttaataggattactgctgaacctatcacttggcttgagttcaccgctgctttccggaagacgcatataccatcgggagtggtgtctctcaagaagaaggaattcaggtcgctcacccagggatctcgctctgttaccgagtatctgcacgagttcaatcgtctggctcgttatgctctggaagatgtacgcactgatgaagagcgccaggagaagttcttggaaggacttaatgatgagctttcttatccactcatgactggggattatcctgatttccagaagttagtagataaggctattcgccaggaggacaagtacaatcgcatggaacagaagaaacgccggattgctcaattcaagacacaacaggggaataatcagaggccgcgtcttactttaggaccccagtccatgccacagggaggttcttcgtctgttgttcgtccgcagcgtcagttcttcaacaacaatgctggcaacaacatccgcaatcaagctccacgccctgttgcagctccaacacagcaacagcctgccaagagggagcaaggcagcaagcccgtagtgtgtttcaactgtggagacccaggacattatgctgacaagtgtccgaagccccgacgcgtgaaggctgtccctgcccagagcaactctaccgcaccagcgccaaaggcccgtgtcaatcatgttgctgctacagaagctcaagtccgggagtatcctgatgtgttcccagacgatttacctgaaaggatacatcagaccgagttcatctccatggggagctccagtaatttttgtggaaaagaaagaccatacccagaggatcttaaaggtgccaccgttttctccaagatagatcttcgatcagggtatcatcagttgagaatcaaagaggaagatatacctaagacagcttttaccactagcctcgcgccgccgttgtcgccgccgctccagccgtgctccgccgtcgctccagtcgtcgccgtcgctcggggaggtcgccatcgtggtcgccgtcgcgtcgccgtcctcgtccgccccttcgccgtcgctgaagaccgccggagcatcgtcgccgtcgtcaagccgaaggtcgacgccgcttcttcctcgacgccgtcgccgtccgttgatcttccgccgccgttttggtcgctggtgagttcgccgcgtcgccctctacgtcctggtgccctccgttcgcgccgccgcgccatcgttcgccggcgagcttgtgctcccgagccgccgcaggtggtgacgtcaccgctgacgtcatcgtcgtcgtctctcgtggtccggccgtggatcggagaagagtttgaagagttccaagggggtgattatgatccaggaaaggtgcgctgtagtggattgtgttgtgcaaggggtattgtcacagctcctttccgagaggaagagttctacagtgaagctgatggtgtggaggattag

SEQ ID NO: 10019 - DNA, 665 bp, Oryza sativa
  Clone ID: PAT_MRT4530_16380C.1
cttcctactcgctttctcatccccatctccatcccaatcgcagctccagaaaaagcgggacaataccgaggttgacagcggcagatcaaggcgagcaaggataaatcggatcgcagctaaatagtttggtaagtctcaaactcagaaaatcccatcaccttctatctttgccttcccagactgtagccgggaaaacatatagggttaataaagaagagtaatgtgatggattgacaaagagtatgttagaaagcttacatgtacaattatgtttctgttttttttttaaaaaaaggattgttcctgtgttttgttcagcaagggaacattaatgttaaaggtcgatagccaactcaaacgatttttttattggataatatttttttttgacatcatcagcaatgatctaaaggtttggtttgacattaacaagtgccttcgattacaggacaatacacttgtttcttgcctgcgtcattctgttgggcaaatctgtgaatcaaagacatcaatgtattaggagtttaggacacaattaaatgctaagcagttaaaaaatctattactaaattcataaaaaaaattttgatgatctacatatctacactgatgattcaaaaatggctggaaattagtaacactttggtcacaataatcctattcac

SEQ ID NO: 10020 - DNA, 554 bp, Oryza sativa
  unsure (1)..(554): unsure at all n locations
  Clone ID: PAT_MRT4530_16381C.1
ttttcgnttttctatagcttcggaggatatggactctctatcttttggtgctagaaggtttcttcgccatttaaccgacctgagttttaagagatctcctgtaacagaattcgaagtgtcaaaggttttggaggaacttggactcacaatggatcagttcattgatttgtgtatccttagtggctgtgactactgcgagaatattagaggttttatcacgttttttcttttttcacacacttaatattagattctaccaatgatatcatattaccatgctgtattcagaatttagaggttgcttcattactttctcatgtcatgggtgctttagacatagcattctccattgctaatgtatctataatagaaatgtggaagtgtgatatcctattcttgagttaaaaacttcaaattatattttctgcaattgcttttatagctcaacgctttgtgcttctgttggctaaatcttgaataaatgccactcaaagttctaagaagattgtagagatatcataatgctggagaattgaatgttgtgtatgctgcat

SEQ ID NO: 10021 - DNA, 237 bp, Oryza sativa
  Clone ID: PAT_MRT4530_16382C.1
ggactgaatggccggacccacccacgcgaaatcattgaagaatatgacgaaccgatcgacgaggagatgtatatatggcttgcagagggtcgcctgcaagaaagtagataccaaaccccatgcaggactatggacccactcggataagcacaacatgcagggagggaaccaggggatggacaatgacggtatcaccataactggcgcaagggagaacggcgcacaacaggcccagaa

SEQ ID NO: 10022 - DNA, 416 bp, Oryza sativa
  Clone ID: PAT_MRT4530_16383C.1
aaatatatatagccggagcttccatatattaaattcacatatgccacacccaacatcatatagccggcgcacataccactctcacatgaagtcacagagagatcatgcgagacaaaggcactagcagagcacggccggtgaacacaaacgacgatgaacatactgggaacacacgaaacatggcgggagacatcatctactcacagatgaacaatctaacagggctatatatgacgatgaccgcttaggtgccaccagactcctagcaccccggaggctcgtacgcgatgaaactcatgagctgaacctgcctgacgttgtcgaagccgatgatacggacgaatgcatcagggtacgccttcttggacttctcgagctccttgagcacctgggtggcgtcagtgcacccgaacatg

SEQ ID NO: 10023 - DNA, 516 bp, Oryza sativa
  Clone ID: PAT_MRT4530_16384C.1
atgaaggaggacctgaggcgtgctaaggaggatccgctcattgccgccggccgcttccaagtccggcgtcgccggatctgtccttgtgttgttgtcgtcgttgtcgttgccctagccatcgccatcgttgtcttcattgtcttcgttgtcgctaaggccggtggaggtggattcgccgctcccgagtttggcgctactggatctggcctcacgcagcttgccaccgtcatcgtcgttgtcctagctattgccgtcattgtcatcataatcgtcattgtagccgatgccagtggagatggatctgccgctcccaagtctggcaccgctggatccacccatcccgggcccgagggcggcagatctgctgccgcgtggctttgtcgcagccataaccaccgttgtcacggccacggtggaggaaagggagggggaggggatggccgttggaggaggggtaaggagagaagaagagaacagagtggggttgggggggagggaggagaggagatattttaa

SEQ ID NO: 10024 - DNA, 1341 bp, Oryza sativa
  Clone ID: PAT_MRT4530_16385C.1
atggcaagcagcaacaacaagaggccacctccttacctcctcctgctgctgctggcactcggcgctgcggcgctgagcgtgggcatcctgcacaagatgagggagcgccgcgtcttctccatcctcctccaggaacgcgatcagcagcttatctcccttcaagccctcctgcagaaagaacaagaaatcagtaaagagatgaggagaaagatggatgaattagaagccaaaacatctgtcctaagcattgagaggacagaactgaaaaacaagctcatggattctgaaaccaccacgacatatctcacaaatacccagaaagagctggaagcggctctagtggaaaaagagggtcatatcaaccaaatgaaagagaatgcggctgcttcaggccctgaacaaatggcagctataaaggaacttctgcagcaaaaagaagctgagcttgaagagatcaagaccaagttgcacgactacaagaaatcagatacaaatatcagcgagagcattttggttggcacaaacaatgagaatacaacttctgacacagcggtacctgagaattctgcaaaccctggtgactctgctccagcagaagaacatcattcttacgacaatagtgcgtcagagagtaaccaagatgagagcactggagcaagcacaaacaacgaaaatgcaactgttgatactgtggtggtcgataagtatgcaaactctagtgattccacacctgctactacagaagaaccgcatccctacaacaccactgcatcagagagcaaccctcaagaaaatagttccccagaacaacactttataaagcttagaactaacagggaagatgatgaaccacaagacaaaacaacaggtgatgccaatgataattcaaatgatgctctagagggaagccacttggggaaatctgaacttcctcagtggagccccaaattggcagatagtcaagataatagcacagaagaactagatagcactagacagttggagaactcacaaggtgaggccaactatgaaagcagaggcagtaatctgctggagaaagaggtggaagccagcaacgaagttgaaccaatgaaggaaaccagtcctgagactgagctggagacttcgaaggatagcttgagtgaagccaaccaaaacagtacacaggctgttgaacctgtggctgatcctgcagatgtgaagccccgtatgcccatatataatgatgaaacaaaagagacaagcaagagacgtaggcggagaaagtttagatccagaaggaaaaagaggaccaatgctccttctaccaatgttgatggagaagtcaccaaagtaaggtag

SEQ ID NO: 10025 - DNA, 335 bp, Oryza sativa
  Clone ID: PAT_MRT4530_16386C.1
ctcacgcgtgcgttcgtacagtatgccctcgagaaggtcgtctttctgatgctaagaaaggggcattgtactgagatgggacatcttgtaccggatgggctgatcaaacaaagatatagtctctctatctgtgggtcacactctgaagacgggcacatcctgaaaagtgtgtatttgaaggcacatggactcatgatcctctgaagtttcacaattcgtactttctagagctactcaatggacattctgaggagcttcctgagcctccaactgacaaagcattgatggaagatccttgatttataccttatgtggagctttttcccagggatgaa

SEQ ID NO: 10026 - DNA, 1671 bp, Oryza sativa
  unsure (1)..(1671): unsure at all n locations
  Clone ID: PAT_MRT4530_16387C.1
ttttttttttttttacagctccaaacataatgtgtgggcntgattcacaaagggaaaaactcaccaaattatacagaattccatcagagttatatctacacaacaaacaaagcactactcatcaatcagcacagtgtgccaagaacagcaaattctccagtgaaatttttctgtgagctgtgcccaacagttcatcactgaatcatcatcgcaattaccaagaacagcttatacaaattccatcagggctatatctatcaaattatacagaattccatcagagttatattttccaatcttggagatgagcgattcgaaggcgccgacgagcgccttcaccttgctcttcctggcaatggcgagcttcccggcggtctcctcgatcacgctgttgtacagccgccggctccgcttcttctccagcgtcttctggtgccggagcgccaccgccggcaccacgaaccccccgccgccgcccgccgccgccgtcccgccgatgctgcctcgcctcctgaggctcctcatcctgagatgaaatccgctgccgccgccaccgccgctgctgctgccgccggcgtcgcccctcctgaagaatctgagccgtgtcgtcgccggcgcgtcttctggtggcgccgccgtcgcggcggcgcggctgctcctggagcggatgaccttgaaggcggtggtggtggtggtggtggtggacctgctcgcctgccgcgtgaacgggaagcggactgatttggcgctgccggtgatgctcatgctcctcgctcgccggtgcgacggtcgcggcggcggcgacggcggcggcgccatgccggatttcttctcttcttggcaaggagggttgtgtggcttctcttctttgatatcatttgctgctgatgatgatgatgattggtgagaaatttgttggctaatttcgacgagatttctcttcggtttgggaggcttcaagctgttcgtcctggtcgtggtcatcttcttcttgctcttgtgagaagaaggtggagtcgatttctcgccggctttgagctccggcgatggaggcggcttgccggttagcttcgacccgacggatttgaccagcttcttcttcgatgatggtccatcgatgacgtcatcggttgattcagcgacgatcttgctcttaccatgtggagatgatttgattggtttcttccccttggtcacactcacatccttcttcttcctggcgtcgccgccgccggcggcgatggtggtcttctccggcggcagtggggttgactcgtacgccacgatgtccttccacaccaccacgccggcgtcgcccttcttccccgtgtcgtcaacggcggtggccgccgctttcttcccggccttcacgggcttggtgagatccccgacccgtctccgcgacgacgccgaccgcagcttagccatcgccgtcgccgccgcgagcggcggtggcggcggcgtcttccggggcctcggctgggccgccgccggccggcgagactcccgctcctcgaaggcgtgcgcgccgccgtacttgcaggcgtggtggcaggacccagccgacggccggtggtagcaagcagggacggcgctggccttcgcctcgccgcggtgacgcggacggcggcgcccctcgctgctcccggcccctccggcgatctcctccat

SEQ ID NO: 10027 - DNA, 550 bp, Oryza sativa
  unsure (1)..(550): unsure at all n locations
  Clone ID: PAT_MRT4530_16388C.1
ggattggcaangccgggtgccaagaacccgtaccgaatggcttgggngcccagcgccggctgtggtttgggtaacngacaccaagcacgnaacagcccaaagcagccgttgatcaggttcaggcngaacagggtgacggcggcgatgcccaggtcgatgaagaacccccccaaacgggcgaaacggcaacgcgggcgcggcagaagccggcggaaccgggggcggagcggaaaccggggcggatgcggacatcaggtacctgtgttcaagagtcgaaagccggcgcgcctccccgcgcaccggccgtgtcccgattgtgtcagatatccaggtttgcgaccttcagcgcgttgtcttcgatgaagtcgcgacgcggttcgacgacatcgcccatcagcgtgctgaagatctggtcagcagcgacagcgtcttcgatgcgcacctgcagcagtcgacgggtttccggattcaccgtggtgtcccacagctgctccggattcatttcacccaggcccttgaatcgctggatctggcggccgcgcttggcctc

SEQ ID NO: 10028 - DNA, 721 bp, Oryza sativa
  Clone ID: PAT_MRT4530_16389C.1
atcaatcacataaaccactggtccggataagcatagagattcgttcgttcaagatgctataggaacaactcatttagctacatatacaccagattttgattgctttgccaccttcaagactttgagcaagaacaacaactaataaaagaagatgacaaaagaagaagctttttttatatatatttgtaatttttgtaatataccttcagtcgttgctatgatcgagcatcaaaacaagaagagaaagccaaaaccagaggaaaataaattgaaaaagagaagcgaaggcgaagaagaagatatgaaactacgcatacagttgatgcaggggatgatcgatgtggtgttggttggttgctgctgtctgaactctgaactctgaactctgaaagagaagaagagatcgatcgatcgatgggagtagctagtagaatagctaggaccagccatagacgaggtggaggtagcgatccttgatccacttgaagctcttgcggaaggagcccttgaccttgccttccacggagtaggccttgtacgacgccacccgccgcttccgctccatgtccgggtcacccagcgccagccaccgccgcttcgacttgctccgcttcgccgccgcctccgccgccgcctgacccgtcccccgctcctcctccgccaccgacccccagtaccccaccttcccactcccgcctccgccgtactcgtactggtactg

SEQ ID NO: 10029 - DNA, 134 bp, Oryza sativa
  Clone ID: PAT_MRT4530_1638C.1
ggctaaggacacgcacgattgccgctgcaccgggtgcgccttcgcctccgtctcggcctgcacctgggattggacccgatggacccgtcacttcgccgacgttcaccaggtcgagagctacgccaccctcctca

SEQ ID NO: 10030 - DNA, 2313 bp, Oryza sativa
  Clone ID: PAT_MRT4530_16390C.1
atggcccctcgcaaaccaaaccccgttcaggcggtcggaccggaccctggccgggtcgacgacgataacaccacctttttgggggcctcccttgtggatgacgacgagctggcgaaactagtcagctctggggcgttgattgcggggcaggctttcgccccggggaaagctgtggtgccgaagcctgtggacaatcggacggtggttttcgccgtcttttttgaggcagggctacggtttccgtgcaacgtgctattgccggagatccttcgcctcttccaggtagagctcccccaattgagcccatcgacgctggttcggatctcaattttcgattgggcttgtcggacttctgggttcgaacctagcgctgctctcttcggcgccatattcttcgccaccgtgaactccaagacggtgattactccggctgggacgaagaagacggtgatcgggagcgtgaacttcaatgttcgccccgaacggtccgacctttggccagcgaatgctgccatgtcgaagtgggaccgccattggatggcgaggtggttttaccacaccatccccttcgaggccggctctgattcagcgaaagctcttcggtgtcggcgcagggttattgcgccgaatcgaaaacccaggatcgccgtggatggcgctatggaggcccggttcgccctgctaaggaaagtctgttcccgcctcagctgccgcgacctggtggaggagttctgcatgcttcgcatctttcccctctcccagtcatggcaggttgcggttaacctgagcgaagaggttgatggcttgcctaagctggtcctccctgagggaatgaacatgctaacccttgaccaagccgaagccgaagcccgtaagatgatcggcgacgtatcggtcgttgagtacagccaaatgcttacacggcaggcaactggtcgggcgaaccgggtttttaacggcgaattgcctcctcgggcgaatccccataaggctggtgacgaagcagggccttcgcggaagcggccgcgcggtcaggttaagcttgcccctaggaagcgtagggctcctgtttcatcagattctgacgctgacgacaaggatggcgaagaacttgacggcgaagagggagagggggaggaagaagagacggagaccgcggtcgaaaatgccgcggtcgaggtgaccgagggacgcgccgaaactcccggttatacccccactccaagtcctggccataacgagactggggtggagtcgaatagctccccccttcgccaaaaagacttggacgtggcgaaggctctggttgcgttctcctctggcaaggcggcgaagggaggccccgtcaagaaggcggctaaaaagaaaggacttgtcgatatcgctcgagtttttagcgacgatgagtcctctgacgggactctgacttcgcccgctggccgcagcctggatctctcagccgctcccgctcctccacttggcggcactggagcgggtggtagcactgccgctggggcttcggcctccgcggaaaggatcgtgacggccgcggcgaaagttttcggcagtcctcctcgtcagccaattgcatcgccgctgactgaggcgaagggaaagagagcggctggcgaaacgtccgcgtcagagtattcgcttgcggtgccccgcttcgcccccggcgacttcgagacacgggcagacctccttccttttgtggaaggggtgagcaatctaatcatgcctgccggcaccccgagcctgttcaccgaacttaatgagttcaatgaggggtgctccgctataaaaagtcttgtggttcggatccttgcggctcactgttcaacagagcgaaccgtgcgagcccgccttgacgggttcaaaagccgtcttcgggcgaaggatgacgaaataggccgcaaaaatcttgagatggaggtcctggctaacaccctgaaggagacgaaagccgaaaacaagcggctccagttggaactggaaaaagggaatgaagctagggccgaagtcgaacgcttgaaggccgaactgcaaaaagaaaaggcccactccgccgtgcttgtggattactacaaccttaccgagtcgaagatggaggctcttcggcaggaagtctgcaaggccgaggcaagcgctgctgcggagtcgcggcggttttcacgggagatggtgaaaactaccgagtccgcgcgaacagcttgccaaacgcttcgccttgctcttaccgatatgggcgcgaaagtgcgaggtgtcccttccgaagatgcctctgcctttgacttctccgaatggacctag

SEQ ID NO: 10031 - DNA, 303 bp, Oryza sativa
  Clone ID: PAT_MRT4530_16391C.1
atggcggggcacgcgcagagcggcactggtggcatggcgctgaaagtctgtccacgtcagcgcatggagcgatggcggctggttgaaaggagaacaagcaagcggcgaggaaatccgtcacctttaaattatctaaacggtcgtgaggaacttcctgctacgctcattctcggcataccgtgcgaccgcaccgtcaactacgctgagcgcctgtccaccatgggcaagccaatggagctcactgcaagaggcaggttcaactactgtgtgatcaggccaatgaagctggacgcgtcgggctaa

SEQ ID NO: 10032 - DNA, 1398 bp, Oryza sativa
  Clone ID: PAT_MRT4530_16392C.1
atggctgccatggacgcgaggaagaagaagagcggcggcggcggcggcgagccgcttctcggcaagtatgagcttgggcggatgcttgggcgagggacgttcgccaaggtgtacctggcgcgcgcggtggccggcggcgaggcggtggcggtgaaggtgatcgacaaggcggaggtgatgggcacggcgggcatggcgccgcgcgtgctccgggaggtggcggcgatgcggcggctgcgccacccgcacgtgctgcgcctccacgaggtgctcgccacgcgcgccaggatctacctcgtcatggagctcgccaccggcggcgacctcctgtcgaggctggcggcgctgccgcggcggcgcctgcccgagagcgcggcgcgccgggtaacgtcctcctcgacggcgacggcaacctcaaggtctccgacttcggcctcgccgcgctcccgggacacgctccgcgacgacggccgcctccacaccgcgtgcggcacgccggcgtacgcggcgcccgaggtgctccgccgcagggcctacgacggcgccaaggccgacgcgtggtcgtgcggcgtcatcctcttcgtcctcctcgccggccacctccccttcgacgactccaacatcgccgacatgtgccggaaggcgcaccgccgcgagtacgagctcccgcggtgggtgtcccagccggcgcgccgcctggtgagccgcctgctcgacccgaacccggacacccgcgtcgccgtcgagtcgctggcggcgcaccacccgtggcggcgccgccgccgcccgctgaacgcgttcgacatcatctccatgtctcccgggctcgacctgtccgggctgttcggcgaacacgacaagagcctaagggagaagcggttcacgacgacggcgtcgccggagaagacgctggagcagctcggcctcgccggcgggaagctcgggtacgtggtggtggtggggaagaaaggggtggagtgcttgccgctggcgggggggcggctgtcgtcggggatcgccgcgatgtcggtggagatgtcggaggtggcgccgccgctgttgctcgtcgagctgaggctggaggtcgccgccggcgacgtcgacggcggcgacggcgaggtgaaggggtttgggtgggagcagctgagaatggagctaggtgattcaccgctgttgctcgtcgatctaaggctggaggtcaccgtcgacgtcgacggcaacggcggcgaggtgcaggggttcggatgggagcagctgagaatggagctaggtgataattgcctccgttgttgttgtcgttcacggcacctcctggcgcaccagctccggatccagctcctgtcggcggcgtaccacctccgccagcagtggcggcggcaactccagacatggcgatga

SEQ ID NO: 10033 - DNA, 368 bp, Oryza sativa
  Clone ID: PAT_MRT4530_16393C.1
atggtgggttgtgagcacatggttttgaaggttgtgctcatgacaattaagggccgattcgctagctactgttgtgagacattaaccgtgccaaccacaagccagcgtgggcaacggctttaccttttgtatagcatggttcattgcggggcaccagactgtgaagcggcgagaagtccgtgggggtcgctggggagtccatgcctctggttattgaggggatgattatgatccagggacggtgcgctgtggtggattgtgttgtgcaaggggtactgtcacagttcctatccgagatatctcctcttgacccacaaaccctagtgaaagtctatattggcccccttttactttagtatccttcattt

SEQ ID NO: 10034 - DNA, 438 bp, Oryza sativa
  Clone ID: PAT_MRT4530_16394C.1
atggcgaagatgattgaagcactcagctttggaggggaggatggtcgtatttttgaagacaagagatactacgacgacgatgatgaggtcggctcggctggtcagaccgggcgccaggccgagttcttcgatttgtgtttcaccgggtttcggcggtctaaccggcaactcaccggcggtcagaccgacggcattgcggcggtcagaccggcggcggcaacaggcgcggcaggcgacttcggcgccggtggcgctagggacggtattgacagggaagacaacggacgcagagcagggggaacggagacaaacacgaggagacggtgccgaacacatggccaaatccacagggcgggcgtcgcgcaccccatcgaattcggcatagtagcagatggcgacctcggcacagtagcagatggcgacggcggtggcagctag

SEQ ID NO: 10035 - DNA, 312 bp, Oryza sativa
  unsure (1)..(312): unsure at all n locations
  Clone ID: PAT_MRT4530_16395C.1
cngggctgcaggantctgcacnaagccaaatttatcttggagttaactcaancagttgcaacagttggggccntctcattagggatttatatttcatcnctccttgngttgnaataggcctangtaattctngcaagtgtgtntantacttacacttttaccgtctgcaanttctanctgcnaaaatgtacattcttatagggtaaatgcatatgatatccattgaatntgtacttcagctcctgctggncanaatattaatggggcncttttnnttttctggaaaaaaatnagtgntaaccacngagagta

SEQ ID NO: 10036 - DNA, 354 bp, Oryza sativa
  Clone ID: PAT_MRT4530_16396C.1
accagcacgaccaactcctgcggggaccgtgaccgcgaccagcacaacctactgaaggaacatggagtgcaggaggcacacgattgacagggtgactcaggacagcacgggtatggccagcctgtctgcccatgtaaagcgccgacctgaccggttgcacacaggatgtggtggtccaaccaaaccagtgttctacaacagggctgacaccactgcgagcattgctctgagaatgcaatgccgaggctgcagcctttactgatagcacgccacaaagaggtgcaggcatcatctgattggtggactcactactggctacggaacatgtgtttttttaactacctacacgatact

SEQ ID NO: 10037 - DNA, 2532 bp, Oryza sativa
  Clone ID: PAT_MRT4530_16397C.1
atgtcatggcagagggttggtgccctgctgctaggggctcagtcctgcctgcctgtcccgggggtcccggccgtaggtgggattgggggtttggctttgaatccactatctggactacttccaaaggagcttgggaacctcaccaatcttctttcattgggcatcagcttggacaattttactggtgaacttcctgaagagttgggcaacctgaccaaacttcagcagttgtacattgatagttctggattcagcggtccattcccgccaacattctcaaagcttaagaatctaaataccttgagggcatcagataatgaattcacagggaaaatacctgattatttggggagtttgactaatttgatagatctaatactaaggaactgcaaggtatcaggtaatcttggaccagtagatttttccatgttcacagcattaatcttgttggacttgagttttaacaatattacaggcgaagttcctcaatccatcctcaatatgggaaagcttgaattcctagatttctcctacaatcagctcactggaaactttccttcctgggctacccagaacaatttgcaattgaatttggtagcaaacaaatttgatgctggtagcaataaccgcagcaagacactccttgttttcgtggatctccagaatgtatttatctttttattcttcaaagattgtagtagtcaacatgattttaggaacttcaaaaataatggctatgtttttcacatcttaacagattattcctttgcggttgactgcggaagtaatagttctacacgaggatcagataatactatttatgaagcagagcctacaaaccttggggatgcatcatattatgttactagtcaaacaagatggggtgtcagcaatgtaggaaaattttccctggcctcaaatggaatgaatataatatctagctccgagcattttcagaatgcagttaattcaagattgttcgaaactgcaaggatgtcaccatcatcgctgagatactatggccttggacttgagaatggaaattacaccattcttcttcaatttgcagaggttgcttatccggactcacagacttggcaaagcttaggaaggagagttttcgacatatatatccagggctctttaagagaaaaggattttgacataaggaagatggctggtggaaaatcttttatagtggttcacaggagttacacagctaccgtgtcaaacaacttccttgaaattcatctcttctgggctggcaagggcacttgttgcatacctactaatggttactacgggcctatgatctcagcattgagcgtctctccaaattttactcctactgtgcgaaatggagtaccaaaaagaagaagtaaagtacacacaattgcaggaatattgattggtgcatcaattttaggattggcagccttatttggaatttttatgatggttaagaagagaagaacaatggcacaacagaaagaagaactgtacaacctaattggacggcctgatgtcttcagtaacactgaactaaggctagctacagacaatttcagttctcaaaatattcttggggaaggcggatatgggatgctgtataagggtaagctatctgatggaagagttatagctgttaaacaactttctcaatcatctcatcaagggaaaagccagtttgtggctgaggttacgacaatatctgctatgcagcataggaatcttgtgaaattgcatggcttctgcatcgacagtaatacacccttgttggtttatgagtaccttcaaaatggaagcttagacacagcactctttggacatagtagattaaacctagactggggaacacgttttaatatcattttaggcattgcaagtggcctaacttaccttcatgaggagtccagtgtacgcatcgtgcatagagatatcaaagccagcaatatcctacttgaaaccgatctcactccaaagatatctgactttggactcgccaagctctatgatgagaagcagactcatgtaagcacaagaattgcgggcacacttggatatcttgctcctgaatatgcaatgagaggccgattgacggaaaaagttgatgtttttgcatttggggtggttgtgctggaaattgtcgccggtcgatccaacaccaataattccttggaggaaagcaagatctatctcttcgaatggctctgggacctgtatgaaaaggagcaagttcttggaatcgttgacccttctctcaaggatttcaacaacaatgaagcttttagggtcatccgtgttgcgctcctctgcacacagggctcaccgcaccaacgaccaccaatgtcgaaggccttggcaatgttgaccggagaagttgagctgtctgaggtggtcgtgaagccaagttacatcaccgagtggcagcttagggatgtaaatagaagctatgccactagcagctactcaggctctaccaaccctgagtttagcacacagaaagagatagagcctcttacccaatcatga

SEQ ID NO: 10038 - DNA, 246 bp, Oryza sativa
  Clone ID: PAT_MRT4530_16398C.1
atggcgacgggcgacgcgacggcgacgggcgacgcgacggcgacggcggagcgtcgacgggacggcgacgctgcgatgggacggcgcggcgcggcgcggggcttggcgcgcggcgatggcggcacgacggcgacgggcgacgcgatagtgacggggcgtgacgcgcggaggggatgttacaagtctcttccaaggagttctggtgctggccgcgtgaaggaagtggctcctcgatggcttggctga

SEQ ID NO: 10039 - DNA, 873 bp, Oryza sativa
  Clone ID: PAT_MRT4530_16399C.1
ctctcggcccgattggcgccgccgcccagcgcctgccgtgcctctctccccactgaccagccgagcaccagagccgccgcaccccaccaccaaaccgcgccgccgtcgaaaatcgcctaggttcccgccgccaacgcccgtcctcgagtgcatgcctgcaggtcctgctgtcgacgcctctgccggcaccgccgagcttccgccgcctgcacctgctgctcgccgaagccgtgcagcgccgccggagcccgacaccgcagaccacctccgcccacgaaatccaacaggtcagatctcgccttgctttggtagtttgcccgattgcttgttgttgcaatcccgtggtcctctgctgcttttatttggagaaattcgagtccaagtacgccttctctatagcatgtccatcacgcaattacctcatcaacaccttcaaaagctgcctctaggaaccacccgctccgacttccgattaaacaccatcaatctagtcgcgagccgaagccgacaagttgcatgccgtcttctcagccgcgaacgacccgagtgctatgtttagccgtctccctgtcgaacgcaactcatcgaaaggcccaggccaccccgcccagagtgatcgatccacccaccgagaacgccgatcgcctccagcttcaatcaacccgagcgtgcggccgcacgtctccctattgagagtagctcaccggaaagtccgagccacccgctcgaagtgtccgacccaccaattggatcaccaatcgcttctgccgccatcaaccagagcaccacgtctagtcatctccctgttgaaagcagccatcgaacggttcagaccgccgcctgaagtgttcgatccaccgatcaaattccgtt

SEQ ID NO: 10040 - DNA, 566 bp, Oryza sativa
  Clone ID: PAT_MRT4530_1639C.1
gaactattttagggatgtcctctttttatgttagatgcttcctttttctgcgtcctttttagaatttcttcttttgatatgagattgcaagtaccttctctatttatcaaaataatatggatttccacaaagcattatgttaacgcattttggcctgtaaattgcttcctgctcagaatgcatctgacctaagaaacttatctaagggaaaatgttcttggaagccaactaactaaagactcatgcccattttcaatcaagcagattattaattttctttttcacaatttcactctttgcccatggtacttcctacaaacaccgtgtgctatatttcataaattaaatgtgggaaatctctgaactttttgttaactgattttgccattgtagtctttatttgatagtttcctcatcattgtgccaatattccatttgatctgatgtaccatattgcaccatataccaattcagaataatttaggacaaaaccatattttcatgtgtcatacgctattagatttggtataattatctcaatgtagctacctgaatcctttttttat

SEQ ID NO: 10041 - DNA, 316 bp, Oryza sativa
  unsure (1)..(316): unsure at all n locations
  Clone ID: PAT_MRT4530_163C.1
gccccccttcttccaccatccactaacccccatctcaacgcaaaccaccctctccgccgcgcgcgcnaggcagatctcgacggggagcgcagcgccgccgccagatcccgccccgatcgccccgnctcgtcccacggtcccgtgatactctctntctctctctctctctctctctctctctggatcggtgcgattgcccttntttttgcgcgcggggatcgggtgtnttttgggacggtgaagagangagtaagtttgaggcgatcgatcntcttatagganactgcattctgtnttatttgttcgntctctcttg

SEQ ID NO: 10042 - DNA, 273 bp, Oryza sativa
  Clone ID: PAT_MRT4530_16400C.1
atgcaaagcttagctgcatatgctgctccttttgggtcgcgtgggcccacctgcagctgcctgcggcccaatcctagcgatctacagaaagtgggccccacgcgcatcccgatcgatgtagaccgggcccacatgtccgggagggtttatcaaatcgttttgagtggggttaccgatcaccctatgattttacggttatcgcgagcagggtggatggatggatgggctcatgggcatgccaagtccatagcagatggggccatgaacttttaa

SEQ ID NO: 10043 - DNA, 471 bp, Oryza sativa
  Clone ID: PAT_MRT4530_16401C.1
gtcgtttccatgggctgcgctggatccactcccaaagttgatgagaacagtaagaagctcaaaaagccaaaaccttggaagcacactcaggcaataacaccaacacaactctcaaagatgcgtgaagaattctgggacacggctccacactatggaggccagaaagagatttgggatgcacttagggctgctgctgaagctgaattacctcttgcacaaaccatagtgaacagtgctgggattgttgtttcaaattctgacatgacgctttgttatgacgagagaggtgccaagtatgaactgcccaagtacgttttgagtgagccaacaaatttgatccgtgaaccgtgatggttgagtgaagatttatgctatgtgaatagaaaaacagatcctgtaaatgatgtaaatcgttcattgatcgctgactcaggactgtatttctcagaacataaatgaaggttaagttac

SEQ ID NO: 10044 - DNA, 1224 bp, Oryza sativa
  Clone ID: PAT_MRT4530_16402C.1
gctaaagaaagcaatcatttattcacctggagatccattttttgagaaagctgttacaggcagaattcagatgactgagaatacacagatgaatttcagagagtgattttgtatatcaataaagtctgaacgcacatgatttgacacacgatgttaaaattcactagtcattatacacacaaatcttcttggggcagcagtcaaaccagttatttgtataattgtattgtaacctactgaagtgggcagcaaacttaagtagacaactggtttgctcaattgcaatttcacttagccacatcacttgtccatccaaatggtgcatctgagactcttcccctgcaacagaaggtcaaatgccgtgttgatgtccttcaggggaacctcgtgagttatgaacttgtccaactccagctccttgttcagatacttgtcggccaggatgggaatgtcctgcttgggtttcacccctccgaagagtgatcccattacgcatttgccgttgaggatctccaacgaaggaatggacaaaggggcaccgtgcatttcgacgccaagaatgatcgtcttgccccatccctctcgggagctccgaaatgcatcgctcatcaccgacgccagcccgatgcactcgaagcagtagtccgcgccaccgtcagtcatctcgatgatcgcttggctgacaggtttgtccccaagttcttgtggattgatgaagtgcgtcacaccgaacttctttcctcagcaaatcctggccccttcagctaccgctaatcctacggcgccgaggccaaagatagcaaccgaagaccccggctcgactttagccagcttccacgctgctccgaccccggtggtggcgccgcagctgaggagggaggccgtggcgggcggcacggcggggtcgacgcggacgacctggttggcgtccacgacggtgtactcgctgaagctggagacgccgaggaagtggtggatcggggcgccgtggcggtcgcggaagcgggcggtgccgtcgcgcggcatcccggggcgcaccgcgaaccggtacgtggagcacacgttgctccgctccgaggcgcagtccacgcactcggtgcactggcccaggaacgtgggcaccaccgggtcgccggcggcgaacccttccacatgctcccctacgctctccaccaccctgcagtttgtcactccgagatcgatcaccttgcaattttcatacat

SEQ ID NO: 10045 - DNA, 407 bp, Oryza sativa
  Clone ID: PAT_MRT4530_16403C.1
tcgtccacgcgtccgcccacgcgtccgcccgccgtgccgcccgccacggcctccctcctcagctgcggcgccaccaccggggtcggagcagcgtggaagctggctaaagtcgagccggggtcttcggttgctatctttggcctcggcgccgtaggattagcggtagctgaaggggccaggatttgcggtgcgtcaacgatcatcggcgtggatttgaaccctgagaaacatgaacttggaaagaagttcggtgtgacgcacttcatcaatccacaagaacttggggacaaacctgtcagccaagcgatcatcgagatgactgacggtggcgcggactactgcttcgagtgcatcgggctggcgtccgtgatgagcgatgcatttcggagctcccgagagggatgggg

SEQ ID NO: 10046 - DNA, 505 bp, Oryza sativa
  Clone ID: PAT_MRT4530_16404C.1
ctggagacgccgaggaagtggtggatcggggcgccgtggcggtcgcggaagcgggcggtgccgtcgcgcggcatcccggggcgcaccgcgaaccggtacgtggagcacacgttgctccgctccgaggcgcagtccacgcactcggtgcactggcccaggaacgtgggcaccaccgggtcgccggcggcgaacccttccacatgctcccctacgctctccaccaccccgaaggcttcgtgcccaaaaatcctcgggaaaacgccggggaaatcctgcatacgccagaacgtgacgtcgctgtggcagagcgaggtgcagacgatcttgatccggacctcgtgcgccttgggcgggtccacgacgatctcctcgacggccagcggctcgccagcggccctgcacacggccgctttgcaacggatgggttgggggatctgacccgccatggacgcgagagagaggagatagtaaagaggtttctcccacgcgtccgcccacgcgtccg

SEQ ID NO: 10047 - DNA, 201 bp, Oryza sativa
  unsure (1)..(201): unsure at all n locations
  Clone ID: PAT_MRT4530_16405C.1
catcgatcgaaaagagaagaggagcggcggcgagatccaattccaatcgatcctnntgctgctgctgctgctgcgctcgacgatcccatccggatctcganggcggccatggctcgcnanctccntgcaatnntantactctcgnnggcgntgctcctcgaccttncctncgcctccgatnccgcnnntgctccgnngntg

SEQ ID NO: 10048 - DNA, 229 bp, Oryza sativa
  unsure (1)..(229): unsure at all n locations
  Clone ID: PAT_MRT4530_16406C.1
ctggcttgtgtactggttgtgaggattttgggagtgagtgagttaaaaggattgccatgggcccaggattggtggatgctgaaaatgttccaccgtgtggattgtgggttgggtttaattatgatggggaatttggtccggtgttgcgtcactgactgaattaacctgctactactagtaganctatggatcatggattggtttgttcaggggacaaaaaaaaaaaaaa

SEQ ID NO: 10049 - DNA, 1328 bp, Oryza sativa
  unsure (1)..(1328): unsure at all n locations
  Clone ID: PAT_MRT4530_16407C.1
atggggaagaagacgacgacgtcgtcgtcgccgtcgtggagctcgctgttcgggctcggctgcttcacctcctcccacagcgacggcggctcggcggcggccaagaacccggggacgccgctgccggcgcggccgtcgtcgtgcaacagcaacgacggggtggcggcggcggtgatgccgtcgccggaggacctgtcgcagtcgctggcggggagcggggtggaggcgttcacggtggaggagctgaggagggcgacgcgggacttctcggtgagcaacttcgtgggcgagggggggttcgggccggtgtacaaggggtacgtcgacgagcggctcaagcccggcgtgcgcgcgcaggccgtcgccgtcaagctgctcgacctcgagggctcccagggccacaaggaatggctggctgaagtcatatttcttgggcaattgagacatcatcacctcgtcaagctgatcggatactgctacgaggatgagcacagacttctcgtctacgagttcatggctaggggcagcttggagaagcacctcttcaaaaagtactctgcgtcgctgccgtggtcaacacgcttgaagatcgccattggagcggccagaggtttggccttcctccatgaagctgccaagcccgtcatctatcgcgacttcaagacctccaacatcctactcaactcggactacgaagcaaaactttcggatttcggactggccaaagatgggcctcaagaagacgagacacatgtctccactagagtgatgggcacacagggctatgccgcaccagaatacatcatgactggtcatctaacgacaaagagcgatgtgtatagctatggtgtggtgctgctggagctactaaccggacggaaagccgtggataagaagagaccgccgcgagagcaaaacctagtggaatgggctcggccatgcctacatgactctcgccggctcaaccgtgtcatcgacaaaagcttgaacgggcagtactcgactcgagccgtacaaaaggctgcggccatagcgtatcagtgcttgagtgttagccctaagtctcgaccccggatgtcagcggttgtggaggccctggaaccacttctggccatggatgatggcattgtagagccatttgtgtacatggcaccacccgagagtaaataaatgaatcaataatttgtgtggagcatatgtacaaacatgccattctccaatccttgcaatcaatttaaaatatagaaaattctccatttgcatttagaaatttcagcatatccctgtatgcctntgagtttttcttaagagtaaattatattggtgat

SEQ ID NO: 10050 - DNA, 492 bp, Oryza sativa
  Clone ID: PAT_MRT4530_16408C.1
atggagcgatccgaacgatttgcctggacgcagccgcccgatcacctgggcgagtggggcgagcgacaaggtgggtcgcgtcacccctcttaccacatgataattaacaacgacgacatgagcgaggcggcggcagtgggacgcgagcttggcggccggtgcgggatgcgagcgtggcggcggcagcggaaagaaggggcgggcggtagcggaaagaagggacggcggccgcgcgaagaggatgtgccgccactgccgacgatgactaggacaatgacaaccagatctggaggagacggggtgcaccgacgaccaggggcgcaggagacgacgaccggatttggaggaggcggggcggcggtcggcgagaggagcgggacgacagccggcgagagaggaggcgcagcagcggcgacggccgatcctctaagtatttgttttggcctaaaatcatccttgggcccacttaatatgccatatggctatttctag

SEQ ID NO: 10051 - DNA, 665 bp, Oryza sativa
  unsure (1)..(665): unsure at all n locations
  Clone ID: PAT_MRT4530_16409C.1
caaaccgggaccctactggttncaagaccaaaaaaaggaatggactccngcactatctctagttctttacacatgtcatggaggaataactcagtgaaacaacgcactgtctggtgctgtttgttaaaaaaaaaaagaaagaaaaaacttagagtgactgaccaagaaatccatgatctggtctacgttcttggttcgtctaccgattcatcaagaagagattccacaccggcctagctacggtgtcccgtgatgtcggctgtcggcaagatcaacatgtatgtttcgttcagctcctccagtgaaatggccccggacagctatatagcctgaatcccaatcagagatgcagtcatggatgataaccatgcgtcgtatgcttcagtaattcagtttagtaggctcatgtgcctctgaatctctgattgggaagttgcagtaggcagacattccagtttggatgccatgatcagttagttatcaatgccgatcctgtgctgatgcagttgttgggttgggtctgattagtgtgacgagcaggaagagacatttgccagtttttctggatctgctacatcattcagaggctttgctaattgatgctgtatttctgtctccaaaaaaaaaaaaaagtaagtgaaatctttgagaaaaaaaaaaaaaaa

SEQ ID NO: 10052 - DNA, 360 bp, Oryza sativa
  Clone ID: PAT_MRT4530_1640C.1
tgaagctcatgattttgcaagcctacggcatgcgcttctggaacaggataggcaggttcttttaactggtgccaatcctttagcaaaggaactatgagctcaacaaccggcggaagattgctcgatccacaggccgtcgtctccaggtgatcataatatcaagcacacgtactccggcgaggctgaccgccgccgtcgagcagtacctcctggagcacggcattcagtatacgcaggcacagccgggccttttccgtgtcctgttacagggaagtaacaggatgggagggtcatcatggttgtgtacacctttcgaagaagaagaaaaaaaagaggaggaacaaaaaagaattgacccct

SEQ ID NO: 10053 - DNA, 156 bp, Oryza sativa
  Clone ID: PAT_MRT4530_16410C.1
aacgcgatagtcgcggtgatcaccgatgggaccagtcgggtgggtcatgggccctgcgactcgattaagcacgatggcgatatggctctgtcgctcaagcaaacgactgactctgtacgggaggatggcgttgagaaagagcatgcgaaggatgcc

SEQ ID NO: 10054 - DNA, 363 bp, Oryza sativa
  Clone ID: PAT_MRT4530_16411C.1
atgaagaagggattcatcctggatagattggatcgcttcttacggggctcacccaagtacgtcaagcagcacctcatccgggaacacacggaatacagcgtacccgttgatatgcagcttaggttcatagatgatatccagaggagattccggacggtcgattacacaagaggtgtcatgctctccagcttctttgtccctgggaataataaagtcacaaagttgcaaagttcccgggtcgatggaagcaaggaacagggtcaggaacgtgatctgatggccgtgtcgcaggcgtggtcgaaaaggcctccggcgactgagatgatggatcacctgatgaggccgattccctggccccttgga

SEQ ID NO: 10055 - DNA, 1182 bp, Oryza sativa
  Clone ID: PAT_MRT4530_16412C.1
atgatgtctcagaagtgggcggcagcgaaggcgcaggcgctacaagacctggaaacgcgattcatccagcagacggcaacgatcctcggctgctacgaccacctcctacccgagcacatcaggcttgatctccaggagcaacactgcaacgaccacaaggttcccgacgatctctggctcgagttcatcaacgccgctttcgatgggaatcccgagacgctggatcgcgaagggggggagcaacaactcgaggtccatgcacggaaggaagcagacaagttttggatcgaggctgcgggagcagcgaagaaggcgcaagccctgaaagagatggaggagcgattcaggcaagaattcatcaagcctggtcttgacaagatactattagaactagtagaatccctacctgagaacatcagggaggacttctttagagttagatacgagatcgttgacgaagtccaggagattcttaacgaacgtgtggaacagaatttcggggtaggcgatcacgagaagcggctcaagatccgggcttgggaggaatcgcagaggttccggatcgatgctgcggccgataagcgtgctgccaagaagctgcagcctctgcaggatatgaagaagggattcatcctggatagattggatcgcttcttacggggctcacccaagtacgtcaagcagcacctcatccgggaacacacggaatacagcgtacccgctgatatgcagcttaggttcatagatgatatcgagaggagattccggaaggtcgattaccaagaggtgatcaaggctcgcatttgggagggttacgagaggtccaaaatgcctctgataaaaaggtccctcgtcactgtaggtgtcatgctctccagcttctttgtccctgggaataataaagtcacaaagttgcaaagttcccgggtcgatggaagcaaggaacagggtcgaggaacgtggttaagtcttttttggggcgaagggagtactccgtttcctatgactatggatgggatgtccaaattgttgaagatggtgtgttgggcgacttcggtcatcatcttctttgcgggcatgctcagctgcaagtgcaaccatggaagctcggagaaatcgcttctggctacctccccaatcgaaacgcctgatattgaaaattctgctccaactgcttactag

SEQ ID NO: 10056 - DNA, 239 bp, Oryza sativa
  Clone ID: PAT_MRT4530_16413C.1
cgtgcggctgccggcggcgggagccgtggcggcgtgcggcgcggccgtggcgtgcagcagcgtgcggcgcggcggcggcgacggcgaccggtgaggcggtgagccgccaaggccaaggcgccaagcccgtgaccggcaggcgcaccgtgaccgacgggcgacggcgtgccgcgtgcggcagccggcgcggcagcctgcaggggcccaggaggcagccaggcaggaggctgctccaggcc

SEQ ID NO: 10057 - DNA, 221 bp, Oryza sativa
  Clone ID: PAT_MRT4530_16414C.1
ctcgcatgtctcatctgcattatcatgcatacttgctcgcggtttgcatctcttcttgctctttggaggatttactactagagagacagctatgagcatgagctaccacagtacttctcaaggcactgcagcggacactgcaccggagacggcgtacccaacggcggagtacggggcgccgtacgcagtggccgccgactacggcgggtattagcagcagt

SEQ ID NO: 10058 - DNA, 425 bp, Oryza sativa
  Clone ID: PAT_MRT4530_16415C.1
atgcgcttggtggctggtgctgccgcccctcggctcgtcctctcctcgactagatcatctccaccccgtcatcctcaggccattgctgccatctcatccttggctggggtgccgccgctcgccagcccactattaggtcgaaactggctggtccaccagaacgccggcagcccggcctcgaccattgacagccgtggatacacatgttgggcgaagcatggagagcaagaattgggaagtggtgcagtagcagacagaagtggtgcagacaatgatgaagaaggagatgaagatgagcatgacatgtttataccatctccattggatggtgaaatgattgatgtggaccttgatctgctgcaagacatgttacgtgacgttgaggacccatcttacaacgagaaagattccatgaagttcagcag

SEQ ID NO: 10059 - DNA, 266 bp, Oryza sativa
  Clone ID: PAT_MRT4530_16416C.1
tccacgcagacgaacacgcacccggggcggggacaatcgaagacacggacccgcccaagcaccggaaaagaggcctaccacatcggacgtcccacgaccagaacgacaatacaagccggctaccggacgcaacaaacaagaggatatgcaaccacggcaaaggaacgatcaacccaacctggaaaaccacagacacgaagacacccgaagcgaccaacgagcagccaaccaccaaagatgaagcacacgccgccaacccacggagg

SEQ ID NO: 10060 - DNA, 452 bp, Oryza sativa
  unsure (1)..(452): unsure at all n locations
  Clone ID: PAT_MRT4530_16417C.1
atatgacccaaaaataacagggggtcaaggtcngccantgaagaccatgggggataagcttcatcgtccaagagggaaacagcccggatcaccanctaangcccctaaatgaccgctcagtgataaangaagtgggggtncaaagacagccannaagtttgcctaaanaccaccaccctttaaanantgcgttataactcnctgatccancncccttgcgctnaaaattaacngggcttaaccnatctgcccaaactgttggatgtccaaatgcatccgttngggancgttccnccctacaaggnaaccaccgccaaagccggggttcnacaaaccgaaaccaaaaatttcngcttnaatttaccaaaaacnttggtgnaaaatccnatgccccaaaaacccnanggtttccncccccanggttccncccccgaanggtgaatccngggccc

SEQ ID NO: 10061 - DNA, 523 bp, Oryza sativa
  Clone ID: PAT_MRT4530_16418C.1
ctgaagtggatctatgaagataaatgaacaggagatggagagaagtacgatcaaccaaactttagagaggcaagtgaagattgctgcttgcatctatttttttttatggttttcttggcttccattcttatttatttgtagaatggatagcacaccatgttggatgcctaggactggaatgaagtttagctgtgtagacgaggcttggaaattttgggttagctatggtggtaagattggctttgatgttaggaagcagtataataacaaaagtgcagcagatgggcccaagtagatggtttgtttgctcaagtgctggttatcgaggaaaacataaaagagattatctaaccaaaaatcctctagtagagacaagaactggctgcaatgttcatatgggaataacattaaacagagttgaaggaaattatgagctatatatatgatttggtgactgaacacaaccacatccttcggttgccagaaacacaccatctaatgccatcacaacattcgaagagtc

SEQ ID NO: 10062 - DNA, 1044 bp, Oryza sativa
  Clone ID: PAT_MRT4530_16419C.1
atgccggatggtcactacgttgtgacagtgctcactgaaactgggtggccacacgaaccatcgacggcagtaactccctatggtagggcgtgtggatgtatcgtcaaggatttcattcccatcaagtatagacattggaaaacaaatgatgtaacacaactcgactggacggtgccacataacctgaaggaagaatgttggcgaaagttgaagctgacattcacctttccaaaaggccaagaagagctagcaaagaagggagccttatcgaagatgagcacattattcagaaagtggaggactgacttgaacgcgaagttggtccaacgcaaccggaccctggattttgagaaacccagcttcctcaccgacttgggccgagcagatatgctaagaatatccccaaatgggaagagaaggaggaacaactgtgccaagcaggggcaagctggtgaccaagtggttaacccaggtgccaaacggagcacttgcgcgtccgcggataacccccctccagaacaggacacatcacgttatgttgtggacgacataacaacacatatgccgtgcgtgctccatgtccctcttcaaagcaacattactcaggagattgcacgcggtgtggcacatccaatatgtgcagggcaaacaatacatggtgttccattgcctgtaggccactcaagggttgaagtggaagacgtgccaagccaatacagaggttatgtgctacagtttcctccggaggaaggggttgacactctgggcgctgctcttcacaacctgatcatatggcccaaacgctacatcgttatcacgttgaacgatggggcaggggatccaggcgacggtgcttccagcccttcaaacggacgaggtgcaaatctagctccttctccgcctcgacagaggaccttcagtccacctcgtgaaaacacacctaatgaaccacatcgtccggagaagtccacaagtccacccccactcagaaaaaagacccgaacaccaagtgcatcacagatgtctgttccatcaagcaaatag

SEQ ID NO: 10063 - DNA, 2066 bp, Oryza sativa
  Clone ID: PAT_MRT4530_1641C.1
atggccagcttggcgactgtagtttctgtctgtaggcaactgatttgtttttgcgtcttgagagcgagctaaaaaaaatcgccgcagaaaaggagagaagagaaaaaaaactttgggcgagaggagaggaggaggaggaggaggaacaagccgcaggaataggaagaatatctccagcaagactttcatctgcttatcatcagtatgtccatcgaagagagaacattaagtttgataaacaagaccactgcgttaaatccaaatgcacaagaatttgtaccttcatccctcagatctatcaatgatgtttcaaatagatcagacacatccaggatttctgtatcaggatcctccaaagacactattgcagatcaacaagatcctgttataccaagtaaccctgatgaagaagcacatcggtactggcaagaacagcttccagatgatattacccctgatttcaaagttctgggacaagatgagatgcctggacctgataatatttcactcactggcttgtcaataaatgatagcattggtgcttcactattttctccaaaccagacatcgaatttgcaacaccgtgcttctccttttattagggacactctgagcacacgatcaaagatcgagtttcctagcccaacttatgtagaagaacagtcaagagctactattatgagtccaactgcaagcgctatgagtccaactgcggctccgtgggtaaaaacagtaagaaatggtgtgcaatacaatgcaaacagaagggatgccagccattacaatggagattctagcattggagctccagtgcaaaaccttactgatgcatacttcggaagcaggcgcagctttagctcaactatggatatcatgagtcagctggagaataaagttgatggacgattcaatcagaatctgaggtcactgtcgtttggacattcaagtcctccatcaccagcatcatatggtcaaaatggtcttgcaaactataacaaagaagcttttggtctggcaaacaatacatatagatcccactcagctgtactcgcagatgatatactttccccttcagctggtcgggaacatatttctctggatgctcctagggggaggtacaatacaactaatttgcctgtttctggtcttggttcaagcagaggctctcagttcatggcaagctcattcaatggcaatcatgacatagtctcaaacaacaccctgcaaaatatagctggagttcaaacaggacctgcttggcttgaagctgatactgcagcaaacatgtttttggaatcaaaggatgaagctcatgattttgcaagcctacggcatgcgcttctggaacaggataggcaggttcttttaactggtgccaatcctttagcaaaggaactaaacatcaaggagctttacaatttgcaaagcagactagctcaggaaaaggctagagatgtatatcgccaaagatttcaaatgccagaatttcaaggcctggttcaggagcaaaataccccaattgacctgtgtggtcttcacgtaagcgaggcgatacacgccctgaactatgagctcaacaaccggcggaagattgctcgatccacaggccgtcgtctccaggtgatcataatatcaagcacacgtactccggcgaggctgaccgccgccgtcgagcagtacctcctggagcacggcattcagtatacgcaggcacagccgggccttttccgtgtcctgttacagtgaagtaacaggatggtaggctcatcatgtttgtgtacacctttgaaagaagaagaaaaaaaagaggaggaacaaaaaagaattgacccctgtactactgtatatggcagagatgagtagtactagcagaatagaaatttgaaatagctgttgtaatattcgtatagcaaggcttttttttttttgtcagcaaaaaacgttgtaaaatttgcggaattaggcgatatgttctttcaaaaaaaaaaaaaaaaatgctcgttccaatctaacacgcatgcgatgcaggatgctatttggactggaaaaaaaaaaaaaaaaaaaaa

SEQ ID NO: 10064 - DNA, 1125 bp, Oryza sativa
  Clone ID: PAT_MRT4530_16420C.1
ctatttgcttgatggaacagacatctgtgatgcacttggtgttcgggtcttttttctgagtgggggtggacttgtggacttctccggacgatgtggttcattaggtgtgttttcacgaggtggactgaaggtcctctgtcgaggcggagaaggagctagatttgcacctcgtccgtttgaagggctggaagcaccgtcgcctggatcccctgccccatcgttcaacgtgataacgatgtagcgtttgggccatatgatcaggttgtgaagagcagcgcccagagtgtcaaccccttcctccggaggaaactgtagcacataacctctgtattggcttggcacgtcttccacttcaacccttgagtggcctacaggcaatggaacaccatgtattgtttgccctgcacatattggatgtgccacaccgcgtgcaatctcctgagtaatgttgctttgaagagggacatggagcacgcacggcatatgtgttgttatgtcgtccacaacataacgtgatgtgtcctgttctggaggggggttatccgcggacgcgcaagtgctccgtttggcacctgggttaaccacttggtcaccagcttgcccctgttgtcttggtaacccattgggaaacagcactgcttggcacagttgttcctccttctcttcccatttggggatattcttagcatatctgctcggcccaagtcggtagaaagcttgttcaacgcggagttggccttgtttagggtgctcacttctcttgcctctgggtttctcaaaatccagggtccggttgcgttggaccaacttcgcgttcaagtcagtcctccactttctgaataatgtgctcatcttcgataaggctcccttctttgctagctcttcttggccttttggaaaggtgaatgtcagcttcaactttcgccaacattcttccttcaggttatgtggcaccgtccagtcgagttgtgttacatcatttgttttccaatgtctatacttgatgggaatgaaatccttgacgatacatccacacgccctaccatagggagttactgccgtcgatggttcgtgtggccacccagtttcagtgagcactgtcacaacgtagtgaccatccggcat

SEQ ID NO: 10065 - DNA, 205 bp, Oryza sativa
  Clone ID: PAT_MRT4530_16421C.1
aggacatatcgcatcatctacaactacagcggctaggccatctatacatcgatcggaatgagtgtcactgtcaaggagtgtgggattgtaactcgccatgtacataaggtatctaccctaggtactataatgcacacggtcataataccactcttgacggagaagtgcactgaattgtcacaatatttcagccgggaagtgaaaa

SEQ ID NO: 10066 - DNA, 1227 bp, Oryza sativa
  Clone ID: PAT_MRT4530_16422C.1
atgcgacgcgagcgcgacgcgacgcaaatcccggagaaccctatggaggggatcccccagaccgccgccgcggcggcggcggcggcggcggcggaggcatctgagcccccgcggaagcgcgcccgcgtcgacggcggcggcggcggcgcaggggaggaggaggaggaccggctgagcgatctgccggactgcctcctggaggacatcctggcgcatctcgggtcccgccaggccgtgcagacgagcgtgctgtcgcggcggtggcggaacctctggcgcggcgtgcgggtcgtggtcatcgacgtggggtcgttccgcctcccgggcgccgacggcgacccgccgcggttccgcctggatcgcatcgaggacttcgcggacggcgtcctgtcgccgtcgctccacccgggcgccgcgcgggagctggacgcgctccggatgcgcctggacgaggacgcggtgaccaccaacttccagaggtggatccgccgcgccctctggcgccgccccgccaccgtcgacctctactacctcccccgccgctccttcagctggccgcccgccgtgcccctgaccccggtcaccgccgtcagccgcctcaagaccctgcgcatcttcgggctccgcccgacggtcgtcttcggcgccgacgagttcccggccctcgaggacctgcacatcgagaggtgctcgtacgcgcacggcaccatcgcctcgcccacgctcaagcggctcgccctcgtctccccaatcaacggctgcttcgtccgcgagcagcgcctcacggctccaggcctcacctcgctgcgcctcgtcctcccgtacagccgggaggaaggggttagggtgatcaccgacgcgccgctcacatcgctcgtcgacgcgtcgatcaccatagttgacaccgatcctggggatccgcggaaccgacgggtgaaccaattcaaggttgacttcttggttgccatcagcaacctgcttggccgcctcaccagcgtcagaaatctcgacctgactgggctcaatgcaacggcactgctggataataaatcccaggaattcccgatgttcccctacttgacaaccttgctcctcaacgagtgtgacattggatacaagtaccacgtgttgaggagcatccttcagaacgccccaaatctggagcagcttagactacacaattgcaagcagtttgaagtcagtggaaatcaagcacccgcgcggtga

SEQ ID NO: 10067 - DNA, 750 bp, Oryza sativa
  Clone ID: PAT_MRT4530_16423C.1
tagtattctccaaacttgaccgtgaacgagcgtacaagttcagcgataggagcgggatgtgtcaaagatggcctttctctggcgaactcccttctctcccctttggtgttctcacctcctccactgcaaccgccagcctcgcgagcatcgaaaggcaccaagcatgcactgtggccccggcagttgatctcctccccctctctttcgtctcactttgcccctgccactatcaccaatccattgtctgggcgcattcgtgaggtgcccacgcgtgttcgggaattaggcttttcgcaactaagtacaagtgatgtatatccgaaatattccccacataagagcaggtttaataagctgagaaggttttgcttcactgctactgtagctatagcattacgtgtttctgaaaaaaaccaaaatcataaagacaaaaaagataagaaaatgaccaaggggagagagaccacacgatcgagccacaggaaggtgacggtgtgcaatgtgacgatggttttgaagacacggttttatttatggatcgaatacgagagttatgtgtctccaaaattatggatagttctggagacactgtttcgagtacatagaatgtactgtcgtgttctaacggtagcaacgtggttgcctgaagtgagggtccgctgctcactgacatatgggctccagtactacagaggatctatattggttgcttgcattgcctactacgcctttgagaaacgagccgtcagg

SEQ ID NO: 10068 - DNA, 569 bp, Oryza sativa
  Clone ID: PAT_MRT4530_16424C.1
ccccgggctgaggaattcggcacgaggttctgcttccccactacctcccgctggtctcggtgcccactgcgcagcgcggtgcttcatctccctctcgctccggggctggctgcagccacaagctagcggcagcggaggactcgcttccgacgagctcggtgtggtgtggaggtggtgtctggcttggctggttggtttgctggtgagtggctcgggcattgaggctatttctctgttcgaattgcattgcggaggtgggggagcggggatggtggccggctcggttctcgaatcggctgccgcctgggttgacaagattttggagcggaatttgggggcggttgctttttgcttgtaagattgctggtgtttcttcgtcgtccctgatctcgcttgtgtggtttcccgctccagattcgttggaggatgggggggtttcggtgcggtgatctgcgcattgatgtggagttagtggatgagtggcgtcattttccgccatggtggtttcgtcatagtatctttgttcattatattgatgctaagatatgttatattggatagtccacttg

SEQ ID NO: 10069 - DNA, 180 bp, Oryza sativa
  Clone ID: PAT_MRT4530_16425C.1
cccacgcgtccgaggggatcgccgggtcgataccctggtcggcgctcaacttctccgccatgtggctcgagctcgtcggcttcacgcactgggagaccagcgtcatcacggggctctaccttctcgccaccgcgctcggcgcgctcttcggcggcctcgtcggggaccccgtctccaggc

SEQ ID NO: 10070 - DNA, 966 bp, Oryza sativa
  Clone ID: PAT_MRT4530_16426C.1
atggcgatctcgccggcagcgacagcatccaccccgcgctggagcagcagctcgacgatctcggcatgcccctcgcaggcagcgatgtgcatcaccgtgctcgacccctcctccgagatctccaaccacacctccaccgctgcccaatccccgccgaaatctggccggagaggaggtttcgacatcggcgacaatggtggacgatccgtcccttgcgcccaagtcatctccactgccgccgcctccgttcccgccgcagcagcagaggccgcgatgcgccacctgcagggagcaaaagatggggtgctcgctggagtgcctgctcgcgtcatacttcatggggacgagaaggtacggctcctcaacgcgcagcgcctcttcggcacccgcaatatccgccgttttgtccaagcaactctaccggagaaacgagatgatttgatgagttcaatcaaatacgaggcccaagtgtgggcaaggaatccccagtccggcgccaccggcgtcatgtggcacctagaacgcaaggtcgagcgcgagcttgccaagctctccaagctgcgtcaaaaactggagatgtgcaagaacctcgccgccaagaagagcatcctcgaggctaagggcgtcggcgtccgccaggtgacattcaaggagcaggagcaggagcgccaatatcaggcgtgccccgcgcgcatcagcgcttggacgctacgcttgtttgttcaccggagtgcctgcgagatacccatttcccaaatggaaagccacatagcttgtatgcagttcttcggtagggccttcatggcattcgttggacagatccaggaggaggcgatcaaccacgaggcagaggacgcacactatgacttcttccccctccaaccccatctggtgctcgactctccccgcaacccccacccactggggaggccgccattgacgcgctcgcacaatgtgcacggctag

SEQ ID NO: 10071 - DNA, 638 bp, Oryza sativa
  Clone ID: PAT_MRT4530_16427C.1
ctcttcccttgatttgaatttccttgggttcctattacttacaccatgcacatcaaaccccatactcgcaacaccatctcacttcatggaagacttacgcccaaacatcacctctccctgaatggatggtactagggctcctcggctattcaaacccactgcacacggtatcctctcgcctatataactttaagatattggcactaatagcgtaggactcctagaccacgagggacccagccaatcgtttacatccagttccctgcctatcacactcacaatgccgcctgccaaccttgacataaaaggggcgtcgccagcaccaaggatttcagcgccctcgtaagcctatccgtgatcaccttgaccagaccctatcacggccacggctactgatcgaataacctcgtctctacaaacgtgctaaatgccaatcgacgaatccagcttgccctgatctgcaccgacagagctaataggctggacccaccattcattgacttccctacccttaagcttttagcgtttatgcctgaggaacggaagacactgattggtaagacagcccagagacaaagccccatacaagatagctacaataatgcttatgacagatgaactattccaaagtgcaaaaa

SEQ ID NO: 10072 - DNA, 408 bp, Oryza sativa
  Clone ID: PAT_MRT4530_16428C.1
atggcgtggcagcaaaggaggccggccacctgtgccaccgctcgccctcccccacctcccgttcctacttctcacgccaccaccatcgtcgtcgatcctgattccactcgccgccctcctctcctgccagtggatgggctgataattgagattaaccatgtttcttgctatgatatgattgagcagttctatgataagattaaagaagctcaagacagtccaagtaagcttgccgcacttaagtctactgctgctgcatctcctataccagaggctattgtagaggaaagaaagaattatgggaaatcaaaagctggtgatgctgacagtgacgaggaaggtgatacttcaggcgaggatgaatctaatgatgatgaggtttataacacagtaacacttttaaaatga

SEQ ID NO: 10073 - DNA, 1021 bp, Oryza sativa
  Clone ID: PAT_MRT4530_16429C.1
atggcaccgccgagcagtgacctcgccatgctcaccaccgtatcccccatcgctggattcgtctggcgccactcgctcactgcgcacaaaagaattagcctgacgatcctgacgaggcccacaatgcagcggaccaagagttcccagcccaagaaattaattctcgcaactacccttctctcgaactctccacattgctcccgttctcctcatcccggtcgcgagctcgccgagaagcactccgcctcagccaccggcggccggcgccggctctcctcccttcgccgccggtgccggctctgcttctccgacagccgcggttgccggctcgcgcaagttctgaaccccatcgcccacgagatggtgctcaagatcaccggcttcggtggctgcggcggcggcagcgggggccggcgtactcgcgtcggcgacggaaggaggaggcggcgctggccgccgggggggttcagttttgctcgagggcggcagcagcttcagtccgccgccatgcggaggcaggggggggtcggcgcggccaggggcgtggcggtggcagcggcggatctcggtgcgcgtggcggcagagctcggcgttgacctggccaaggcggcgaccgggaggagggcgcgctcctcctcaacgttcttggcggcggctcaagaacgggcagcgtgctgctccgacgccattccaatcgatgccgaggccgccatggattttgtcctcatggcggcaaggccgatgccggcgcgggcaaaaggactcggtggcggtaggatgaatcgcaggcgcgggaagggattttttcgtgggcgaatctggaatttctccgagtgctgcgtgcgcgaggtcacgggcggccaagcatcgacgcccacagcgctcgctcctcgtgtttttctggcggcgcgtggattcgaccgagcaaggttgcgcgttgctctgcttggggacgagcaaccaagtttggtcctggttccacgcgacatgtcggacaaaatcctccgtgtcgccccatag

SEQ ID NO: 10074 - DNA, 500 bp, Oryza sativa
  Clone ID: PAT_MRT4530_1642C.1
ttatgcatgcgttgattaaaaaatgagaagaggtttatcgaaagagtacagatacaccctcatttgatacatcgaggatctatgaagggttatacatgttggactaggtatgaggagcaaaagttgctgaatattgtggatgaagtgagcggtagatcgaatgacgaataagatgaagattacatgtttttttcttttccgtttggtggtggtatggttgatatctacaatgatagttttaacccaatgatgaatggcgttgatgagctagcttattacgagagatactataagttcactaggttagtgtttgattcagagacacctctatatgttgaatgcaaggcaaaacacacaaagttatttgttgtcttggatcttgtgaagcttaaggcaagtaatggatggatagacaagagtttgatacaactgatggatttgttgaatgccttgttttttgaggagaactcgctgcccaagacgacatatgaagcaaaaca

SEQ ID NO: 10075 - DNA, 463 bp, Oryza sativa
  Clone ID: PAT_MRT4530_16430C.1
tcgcttataatgactttcgtgaaagtaatcgagaatgaagcgttctttaaaagatatcaagtaaaattccgtcgtcgccgtgaaggaaaaactgattaccgtgctcgcaaacgtttaattgcgcaagataagaacaaatacaactccccaaaatatcgtttagttgtacgtttgaccaacaaatttgtcatctgtcaaattgcttacgctgaaatcgatggtgataaaattttagcatcagcttattcatctgaattaccacgttacggattaaatgtaggattaaagaactatgctgctgcatactgcacaggtttacttgttggacgtcgtttacttcaaaaacttggtttagatcaagattatgaaggaaacaccgaaattaatggtgaagttgtcaagactgagatcaatggtcgcacatacttcgtcaatgaagttgctgatgataaacgtccattcc

SEQ ID NO: 10076 - DNA, 2208 bp, Oryza sativa
  Clone ID: PAT_MRT4530_16431C.1
atgcccccgccgaccccgctggcccgcctcctcgcggccatctccgccgccgcctcctcgcccgccgacctccgccgcctctcccaccgcgtcctgtccccctccgcgcctcttccccctctccgctgcctcaacaccctcctcatggccctcgcacgccaccgtatgttcccggacatggagtccctcgcctcccgcatgcccgcccgcaacctccgcacgtacaccaccctcatcaacgcctactgcctcgccggcgacatccccgccgcgaagcagcatctcacctccctcctccacgcgggactcgcgccggactcgtacgcgtacacctctttcgtccttggatattgccgcgcacggatgctgacgcacgcctgcccggtggtcctgctaatgccgctccggggatgcctgcggacagcgttcacgtacacggcgctgctccatgggctgcttggcgcagggatggttcgtgaggctatggcagtgttcgttgggatgagggcggacagctgtgctccggatacccatgtgtacgcgacgatggtgcacgggctgtgtgaggctggacgaactgaggaggctgaggtgctgcttgaagaggcaatgtctaacggatttgagccaaatattgttgtctacaatgcgctgattgatggctactgcaatgctggagaaatggaacatgcacttaaggtcttcgagggcatggatggcaaccggtgctccccaaatgtgcgaacatacaccgagctgatacatgggttgtgcaaatcagggaaggtggaaagggccatggtgctgttcagtcggatggttgaggcaggtttggagcccaatgtagtgacatacacagctttaattcaggggcagtgcaatgagggtcacctgcaatgtgcttttaggcttcttcatttgatggagactaatgggctggttccaaacgactggactttctcggtgttaattgatgctctctgcaagcgtgagaaggttgaggaggcccagttgtttcttgggtctcttgtcaagaagggagttaaggtgaatgaggttgtttacactagcttgatagatggattgtgcaagacaggaaagattgatgctgctgatgaattgatgcagaaaatgatctcagaggggtttgtgccagatgcccactcatacagttcacttattgatggattatgcaggcaaaagaagttgtcgcaagcaacattgatgttggaagatatgatggagaagggaatacaggcaagtcctgtaacatataccattataattgatgaattagtcagggaggtaggatcagaaggtccaaagaaaatattcgacaagatgatcgcgacaggtatcaatcctgatattgtaacgtacacagtatttgtccgctcctactgtgaagaggggagaatggaagatgctgaatccatgatagttcaaatggttgatcgtggtgttttccctaacctagtcacgtataacactttgattagagggtatgcaaatctaggactagtcagtcaagcattttcaacttttgaagtaatggttggtaaggggtggaaaccaaacgaggactcctacacagttcttctcagacttgtggtaaagaaaagttcctctgataactctgttgatatatggaaaatagcagacatgaaagatctccaggtacttttggaggacatcactgagcgtcagttgccactagccgccgatatttacagttgtttcattagatgtttatgccgagttgacagattggaggaagcaaaacatttttttatggggatgcagaatgctaacttgacccctagcgaggatgtatatacttcgataatagactgctgttgcagattaaaaatactaacagatgctttgacattgcttgattcaatgacgaaaagtggttatttgccacatttagaatcttatagaattataatttcttctctttgtgagggaggaaactttcgcactgctaaggaagtttttggtgatttgttactgaaggaatccaattatgatgagattgtatggaaaattctgatttatggcctattacagaagggcagtgttgctgagttctcaagtctgctctccgtcatgaaggaacatggttaccaacctagtaacacaattaatgccatgattacaggtgaaataacagttacaaatgaagttcaggaaatcgctagataa

SEQ ID NO: 10077 - DNA, 599 bp, Oryza sativa
  Clone ID: PAT_MRT4530_16432C.1
ggcggccggcgcacgaagagtgaggattcgaggggggcgtcggagttgtgaactccgaccgcctctgggcatccggcatcagccgttcgatgcggatcgtgcgatccagattgagtggatcagctcctcgtcgccgagtattagcgagtgtttgggccttcgtggtgctacctgggcctaaggcccaatagtgcgacacatgtctaggcccaacttctcatacaccgcttctgtcggtttcggatgactcgggctcttcgcctcttcgccggcggcggcggcggcggcggagaggaatgttccagaagggcagggggatggatggttcaacacggggagaagtttgcagctggccggcatcgacaggtgagcagtagggtttatgaacttcgattgcgagatccatcgcctgcactttggtggtgaccggtgggtggatttgttcactgtcgatttttgcagggggagggtggcatgattcgggttcttctaggccgggtgaatgcgcacgcgatttcactggggatttgatttcgtctccgatttatgcgtgggaggatcacatccgcgcgttgtatactgtataggtataatataat

SEQ ID NO: 10078 - DNA, 810 bp, Oryza sativa
  Clone ID: PAT_MRT4530_16433C.1
atgcctatctctgaagtcaatatccggcgccttgtcttggcaccttgggtgagagttgaagaatacttcctagctactactcgtcccccactgaacatcgtcatgggcttctgcacttacaaagagaaggatgacatcttcaagctgaccctcaccggcggcaacagtggccacaattacctcaccgagaagtcgctgaaggagctcaaggagacgctcgcgacgattcgcggcaaggccaccccctcgagcaggggcctcgttaccatctgctcgggcaagagctccttctgcgacggcatcgactacacctcgtcgccgccgccggcggtggaggagctgatccgcggcatggccgaggtggtgcgcgagctgctgggcatgcctttcccgacggtggcggccgtcggcggcgacgtgaggtcgtccctggcgctggcgctggtgctggcgcacgacgacgtcgccgtgctaaagaaagtcaagatcgaggcgagggaggtggtggaggggcgccacgacgccgtgccgccgtacctcggggcgctgctccgggacaagtcgtcgtacccgcagatgagctccgacctggtgctccggtcggagaccatggccggagagaggctcaagtattggtatctgatcgagcgagtgtgcgacgaccagtgggagctgaagggccatgccattaacatgatcaaagaggtcttcggtgacgagcgcgacggcgaggcctacgtcaccacccgcaagagcttggtcttctccgagtcctggaaggccgtgtccgagttactcaagaacatctag

SEQ ID NO: 10079 - DNA, 473 bp, Oryza sativa
  Clone ID: PAT_MRT4530_16434C.1
caaaaccagtaaaaaattattgtcaccttcgccggcgagatggcccaccgccgcatcatcctcctcctcgccgccgccgccgtcgccgcgacctccgccgtcgccgccgcgtcctccggcttcgacgactccaacccgatccgctccgtcacggaccacgccgcctccgcgctcgagtcaaccgtcatcgccgccctcggccgcacccgcgacgccctccgcttcgcccgcttcgccgtcaggcatgggaagaggtacggcgacgcggcggaggtgcagcggcggttccggatcttctccgagagcctcgagctcgtacgctccaccaaccggaggggcctcccctaccgtcttggcatcaaccgatctgcggacatgagcttgaagaaacctggtgacagagttgaggctgatgagcccatagcacagattgaaactgataaggttactatagatgttgctagtccggagct

SEQ ID NO: 10080 - DNA, 3009 bp, Oryza sativa
  Clone ID: PAT_MRT4530_16435C.1
atggcccaccgccgcatcatcctcctcctcgccgccgccgccgtcgccgcgacctccgccgtcgccgccgcgtcctccggcttcgacgactccaacccgatccgctccgtcacggaccacgccgcctccgcgctcgagtcaaccgtcatcgccgccctcggccgcacccgcgacgccctccgcttcgcccgcttcgccgtcaggcatgggaagaggtacggcgacgcggcggaggtgcagcggcggttccggatcttctccgagagcctcgagctcgtccgctccaccaaccggaggggcctcccctaccgcctcggcatcaaccgtttcgcggacatgagctgggaggagttccaggcgagccggctcggcgcggcgcagaactgctcggcgacgctcgccggcaaccaccggatgcgcgacgccgccgctctcccggagaccaaagactggagggaggatgggatcgtgagccccgtgaaagaccagggtcactgtggttcctgttggaccttcagcaccactggttctcttgaggcagcatatactcaggccactgggaagcctgtctctctttctgagcagcagctggttgattgtgctactgcatacaataatttcggatgcagtggaggcctaccatctcaggcctttgagtacatcaaatacaatggtggccttgacactgaagaggcttacccttacacgggtgtcaatggcatctgtcattacaagcctgaaaacgttggagtcaaggttttggactccgttaacatcaccctggtgatcaacggtttcaggatgtacaagagtggagtttacacaagtgaccattgtggaacttctccaatggatgtgaaccacgctgttctggccgttggctatggtgtcgaaaatggcgttccctactggctcatcaagaactcatggggtgcagactggggtgacaatggttacttcaagatggaaatgggcaagaacatgtgcgtgttcatgtcagtaaagatagcccgcaaggaactgcaattaacccgtgattttactcaccaagatcgcttcttgcccggtgcaaagttcaccgatttcaccatgaggagacacgcagggacgattatcctgttgttgatcttggcctgcctatggctgtgccctgggaggagcagcggcttctcgtggaacattttctcctcgtcgtcgtcgtcttcgccgccgacggccggcgagagccgcgccgccccgatgctggagctggacggcgcggtggccgacttcttgatggacggggccgacgacccgagggcggtgaagctgctggagaacgcgaggagcaagctcgccgggccgagcaactgctggcaggaggcgtaccggaggctgttcgccagctgcggcgacatcatggccgacaaggagatgcagtcgcggctggcgtggcacctcagcagctgcttccaggaggactccggccgccccccgttccctcgctgcggcgaggtctccgacatggtgcactgccgcaagaggctcggcgtctccgaggaccaggtgttcctcgagttcttcctcgagaccaacaccctgtgccaccaattgcaagctgaagcgttcaagcataacacggagaggcttgtcaacgacctgacaaggacatccaagtcagccgaggagaagctggaggtgatcgaggagaggtcagaccagatcatacaagaatcacgcaaagttcaggagacgatctcgtcgatcgaaatgcaggcagatcatctcgcagaggcgtcgaagaatgtcggagaccagatcgacgacgtgctggctcactccaaggccatctttgagcagtccaaggagattgcagactctcaggcaaagctcagagaagggcagaccgagatgagggagacgatcgatgccggcatgacgcatattcaggagtcgtatgagagccttggcaatgggatggataagctgaaggaagaggctgttgatattcagagggagatcaaaactgttggtgattccatgtccaccaagatgcaggatttgcagagcactgcaaatgatattgggagtgtggctggcaaatcattggagaatcagatgcaacttttggatggacagagcaaggccatggacggtctgaataatctgtacagctttcaggcacaagctcttgaggaaagcagggagactgtgcaaaaacttgcacagtttggccagcgtcagcaggaagagttattgtccaggcaggaagaaatccggcaagctcatgaacacctgattcataattcacactcaatactggaagctcaggaagagttcagagcaaagcaggccaacatttttgctgctctggacaaactttacatcctccacaacgccatcttagccgagtcacgtttcatcaaggcgttcttcttctactgctgcatcgtgtttctcatctacatgctcacaagcgcgaagcaaactttcagcatcaggggacatctttactttggcttgtgcatcacgcttctgctcgaaattggcctgatcaagctcggagctgacgacatcgacaagcaattctgggtcatatccaaggtgttccttgtcagatcagtgttccttgcacttgccaccgttcagatgttgcatgccatattcacattcagggattacgaactactcaaccatcacctgctccagacgctggtcgagaaggtccgggcgctggaggaaaccgccgccgccggcgagaagatgctgccctacggcggcggcggcgcggagagcgagaggagcctgatggactactcgtgggtgttcgacgagttggccgacgaggtggacagcaatgcggatccgagctacgccttgccgggggatgagcagcggcaggtggcggtggtcgctcctcgccggaggcactgcgcctcgccggaggaggtcgtcggcgagaactccatcacgacgtcggctggccggaggtacaacctgcggccacggagtagttacaggcagacgtga

SEQ ID NO: 10081 - DNA, 2498 bp, Oryza sativa
  Clone ID: PAT_MRT4530_16436C.1
cggacgcgtgggcggacgcgtgggcggacgcgtgggcggacgcgtgtccactctcacaccaaaaccagtaaaaaaatatcgtcaccttcgccggcgagatggcccaccgccgcatcatcctcctcctcgccgccgccgccgtcgccgcgacctccgccgtcgccgccgcgtcctccggcttcgacgactccaacccgatccgctccgtcacggaccacgccgcctccgcgctcgagtcaaccgtcatcgccgccctcggccgcacccgcgacgccctccgcttcgcccgcttcgccgtcaggcatgggaagaggtacggcgacgcggcggaggtgcagcggcggttccggatcttctccgagagcctcgagctcgtccgctccaccaaccggaggggcctcccctaccgcctcggcatcaaccgtttcgcggacatgagctgggaggagttccaggcgagccggctcggcgcggcgcagaactgctcggcgacgctcgccggcaaccaccggatgcgcgacgccgccgctctcccggagaccaaagactggagggaggatgggatcgtgagccccgtgaaagaccagggtcactgtggttcctgttggaccttcagcaccactggttctcttgaggcagcatatactcaggccactgggaagcctgtctctctttctgagcagcagctggttgattgtgctactgcatacaataatttcggatgcagtggaggccgtccaatactagaaaagggaaaaaaaaataaatcaaaatccattccccttctccttccccaaacacggtgtggtctgcacgcgactcctcccccctccgccgccgccgccgccgcagcgagaccccggcgaatggcgtcccgcatcgcctctcgcctcctccgccgctccaacgcgactctaggcctcatcaggagttattcacatgccaggaactacagcagtcaactttcagctcttattccaattggttcccagagctcaaagcttacaagaagacgctattacttgccaaatgcctctccgtaccaactctggagtaggtcatttgcatctgacaatggagaccaggttgaagctgttgtccctttcatgggtgaatctgtaactgatggaactcttgctaacttcttgaagaaacctggtgacagagttgaggctgatgagcccatagcacagattgaaactgataaggttactatagatgttgctagtccggaagctggtgttattgaaaagttcattgctagcgaaggtgatactgttactccaggcaccaaagttgctatcatatcaaagtctgcggcaccagctgaaacacatgttgctccgtctgaggattcaaccccaaaagaaacgcctccaaaagctgaggagacaaaaccaaaattagaagagaagtcaccaaaagcagaacctcccaagatgcctcttaccacccaagcctttgattacatcaaaacaatggttgccatgacactgaagaggcttacccttacacgggtgtcaatggcatctgtcattacaagcctgaaaacgttggagtcaaggttttggactccgttaacatcaccctgggtgctgaggatgagctgaagaatgctgttggacttgttcgtccagttagtgttgcctttcaggtgatcaacggtttcaggatgtacaagagtggagtttacacaagtgaccattgtggaacttctccaatggatgtgaaccacgctgttctggccgttggctatggtgtcgaaaatggcgttccctactggctcatcaagaactcatggggtgcagactggggtgacaatggttacttcaagatggaaatgggcaagaacatgtgcggtattgctacttgcgcatcctaccctattgttgcatgaggtgcccacggattagttccattgtgtcaatttagttggcctcaataatatatttttctgtccaaggatgaagatgggtatacagaaactgaaactttcttgtgaatataagatcataaggacatgaattagcccagtgcatgtaatcttctcctgtatggttgtgtaggtaatccagcaattggggtttcagagtactcattacatggctgtaaattcctatttatgcgacagaatggcctattcatatttcatagtgcagttacgaaaaatacagaagaaccaccaatcgcagcctgagagctgctttgtgctttgtctggaaaataatactgcaaatttttgactgatacaaagagttgcttttctgagaaagacgaaatttgagttgaggataccgtgagggggtctctctgacaattatagacgagagcaccaaatccgaatcttaaatcttatatatcagcgcttattccattttgggatgtagttccctaaacaatttgcttttagtttcaatgcaagagcaatagatcatgcattttttgtttgaaaaaaaaaaaaaaaaaaaaaaaaaaaaaaaaaaaaaaaaaaaaaaaaa

SEQ ID NO: 10082 - DNA, 1423 bp, Oryza sativa
  Clone ID: PAT_MRT4530_16437C.1
aattcggcacgaggcgtcgactcgatgatataccagcaaaaggggcaagtgtgagcaggcggcggcggagccatgccgatgccgtcgcgggcgcggcgcaggtccaaatcccggtggcctctcggcgagccccctcccggcctcttccccgctagggacgacctcctccgcctgctcgccgtcgtctccatcgccgccgcagcagccgctgcctgcagccttctcaaccgccgccccaaacccttgtgcgacagcggcggcgccgcctatacccaccatgattcatgccaaccatgccctccccatggacgatgcgtagacggaaacctggagtgcgtccagggattcaacaaatatggcaacctgtgcatagaggatgggctggtcagccaaactgctaccaagatttcacagttgctagagcggaggatctgcgatcaatatgcccgtgctttatgtggccaacctgccaaaatcttgttccaagagctcgatatcttaaacatggctgatgagctgttatccaagggttttgttggcctaagtcaggatggagctaaggttgcaaaaattaaggttctggacagtgcgcgggccttctttgagaaaacattcagctccgacggagtcgaagagtttaaatgtccagacctggttgccgagctttataggcccctgacctgtcaaattcggcaatggatctcaagaaatatcatgtctgtgacagcctttggtgtcctgcactgctctggattctttggactatttacaagagacaagcattatcaaagagggccgaacaaatatatgctcaggtgtgtgaggtccttgaagataatgccatagatgcaaagattggcaactctgaatgtgagccttgggtggtcacgtcttggctgcgagatcatctgctagtcccacaagagagaaggaatgctttcctttggaagaaggtggaagaactaatactggaagattctcgcatagatcaatacccgaaagtggtcaagggagagtcgaaagttgtttatgagtggcaagcgagcggctcgctcagtggaaagaaaaaggttaagaagatgcaaggtgtagcagcaggcaagtcaagagccgatggtgcagctggcggcgccataaaacttgctgaagaactggatgcaggctagctagagctgccatgcgttatgtatgtacaaatgtttctcaagctactaggagagtatatatcatgatgtatgcttggaatgtactaaattaattgagttaatggagtacgtggtgtatatgtaaaaaaaaaaaaaaaaaaactcgagcctcctcccccctgtgaggcgtcgtcggcgtagtcgcgcgcgcggccgggcgagaggggcgaggcgggccggcctccttacaccccgaatccgtcgccgtgcggatcgaa

SEQ ID NO: 10083 - DNA, 911 bp, Oryza sativa
  Clone ID: PAT_MRT4530_16439C.1
cccacccgtcgcgtccggtcgtcgtcccccccaaaaaaacgcgaagagagagagaaagcgagatagagagagagagagagaatcctccggtgaggaaaagtcccgtgcccttctcgcctcgcagcctgccggtagcaatggcacaagaaagctggaaaaatgagtctgaggagactgtccacacaccggaggccccaatattgtgtgtaaacaactgtggcttcttcggcagtagcatgacgaacaatatgtgttcgaagtgctacagggactttgtgaaggtcacgacaatggctgccccagtagtggagaagaaggcatttacgccagcatcgtcttcgaagacaccattggagccagcaaagccagatgaagttcctgccgcagctgtagaggataagcaagcggcacaggagcctccaaagccacccagcaaccgatgcctgtcatgccgtaagaaggttggtctgactggcttccagtgccgatgcggaggtaccttctgctcaacacaccgttataccgaagctcacgactgcaccttcgactacaagaaggccggccgggatcagattgccaagcagaatcctgttgtgatagccgagaagatcaacaagatctgattgaaggttatggaagggccatttaatctctattcatggtggcaaccgagtcttcaagtttacttcagccagtaggttccttcaggtctgggttagtgtgctaggagtcccaattgtgtctatccttcctccttatcatggtttcattctctggcaattaaggaataataatgtaaatatatattatattcttaactatatttccatcttattgcttattgttacaaaaaaaaaaaaaaaaaaaaaaaaaaaacgccgctcttaaaaggtatccaggctacggcaggg

SEQ ID NO: 10084 - DNA, 3231 bp, Oryza sativa
  Clone ID: PAT_MRT4530_1643C.1
atggagcggggcgggccctgcgacggcctctgtcgcttccggattcacctaggcaccagaggggactgcccgttgcccgctagggacgggggctttgctatcaccggcacgtccttgacggagattgataaccgcaacctccaactcaatgcccaagccatgaatgctttgttcaactctttgagccaagaggagtttgatagagtgagcaaccttgagaccgcatatgagatttggaacaagttggcggagatccatgaggacacaagtgagtacaaggatgccaagcttcatttcctcaagatccaatatgagacattctccatgttgcctcatgagagtgtgaatgacatgtatgggaggctcaatgtcattgtgaatgatctcaaggggcttggggtaaactacaccgatcttgaggttgcccaaaagatgcttagggctctaccagagaagtatgagacccttgtcaccatgctcatcaattccgatatgtcaaggatgacacccgcaagcctcttggggaagatcaacaccaatgacatgtacaagttgaagaagaaggagatggaggaagcctcaccttccaagaagtgtattgctctccaagccgaagttgaagacaagggcaagggtaaggtgaatgaagccaatgaggacttggaggaagagattgcccttcttgctagaaggttcaatgatctcttgggaaggagaaaggagagaggaaggggctccaactccaataggagaagaaatagaagacccaacaagactctctccaacttgaggtgctttgagtgtggtgagaagggacactttgcttccaagtgcccttccaaggatgatgatggggacaagtcatccaagaagaagagtggaggctacaagctcatgaagaagctcaagaaggaaggcaagaagattgaggccttcatcggggaatgggactcaaatgaggagagctccgcctcatccgggtccgaggaagaaggtggtgatgatgcaagctccaagaagaagaagatggccgttgttgccatcaagattgtcaagttcaaggccctaaagaaggatcatgcttctttggaggtcttgtatgaggagctaaagacttctcatgagagactcaccatttctcatgagaagcttaaggaagctcatgacaacctcatttccactactcaacttggagctctcattgatgttggcatatcttgtgatttgcttgatgatagtgctactcgccatattgctcatgttgcatcatctagcatttctacctcttgtgatgatcttgtggatatgtctagctctagctctagctcttgtgtttctatttgtgatgcctcacttgttgttgagaagaatgagcttaaggagcaaatggctaagctcaacaagagcttggagaggtgcttcaagggtaagaacactcttgacaagattttgagtgagcaacggtgcatccttaacaaggagggacttggattcattccaaagaagggttatgcctcaaaaagcaaggcataccgggtctacaacaagaacaaaggtattgtggaagaaaccgccgatgttcaatttgatgagactaatggctcccaagaagggtacgagaatttggatgatgtatgtgatgaaggcttgatgagagctatgaagaacatgtctattggagatgtcaagcctattgaagtggaagacaagccatccacctccactcaagatgagccatctacttccgctacgccaagtcaagctcaagttgaagtggaggaggagaaggcacaagatccacctatgcctccaaggatacacaccgctctttccaaggatcacccaattgaccaagtgttgggtgacattagtaaggatgaagctctttgtgatccggattggatgaatgctatgcatgaagagctcaacaactttgcaagaaacaaggtgtggactttggttgaaagacctagagaccacaatgtcatagggacaaagtgggtctttaggaacaaacacgatgagaacgggttggtggtgagaaacaaggcaagggaatttgagatgtccatgattggagagttgagcttcttccttggacttcaaattaagcaactcaaggatgggacgttcgtgagcaaaaccaagtacatcaaggatctactcaagaggtttggcttggaggatgcgaagcccatcaagacacctatggcaaccaacgggtatcttgaccttgatgagggagtgatgcctccccgcacttgtcatgatcgtcgtgcgcccactccggatcccgtgagtgagcctggggaatcgagcggagaggattacgctcaaagtgatgaagaggttgaggcaaatgttgagggggctagtgaggaggcaagtggagatgatgacagtggaagtggagaggatgaggatgaaggaaggaaagcttttgcagagcataagtggatttcttggagagacatcaatgagactccagagtttgagggcttgcaggatctcttcaagactgttggcattgatcggattatgactctcaagcaagactacaatgaagatctgatccggcagttttatgctacagtgtgggtggctggggactatagtgagatgaagtggatgtccgacaccctccagtgttctatctctaggaggcaattctggcggctcctcaatattcgcttggactttggagatgacttgcatgaggagcacacccataatccgctctccatagactacctctctcagttttatgaagatggagtgcggtacacacatgggaaggttgccggcttgaggaccatccccagtgtggttaacaggattgtgagagctaccatcctccctcgccttggcaacaatgatgacattaggggggtggcttggcacgtcatcgatgcgatcattcagggtcgtcagttcgacattgtgtctctcatgatgcaagagattgccatctctaaggggaccttcactcagggaatctattatgccccttacatcatgaggttgattcaagacaagcttggggctgctgggcaaaatttgaagaagcataagcagtacaagccccgccttcagcttggaactccccgtgctcctagagcggcgccctcctctcatcctggagctagctcaagctcagcacctcctcctcctcctcatgggtatgttccaaatgctttcttccatcctcagtatgcctactttggaatgtag

SEQ ID NO: 10085 - DNA, 3849 bp, Oryza sativa
  Clone ID: PAT_MRT4530_16440C.1
atggcggcggcggcggcgcgagaggcggcggacggcggcgacattaatgggggtggaggaggaggaggagagaggtcgtcgagccccgcggcggcggcggcggggaatagcgacgtggggcgcgtggcggtgcggcggatgttcgcgttcgccgacggggcggacgcggcgctgatggcggtgggggcggcggcggcggtggcgaacgggatggcgcagccgctcatgacgttcatcttcggcgacgtcatcaacgccttcggctccacctcctcgccggacgtcctcgccaaggtcaccaaggtgattttgaattttgtctaccttggcattggagcaggatttgtttcaactcttcaggtatcatgttggacaatcactggagaaaggcaggctgcacgaatcagggcattgtatctcaaggcaatacttagacaggacattgccttttttgacaaggaaatgagcactggacaagtggttgagaggatgtcaggggacacattcctcattcaagatgccattggagaaaagagtggcaagtgtatacaactcctttctaccttctttggaggcttcattattgcatttgtgagaggatggctcttggcacttgtgctgctctcatgcattcctccaattgcggtggccggtgcttttgtgtcaaggttgatgacaagaatctcaacccgcatgcaagaaaagtatggtgatgctggaaacattgctgaacagactattggggccattagaaccgttgcttcattcaatggcgagaagcaagctataaacacatataacaaattcataagaaaagcttatgaatctactctacaagaaggtgttgttaatggccttggattaggtaccgtaatggcaatcttgttttgcagttatggtttggcagtttggtatggatcgaaactgatagtcaaccgtggatacaatggtggcatagttataaatgttctaatgtctgtcatgatgggtgcaatgtccttaggtcaggcaacaccatcaataacagcttttgcagaaggtcaaggagcagcatatagaatgtttaagacaatcaaaagacagccagatattgatgtatgtgataccaaaggtatcatattggaagacatcacgggtgatgttgaactgaaggatgtgtacttcagctatcctaccaggccggaatatttggtattcaatggattctccttgcaaataccaagtggcagaacaatggccctagttggagagagtggcagtggaaagtcaactgtgatcagcttggtggagagattttatgatccacagtctggggaagtcttgattgatggaattgacattagaagaatgaatctgggatggatacgaggaaaaatcagtcttgttagccaagaaccagtgttgttctcaagtacaatcagggaaaacatcgcctatgggaaggaggatcaaactcttgaagagatcaagagagcagtagagcttgcaaatgcagcaaaatttgttgataagttgccaaatggtcttgagacgatggttggggaacgtggaattcaattgtccggagggcagaagcaaagaatagcaattgctagagcaattataaaaaatcctaggatcttgttacttgatgaagcaactagtgcattggatatggaatctgagagggtagttcaagatgctttgaatagggtaatgcttgaaaggactacaattattgttgcacatcgcctaagtacagtgaagaatgctgacgtgatttctgttctacagcagggaaagatggttgaacaagataaatcaaagctgcttctgactactaatcaacagatagacaacaacctatttactttgggttctcatgtagaactgatgaagaaacctgaaggtgcttatgctcagctgatccagctccaaggggcacagcaggatgctgaaatccataatgacgacactgacatgataataagaagcgattcaggctctaggtctataaatgtaaaaccaagaagccaaagcacctcatttaggagatcaattactaaaggctcctcttttgggcatagtggcaggcatcctatccctgctccccttgactttccagatcccatggaattcaaggatgatctgggcatggaggagactacagacaaagtgcctcgtggccagaagaaagcttcaatcagtcgactgttctatctgaacaaaccagaagcttttgttcttgtacttggttctgtaaccgcggcaatgcatggactcatgtttccaatatttggcatactgatctcaagtgcaataaagatgttttatgagccaccatcagaactcctgaaggactccaggttctgggcaagcatgtttgttgtggtgggagcttctgcatttgttctgattccaaccgagtacttcctgtttggattagcaggtggaaagcttgtggagcgtatacgttcactgacattccgaagtgtcatgcaccaggaaatcaactggtttgacaaacctgaacactctagtggatcgattggtgcaaggctgtctgttgatgctctgaatgtgaagcgccttgttggagacaatttggcacttaatgtccagactgtatcaactgtcatatcaggttttacaatagcaatggtggcaaactggaagctggcattgattataacagtggtagttcctttggttggtttccaagcctatgctcaaatgaagtttttgaaaggtttcaacaaaaacgcaaagctgaagtatgaagaagcaagtcaagtagcaactgatgcagttggaggcatcagaactgtggcatcattttgtgctgagcagaaagtgatagaagcatatgagaaaaaatgtgaatctccagtaaggcaaggaataagggaaggtgtagttggtggcttgggttttggcttctccttccttgtgttctactttacttatgctctctgcttctatgttggagcaaagtttgttcaccaaggagtggcaacgtttcctgaagtgtttagggtcttctttgttttagttttggctaccagtggaatctcacgaacaagtgcaataggcgcagacagcaccaaggctaatgaatcagctgtttctatcttcgaaatccttgaccggaaatccaagattgattccagcagcgaggagggtgtggtcattgcaagtgtgaggggtgacattgagttccataatactgttgcactggttggagagagcggaagcgggaagtccacggcgattgcgctgcttgaaaggttctacgacccggataccggcaagatccttcttgatggggtggatctcaagacattcaaggtcagctggcttcgtattcagatcgggctcgtggcacaagaaccggtattgttcaatgacaccatccacgccaacatagcttatgggaagcaagaacaggcatctcaggaggagatcatggccgctgccgaagcagcaaacgcgcaccagttcatctcggctctgcctgacgggtacagcaccgtcgtcggcgagagagggatccaactgtcaggcgggcagaagcagcgcgtcgccatcgcgagggccatcatgaaggaccccaaggtgctcctgctcgacgaggcgacgagcgcgctggacgcagagtcggagcgcgtggtgcaggaggcgctggaccgggtgatggtggggaggacgaccgtggtggtggcgcatcggctgtcgacgataaaaggcgcggacatcatcggcgtcctcaagaacggggcgatagtggaaaaaggggggcatgatgaactgatgcggataaaggatggaacctatgcttcgcttgtcgagcttagttcaagttcaaggtaa

SEQ ID NO: 10086 - DNA, 187 bp, Oryza sativa
  unsure (1)..(187): unsure at all n locations
  Clone ID: PAT_MRT4530_16441C.1
acagcaacattaactatacacatgtgtcccaattttgttagaggtcnccacnccctattttgacatggatcacgtaattattcgacttgtagcatgaaaccaaaaaaaggtattcgggaccggtagtttcgaccgtggaatttcttcccaggtgcagcagcgctgatcacaattcacaaatgcggga

SEQ ID NO: 10087 - DNA, 174 bp, Oryza sativa
  Clone ID: PAT_MRT4530_16442C.1
accttgtccgtttgtggcaatattctttctctttttggactcaaccacaaaggatccatctaaatcaattagcaaacttttgcttcgattttctagggtactttgcaagtgtaccaataaattctttgttagtaaagaatcaaatgctagagaattcatttatcctcccaccct

SEQ ID NO: 10088 - DNA, 3234 bp, Oryza sativa
  Clone ID: PAT_MRT4530_16443C.1
cgaagtgtacgcgtacaatgatatataagtatacagtatgatatagtacaaagctagactgatcgtcccacaaaatcctataagcagggggattaatcagacatgaatgagtcaaaaaaagatgacgaaacaatagagataatggatggattacctatttatatttctataaacaactcagggtaccctgcttacaaattgttcatgcaatctctccactaacaagacgcttctctctctatagtccaaatcccccaaatccgctcaccccagccaccaatatcaatcagaaacagggcgtggtgcctagcaagaatacatcacggcgctcgttcatggatatatactaatcagcgtgattagtatttaggaggtgctggaggtaaccggtttggagtgcgtcggctgccggagttggcaccggaggtcacgtcgccgttttcatagcgccctctgcgtccatcagcgcttcttgaccttgattcgctgcctgagctgggtccgttggatgcggaatcgaaggcagacctccaatcctcacctgggcggttgggtgtccgggggctctcagcttcagagatatcattggcataagaagcagccctgttgtcatggacactaagttgacgggtaagctttgacaagagagatgattgtttttggtatttttcccttctacgtttagcattatggtcctcttgcagaagctcttcaatttttgcattgctttgcccacttattgaactatatagctggtttagcatatcttcctttgccttctccacttggcacaacacaatagcctttgggacatttgctgccagactattcaaaacagcctcaacataaccacgaacttcatgggacatccatctaagttcttcttcaggatcagcaggtctccgtgccatagtatccagagcaccatcggaattgctttgtctcatggaaccaccatcagtatttggacccttgaatgatccccctttgctttgaattacagcccgtatcttatttacccactcaactttgtcggccgtgctctcagctttcaatacaacagcactatgagcttttagaactgttttgtaggcaaccctgttagttatcttaaagacgagacttgggcctttctctggcccatttgccttttttgaatccttcaaacttttaggaggttcttcctcctctacttcttcaaggttacactcctcaagagtgatgacaccacgaaaatgtctctcctcttgtttcttcgtgtagccaagctttccgcttttctcattgaggacaaaccacctcctactccatccatttgtttttgcacttttcttcaaaaggtaacctgcagtaatttcaccagaagaaccagcaacctgcacagaggacccctcttttgcgtctttgtcttgctggcctgatttgtctttgtctttgtctttcgctgatttgtcttttgtgtctttctcagatcctgtctggggactggaggccctttttcccatgggttggtcagcatcctgtggtttcttggaggatcgattttttaattcatcctcacggcgttgcctttccattcttctttgcactagacggatgaaatgctgaggaggaacaaaggcgcgctccatatcaacaagtgcaacaaccatcttttttgcatcatttttgaagctgtctagtgcatttgatgctattgcaatgacctcgcgcttgaatggaggatatcttccaagtcctggtgtggcatttgctgaagcattgacaatgtctaacaatacacgatgtacctcttcaacacagagtcgtgatggctcctttgccatatccaatactatctttatcaaggacctcaaccctttctctggagatatcaggtacggttgataaccatcggcttccaagacaatccttttaacattgctgaggtcaaagtgcctgtccagtggcagctgtttaattctctctgggaatttcccttcaaaacttgcaacaactttccaaccagacccctcgccagatgtaatatgagcaagaaacttatcctcgaattcccggcagagttccaaagcaacagcccgagtcccttcagcactttgtaccatagattctcccagccgtgccagttcatcttgaaccatctgggacttaccctgaagaccactcaataggttaggaagtcgcactttcatccgtttacgtatctgcttagcaatggtgtcaaccagagctattctacctagtttactttttggagctccagttaagatggatctgagggtttcatcttcagcattccatgctgtttctagtgagttttcagaacctgctgcttgagctgacgcaattgcaactgattgtcctatcagagcaacccactcgatatctggaaggttttttgggcccttattcgacagaagggcctgaacacaagctatagtttttgcatctccttctgcttgatcaactttacttatcacacctacagttctggtgccatctgcatcaatatccttggccagcctaagagctcgagatgatgcaacatcagctgcttgcattgcaggtatcacaactagcagtattgcatcattgtgcccagcatattcattaatcattgaatcgtcaacagctcgctggtctatcccaggtaaatcaaccagctttagtgggggagctgtactcgtccgcagcttgagattgatcccctctacacggcccctactggatccgctggacgcccccttgctgagcctgtcctgcagcgaatgccgcagcgaacttgcggacacctgctgcgacttgctgtcgatttgcagcacgatggacttgctgctgaggcccgggtccctctgcaggtccaccacaattggcgccctcgtcgccccgttctcccccgtcggcagcacggggtggccgatgaggctgttcagcacggccgacttgcccgccccgacgttgccgagcgcgacggcgttgaggaaggtggaggggcggcgtggggcggagtcgtcggaggggtcgtcgtcggccagcagcgacgccgcctggcgcatcgcctccgacagctgcgcgagctcctcgacggcctccatcgtctcccgcgtccccgcccttcctctccctctccctctccccgcgccggatctcgacggatcgggggctcccgctgctgctgctgctgcgacggcggcggcggcggcggcgaccagggccgaggcgacgcgggtttga

SEQ ID NO: 10089 - DNA, 343 bp, Oryza sativa
  Clone ID: PAT_MRT4530_16444C.1
ttttggttttttttaattttttggggttttttttttttttttttttggaattatttcccctttattttattggacaccattccaaacgggtcaaccaacaggaattacaagtttacaacatgaaacatcccatggtttgagtagaaaaggacttattgggcccgcacataatctggggggaaaccaggaaaccttacgggttttaacggcacccctttggaccatattgcaggggggcctccggaacgccggggactgaagacccgcccttcttcacgggctttcggcaaacgacccttgtgtccgccgggttagggcttggctttctaccctccttcgacgg

SEQ ID NO: 10090 - DNA, 1204 bp, Oryza sativa
  unsure (1)..(1204): unsure at all n locations
  Clone ID: PAT_MRT4530_16445C.1
tgattcgctgcctgagctgggtccgtggatgcggaatcgaaggcagcctccaatcctccactggncggtgggtgtccggggctctcagcttcagagatatcattggcataagaagcagccctgttgtcatggacactaagttgacgggtaagctttgacaagagagatgattgtttttggtatttttcccttctacgtttagcattatggtcctcttgcagaagctcttcaatttttgcattgctttgcccacttattgaactatatagctggtttagcatatcttcctttgccttctccacttggcacaacacaatagcctttgggacatttgctgccagactattcaaaacagcctcaacataaccacgaacttcatgggacatccatctaagttcttcttcaggatcagcaggtctccgtgccatagtatccagagcaccatcggaattgctttgtctcatggaaccaccatcagtatttggacccttgaatgatccccctttgctttgaattacagcccgtatcttatttacccactcaactttgtcggccgtgctctcagctttcaatacaacagcactatgagcttttagaactgttttgtaggcaaccctgttagttatcttaaagacgagacttgggcctttctctggcccatttgccttttttgaatccttcaaacttttaggaggttcttcctcctctacttcttcaaggttacactcctcaagagtgatgacaccacgaaaatgtctctcctcttgtttcttcgtgtagccaagctttccgcttttctcattgaggacaaaccacctcctactccatccatttgtttttgcacttttcttcaaaaggtaacctgaagaaaaatgtacaaaattaacgaatatttatatttgcatgtacttttttacaatgagacaaaacaaatgtttcatttcaccaaatggttcaaagggcctgtttaccagagctccaactcctggattcttacagaatgagtttttagactagaatagaagtgctttaagcctgtcttgagcctaaattcaataaaaaatttgtggttttccataatggctagcttgagcacagcatgatttgacacattcttacctgcagtaatttcaccagaagaaccagcaacctgcacagaggacccctcttttgcgtctttgcctgcagcccgggggatccacta

SEQ ID NO: 10091 - DNA, 175 bp, Oryza sativa
  unsure (1)..(175): unsure at all n locations
  Clone ID: PAT_MRT4530_16446C.1
tcgtcgtntcgccntcgcgagtntcgcccnccgcctgcnccnnagcagcctgccgatcntccgccacgcgagcagcggcnccgnnggtccngcnacttccgncntgtcctcgncgntnagcaaccaaaggaaggattagtaggcgctngagcanntacaattttattttttggtg

SEQ ID NO: 10092 - DNA, 828 bp, Oryza sativa
  Clone ID: PAT_MRT4530_16447C.1
ccggccgggaaccccttctcttcccctccgccgccgacgaccaaaccccacctcccaccccccgccgccgacgagccacagacgaagatggcggaggtgaacccgaaggcgtacccgctcgccgactcgcagctggcgcaggcgatccaggagctcgtcagccaggccgccaactacaagcagctcaagaagggcgccaacgaagcgacgaagacgctcaacagagggatcgcggagttcgtggtgatggcggccgacgccgagcccctcgagatccttctccaccttcccctcctcgccgaggacaagaatgtgccatacgtctttgtcccatcaaagcaagctctcggccgtgcatgtggggtgacgaggcccgtgatcgcctgctcggtgaccagcaatgaggccagcaacttgagagatccaatcaataacctcaaggtcgctattgagaagctcctgatctgatcagtgatctgatgaggtgaagttcaaccatggcgttttcggcgtgaagggcctcacaaggagccggaggcctggactggtgatggtgtctctgtgttgcagatacctgctggttctaagttccttttatatgttttttgccagacagtttagtcagctcccagtattatgtctgagaattttctgccattaatcttaaagagcagtgattgatcagttgaattattgagttctccaatgaattgatgtgttctgagcagggttgacagtatttgttttcggtcaaactggcactaacatgaattagtttcgtcagcgaaattccataatcgagttctccagtgaaaaaaaaaaaaaaaa

SEQ ID NO: 10093 - DNA, 789 bp, Oryza sativa
  Clone ID: PAT_MRT4530_16448C.1
atgccgccgcctctgtggagcttggtcttctgcggcgcctacctgatcgacggcggcggcggggagcgcggcgtcggcatgtcgaactaccgggtgctctgcatgttcggcgagctggcgtgcgtcttctcgccggggaacgacggcggctggcgcttcgtcgacacgggcttgaagtacggcgacggcgaggacgtcgagttccccgaggacacccagttcgtcggccgcgccgccgggaagatctactggtgggcaccgggtgggctagtgcaggtgttcgacgaggccacggacaccttcttcctcatggagttcccgaagcacatgcggtgggagtaccacaagtccaacctccgggtgatcggcggcgtggacggcggcgggatacgcgtcgtccgcatgaccggcgaggacctggagatctacggcgagagcggcggcggggagtgggcggtggagaggagcgtccggctggccgaagccacccgcgggctgccggggcgtcaggaggtgttcttcaccgcggaggcgccggctgcgaggatcgtgaccgccggcggcgacgggttcgtgacgctggcgccggcggaagatgagacgtggctcttctccgtcgacctggagaccatggaggcggagcgcgaccacgagaggaacaagcacgtcggcgaggcgcacccgtgctcggcgccgccgctcgccgccgtcttccgtgcttgcggcgtaggtgacgctacgaggacggaaaaaagcggaagccgccttggaactgacgacgaactttag

SEQ ID NO: 10094 - DNA, 468 bp, Oryza sativa
  Clone ID: PAT_MRT4530_16449C.1
atggaacagggcgagcggcagcggcagaagcgggcgacatgcggggcggagcggctggccagcggagcgaggcggggcagcggccgatggcgggctaggcggtggcgccgcctcgtcaccagcaacgcggtgtacatctgccggtccatgccgccctccagccgcctcatccgcgacctcatcgtcggcttcttccaccagacccacgaggacgactcgtcttcctcggtcgcgccgcctcggttcatcccgttgccctcggcctcctccaggttcggcgacggcgagcttgacagggtgagcgcattggatgcgttcctacgtcgtggtacaatcgcgtccatccccacgatcctaacaacgcccgggctctacgcgtgcgcgctgctcaccgccgacgatctccaggactccgccgatctgctctcaccgggtcccgccgccttccgcctgttggtcctctactag

SEQ ID NO: 10095 - DNA, 474 bp, Oryza sativa
  Clone ID: PAT_MRT4530_1644C.1
atgggacagcggcgcggcgcggggtgcggggcgcggggcggcgacggcgacggctcggcagcggcgacgcgactgcgggcggcagcagcggcgatgggacggcgcgacgggatggcggcgagcgatgcgcgacggcacgggcgcggggcgcgaggcggcggcatggggcttcgggatgacgtgataggcggcagcggcgacgcgacggcgggcggcacgaggcgcgggacgacggcgatggggaacggctcggcagcggcggcgcgcggctcggggcgggacgcgacggtagcgcggcgcgacggcgacagggcgagtcgacgggcgagcggcgatgggacgggcggctcggggcgcgaggcggcgatgggacgcacgagcggcgacggcgacagcggcgacgcgacgggcggcgacgaggaggggctagcgctagggaaccacgtcgaacacctggcggccgatgaacagtga

SEQ ID NO: 10096 - DNA, 696 bp, Oryza sativa
  Clone ID: PAT_MRT4530_16450C.1
atgccgccctccagccacctcatccgcgacctcgccgtcggcttcttccaccagacccacgaggacgactcgtcttcctcggtcgcgccgcctcgttcgtcccgttgccctcggcctcctccaggtgagcgcattggatgcgttcccacgtcgcggtacaatcgcgtccatccccacgatcctaacaacgtgctcacgcctccgatcgccaagctcgtcgtgtgcaaccccatgatcggtgaaatggccatcctcctccccgtcctctccgggaaggacaggctcgggctctacgcgtgcgcgctgctcaccaccgacgatctccaggactccgccgatccgctcccaccgggtcccgctgccttccgcctgttggtcctctacaagcgccgtagcttcacggcgtgccggtcctactcgtcggacaccaaggcctggagcaccgagcgcaagctatccggcgggacggacctcaccacgggggcggggctagccaccaccgccgccggcaatccgaaggacgatgggggagattcgccgccctccccgcgaagaaggaggcgctgcgggagaatggctggcgcgccgcgacctgacccgccgtcggccacgcctggcccgtcgcccgccgctcgccctgctccatcggccagagagagagaagggatagagagaagaggggagagagaggagtga

SEQ ID NO: 10097 - DNA, 834 bp, Oryza sativa
  Clone ID: PAT_MRT4530_16451C.1
ctctatcctctctcccctcttctctctatcccttctctctccggccgatggaacagggcgagcggcgacggtagaagcgggcgacagacggggcggagcggctggccggcagagcggggcggggcagcggccgacggcgggctaggtcaggtcctcctcctcgtgtttgcggctagctcgctggatcttcacgatctcgtccggtgcaccgcgccacttgtaggcggtggcgccgcctcgtcaccacctcaccggcaacgcggtgtacatctgccgctccatgccgccctccagccacctcatccgcgacctcgccgtcgacttcttccaccagacccacgaggacgactcgtcttcctcggtcgcgctgcctcggttcatcccgttgccctcggcctcctccaggttcggcggcggcgagcttgacagggtgtttgacaaccccggcctcttcaagaactcccgcctcgtcgcatcacggaaaggccgcctcgtcgtcgagctccgccgcccttaagtgacagctaacattaagctcgtcgtgtgcaaccccatgaccggtgaaatggccatcctcctccccgtcctctccgggaaggacaggcccgggctctacgcgtgcgcgctgctcaccgccgacgatctccaggactccgccgatccgctcccaccgggtcccgccgccttccgcctattggtcctctacaagcgtcgtagcttcacggcgtgccggtcctactcgtcggacaccaagtcctggagcaccgagcgcaagctatccgggagccgacggcgccggatacggccgggcgacgtggcggcggcggcgccgga

SEQ ID NO: 10098 - DNA, 4136 bp, Oryza sativa
  Clone ID: PAT_MRT4530_16452C.1
tggtggtgattgtatcagggcggcgatcggtgggcgagccgacgctggacgtctctgagatgctgctccaggcggcgcaggcatggagaagccggcgcacgcagcgggaagctcgcccggacgcgcttccacctcgccatcctcctcgtcccgtcgccgcggatgggcgcgggggctcaggcgaggggaccagtagagcgcgggggcgcggcgaggaggggacggctcgtggcggagatggcgagatgatggcgctggtgagaacagtggatgtggccgtggccggtggtttggccacgctcacgcacggcggcgagcgggatgctggcgcggcggtggcgacggaggagaagagaaatggcggcgaggtggggacgaagagggggatggaggagcgggccgcgcgttcgccgccgccgcccaagcggagcgcggtgtcctccgttcgccagcttcctccaggttgcggaagggacgccgctcttccactcgggcgccgccacggccgcggccgcgatggcgacggtggtgttcctcctctcgctggcaacagaactgatttgccgttggaagctgtggtggatggtggtgatccaattgcaaatgtgcatcaaatcttcagcaaatcttcgcatgctacggatgagaatcaggtcgcttgcaaagttggttcactggaggatgttgtacaagaaggggcagcaaatagtggtgaattgctggggtggaagcaagtgttagctcaagccgcgaatgtgcttcccaagaggaggatggtatccgcgacgcgccgcttccctcctggatgtgggagggacgttaagactggttcaggtttggaattcatggctgttgatgcttcttgtggtggtgtgtcaaaggaggtggtggcttcggatggcggtgatagtttggttagccaggaattggaggagggtgaggtggctgatgaggcatactctgatgtagattcacaaaatgttgctgtggatgattccatggctgcagctactgaagatgttaaggtgatgaacaaatgcaaagggaccttacccagagccgctgctgaaccttgtgctgagggtccttccaaagaacattttaagggtacgagggagtgtgaaaatgataggatgggaaaatcatccatgaatgttgcaacagaagtatttggtgattgtatgatgagaagtaagatactattgacagctagaaaagcagtcaagtcaccactgaacattctgcatagacgtcccttctctaagggaaaagaggagtgtgttgtaacaaatagtgctccatgtggtcctaagaagaagttgaaggtaaaaggtgcatatcaaactaaagatattcctatcaagattgtctctacacctggattagggggcaaggacaaccttgtcgacaaagaggctttgatcttggaagatgatgatattttgaaggcactagctgttcatgatggaacacttaagttgtatctcaatgcttcctcatctgtgcagcatcacgggcaacatggaagtgggaatgctgatgataggaggaaaaccatgatgctgtgcaggaggtttcagtttatacgccaggctcttgtacaagctgtcaaacagggctcgttgaaggttctaagagctgaccttgaagctgataaaatcgttcggaaattgccgggctttatcaaacctggacctattgtgggaaatgttcgtgttgtcgaagttggtgacgaatttctatacagagttgagctagcccttgttggtctccaccgtccataccagggaggaatcgataccgccgatcataatggagtgcttgttgctataagcatcgttgcttctggaggttatcccgatagattgtcaagttcaggtgaactcatatacactggttctggaggacagcctgctggtaagaagaaaagtgaggatcaaaagctagagaggggaaatcttgccttgaagaattgcatcaagacaaagacacctgtccgagtgattcatggattcaaaggccaaaatggcaaggatgacaactacaaagaattcatgctggtcgatgagaaaggagggaggtggcggaagctcagctgccggaggaagaccgtggcaaaggaggcgtcctcgggcatcgagggcgggtggcggcgggggatggatcgctgggaggcgttgatcgccgccgccgcgcggcggagcgagccgccgagaagcgggtgggcggagtggggcgggggcgggggcggcgacgctcgcgcgacggcgattccgtctcgctgtcctcctcgtcctcgtcccgtggctgcgggtgggagaggcggggggggtgatagaatgcgggggcgaggtggggaggaggggacgtggaagagtcatggtggagggggacgaggtgcggagcgcgcgggcgcggtggtggcgccgccgagggcagcggacgcggcggggacggggacggggacggggaggaacgcggtggccgtcaacggtggtgcggcggaggatgtggtggtgattgcatcagggcggcgatcggtgggcgagccgacgctggacgtctcggagatgctgctccaggcggcggagacatggagaagccggcgcacgcagcgcgaagcccgcccggacgcgcttccacctcgtcccgtcgccgcggatgggcgaggcggctcaggcgaggggaccagtagagcgcgggggcgcggcgaggaggggatgactcaagtggccgtggccggtggtttggccacgctcacgcacggcggcgagcgggatcctggcgcggcggtggcgacggaggagaagagaaatggcggcgaggtggggacgaagaaggggttggaggagcgggccgcgcgttcgccgccgccgctgccgccgcccaagcggagggcggtgtcggccgttcgccagtttcctccaggttgcggaagggacgccgctgttccactcgggcgccgccacggccgcggccgcaatgccgacggtggtgttcgtccgttggatcaggcgactgctcctcctctcgctggcagcaaaactgatttgccgttggaagctgtggtggatggtggggcagcaaatagtggtgaattgctggggaggaagcaagtgatggctcaagccgcgaatgtgcttccaaagaggaggatggtacccgtgacgcgctgcttccctcctggatgtgggagggacgttaagactggttcaggtttggaattcatggctgttgatgcttcttgtggtggtgtgtcaaaggaggtggtggcttcggatggcggtgatagtttggttagccaggaattggaggagggtgaggtggctgaggaggcatactctgatgtagattcacaaaatgttgctgtggatgattccatggctgcagctactgaagatgttaaggtgatgaacaaatgcaaagggaccttacccagagccgctgctgaaccttgtgctgagggtccttccaaagaacattttaagggtacgagggagtgtgaaaatgataggatgggaaaatcatccatgaatgttgcaacagaagtatttggtgattgtatgatgagaagtaagataccattgatagctagaaaagcagtcaagtcaccactgaacattctgcatagacgtcccttctctaagggaaaagaggagtgtgttgtaacaaatagtgctccatgtggtcctaagaagaagttgaaggtaaaaggtgcatatcaaactaaagatattcctatcaagattgtctctacacctggattagggggcaaggacaaccttgtcgacaaagaggctttgatcttggaagatgatgatattttgaaggcactagctgttcatgatggaaaacttaagttgtatctcaatgcttcctcatctgtgcagcatcacgggcaacatggaagtgggaatgctgatgataggaggaaaaccatgatgctgtgcaggaggtttcagtttatacgccaggctcttgtacaagctgtcaaacagggctcgttgaaggttctaagagctgaccttgaagctgataaaatcgttcggaaattgccgagctttatcaaacctggacctattgtgggaaatgttcgtgttgtcgaagttggtgacgaatttctatacagagtttag

SEQ ID NO: 10099 - DNA, 1431 bp, Oryza sativa
  Clone ID: PAT_MRT4530_16453C.1
atgttgccgccgccgccgctgcgttccgttgcggcaagcggcgacgggtggctctccctctccgtctccacggagtccacggggtcaggagagagcaacaagcgcctcaagcgaggcggcggcggcggatcggtcgaggacgatgggttccccctccacgacgaggtcctcctcctcgtgtttgcggctagctcgctggatcttcacgacctcgtccggtgcaccgccacttgcaggcggtggcgccgcctcgtcaccggcaacgcggagtacatctgccgctccatgctgccctccagccgcctcatccgcgacctcgccgtcggcttcttccaccagagccacgaggacgaatcgtcttcctctgtcgtgccgcctcggttcgtcccgttgccctcggcctcctccaggttcggcggcggcgagcttgacagggtgctcgacaaccccggcctcttcaagaactcccgcctcgtcgcatcacggaaaggccgcctcgtcgtcgagctccgccgcgcctcccgtgccgccgcccttaggctcgtcgtgtgcaaccccatgaccggtgacatgtccgtcctccccgtcctctccgggaaggacaggcccgggctctacgcgtgcgcgctgctcaccgccgacgaccttcaggactccgccgatccgctcccaccgggtcccgccgccttccgcctggtggtcctctacaagcgccgcagcttcacggcgtgccggtcctactcgtcggacaccaatgcctggagcaccgagcgcaagctatccggcgtcaagatcggcgggaagcgcctgggcgacatggccgccggtgtgaccttccgcggccgcgtgttctggctggtgaacagcgtggtgttcgtcctccacttggacacgctggtggcgaccaccgagaacatctcatggcattggaggtggaacggcaagccatgcttctgcctcggtgacccggtgccaaaccgccgtctcgccgtctcgccggacggacgtctctgcgtggtgcaggtgggtcgaaacttgaggacctacaacccggtgatcaacgtcttcgctcgccatgacagtggcggctgcaatgggagcacggcgcagaagatcaggtggaaggtggaggaggcgcacgacgtggagctgagccacctgattccattggcgaacgtgaagagggtttgtctgaggggcgtctgcgagaagagcgggctcatcttcctcgccatcggcgcagacatgtacgccaagaaaccggacctggcgctgtacgcgctggacatggagaagaaggaggcgaggctggtgccggcgcccccgggccgctgctgcgttcgccggtcgtcgtggagcttcttcgggtacgagttggaccgtgtggactacctcgcctccctcgccggtggcgattccaccgctagatga

SEQ ID NO: 10100 - DNA, 114 bp, Oryza sativa
  Clone ID: PAT_MRT4530_16454C.1
atggccgagctcgatctcaagcttgccagcggcaaacggtggctcgtttgtgggtccggcggcggcaaactccttcgggttgacggcgacagctcaaactactccaagatctag

SEQ ID NO: 10101 - DNA, 645 bp, Oryza sativa
  Clone ID: PAT_MRT4530_16455C.1
atgatgggcgatgggaaggggttggggcagtggaagtatggggtgaaatgcccctgctacagcaacaagttgtccatggtggttgctggctggagctggagccgaaggccgaagctgaacaatgacggcgacaccgcttcatcacttgcggcgatcaccatcatcaagattacttgcgaggtgagcagtaacatggataggtcaggccagaaaagccagggtgttttccacccgttctttctgagctgcccaacgtccattctttccgtgtttctgatccatgacagcacgaacggcatccgactgccacagggtgttagggataggatggactatttcaggagaagacttttgtggcaagaagaccaagggacaaagtttggtggaatctctgtaaagatgctgtcatatgggctatttggaagactcgaaatagagcttgttttgacaaaaaaactcccagatgaccctactgatttgatttttttggcatgtcactgggttgaaacctgggcaattctggagaaacagaaggcaaatcgaagaaacttgctgttgggtgccaagctcataaggcgggtgacaagtgaagtctaccaatcaagatttggatggaggatcaacaacaggaggcttgagaactga

SEQ ID NO: 10102 - DNA, 757 bp, Oryza sativa
  Clone ID: PAT_MRT4530_16456C.1
cctcgtatcgcttcggggtcacatggagttatatggccaatacatataaatgatagggaagaatcggatttcaagcaaagattgatacatgttctcaactttccctttgcctgggaggttctgtcgccctctttgggatggctacgctgcccttgccatcgactggggtccgccggactccccgtggcgggttggttttctgctctcgacctgtggcggcaatttctttttttgattggtccccagatcttgccaaacaagttgaagaagccagctatcccaatcgcttggctctgttgcgtgggcttttcttctggttggaggttactgcgcacggtgttctgctctgcccgtggtgtgtcgttctcttgcgctacggcttgtcgtctcgcgcagtgctcgtaactatgttcttgctggcctgcgttgtgccgcgccgcctcgcccctcattgccgtccctgcgtaccccgcaatataccggtgtttgcttgcgccaccgactcccggcccgtccagattatttgtttttggtagagttaaagaaccatattttttagtgtaggtttacagtttgtctagccctgtgatgtatgttacacttggactgctacgtgctaaatatggggctgggactaatttctgggaatgatgccaaatgtcactagtttgcttccttttgcagcattagtgttcgtattatcttcgtactagcatgcagtggcataccatttggctacatgcttgcgcaatagtac

SEQ ID NO: 10103 - DNA, 426 bp, Oryza sativa
  Clone ID: PAT_MRT4530_16457C.1
cattaaatctgcacggccaacttatttcagttatcagcaaaactgatccgacggttgcataagggttgcagaatcacagatgggtgagggacattcagggggctctgtcaaaaagggcgataggtgatcagtttgatctctgggatgccattcaggatgttgagttacgtccagaggaatgggacaggacaatctggaagatggcagtggatgggcaattctctgtttcgtcggcctacagtattcattaccaaaatgagagtgtgttgtggcaaactgatctggcaaacaaaggttctggtgagggtgaaattatttatgtggttggcagaaaaatgggcatgtctcccagcggacaatctactgaagagaggatgacctcaacagcaggcatgcatgctctctctgtatggtggcgaatgagga

SEQ ID NO: 10104 - DNA, 2046 bp, Oryza sativa
  Clone ID: PAT_MRT4530_16458C.1
atgaagagccactggtcgacgggctcctcgacgaagctggccgtcgagcgtcggcgagcgtcggcagtggcttcgtcgtcgtcggtgatgaggttggtcccgcgccgccacacctgccccaccctcactagccccgcgtcgccatgccccgctccaccctcgccatgcccacccgccggccacctcgcgctcccaacggcatcctcgagagaggaagaggagaaagagagagtggagaggcccgccaacgtggtcatcttgtggcggcaatgcgccgtcgccgcaagaggactagcatctgcatcaaagctcgccataggtctagaatgcccacctcacggggctaccatcaccgccaccttggccggactacctgcatcatccccgtctcgagtcgcgtcactagccctgttgcccttgctgccgctggatctcgactcggagcaccatccagtctcctacccatgccgtgtttgctcatcttgtcgacttgtcgttggtcgtggcttctcgttgtcctcgccaccccgctctagttgtatgtccgccgtcatcacgctggcatctggccatcgctgcttgcacaacgccgaccttcctgcttgtgccccaggcgcagtgtcacgcccggaatttctatccaaaattccaaacgcttacatcgcgggcctcctgtttcccctggccaggcggcctcacgtcatcgccggccacaccactccacgccgcattgacctctcgccggcggccatgcacgaccttcgctccgcctgttccggtcgtctgtcgctgccaaccatgacaaccctctcacaggctgacctttacccctgccatattgactacgacccctgccagatctggccactccccaccgtcgccagctacttctttcccctctccgccgccgcgccaagccatcgccacgctcggccgctgctgcgcgtgtggccacatgtcccgtacgagcaccacccgtgcgccactgccgctttgccaccacccgccgtcttcgtcttgctcggggccaccaccatgctacgagcgctgcccccgcgcgcggccaagccggcccgcacgggcgccgcctccgccgaccacccaacgcctccacctccgcctcctctgcccggcgctgccccggcacctcctcgctgtgccggccttttctccccatccacccaacgccgccggaccgcctttaggccgccgccatcgcctcggcccgtgccgccgcagccggtcgccggccgcgcgagaggcaacaccttaagtccttctctcgccttggccgctcatccgcgcctcctccacgggccgcaggccgccgctgtcacctcggcccgagttgcgcggccggttgccggccgcgacggcgcggctggccgcatcccgctcgggaggatcgagcaggctgactggctgaggcaaacgtgtcgcggcgcaggccaggttttggcaaaacaggtgacatctttagattctgtgactagagattactttgtcatcttccctataatggtgaacagaatgtccggtggacagagccgtgctcatcgccttgggcacatcgatgggaactggccagaggtgaagctgatcaacgactacgcgatgttcatggggtacctgtcaatggctgtcaccgggacgggcttcctggtgctcacttggtccaccgtcgtcctcctcggtggattcgtttccacgctatcaacgaaggacttctggagtctcacggtcattacgctcgttcaaacgaggaaccgggaacggggcccactgccatccctcgggtgtggagtttgcgtaggagcagctggtggggcgctcgagcagaggacggcagcgccaggagaggttggtggtgggtgtggcgcgcgccagcagccgctgcaccgcgagctccacagccgcgcctccatctccttctccatcagcctctggtccactcgccgagccactgagctgccatgccggaggcaagcgcgcgatgggagggaggacagcggcgctgacaggagggaggggggcagtggcgcatag

SEQ ID NO: 10105 - DNA, 149 bp, Oryza sativa
  Clone ID: PAT_MRT4530_16459C.1
atgataaaaaaagctaaagccaaagacggaccgcaagtggggcaaaaaacccgaaaaggcgcccaaaggagggaagcccccccgccggataccctcggggggttggcctacgccaaggcggtggggaaccgcggcctcaagatcggccg

SEQ ID NO: 10106 - DNA, 804 bp, Oryza sativa
  Clone ID: PAT_MRT4530_1645C.1
atggccggcgtgatggcgccgctgatgctgcacggccgcgtggcaattgtcaccggcggcgccggcggcatcgggtcggccgtgtcgaggcacctggcgtccctcggcgcgcgcgtcgcggtcgcctacatcggggaccccgcgccggcgaacgagctggtgagcggcatcaacgacggctacttgcgcgcggaggaggaagagaagcgcgggccgcgggccatcgcggtggaggcggacgtgtcggacgcggcgcgggtgagggcgctgttcgacgcggcggcggcggcgttcggcggcgagatccacatcctggtgacgacggcggccgtgctggacttcgcgtacccggcgctggcggagacgagcgaggcagcgtacgacgccatgttcggcgtgaacgcgcgcggcaccttcctgtgctgccgcgaggccgcgaaccggctggcgcgcggcggccgggggcgcatcgtgacgttctcgtcgtcgggcgtcgggtcgctccggccggggtacgcggcgtacgcggcgagcaaggcggcggtggaggtgatgaccaagatcctggcgcgcgagctgcgcggcacggggatcacggcgaacgcagtggcgcccgggtccacgggcacgccgatgatgtacaccggcaagacagaggaggacatggcgcggtacatcgccgaggcgccgctgggccgcctcggcatgcccgacgacatcgcgccgctcgtcggcttcctcgccagcgacgccggcggctggatcaacgcccaggtcatccgctgcaacggcggcactatctag

SEQ ID NO: 10107 - DNA, 110 bp, Oryza sativa
  Clone ID: PAT_MRT4530_16460C.1
ggtacgaatactaccaagaaggccaacgccagtccatagactggaaaaccttctccgctaacggggccatcgacttcgccaggtggtctatctccgcaggagtcctctga

SEQ ID NO: 10108 - DNA, 1342 bp, Oryza sativa
  Clone ID: PAT_MRT4530_16461C.1
cccacgcgtgcgaccaagactaagctcagaatcctacctgactagtactaccactactagctagtagcgagctactctctctggtcatcaagctttgagtggttggagtggtggcagctatggctttttccatctccaagaaggctgcagttgctgcactcttctccttccttgttgtcacctgcgtcgccggcgccaggccggggaacttcagcgcctccgacttcaccgccgatcccaactgggaagtcgccagggccacctggtacggcgctcccaccggcgccggccctgacgacgatggcggtgcttgcgggttcaagaacaccaaccagtacccgttctcgtcgatgacctcctgcggcaacgagcctatcttcaaggacgggaagggctgtggctcatgctaccagataagatgcgtcaaccaccctgcctgctccggcaacccggagacggtgatcatcaccgacatgaactactaccccgtttccaagtaccacttcgacctgagcggcacggcgttcggcgccatggccaagccggggcagaacgaccagctccgccacgccggcatcatcgacatccagttcaagagggtgccgtgcaacttccctgggctgaaggtgacgttccacgtggaggaggggtcgaacccggtgtacttcgcggtgctggttgagtacgaggacggcgacggcgacgtggtgcaggtggatctcatggaggccaactcccagtcgtggacgccgatgcgcgagtcgtggggctccatctggaggctcgactccaaccaccgcctcacggcgcccttctcgctccgcatcaccaacgagtccggcaagcagctcgtcgccagccaggtcatcccggccaactgggcccccatggccgtctaccgttctttcgtccagtacagcagctaagccaatgatcaagaacaagcataattcatgcctactatagcagcagcagaagcagcattagctactatacatacctctacgtacgacatttgagatcgatcgtttggccatttttatctgctcgggtattgattagctctccctcggtattgtatggatttgcatggatggttcattaatctgtcatcaggagttcgttttgagtaggtgagacgtcggttgttgggtgtcatatagacatcgctcggtgtcttgaggttgagagtgggataaggaggaggcaaagtttgcatgtgctgtcccgcccactctcactgtaccagtgtcactgtttgtgtaaccagaacaaaggtcataaattatactactagtatacagtttgctgcctggcatgcagtaaaaaaaaaaaaaaaaaa

SEQ ID NO: 10109 - DNA, 231 bp, Oryza sativa
  Clone ID: PAT_MRT4530_16462C.1
aaagggggaaggacggattaaggaaccagtgtcacatatggttcctttatattgaaagagactggattacagatgcggtttcacaactacctgtaaaaaaaaaaggacaagtcaaacttttagaactatactgaagtgcttctttggagttgtagttctcccccatctccactaaatggttattaccgctgaccttcccttgttcttatccaaaaccgtttaactgataat

SEQ ID NO: 10110 - DNA, 609 bp, Oryza sativa
  unsure (1)..(609): unsure at all n locations
  Clone ID: PAT_MRT4530_16463C.1
gcnngcttcggcacgagtcttcttccacctcgcaaatccgatcaacacatcagcttgagaaacaatggacgcgccggccatgctcacgaccaagcacgtccccgaggacgtcggcctccgcaacgtcncggcggcggaagangangggggacaggggcanatgcaccgtggggaggagaagcagcacaagccggtgctcaagaangtgaaggagaaggtcnagaagatcnagaacaccaccgccggtgaggaatggaaggacgcgacncccgacagcgcanctgcaggcgcgacgcccggcncgacntncaccgacaagatcaagtcggcggcggcgggcaccacggantncggcaagaactggccnccncggtgtacaaaaaggtccccggcntcgggacggtcttggtcggcaaggtgcancaggttacccaaacggccggcaccgacacaccangcttcccggcggcgccnccggctcacattcccagganaacttcaacncctccaccaccctcncctccgggaaaccggcnaccggggggcacancancaggacaagggggttacatcncggctactcccnacaactccccgggcaacancacn

SEQ ID NO: 10111 - DNA, 393 bp, Oryza sativa
  Clone ID: PAT_MRT4530_16464C.1
tgggtttttttatttttttgggtttttttttttttttttttttttttttttttttttttttttttttttttttttaaaaaaccctccaaagggggaacaaagataattttcccggcggcccctaactggggggggaaaaacaaccttcagcaaggacagaggggtctaaaaaccccttattggggggggcccccctaccggaaaacaaaatttttgggccggttggaaccacaacaatttggccccggggtggaaaggggcattccacccaaaaggggaacccgaagggggagggggaaacacccaaaatggctttaaaagaagggaaaagaaaccccggaggtgggaaaagttttttggaaaaagggcacgggggtgccaaatttggcccgg

SEQ ID NO: 10112 - DNA, 838 bp, Oryza sativa
  unsure (1)..(838): unsure at all n locations
  Clone ID: PAT_MRT4530_16465C.1
gacccacgcgtccggttcaaagaccacgcgtccgcagagaaaaagataattgcaaagcttaagaacagttctgaaaaatcattatggctggagaaagaagacagcattcggcgtggtttgtttgatctactacagaatatagtccttattagagatccagaggacagcacaaaattttatccccgcttcaaccaggaggatacttcaagttttaacgatctagatgaacatagcaaaaatatcctcagaagattgtactatgactattattttgctcgccaagagaatctctggcgtcaaaatgcgctcaagactctgcctgtgcttttgaactcatcggatatgttggcatgtggggaagatcttggccttatccctgcctgtgttcaccctgttatgcaagaacttggattgattggattgcgtatccagagaatgcccagtgaaccaaacttggaatttggtattccatctcagtatagctacatgacggtttgtgctccgtcatgtcatgattgctccacattacgtgcttggtgggaagaagatggaggaagaagaagccgtttctaccagactgtaattggtagtgatgacgagccgccatctcgctgcaccccagaagtagcgaactttattgttaagcagcattttgatgctccatcaatgtgggcaatcttcccactacaggacctgcttgcacttaaagacaagtacaccacangaccagcaaaagaggaaacaatcaatgacccaactaacccgaagcattattggagattccggctacatgtgacattggatttcgtgttggacgataaggacatccaagcaacca

SEQ ID NO: 10113 - DNA, 3987 bp, Oryza sativa
  Clone ID: PAT_MRT4530_16466C.1
ccacgcgtccgcaccctcgccactccgctcgctccccgtcgtagacgtcgccttcgccgtcgctctcctcgtccacccttttctgctccatgttttcatcatcatcttcttcttcttcttccacccgttgctgattccctcactgctgctcgtttctcgccattgcggccgttcttggctactgacagaagaggaatgacgaatttgtccgggaggaaatctctgaatacagtgaccttggtcttcaaattaccctactacacacaatgggggcagagtcttctcatcgccggctcagagccagcacttggatcttggaatgttaagcaaggattgtctctcagtccagttcatcagggaaatgagctaatctggtccggcagagtttccgtcgctactggttttacctgccagtacaattactatgtagtggacgacaacaagaatgttttgagatcggagtccggggagaaaaggaaattagtacttccagagggtgttcaggatggagatgtagttgagatacgcgactggtggcaggatgcttctgaagctcttttccttcgaagtgcattcaagaatgtcattttcaatgggtctgaaaatgctaaaagagaattgaagactacatccctcaacaaaagtttggagcctgaagatattgttgttcagtttattgttagctgtccccgacttggagctggctctactgtcgtggtcacaggaagtaatcctcaattaggaaggtggcaaacacaagatggcctcaagcttaattatgtcggagattccatctggaaagcaaactgtctgttgcgaaagtctgagttcccaataaaatataaatactgtaaaattagtgaagcaggagtctcttcattggagttcggtccgaacagggaggctgatgtggatctatcatcacccaagccatccagatacgtcctcttgtctgatggtgcccttcgggaatcaccatggaggggtgcaggtgttgctgtacctatattctcgatcaggtcaaatgaggaccttggtgttggagaattccttgatcttaaacttcttgttgactgggcagtcaactcaggctttcatcttgttcagcttcttcctatcaatgatacttcagttcacgggatgtggtgggattcatacccatacaggtattgggctgatgcagtgtgcttttgctttgagtaagaagaatagtatctgaacagaaataatgccctacatgttggtttacagctcgctctctgtgtttgcattgcaccccttgtacctgagagtacaagcactttcagatgcaattccaggggatattaaggacgagattcacaggcagaaaaggagttggactaaaagtatgttgactctcaagcatcacagatctgaaaactcgtgttagcgagaacattgttcataatcgtgaaggagagcgggcgttgctctacctctttcatcgagttggtctaataaaaagcggagtggttgaaactatctggatcttatagttttcgttgacagggcagtcaacccaggcattcatcttgttcagcttgttcctatcagtgatactacagttagctggatgtggtgggattcatacccatacagctcgctctctgtgtttgcattgcaccccttgtacctgagagtacaagcactttcagatgcaattccaggggatattaaggacgagatttcacaggcaaagaagcagttggacaaaaaggatgttgactatgaggcatcactggcctcaaaactctcgatagcaagaaaaatattcaaattagagaaagacaaagtactaaattccagttcgttcaagcagtttttatctgaaaacgaggagtggttgaaaccatatgctgcattttgttttctgcgggacttctttgagacatcagatcacagccaatggggccgtttttctcagttttccaaggagaagctagataagcttgtttctgaaggtaccttgcaccatgacgttatatgtttccattactacatccagtaccatctatatatgcaattatcagaggcagctgcctatgcaaggaagaaaaaggttattctgaaaggagatttacctattggtgttgataggaatagtgtggatacttgggtataccccactttatttcgcatgaatacagctactggtgcacctccagattatttcgacaaaaatggacaaaattggggttttcctacatataactgggaggaaatgtcaaaggataattatgggtggtggcgagctcgtctgacacagatggcaaaatacttcactgcatataggatagaccatatcttgggtttctttaggatatgggagcttccagatcatgcagccacaggtctagttgggaaatttaggccttcaattgctctcagtcaggaggagcttcttagtgaaggcctatgggatttcgatagaatgagccgcccttatattcttcaggaaacactggaggagaagtttgggtccttttggacagtaattgcagctaactttctaaatgagtacaagaaacaacattacgagttcaaagaggactgcaatacagagaaaaagataattgcaaagcttaagaacagttctgaaaaatcattatggctggagaaagaagacagcattcggcgtggtttgtttgatctactacagaatatagtccttattagagatccagaggacagcacaaaattttatccccgcttcaaccaggaaggatacttcaagttttaacgatctagatgaacatagcaaaaatatcctcaggaggttgtactatgactattattttgctcgccaagagaatctctggcgtcaaaatgcgctcaagactctgcctgtgcttattgaactcatcggatatgttggcatgtgggggaaacaatcaatgacccaactaacccgaagcattattggagattccggctacatgtgacattggattcgctgttggacgataaggacatccaagcaaccatcaaggaacttgtcacaagtagtggggctacatttccttgtaagctgcgtcatgtcatgattgctccacattacgtgcttggtgggaagaagatggaggaagaagaagccgtttctaccagactgtaattggtagtgatgacgagccgccatctcgctgcaccccagaagtagcgaactttattgttaagcagcattttgatgctccatcaatgtgggcaatcttcccactacaggacctgcttgcacttaaagacaagtacaccacaagaccagcaaaagaggaaacaatcaatgacccaactaacccgaagcattattggagattccggctacatgtgacattggattcgctgttggacgataaggacatccaagcaaccatcaaggaacttgtcacaagtagtgggaggtcatttcctggtaaggtggatggcgccgaagaaagcggagagaagctagctaaagtccagttgaatggtaaaccatagaaaattatcccaagaacagccgaagggtatcacggtcaaaagtaaatagaataaggcagcgtactgccaattggcatgccagttcagctggtgttgtttcagctagaattttttttacgccaacttaattccatttaacactggaaataattagtatcattcatcaagtcggcatgtggaataatttatcccctgttctttgctaataaaatctttttctgatgaatcaaaaaaaaaaaaaaaaaaaaaaaaaaaaaagtgcaggcctagggcgtcgcacgctggactacgccaggcagctgggggaggctcccctccctccctccctcccagatctggccgaaggggtgaggggggaggccggcggcggggtgcattcgtgcgacggcgatgacgacttgcgtgggaaaatttgtgatttgatttgatttgattgtgaaccactatgatgtatgttaatctgtgccgcttctatgtatttgatttggtttg

SEQ ID NO: 10114 - DNA, 355 bp, Oryza sativa
  Clone ID: PAT_MRT4530_16467C.1
agagccaacacatgaataacaagaatactgggtcacatttattactggagtaccatccccactcatgaaatctatcagaaaaatacaacaacccacgcataaaggcagcataaaccacatatttaatgaattcatagcacacccaaataacacaaaagccactgaagtcacacacaatctacactcatatgaatgtattccaaacccaaccaagttaggtcgttgactccaaatgtaacaggtattcaatttctcaatagaacaaccacgcttaatatcatcgatattaagctcgtggatggttttaatctaacgttctaatctatctagggacacttggagttgaccatcgccc

SEQ ID NO: 10115 - DNA, 197 bp, Oryza sativa
  unsure (1)..(197): unsure at all n locations
  Clone ID: PAT_MRT4530_16468C.1
caacgtaccgatcacccttcttatataaaggattatgtatggccacaatattagaagacngtactgttcaagtagtacattgtggtatttttcacagctttccagttaccggaactatatgtangagtcaaacaactactacaattgaatttttggccactactccgtactcgttatcagtgggaaaaaaaaaaaaa

SEQ ID NO: 10116 - DNA, 2082 bp, Oryza sativa
  Clone ID: PAT_MRT4530_16469C.1
atggccatcgaagccgatctattggggacatcttgcaccctgccgtcgtggaccgtggcgagttttctattgtgcaatataaacgagaggcggatctatctattgggtaggatggatttagatcatactcatgaatacattatccaacaacaagctagaactttggccattttagctaccgtgttggctattattcgttggcgacgtcgtaagaaaaatagacggattccaaggaaatatgggcctttggtggatagagatctgatcagacaaacaagactagatgatttatacaatggaactgatatcaattgcatcaatcaacttcgtatgagaaaagaagttttttggaagcttgcctccaatttacgagatcgtggtttattatgtgacacaatccatgtctcagttgaagagcaattagctatgttcctgcacactgttggtcacaatttgagaaatcgtgtgattggattttttgtcaaaagatcaagtgagatagattgcattggagcaattgacggtacacatgtccctgcatttgtccctgcgaatatagttaacaggtttagaggtcggaagtcctatccaacgcaaaatgtgcttgctgcagttgactttgacttgaggtttacatatgtgcttgctggatgggagggttcagctcatgactcggtagttctcaaagatgcccttaaaagatcaaatggaattcaaatacctgaaggaaagtactatttagctgatgaagggtatgcggcaaggcctggtatactgccaccatttagaggtgttcgatatcacctgaacgagtacgaaggcaggaaagcaccagaaacaccccaagaattattcaatcttcggcattcctcccttcgcacatctgttgagcgagcttttggaaccttaaagaatcgttttaaagtccttgctagcaagccatactttccatacaaggtccaagtgaagatagtcatagcttgttgtgttctacacaactggatacttgataatgctcataccatggatataggagaaagcaaaggcaaaggcaggggcaagggcaaatcaagcaacctagcagcgggtagggccaaacctataaattggccgctagcactctccgagttcctccttgattggtacattgaaaagaagttgcagctaccgccaaaagcagtgatcaagaagatacaccacactgcttgcacattagctataaatagcaagtatggcactacttacacggttgatcaagttcaacaccactacaggcgtcataaagaaaattggtctcttgtagctcgtcatctaaatgaaagtggtaatggctgggatgagactacaaaaatgttaactctctctcaagctactttggatgcacttttgataaatgatcgtggaattctttcgaagccaatccaattctttgacaagctgcaagaattatttagtggttgctcggctgatggtgcattcatggaagatccttcaagtgctgctgattttgatgacgaagatgatgaagatgataaatttgattttctgaatgatatgtcaacctatgctgatacaaaagttccacaaggtgaggactttgataaattggagtcagacagtgatgattgcaaggaggtggcagcccttagtgcagctactatccaagtttcatcgtctactaattatgatttgaagccaaacaagaagaatttcaaaaggtgtgggaagccaaagacgttgccccaatcacataatgataagtgtaacaagacaaaggcaaaatccacagctcaagtgcatgatagtgatgatgttgatgtgctgatcaacaataccttggttggaatcaaaaacactcttgagaaaccaatacagacagttgcccctcaagatccaaatattcctctatgggacatgcttaagaagattgccttagaccctgatgacaagttgagagtagggctgcacctttgtaagccagagcttcaagctaaccgcagttttcttattagcatgggtcaagaataccttgagcattggatctacaagtttctatctggtgatgatccaaatctcggctga

SEQ ID NO: 10117 - DNA, 3843 bp, Oryza sativa
  Clone ID: PAT_MRT4530_1646C.1
tcactcttgtggaggagaaggaggacgcgccgaagtggaaggatgaggagcatcacgacgacgatgatacacaaatgcttgggagctctccaacagttggactcgagaatccaacgtacccactctagtgtgcaatctccccacggaagcattcaagtctccaacgtccgtgcagaagccacgaacatcctcatgtaaagcttcatgcccggtagacaagcgttgaatgctttcacttagggtattaatagccccaagtaccgggttgaagtatttgttgggttgcattccaaaataagcatactgtagatggaagaaagcatttggatcatacccaggaggaggaggaggtgctgagcttgagctagctccaggatgagaggagggcgccggcctaggagcacggggagctccaagctgaaggcggggcttgtactgcttgtgcttcttcaaattttgcccagcagccccaagcttgtcttgaatcaacctcatgatgtaagtggcataatagattccctgagtaaaggtccccttggagatggcaatctcttgcatcatgagagacacaatgtcgaactgacggccctgaatgatggcatcgatgacgtgccaaaccacccccctaatatcatcattgttaccaaggcgagggaggatggtagctctcacaatcctgttaaccacactggggatagtcctcaggccggcaaccttcccatgtgtgtaccgtacttcatcttcataaaactgagagagatagtctatggagagtggattatgggtgtgctcctcatgcaagtcatctccaaagtccaagcaaatattgaggagccaccggaattgcctcctgtagatagaacatatagtcatctcattgtagtattgtttgagagtcacaatccggtcaatgcaaacagtcttgaagagatcctgcaagccctcaaactctggagtctcattgatgtctctccaagaaatccacttatgctctgcaaaaactttccctgcataaatctgctcatacacactcttctggaaagcggtgtgaaaacggggatccggggtatcccgaggcctcaaaaactgatcatggtgcctcaagatggtatactgcgatggattcctcatgttcacaacaaactggatggagggatcaatgtgcatatcatcacttccttcatcctcatcctctccacttccactgtcatcatctctactagcctcctcactagccccttcaacattggcctcaacctcttcatcactttgagcgtactcatctccgctcgattcctcaggctcactcatgggatccggagtgggtgcacgacgaccatggcgagtgcggggaggcatcaccgtcgaaacatattctgcctcggcggtagagagggctacggagttttgtttcttggatgaccatgacacaagggatctaccaagcatttggcaactaccagatgtgctctttctatccactttgcaaccggcataatccgaatcggaatagccaacaagcttaaacttagcaccttttgggtaccacaagccaatagtagaagaatgatttaaatatcttagaatccttttcacggccactaagtgacactccttaggagcggcttgaaaccgtgcacacatgcaaacactaaacatgatatccgacctagatgcggtaaggtaaagcaagctaccaatcatagaacgataaagctttaaatctactggtttacctccctcatcaaggtcgagatgcccgttggttgccataggtgtcttaatgggcttcgcatcctccaagccaaacctcttgagtagatccttgatgtacttggtttggctcacgaacgtcccatccttgagttgcttgatttgaagtccaaggaagaagtccaactctccattcatggacatctcaaatttcctagacatcatatcaccaaattccttgcaaaatacctcattagtagaaccgaatatgatgtcatcaacataaatttgacacacaaagaaatcatctccaatgatttttgtgaaaagggtggtgtcaacttttctaattttgaaatcctttcctttgctattgtctccaaatgtcactttctcttgttctttccctcctactttaaatatggtgaacatagccctatcactggtcatgtgttgagtgcatccactatcaagcacccaatggctcccaccagtgcggtagttcacccttgaagcacctctccaaactcttgttgagcttggccacttgctccttaagctcattgttctcaacaacaagtgaggcatcacaaatggaaatacaagagctagagctagatctaggcatatccacaagatcatcacaagaagtagaaatgctagatgatgcaacatgagcaatatggcaagtagcactatcatcaagcaaatcacaatatatgccaacatcatgagagctccatgttgagtagtggaaaggaggttgtcatgagtttccttaagattctcatgagaaatggtgagtctctcatgagaggcctttagctcctcatacaagacctccaaagaagcacgatccttctttagggccttaaacttgacgatctccttctcactataagcatggagctcctcaaacatactcacaagctcatcatcggaaacatcatcacaatcatcatcactctcactatcactaagagatgttaccttagaggagccctttgccatgagacaaagtggagcgaagagtgatggagcctccttgatggcaacaacggccatcttcttcttcttggagcttgcatcatcaccaccttcttcctcggacccggatgaggtggagctctcctcatttgagtcccattccgcgatgaatgcctcaatcttcttgccttccttcttgagcttcttcatgagcttgtagcctccactcttcttcttggatgacttgtctccatcatcatccttggaagggcacttggaagcaaactgtcccttctcaccacactcaaagcacctcaagttggagagagtcttgttgggtcttctatttcttctcctatttgagttggagccccttcctctctcatttctccttcccaagagatcattgaaccttctagtaagaaggacaatctcttcctccaagtcctcattgacttcattcaccttgcccttgcccttatcttcaacttcagcttggagagcaatgcacttcttggaaggtgaggcttcctccatctccttcttctttaacttgtacatgtcattggtgttgatcttccccaagaggcttgcgggtgtcatccttgacatgtcggagttgatgagcatggtgacaagggtctcatacttctccggtagagccctaagcatcttttgggcaacctcaagatcggtgtaattttccccaagccccttgagatcattcacattgacattgaacctcccatacatgtcattcacactctcatgaggcaacatggagaatgtctcatattggatcttgaggaaatgaagcttggcatccttgtactcgcttgtgccctcatggatctccgccaacttgttccaaatctcatatgcggtctcaaggttgctcactctatcgaactcctcttggctcaaagagttggacaaagcattcatggcttgggcattgagttggaggttgcggtgatcaatctccgtcaagggcgtgccggtgatagcaaagcctacatccacaatactccaaatatggaggctcatagctttgaggtgagtagacattttaattttccaagtggagtagtttgtgccattaaacatgggagccttccctacatggttcacctcattcgacat

SEQ ID NO: 10118 - DNA, 324 bp, Oryza sativa
  Clone ID: PAT_MRT4530_16470C.1
atggggatgatggttggatggcatgggaggaggtgcggcgatagggcggcgcgagtatctcatgagacccttcgaccagatctgccgaaaccgtgcgaccagtcaggattcaggctcaaggtgttaagttcatcggggcaaagccccatggtgaaggcggtgaagccacatggcgaagacaatggagcgaggacggcaaaagatggagccccatggcgaagactgtacatcctgggcgaagggtgcccgccaaaggagggtgacttcgccatcctggccgctttggccggcctttgggccgcattcgccaaccaggcccattag

SEQ ID NO: 10119 - DNA, 384 bp, Oryza sativa
  Clone ID: PAT_MRT4530_16471C.1
atgggcgcggcggtggtccggcggctccacgcggcgcaggcgcaggcgcagcccccgcggctgacgaagctcgcgcttcgcgcgcccaaattcgaggcgcacgggtacgcggcgcgggagaaggtggtgctgcggatgcgggggaggtcgtggacggtgaggctgaagcacaccaagggcaggcggccgcgccgcgagcgcgcggtgctccggtacggctggcaccggttctgcgccgacaacggcctcgccgtcggcgacacctgcttcttccgcgcgctccgctccgccggctccggcgccggcgacgtcgacgacggcgacggcgaccacgtgctcagcgtcaccgtgcacaaggccgacggcggcgatcccctcgagtga

SEQ ID NO: 10120 - DNA, 2995 bp, Oryza sativa
  Clone ID: PAT_MRT4530_16472C.1
atggcgatgacggggacggcgccctggaggtcgccgcttcgggcccctcctcctactccctcgcgcgggaataattcgcgcccccgcggcctcgtcccggcgcaatgccggccgtggccgcgtcccagcctcagttccgccgccgtcgcgtgcccgcggagcgaggagatggcgcggctggagcgcgggtcgctggtggtcggcgggcgggagctcctggagcgggcccctcccagcgtggccctccgccgccccgcggtcgtcgcctccccggggggcgccgcgttccttggcgccacggcgcccgccccgtccagccgccacgtgttctccctcggcaccctcgccagtgggtggaagtggctgtccctgttcaggttcaagatctggtggatgatcccgacggtgggcgaggacgccgccggcgtgccagcggagacgcagatgctgctcttggagtcgaggagcgaggcgggtgccgcgctgtacgcgctcatgctgccggttcttgacggcggcttccgagccagcctccaggggagtcctgagaatgagctccaattttgcttcgagagcggtaggtttattctggatttgctggattctgaggtgttcgaattgaaacgaactgcaaattttggaatttcggttggaatttctgaagagtacagtggtggactgtttttaggtgatcctgaggttcagacactggaagcagttgatgctgtattcatcaactcaggggacaaccctttcaagcttatgaaggaatcaatcaagatgttatctaagatcaaaggaactttcagtcatatagaggacaaagagatccctgcaaacctggactggtttgggtggtgcacttgggatgctttttataaatctgtcaacccagtgggaattgaagagggccttaaaaggtttgcggagagacttatcgatctgacagagaacgataagtttaggggagaaacctgcaagaatcttggagaccatgtcaagaaaatcaaagagcactatggagtcaagtatgtctacatatggcatgctttacatgggtattggggtggtgtcctcacaacacctgatgcgatgaagaagtacaatccacagctagtttacccagtccagtctcccggtaatgttgcaaatttgagggatatagctatggacagcttggagaaatttggagtgggtatcattgatcctgccatgatatatgacttctacaatgatcagcacagctacctttctagtgtgggtgtggatggtgtgaaggtagatgtgcagaatgtgatggagactcttgggaagggttttggtggtcgtgttgcattaactcagaagtatcaacaagcacttgaggaatctatcgctcggaacttcaaaggaaacaacctaatttgctgcatgagtcacaatacagacagcatttttagttcattgaagagcgcagttgctagagcatcagaagatttcatgcctcgggagccaacgatgcaaaccctgcacattgctactgtggcattcaatagccttttattgggagaaattttcatacctgactgggatatgtttcatagtaagcatgaatcagcagaatttcatggagctgcgagggctctgagtggtggtggtgtttatgtcagcgacaaaccagggatgcatgatttcagtgttcttaaaaaacttgttctgccagatggcttgattctaagaacaaagcatgctggtcgtccaactcgcgattgcctgttcaatgaccctgtcatggatggcaaaagtctgttgaaaatatggaacttgaacaagttttctggagtcatcggagtgtttaactgtcagggtgctggaaattggacttatccagtgaaagaaaatgctcatgttcccactaccgtctgcatcactggtgatctctccccatcagatgtggagttacttgaggagatagctggggatgattggaacggagagactgcagtatttgcttttaattcatctacgccttcaggttctctctcaaggcttcagaagcatcagactatggaggtttccttgtctactatgacatgtaagatatataccatagcccggataaaggtttttggtggctttgttcagtttgctcctcttggactggttaacatgtacaactcaggtggtgcgctcgaaaacgtcacgagcacaggtgattgttcagagatcacaattcagatccaatgccgagggccaggtcggtttggggcgtattcagcaaccaggccggaaatttgcagtgttgatgagcatgaagtagagttcaaacacacagatgatggcttcctggcctttgatctctctcacggttcgtcccaggacaacctcaggaacacttgagattctgtacagagcttcctgaacctccattttcagtgtgatttttatgctctttcgagcagattatgctgctctcaggctcttagctgtggataattattgcttcccgcaagcgtgtgttagctctgaattactgcatctcgcgtgtgttgtttgtgccaattaatttgcgcttgttctaagtttcgaatctgccggagacagttataatacgaatatgtattttggcaaatcaaaaaaaaaaaaagccaatattacctaaaacaaaaaaaaaaaaaaactccagccgccacgtgttctccctcggcaccctcgccaggtagagcccccgcccccagagcagagattgcggtgtgcgccgcggccggcagcggtggtactgattcgttgttgggttttggtgtgcagtgggtggaagtggctgtccctgttcaggttcaagatctggtggatgatcccgacggtgggcgaggacgccgccggcgtgccagcggagacgcagatgctgctcttggagtcgaggagcgaggcgggtgccgcgctgtacgcgctcatgctgccggttcttgtcggcggcttccgagccagcctccaggggagtcctgagaatgagctc

SEQ ID NO: 10121 - DNA, 535 bp, Oryza sativa
  Clone ID: PAT_MRT4530_16473C.1
cctttcaatcttcaaccactggtgctgcagtctaggacagctctgtgccccacaacactgctctagggtgacggccttttcgcgctcggtagaggctcctggccttgctttccacagcaccaggttagcctgtagtgttgtaaatagatccctactgcgggcgcagcagagagccggggccgttgattgagcaagcggtcgcagcaacaaggggaccatgagctctactgtcaccccactggccaagtataagcttgtcttccttggggaccagtcggttggcaaaacaagcatcatcacacggtttatgtatgataagtttgacacaacgtaccaggcaacaataggcatcgacttcctttctaaacgatgtaccttgaagatagaacagtgcggctacagctctgggacacagcaggccaggagcgcttccgcagcttgattcccagctatattcgcgactcatcggtcgcagtggttgtgtatgatgtcacaaaccggcagtcattcctttaacatccagcggtgggtggag

SEQ ID NO: 10122 - DNA, 301 bp, Oryza sativa
  Clone ID: PAT_MRT4530_16474C.1
agttgaagagatatttgtctactccacccgttgtgcgaccaaatttggcacttaggattaaaataggaaagattgccaaaatttggaagtctaccggtttcctccgagtgggccggtctgaccgccgggcggtcagaccggcagtgtgtggccggtctgactggcaggtccgagtccgactgtgttacgtcgggtttcgaggtttccttgctcgggaaggcatgtttcgggttttctttagtttctaccccgagttggacgtggaggaaggcctgtagagggcaggaccaacccctatata

SEQ ID NO: 10123 - DNA, 1125 bp, Oryza sativa
  Clone ID: PAT_MRT4530_16475C.1
atgctgctgcggtggctggcgcggccggcggagaggtgcctggggcgaggcggcggcggcggcggagggggaggaggggatgggttgctgtggcacgcggagctgaagccgcacgcgagcggggagtactccatcgcggtggcgcaggcgaacgcggagctggaggaccaggggcaggtggtgacctcgccggcggcgaccttcgtcggcgtctacgacggccacgggtttgcatctgagcaaggtggcatgtccaccgatgcaatcaagagggcattccatgccacggaggaggagttcttgcacatggtcaagcgatcctggctcaagcagccacagattgcctcggttggttcatgctgcctcgtcggagcaatcaccgataacgttctatatgtcgccaatttaggggactcgagggccgtccttggccgtagggggcctgatggtcgggaggtagtggctgagagactatccaatgaccacaatgttgcagaggaggaggtcagaaaggagctcactgagcagcatcctgatgattcacgtatagtcatctatacccgaggagtttggaggattaagggcatcattcaggtttccagatcaattggagatgtatacctgaagaagcctgaatttgctagagaccctatattccggcaatatgtttgttccattccattgaagcgacctgtcatgacggctgaaccatcgatcaaagaacatcagttgaggcagcaagacttattcttgatatttgcatcggatggtctgtgggagcagctaactgataaagcagcggttgatatcgtcttcaagaatcccagagcagggatagcgaagcgattggtgcgagcagcgctgactgaagcggcgaggaaacgagagatgagatacactgatatcaaacatatagagagaggcagcaggcggaatttccacgacgatatcacagtcgttgtggtctatcttgaccatcacaagcatggtgtgcggcctaatttgggtaacagaaacagtttccggttcaccaatgcgccggttgacatcttctccggcagctcagaagaggtggatcaccaccctctcaggctgaatcttgcaatggatggtgctgtgggttag

SEQ ID NO: 10124 - DNA, 516 bp, Oryza sativa
  Clone ID: PAT_MRT4530_16476C.1
gtggttattgggcgggaattttcgggaggtgggggaagagagggaacgccgggagcgttgcggcgacgacgatgctgctgcggtggctggcgcggccggcggagaggtgcctggggcgaggcggcggcggcgccggacggggaggaggggatgggttgctgtggcacgcagggctgaagccgcacgcgagcggggagtactccatcgcggtggcgcaggcgaacgcggagctggaggaccaggggcaggtggtgacctcgccggcggggacctgcggcggcggctacagcggccacggtggccccgaggcgtcccgcttcatctcctcccgcctcttgccccacctccacaggtttgcatctgagcaaggtggcatgtccaccgatgcaatcaagagggcattccatgccacggaggaggagttcttgcacatggtcaagcgatcctggctcaagcagccacagattggctcgggtgggtcatgctggctcgtcggagcaatcaccgataacgttc

SEQ ID NO: 10125 - DNA, 276 bp, Oryza sativa
  Clone ID: PAT_MRT4530_16477C.1
atggttgagcaacaagaggatggcaagaagcgtgaaccaagccttcaccttaactgcgttctactccttcatcctcacatggcacaatcaccatatgatgccccgacaacaagaagatggctagacccaaactgccgtgctccgccgtcgctccagctgtcgccgccgctcgggaagaccgccgtcgtgctcgccaagtcgccgccgtcctcgtccgccccttcgctgccgtcggagaccgccggagcatcgtcgccgtcgtcaacccgaaggtag

SEQ ID NO: 10126 - DNA, 284 bp, Oryza sativa
  Clone ID: PAT_MRT4530_16478C.1
cgtctatcttcgatcacggctacatatgcctcatacgcccacatgctatgttggccctatacttgccgtcaatatgcggtatctacccaagctgacgaatcatctgctcccctgtagcattcctagccgtcggtggtatctggtattgaattgtagcagtatagtagtaccaggagagcaaaataaagtcatgcatcatcgtgtgtgacagttgaaacatcggggtgatacaatctgaatatgaaatgtcactgctaaatcctaaacaaaaaaaaaaaaaaaaa

SEQ ID NO: 10127 - DNA, 372 bp, Oryza sativa
  Clone ID: PAT_MRT4530_16479C.1
gctacaatggagtgataatgctatataatcaggtaggaaccacatgcaagaacaatctcaagaaaccctttcacagacaatagtccggcatgttttgaactcggaaaactagtattgctaaaccccctaacaaaaaaggcataagcatatgccaccgattctacccactgagaaacctgacctgactcctaataacatgcaaacggagagcatacgttaaatatatcttaaacgcaacagcatgcaaacgcacctaatatgaacatagatacccactgcttataataatcacctagtgttagccaccaccagaaccgttctatttaccgatgacgaccacctctgggttgacatctacagcagcacaccagc

SEQ ID NO: 10128 - DNA, 4620 bp, Oryza sativa
  Clone ID: PAT_MRT4530_1647C.1
tcaagccacattagagaagtctatgacatttaactcattcctcaacttgcaaaagcgggtttcatcaagaggcttggtaaagatgtcggctagttgatcctcggttcttatgtggctaatgactatgtcacacttggcaacatggtctcttaggaagtgatggcgtatgtcaatatgcttggttctagaatgttggaccgggttattggctatctttatggcactatcattgtcacataggagtggggttttggtgaaggatatgccatagtccaacaatgtttgtttcatccaaagcaattgggcacaacaactacccgccgaaacatattccgcctcggcggtagagagggctacggagttttgtttcttcgatgaccatgacacaagggatctaccaagcatttggcaactaccggatgtactatttctatccactttgcaaccggcataatccgaatcggaatagccaacaagcttaaatttagcaccttttgggtaccacaagccaatagtagaggaatactttaaatatcttagaatccttttcacggccactaagtgacactccttaggagcggcttgaaaccatgcacacatacaaacactaaacatgatatccggcctagatgcggtaaggtaaagcaagctaccaatcatagaacgataaagctttaaatctaccggtttacctccctcatcaaggtcgagatgcccgttggttgccataggtgtcttgatgggcttcgcatcctccaagccaaacctcttgagtagatctttgatgtacttggtttgactcacgaacgtcccatccttgagttgcttgatttgaagtccaaggaaaaagctcaactctccaatcatggacatctcaaattccctagacatcatatcaccaaattccttgcaaaatacctcattagtagaaccgaatatgatgtcatcaacataaatttggcatacaaagaaatcatcaccaatgatttttgtgaaaagagtggtgtcaacttttccaattttgaaatcatggttaggatatttaggatcttcaaaaccgggaggttgttcaacaaagacaagttcggcaatttcaccatttagaaaagcacttttcacatccatttgaaatagttttatatcaaaccatgatgcaaatgcaagaaggatgcaaatagcctcaagtcttgccacgggggcaaaagtttcaccaaaatccaaaccttcaacttgtgtgaaaccttgtgccaccaaccttgccttgtttctcaccaccaacccgttctcatcttgtttgtttctaaagacccactttgtccctatgacattgtggtctctaggtctttcaaccaaagtccacaccttgtttcttgcaaagttgttgagctcttcatgcatagcattcatccaatccggatcacaaagagcttcatctacatgttttggctcaagacaagaaacaaacgagtaatgttcacaaatcgaagcgacacgagatagagtttgaacacccttactaatgtcacccaacacttggtcaattgggtgatccttggaaagagtggtgtgtatccttggtggtataggtggatcttgtgccttctcctcctccacttcaacttgagcttgacttggcgtagcgaaagtagatggctcatcttgagtggaggtggatggcttgtcttccacttcaataggcttgacatctccaaatgacatgttcttcatagctcttatcaagccttcatcacctacatcatccaaattctcgtgcccctcttgggagccattagtctcatcaaattgaacatcggcggtttcttccacagtacctttgttcttgttgtagacccggtatgccttgctatttgaggcataaccaagaagaaacccttcatcacaccgactttcaaatttggttagtctaacaccctttcggtaaatataacacttgcaaccaaaaactcgaaaataggcaacattaggcttcctcccaacaattagctcataggaagtatttttcaagagacgatgcaaataaaacctattggttgcatggcaagcggtgtttatggcttccgcccaaaaggaatcggaaacaccatattcatcaagcatagtccttgccatctcaatcaatgtacgatttttcctctccactacaccattttgttgaggtgagtaggtagcggaaagttcatgtttaataccaagatcatcacaatagtcctcgatattggtattcttaaactcggaaccattgtcacttctaattttcacaagagtgcaactaaattcattttgggccctttttgcaatttttttgaaaagctcggcaacaatagacttatcatgcaaaaagaacacccaagtatagcgagaataatcatcaacaatcacaagacaatgactattaccaccaatgctcttataggttgttgggccaaacaaatccatatgcaagagctctaatggtctagatgtggacatgatactcttagtaggatgagaacatgcaacttgcttgccggcttgacaagcactacaaagcttatctttctcaaacttcacatctttcaagcccacaactagatcacgttttgaaagtttgctcaattgattcatgccaacatgggctagccttctatgccaaagccaacccaaagaagtttttgcaactaaacaagttttcaaatttgcttcactagaattgaaatcaacaaagtaaagatttccatatctaaaacctttgaacacacaagacttgtcaagaaggctagaaacaataacttcttgcgggaagaaagcacatgacaagccaagatcacaaatttgagcaaccgaaagcaaattgaaatttagagatttaacaaaagagacattatcaattgacaaatcattggagatagcaattttacctaacccaattacctttcttttgctattgtctacaaatgtcactttctcttgttcattccctcctacttcaaatgtagtgaacatagccctatcaccggtcatgtgttgagtgcatccactatcaagcacccaatggctcccaccggtgtggtagttcacccttgaagcacctctccaagctcttgttgagcttagccacttgctacttaagctcattgttctcaacaacaagtgaggcatcacaaatagatacacaagagctagagctagagtatcatcaagcaaatcacaagatatgccaacatcaatgagagctccatgttgagtagtggaaaggaggttgtcatgagcttccttaagcttctcatgagaaatggtgagtctctcatgagaagtctttagctcctcatacaaaacctccaaagaagcatgatccttctttagggccttgaacttgacaatctccttctcactataagcatggagctcctcaaacatactcacaagctcatcataggaaatatcatcacaatcatcatcactctcactatcactaagagatgttaccttagaggagccctttgccatgagacaaagtggagcgaagagtgatggggcctccttgatggcaacaacggccatcttcttcttcttggagcttgcatcatcaccatcttcttccttggacccggaagaggcggagctctcctcatttgagtcccattccccgatgaaggcctcaatcttcttgccttccttcttgagcttcttcataagcttgtagcctccactctttttttttgatgacttgtctccatcatcatccttggaagggcacttggaagcaaagtgtcccttctcaccacactcaaagcacctcaagttggagagagtcttattgggtcttttatttcttctcctatttgagttggagccctttcctctctcctttctccttcccaagaaatcattgaaccttctagcaagaagtgcaatctcttcttccaagttcttattgacgtcattcaccttgcccttgtcttcaacttcagcttggagagcaatgcacttcttggaaggtgaggcttcctccatttccttcttcttcaacttatacatgtcattggtgttgatcttccccaagaggcttgccggtgtcatccttgacatgtcagagttgatgagcatggtgacaagggtctcatacttctccggtagagccctaagcatctttttggcaacctcaagatcggtgtagtttgccccaagccccttgagatcattcacaatgacattgagcctcccatacatgtcattcacactctcatgaggcaacatggagaatgtctcatattggatcttgaggaagtgaagcttggcatccttgtactcacttgtgccctcatggatcttcgccaacttgttccaaatctcatatgcggtctcaaggttgctcactctatcaaactcttcttggctcaaagagttgaacaaagcattcatggcttgggcattgagttggaggttgcggtgatcaatctccgtcaagggcgtgccggtgattgcaaagcctacatccacaatactccaaatatggaagctcatagctttgaggtgagtagacattttaattttccaagtggaatagtttgtgccattaaacatgggagccttccctacgtggttcacctcgttcgacat

SEQ ID NO: 10129 - DNA, 292 bp, Oryza sativa
  Clone ID: PAT_MRT4530_16480C.1
tcgctcaaccatcgtaaggatcttattcagcatctaacctgctcttttcgtcgtggcaacgaccaacagcgtagaatcggagtggatcatgcatttcatcaaggcggacgacggtaaacgggggagcggcaccagctgctagggcggaaggctacgattggccggatatggacggaggcgacgatttcactcgaagatcaaccggaagcggcttgacaagctctgatattattaaaatctgtgaggagacttagtacttgtcggtacctatgtcactaaggcttatcggatt

SEQ ID NO: 10130 - DNA, 391 bp, Oryza sativa
  Clone ID: PAT_MRT4530_16481C.1
ctccctcctctcccacatctgcgccgccggccacgacgacgacgacgaccacggcgccgcctgctcgctcctctcctatgtccacgcgccgtcacccacgacgagcgacgacgctggcactccagatccctgcgccgtcggcttcctcctcgccgcttgcgccgcccgcttcccctcctcgccctcttcgctgctggcttccctcctcgccgtctctgccggccgcttcccctcctcgccccctccgccaccatccacaacgaatgacgatgatggctcgcctcctccgccacatgcttccctcctcgccgcctcctccaccggccacgacgggcgacgacgacggctcgcatccggccgccggctatcctcgtcgacgcgacgacgatga

SEQ ID NO: 10131 - DNA, 288 bp, Oryza sativa
  Clone ID: PAT_MRT4530_16482C.1
atggccgtggcgaccgtggacgtggctgccgtggcggaggaggtgaggatggtgatggagaggtggctgggtgttcggcagcagcggctacggtggcgagaggcgcagccgatggcagcggaggccggctcggcgcgagaggcgcgggcggcggagctggaggccggcgcggtcttcggcgcacgaaggctggccggcgggggacgccggtgcaggggttccacatgtcggcagagcttgagtggtggtggagcatcggtgcgtcagccgtggattcgcagatggtga

SEQ ID NO: 10132 - DNA, 1650 bp, Oryza sativa
  Clone ID: PAT_MRT4530_16483C.1
gaaagagaagataaggaaagctaaggaaattgtggacaatgccctcaagataagagaagaactgcatcaaaagtatctcagagccgagccatggttaaaagaacaggaaagacaacgacttgaaaggaacaaacgttttacaactgagatcattaaccaacctccagattatcgtggagaatgggatccatatgtatcggatgatgagttcgggacatcatttgagctgaagcgtacgggttgggaagttgagaagtttgccttagaccttgctcgaagcacagttggactcgagtctttcactggagagaatcatctattctcttgctctggtactattattgaatttctgaatggtatttgttctgtggtaacatctgcaagtttaattagatgcatggacaaagacgagcaagctgatgaacttaagattaatgtatggttaccgagtggtgaaaaatgtgagggttttatttcaaatgtggatctgtactacaacatttgtttggttacagttcactgtacttctaacctgccaaagaaaagcttcaatgacgacactggattttttgatttatatggcaaccattcgaaagatgttgtagctttaggccgtagttgtgaaccttggagcttgaaggtggcttcgggaaagctaattccaagaagacaccgatttgattgtgaagaacttcttgtttcttcgtgcaagattacaaagataggtgttggtggtcctttgatggattttaatggaaatatcgttggaatgaacttctatgacaagaaagaaacacctttccttccaagtttcattgtgttgaagtgtttacagcacttcaaagaatttgggaaggttgtacggccattgcatggattaagggttggaaatcttcacaaagagtctctcgcttcacttgagaagatatgtcatgagttccctaaggtttgtggtgtgattgtggagaaggtagaaccttcagcagagcattctgagataaaagttggggacatcatcacccatcttgatggtatggctttttccaatgctgcagagttcggtggcatactgctcgataggtgtgtcacacagatgctagaaaaacagaacttgtcagaggactgcaaccagatgataagcctcaagttttctgtgaaaacaagaggtggcatatctgaagccacaacaagaacaatcaacactgacaagtttactccaagtggactcaacaggtggccacttcccaggccgattattgttcggcaatatgctcgtggagttctattctccgaagattggtacagttagcaggactagggtttgttttatccttatacgtagaagtttctcatcatgaaaagtatttatgtgtaaggtggaattacacggatagtgtgaaatgttaataagggtttcaccagaattcaagttgagtagtgaagctgtatcggtggaatttttttgtatggtattaccatgacatcctcatggtaggcacaaaatatagcacctgacttgggaaaggcgttcaattgtcgagttaaaaacatagctgttgtaaccgttaatccgtgatggcgatgggatcgaattcctgtttatgcccaatgctcgttatgctaattgagttcataataattcgcaaccac

SEQ ID NO: 10133 - DNA, 846 bp, Oryza sativa
  Clone ID: PAT_MRT4530_16484C.1
cggacgcgtggggagatataatacctctactaaaaggtatatacgtacctccaaagcacagaagaaaaacttgcataatcttggcctagacaaacttacccacatactatgtcacactttgtggttgttcagttatggtgtaggtgagcgaatcagcttggcctacacaaggaaaatcatcgatgccattcactcgggtgagcttttggctagaagctacaaaaagacagatgtctttggactagacatccccacaaaagtggaaggagttccatctgaattgcttgacccaataaataccgtaagtccataatttcaacattatatatttttgcatgggatttatgctgcagcttggccaaccattttcaactatgatgtagtgggaagacaaagactcatacaagttgacacttctaaagctgtcagatctgttcaagagaaatttcaaggtatttgcaaattacaagaaaggtggtgttagtgatctggctgatgagattgctgctgcaggaccaaattaatttctgattttaattgaatagtagtagtatgtcttaatgtataccaaataaaagggattttttatgttcctcgaggatgtatcgcaaggtaccacttattttagtgtaaatttttgatacctcatggtacttctctagtgtaaagtaccaaaaagtatcataaattaacactaaaatatggtatctctcgttacctagtcttgtacagtaaaactgaacaaaatgcccattttgaggatggtgacatatatatattaaaagctatttcagagtgatgtataaaaaaaaaaaaaaaaaaaccacaaaaaaaaaaaaaaacaaa

SEQ ID NO: 10134 - DNA, 300 bp, Oryza sativa
  Clone ID: PAT_MRT4530_16485C.1
atggcgatcaacatcaattactatgtattttttttagataatagaatttatttcgtctttagcttcaaaaaaggaacaaaatctccgaaatcagcggctaattgttatgctgatcgaatttcgtgcacatcaccaccaacaaccaacatcgaaccgaagcaaaagataaccaccgccacaaccattggagctgacccgacaaggatattgacaatggttatgaaggttgccactagacagatgacactcccatcgtctcaatcactggatcttgcagacgggacctcgaccacgacctga

SEQ ID NO: 10135 - DNA, 424 bp, Oryza sativa
  Clone ID: PAT_MRT4530_16486C.1
ttttgtgttttttttttttttttgtttttttttttttttttttttttttttggttaatttcaaaactgttatttttcaacttttatctgaacactgggcttttttcggaacccccctttacattatagatttaaacataacaaccccaaagttttgatcttaaacaaaacagggtgatcctaggtagggactggttaactacatccgggtgatgggaacgggtcatcatttacctccagagagggcaaagaaggggcctgccctgggggatgtcatcgggtaggacatgacgtaggggtcgaacccctggtcctgcatgagcgccagcatgttgaagctttggtacgtcggggacaggtccggcaggggcacgttgccttccagggactggacaagctggcttgtccccggccgtgcgccgggc

SEQ ID NO: 10136 - DNA, 159 bp, Oryza sativa
  unsure (1)..(159): unsure at all n locations
  Clone ID: PAT_MRT4530_16487C.1
ccgtccggccgcnnaattccgtttcccccgcacccaccgcacgnncttcccatccgaacgcaanntctgaagcgccatccccanagaccccaannccgaattcacttgcagnnctgctgctcgnntgtcagctgcnnggcggtggctgggacccccccc

SEQ ID NO: 10137 - DNA, 198 bp, Oryza sativa
  Clone ID: PAT_MRT4530_16488C.1
atgcgcagaggacgtcggacccggatgcttgaaggggacaggtttgatggagatctcaacggccaacttctgccaatccgcttcctccatcctcgcgggccgcccgcttcttctttctccaccgagtggagggggccggaggaggtgctggcagaggacggcggtggccggaggacgacgacgctgggagacggatag

SEQ ID NO: 10138 - DNA, 813 bp, Oryza sativa
  Clone ID: PAT_MRT4530_16489C.1
ccggcccgcgggcgccgccacccggccccgtgcccctcccccccccccttcccccccgcctctcccccccgccgctcctgccggcaccgccgcccccgccccccccgtcgtcgccccccccgcaccccgccctcgggccccctgccgccttcgccctgcccccgcgcccgccccgccccttgcgtcgcccgcgccccgcccccccgcccctccttgtggcagcaccgccgagggcaggacgggcgaggcgcccgtcggagccggcacaggtgctcccttcctccttctcccttcacttgtgccggcggcggcggttgcgacgagggaggacagatgcggcgcccgtcgttgctgttgtcgccgtgtcccctcccttcttctccctccccttctgtcagcggcggcagccttctccgttcgtctctctcctatccgtctcccagcgtcgtcgtcctccggtcaccgccgtcctctgccagcacctcctccggccccctccactctgcccatccgctccactcttccctcctacccaaatctacggcgccgctccgtggtcggcagctcaattcctcgccggatctgacagtttgaccggtggagaaagaagaagcgggcggcccgcgaggatggaggaagcggattggcagaagttggccgttgagatctccatcaaacctgtccccttcaagcatccgggtccgacgtcctctgcgcatggtctgtgacagcttggtataatgaagaattagaaaggattcagttctctccttcctgttctattctttcagcaatggtttaggtcaacacaaa

SEQ ID NO: 10139 - DNA, 821 bp, Oryza sativa
  Clone ID: PAT_MRT4530_1648C.1
gacactatagaatactcaagcttgcatgcctgcaagtcgactatagaggatccccattgatcacttttctcagttttatgaagaagggggaaggcacacatatggaaaggtggcgggtttgagggctctcccaagtgtgatcaaccgcatagtaagggccaccatcctcccaagatgcggcaacaatgatgacatacgcggagttgcttggcatgtcattgatgcaattttggatggtcgtcggtttgatgttatcaaccttatgatgaaggagattgccatctcaaaggcaactattagataaggaatctattatgctccctacataatgaggttgacaaagcaagttgggacaaattggtcacaatttaaaagaacataaggagtacaagcctcgtctccaactctccactcctagagctcctcttgtgcaccaaccaacttttgatcaaggtgcaagctcaagtgcagcccctcctcctcctcctcatgggtatgatccaagtgcttttttccatccacaatatgcttattttggaatgcaacccaataagtacttcaacccggtacttggggctattaataccctaagtgaaagcattcaacgcttgtctaccgggtatgaagctttgcatgaggatgttcgtggcttgcgcaccgatgttggcaacttgaatacttcggtgggaagattgcatactacggtgggtgtcttggattctcgagtccaaactttggagagtacccaagcatttgtgtatcatcgtcgtcgtgatgctcatcatccttccacttcggcgcgtcctccttctccaccacaa

SEQ ID NO: 10140 - DNA, 1185 bp, Oryza sativa
  Clone ID: PAT_MRT4530_16490C.1
cggacgcgtggattagagttggactcggcaacgcgacgagcaccaaaagcgagggaagaaaaccaatccgaatccggagagagaagcgcaggaggcaaaatccactccaattcaacccaatcacccgcggcgagccgagcgggcggcggagccggcgacggcggaggttggggcgggggtcctggtgtggtcggcgtaccgggcgggggcgcaggacctggtgcaggggatcgactgcaagcgcggctgcgcgaactccctcctgaccatcatgatctacaaggtctcgcccacagccctgcggcagcggttcttcggggctgacgtcggaccggctgggtaaataagtaagtaactaactaactaactaatctccgggttcttgctggtaaatcgaatgcaggtgtacgccgatggcaccacggctctgccggagtgggagagggaggccagcatcaggcaattctacggtgtcatcttcccgtcgctgctccagctgccgagtgggataactgaattggacgacaggaagcagaggaggctgtgccttcagaagttcaggaaggtggaggagagggtctcggaggtggatttggagagggagctcgagtgcggcatctgcctcgaggtgaatgccaagattgtgctgcccgattgcgcgcactcgctgtgcatgagatgcttcgaggattggaacaccaaatcaaagtcgtgccccttctgccgcgcctgcctcaagaaggtgaatccgagcagcctgtggttgtacaccgacgaccgcgatgttgtggatatggatacgttgactagggagaacattaggcgcctgttcatgttcataagtaagcttccacttgtagtgctccatgtggttgaccttgacatttacgagtaccgtatcaagtgaaactgtactcttttgttcataccggtgggtctctgtacatatcaaattcatcggtgctgatctgtgatagctcaacctgaggctgcaaattagcagagttgtttgtagctcaacgagttgataatatttttgtgaaaagaagatgctgaagtgtactccaaaattgcatatgcacttgtctgtcagtttaaaattatgtggggggtaccaaatggaacgctcctaaccagttattttggtcagtgttaaaaatatgtcagggaattaatctcttccac

SEQ ID NO: 10141 - DNA, 1576 bp, Oryza sativa
  unsure (1)..(1576): unsure at all n locations
  Clone ID: PAT_MRT4530_16491C.1
cccgctaatcctcgttcgcccgcagctaaaccaggtgacgtcgaacccacactcaccaatcaatccgcctctccgcaaacccgcgggccgccgccgccgccaccgccgccgccgattcatcgagtgacggagagaggtgttcggagtgaggaggagagagagagagagagagagagaggggatctcttcttcttcctcgcggccggcgccggccatgtcgtcgattgggacgtcgaagggggtcctggagatcgccaagttcggggtgtacgtctccgtccccgtcgcgctcacctacctcgtcgccaccgactccaagaccctcaagaagctcatgggcctccgtgaatacgtggtatatcctcccgaaggtccacgtccaccacctcctgaagaacttcgtgaaagggctcgcaagatagctcgaaagaggcaacaacaacaataaatacatggaccatgatcacttcggactcccgctatttgtgacgaaaccgtgagtccaagaggaagctcagaaaagtgaagaccagctgactgtttttatcaatatgtgactgtatgatcttgttgctgtaagatttgaaataaacccaacttatgtaaaatctgtaagaaacacagtagtagcttcatcaataacttcgttctgttcccctggtgattcatgaaatttagagaccggtttcttctgatggttcatgaaatttcagctgctctggcctgtacactaccagatcttctttgttattatctagtgtgccataatatacaaagaatgatctttacattgaaataaagtatggttatatttctttgttactataagaaaaaaaataacaaagatttcatttcgatataaaacaaagattgattatcattcatacgttagcgtttgttttgtttggggggtcagtaaaactaaaagccgtgagctgagcctaaatattccttttttggattgaaaaaaaagctttttgcagcgtgtgcataaagccaacatctttttgccgtccactatccatcacacggcaaaaggatattttcatggattttcgattcgtttaattgcataaccattttatgcaagacggagttnagtgtgaccatgatctggttcgacgattggaaacgcgcgttcgagctcgtcctgatcaggatccagcgcagccgccgccaccacagcggcgagcatccacagcaccgccaccgccgaagcgcgactccgccaccccatccgcgcgcgctctccctcccgctcggatccctccccccaccgctccacgccgcgcgagcaatcacctccgcccgccgccaacggaacgaaacgccaccgatcacctccgcccgccgcgcacgcaccgaaatggcctcaactcctcaactcctctcgtcggcttggagtcgagggcgagatcgatcgaacgatcgaacgatcggggaggggatcgggttgatatagcggatggggatttggggattggaagcggaggagggtttcctcctccggcgagaggggttgcttggaggcgggagggaaggagacgtcgaggcgaggcgagcgaggtggtcggag

SEQ ID NO: 10142 - DNA, 1161 bp, Oryza sativa
  Clone ID: PAT_MRT4530_16492C.1
cccacgcgtaacgccactcctgcgagagacgcgcaggaggcaacatccactccaattcaacccaatcacccgcggcgagccgagcgggcggcggagcacgacgacgacgaggtttaggtaggggttcttggcttgtcggcgtcggcggcggcggcggcggaggatgaggaggagtcagcgatgcggaggaggttccaggactccgtcaaggccctcgaggccgacatcgagcacgccaatgagctggcgtcggagttcttgcgggattacgacggggcggtgatccagatgcggatggcgtacagcgccgtcgcgcacttcctcgtgcagtggatcgactgcaagctcgccggcgcgctcggcctcctcaagatcatgatctacaaggtgtacgccgatggcaccacggctctgccggagtgggagagggaggccagcatcaggcaattctacggtgtcatcttcccgtcgctgctccagctgccgagtgggataactgaattggacgacaggaagcagaggaggctgtgccttcagaagttcaggaaggtggaggagagggtctcggaggtggatttggagagggagctcgagtgcggcatctgcctcgaggtgaatgccaagattgtgctgcccgattgcgcgcactcgctgtgcatgagatgcttcgaggattggagacaaaatttcgtttacctgaatgtggtgttcaagaaagagagaaaaagattacctttgccatatattggctggttgtgttcctcaggatgtaaagtcagttgtaaatctcctgcacttctgatagagtaccacaatgccctctccacagagtctttaaccatcttcatgcatcaagatgtagtccatccaatcaaacctgcatccagaatgactttatttataactgcagcaaacattctattgaactatgtcctgctcttgagcaggaacaccaaatcaaagtcgtgccccttctgccgcgcctgcctcaagaaggtgaatccgagcagcctgtggttgtacaccgacgaccgcgatgttgtggatatggatacgttgactagggagaacattaggcgcctgttcatgttcataagtaagcttccacttgtagtgctccatgtggttgaccttgacatttacgagtaccgtatcaagtga

SEQ ID NO: 10143 - DNA, 782 bp, Oryza sativa
  Clone ID: PAT_MRT4530_16493C.1
cgttcccgttgtccataataaagaaaaaagggcgaaaaaataaaacaacaaaataaagtctgattcaatttgacgagaagaaaacaagtctgtaaaaaaaggcccgtaaaaaagggtgctaaaaaaaaggcaaagaagggcgaaaaaaaagtcgtccttaaaaaagaaaaaaaatacgtgagagaaaaaacagtttccaaaaaaacgcctgagaaaaaaaaaataaaaaaaacacacgagagaaaaagcaaaaaaacgcgagaaaaaatgttagaaaaacgcgcaagaaaattacggtttccatcgtctgaaaaaaaacacacaagaaaattacggtttccatcgtctctaatctaatctaactactaatttaaaagagaagtttcaatcgtccgttaaaaagtaaaaaatgtgcgagaaaaaaaaagcaaaagacgctcaagaaaaaacaagaaaaaaaaaagcgttagaaaaactgtcagaaaaagccaaaaatacgcgcaagaaaaaaaataaaaaaaagcgcgagaacaatatggtttttgtcgttggtaaaaaaaaagcaaaaaaaaacgataggaaaaaactgtcagatagaaatgcgtcatttctaagaaatagtttgagaaaatacagttttcgtcgtcggttaaaaaagaaaaaaaaatgctaggaaaaaactaacagaaagaaatacgtcattttaaaaaatggtttgagaaaaccgcacaagaaaaaaaataccgtttataaaaaattggattgagaaaactatccaagaa

SEQ ID NO: 10144 - DNA, 339 bp, Oryza sativa
  Clone ID: PAT_MRT4530_16494C.1
atggtgagggctaagaccggcgacggccaacctcctactcccgacggcggcggcggcaccttttgcacgcaccatgactggcgagtgggcctagacatttgcaacgtgcgagatccagtcacaacgacgacggtgggagctagatccggtcacagcgacgatggtgcccgttgctcccctcctgagagctctcaaggcggctggatccggcggtccacttcacgtccagatctagtggccgagcacaaagaggcgaaggaggatcacgacatgaggatgagcgccaccgccgccgatgaggaggcggttgggagcggctccatccccttcgcagcttaa

SEQ ID NO: 10145 - DNA, 276 bp, Oryza sativa
  Clone ID: PAT_MRT4530_16495C.1
atggccagttacaggtccgtcgtcttcgagctctttgaggacgtagaaactggccagctgcaagcatgctcagttttatcccaactggctcggtcccgccgatccattccgcgcgaccgcggcgatcccgcggctccgttccgcgcgatcgagcggacgtcggctcggtcccggacgtgcgctgccaccgcgccggaccggctcggttccgtactctcggtctacgtgaccgagccggtcccgcgtcaccgttccgcgcaaccgctgcagctctcg

SEQ ID NO: 10146 - DNA, 491 bp, Oryza sativa
  Clone ID: PAT_MRT4530_16496C.1
cgggaagttggcctttccactggtttttaaattggagacccaatatctgtgtttctgtgctatattttattttataggatgcttgtaaaaacctttacccagatgaaaatatggtgctgtactggatgacttctttataccacatgcagatatgacgtgtggttggagataaacctatattttataattcaaatgacccaccatttatttccgctaccaccagtagattatctcataaaggagataatctattggccgactctttttggtggttgcactccctggagacataagattgtacttcgtatgcactttgttgtatgtccagccactagattgttgtccgttcctgttttatttgggtacttttagccccctccactttgcactttcttgtttgaaaaaaatatatgaaaagatgtcagtaatagtcatcgttctaccctagtccctttgcttttattgtttcccaaaaaaaaaaaaaaaaaaaa

SEQ ID NO: 10147 - DNA, 2487 bp, Oryza sativa
  Clone ID: PAT_MRT4530_16497C.1
ttttttttttttttttttttgaaataacggttattcctttccaaaaggaaaagaggtgttatttcttttggatcttctgtaacagatcaggtaaatacaacgtaaacaaaatattgctggccatcccaggacaataggggaaactgcggttccagaacacaacattgattttgtgagcacagcctattgagaccttcggtgttttgagtgtaaactttgatacatgtggttttcgtaattcatgtacatgtgtttcgtaaacctatcaccgtatattatgtcagatgatgtaaaatatggtcgagagagctcgtcggcaacgtctttcgggaaacagaaattttctgaagttgcttactcaaatgcgagcctctgtgtaccaacaagtgacgcatatcggccaccgctagcaaccagttcagcatgagtcccaagttctgctatcttgccatctgagcagacagcgatttgatgcgcattttgcacggtgctcaatctgtgcgcgatcaccagagaagtccttcccttcatcaagtgattgagagcttcctgtacaagccgttcactggtcgtatcaagtgcactggtagcctgaatcttggccctaacacatgttttgaatgttctctgagtttccctagacacaaacatataaccaaaccattgatttgcttggctaaacaaaaataaccaaacttgctcatcaagtattagaataggagagtttttcagaagagcacgagcaatagcaattctctgtctctgtcccccacttaggaggctgccacgttcaccaacaagtgtgtcatagccctgtggaagagagacaatgaattcatgagcattggcagctttagcggcctttattatctcatccttggaaacaacatcatccggaagaccataagcgatgttttctccgacagaaactgagaataggacagggtcctgattcactaaggatacaactcgagaccattctcttttatcaaatacacggatgtcttccccagccacagtgatgcgaccatgagttggctcatagtaccgtgcaagaagttgcaccactgtgctttttccagcaccactaggtccaacaagtgctgtaatttttccacactcaattgtaagatcaagcccatttaagatctccacatcagatctcagtgggtaagaaaagtggacaccttctaggtgaatgtcaccagaccaggcaagattactacagctgcttgatgattttagtgctgacatgtaatgtttgttagcagtgccattttcgtgcactgcaccatttgaatcttctagttctttggctaaaccatatgcaagtgaatcatcaatgtcctctgctgatagaatagaatttattctttctacagaagcaaatgtcccacgtagatcaccaagagtattaacagctccttgaacagcgaatgtcagtgtgaatgtgtaaccaataaaagatgccatggttccaacagacaattttcccgcattaaccttgcttccaccaagaacataaagtgccattagggaaacatagactaccacccgagtcaatgactcgttggcagatttcagcacgcctagttttgtgccactattctggaaagcaagtgccaaattgtcaaacatagaaatttgtcgtttttcacccccaaatgacctaacagtacgaatagctgaaaatgtttctgatgcagtgtctgatatacgtgcttggacaattccataagatttaaatgtgggaacagttgacctcttgaaaagagcaactagcacggagacagagaccattaggagtcctagtacaggagctagctcagtggataatgtgaaaagtatacaaagtgtaccggtgatgacactcttcaaagtacccaaatcagatgtcaacaaaccagtcaactcgccaaccttgtgacgatcaaagaataccatcttctggattagaatcctgcgaaatatttggctccggagcctcgccatcaccttctcccagatcacggtcatgttgatcacgaatacgattgtaaatatgggctccagcgtatacagcacggcgattttggacagcagcctccacaggggttcggagccccttcctatcagcgtctcgaagaacctccctgagaagagcggcatggagagggtgcaggtggtgcacgcgaggagcgccgcgagggagaccgcgatgcgggccctgtgcggcgacaggagggcccagacccccgcccacgtgacggcgtccgaggaggcgatggccgcggcgacgtccgccgccgccgccgcggcgtcgagggccggggacgggtaggcgtcggggccggacgccggcgcggagatgtaggcgcggggagcctggcggccggggccggagatgggggaggggaaggcgaggcggcgggtagggttaggtctatggctcgaggcggaggcggagggggagaggaggaggcgcgtgctccaggtggagatcgccat

SEQ ID NO: 10148 - DNA, 1764 bp, Oryza sativa
  Clone ID: PAT_MRT4530_16498C.1
ggccgccccttttttttttttttccctcgaggtttaaaatccactagtattagtatggcagagccaagcacagcagtatgcaactcatgctagctcccagaaatgtgaacaattcgtagttcggagaagataaaaggactaacagtagaagaacaggcgagagccgagagcgacgcaacaaaagcaggactaatgaagtcgtcgagaacagctggcctagcacgacactgcttgccccctattggttaggagtacttgcatcggcaagccaccctccatgcgcagcgccagcgaggtgacgagccccggatgcccctcgccgccggtgtaccggagtgtgaacctgtcgaacacgcacgacacgatggacttcatctgtatgtaggctatctccttgccgaggcacatcctcggcccgccgtggaacaccgggtacttgaacgagctctccggccggaacacgcccgcctcgtccagccaccgctccggcctgaactcctcgcagtccgtgccccagatgtcctccaccctcgccatggcgtacgcgcagtacgtcacctgccatcctttcccgacgaacgtgccgtccggaaggaagtcttcctccttgcagacgtacgtgtcgagggacaccggcgggtaaagccgcatggactcggtgatggccgcgtgcaggtagtgcatgtcgcgcagctcatgggggctgaacgccgcgccgcttgtgaccccgttgctcgaggacgcacgccgtaccgcgcggatctcgcgcactatattgtcctcaacatcgggacggccggataccaaccagaaaaaccaggttagcgccgacgccgttgtctcgcgcccggcgaggacgaggttggtgatcacgtcgtggaggctttcgtcgctgtgcttgtcgcccgcggcaaagcgcgacaggaagtcgtcaccgcgtgcctcccctctctccctgcgctcccggatgatccggtcggtgtacgcatggatcgtggcgagcgcctcccgcaaccgcctttccgactctatgttgaatagcctcttgactcgccacagtgacttgatcggcgaattgaaccgggccaagatggcgttctgcgcgtcgttgcacgcgcccatgaactccgcgatgtggggcgaggccacgctgtccttggccaggcacgccgggtcctcgtcgaacaccacacggcagatgttgtcgaacgcgaagcgctcgagcacgctctgcacgtccagcgtccggccgtcgcgtcccgctcgctccagcagcggcagaagcctctcgatgacctcgaactgaacggtgtccaccacgaagttcctcagcgtgcgcttgctgaactcgtagctggtggccttccgttgccacagccacttctcgccgtcggagttgaagatgccgcggccaaggaagtcctcgagcatggtgatgatggcctcacccttgacatagttaccaaagttagtcttgagcatgtgttcgacgttggccgggttggccgtaaagacgccgccggtgaggccaagcgccttgaacgacatggtgtgcatggggctgcgctttaggacgccggccgaccactcgaggatgtgattcttgtgcttgatgaagtgcggcagagtgccaacgacagggtaggacttgagtccatgggcacgaggctgcttcttggggtcctggtgcaggtagaggaagtagagaagcggtagaagagggaggatgaggaggagagaagctgagattgaggagagttccat

SEQ ID NO: 10149 - DNA, 924 bp, Oryza sativa
  Clone ID: PAT_MRT4530_16499C.1
atgggcggcgccgtggacgatggcggcggcggcgagctggacgtgttcgatgccgggcggtgcggcggcggtgggtacgagctgggggtcgccgtggggcggaggttcggcgaggccatcaggagcaggatgagcggcgacgccgtgctgcggcggcggctgctcccgttcgcgtcgacggcgccggggcgggcgctggtggacgcgctccgcgacgccaaccgcgcgaggaaggagctcctgccgttcatcacagaggaggaagatcaacaccaccaccgggaagacgaagccgccgccgtcgccgccgacgccgacgacgactgctccgacgtcctgatcgtcggcgagtcggcggcgatcgccgcgcacaacgaggacgccaacgtcgcgctcctcggccacacctacgtggtgaaggccacctcgccggacggctcgtcgtcgttcaccgcctacacctacgccggcgagctccccacctgcgccttcggcttcaacagcaacggagtgagggtgagctcgccggccatgtcggtcggccacagctacaacctgatggacgtccggcgccggaggatcgtcaacgtcgagaccgcctccggcaaccgcttctccgtgcgcgaggccgccgccgcgcccttcttccacgccaacatgtaccgccatctccaggtcaaccaggtgcaggacgagaactccatgagcagggagaggagagcggcggagctctcgccggacaccaaggagaaggcgctgtcgctgctcggggacacggccgatgacaagtacccgatctacatgacaggtccaacactgtacactctgtgcaccgtcttggttgatctcgacgaggcgacgatgaccatctacaaggggaatccgaagaacagagatgcagttcgagtgttccgtatgctgtga

SEQ ID NO: 10150 - DNA, 3406 bp, Oryza sativa
  unsure (1)..(3406): unsure at all n locations
  Clone ID: PAT_MRT4530_1649C.1
tcaagccacattagagaagtctatgatatttaactcattcctcaacttgcaaaagcgggtttcatcaagaggcttggtaaagatgtcggctagttgatcctcggttcttatgtggctaatgactatgtcacacttggcaacatggtctcttaggaagtgatggcgtatgtcaatatgcttggttctagaatgttggaccgggttattggctatctttatggcaccatcattgtcacataggagtggggttttggtgaaggatatgccatagtccaacaatgtttgtttcatccaaagcaattgggcacaacaactacccgccgaaacatattctgtctcggcagtagagagggctacggagttttgtttcttggatgaccatgacacaagggatctaccaagcatttggcaactactggatgtgctctttctatccactttgcaaccggcataatccggatcggaatagccaacaagcttaaatttagcaccttttgggtaccacaagccaatagtagaggaatgctttaaatatcttagaatccttttcacggccactaagtgacactccttaggagcggcttgaaaccgtgcacacatgcaaacactaaacatgatatccggcctagatacggtaaggtaaagcaagctaccaatcatagaacgataaagctttaaatctaccggtttacctccctcatcaaggtcgagatgcccgttggttgccataggtgtcttaatgggcttcgcatcctccaagccaaacctcttgagtagatccttgatgtacttggtttggctcacgaacgtcccattcttgagttgcttgatttgaagtccaaggaagaagctcaactctccaatcatggacatttcaaattccctagacatcatatcaccaaattccttgcaaaatacctcattagtagaaccgaatatgatgtcatcaacataaatttgatacacaaagaaatcatcaccaatgatttttgtgaaaagagtgatgtcaacttttccaattttgaaatcctttgacaaaagaaaatctctcaatctttcataccaagccctaggagcttgtcttaaaccataaagagcttttgagagtttgtaaacatggttaggatatttagtatcatttagaaaagcacttttcacatccatttgaaatagttttatatcaaagcatgatgcaaatgcaagaaggatgcaaatagcctcaagtcttgccacgggggcaaaagtttcaccaaagtccaaaccttcaacttgtgtgaaaccttgtgccaccaatcttgccttgtttctcaccaccaacccgttctcatcttgtttgttcctaaagacccactttgtccctatgacattgtggtctctaggtctttcaaccaaagtccacaccttgtttcttgcaaagtttttgagctcttcatgcatagcattcatccaatccggatcacaaagagcttcatctacatgttttcgtaatgtcacccaacacttggtcaattgggtgatccttggaaagagcggtgtgtatccttggtggcataggtggttcttgtgccttctcctcctccacttcaacttgagcttgacttggcatagcggaagtagatgctcatcttgagtggaggtggatggcttgtcttccacttcaataggcttgacatctccaattgacatgttcttcataactctcatcaagccttcatcacctacatcatccaaattctcgtgcccctcttgggagccattagtctcatcaaattgaacatcggcggtttcttccacaatacctttgttcttgttgtagacccggtatgccttgctttttgaggcataacctagaagaaacccttcatcacaccgactttcaaatttggttagtctaacaccctttcgatgaatataacatttacaaccaaaaactcgaaaataggcaatattaggcttcctcccaacaattacctcataggaagtctttntcaagacacgatgcanataaagcctattggttgcatggcaagcggtgtttatggcttccgcccaaaaggaatcggaaacaccatattcatcaagcatagtccttgccatctcaatcaatgtacgaattttcctctccactacaccattttgttgaggtgagtaggtagcgaaaagttcatgtttaataccaagatcatcacaatagtcctcgatattggtattcttaaactcggaaccaatgttacttctaattttcacaagagtgcaactaaattcattttgggccctttttgcaaactttttgaaaaggtcggcgacaatagacttatcatgcaaaaagaacacccaagtatagcgagaataatcatcaacaatcacaagacaatgactattaccaccaatgctcttataggttgttgggtcaaacaaatccatatgcaagagctccaatggtttagatgtggacatgatactcttagtaggatgagaacatgcaacttgcttgccggcttgacaagcactacaaagcttatctttctcaaacttcacatctttcaagcccataactagatcacgttttgaaaatttgctcaattgattcatgccaacatgggctagccttctatgccaaagccaacccaaagaagtttttgcaactaaacaagttttcaaatttgcttcactagaattgaaatcaaccaaataaagatttccatatctaaaacctttgaacacacaagacttgtcaagaaggctagaaacaataacttcttgcgggaagaaagcacatgacaagctaagatcacaaatttgagcaaccgaaagcaaattgaaatttagagatttaacaagagagacattatcaattgacaaatcattggagatagcaattttacctaacccaattacctttcctttgctattgtctccaaatgtcactttctcttgttcattccttcctacctcaaatgtggtgaacatagccctatcaccggtcatgtgttgagtgcatccactatcaagcacccaatggctcccaccggtgtggtagttcaccaccgagtataggggaacccacatatctaggaacaatgctaccatcatgagccttcctaagcatataatgagaatcaaacatgcatgtcttaggaggcttaccaccggggcaatcattcaccaaatgcccaacctcacgacacttggagcaatacttaccattgctcttgacaaaacgagtggcacggtgagaaggtttcttacccttctttggaatgaatccaagtccctcattgttaaggatgcaccgttgctccctcaaaatcttgtcaagagtgttcttacccttgaagcacctctccaagctcttgttgagcttagccacttgctacttaagctcattgttctcaacaacaagtga

SEQ ID NO: 10151 - DNA, 1764 bp, Oryza sativa
  Clone ID: PAT_MRT4530_164C.1
ttttggccaacccgccgctggctcgctttatatcccgcgtgagctccacaccggccgggaagcggaggtccggaggaggaagcggcgagagaagctcagctaggcagggcgacgggcagaaacgcgaccacggcaacaaaccccgccgcgcgcgcccaccgtgccggttacatgggagtagaggcgggcggcggctgcggtgggagggcggtagtcaccggattctacgtctggggctgggagttcctcaccgccctcctgctcttctcggccaccacctcctactagctatacacacccatctcaccataacacacatacatagatagatagatagatagatacatacacacaaacataagtagctaggtagagaaagagatcatagcgttaggtgatcgatcgatggctgctgctgaggcggcggcggcggtggggaagcagcagcagaagggcggcgggggaaggggaggaggcggcggtgggccggcgccgttcctgacgaagacgaaccagatgatggaggagagcgcgcacgttcttggtgtcttttggggaaaaacatgtccttattgtcttgtgttgattaggacagaaacatgttacgattgcccctcaatacgttcacacgatctgaccggggctaacgagagatggcgactattcatgcagggtttccggaaggtggtgcccgatcggtgggagttcgccaacggcaacttccggcgaggagagcaaggcctcctctccggcatccgccgccgcaaggcgacgacgcctcagtcctccaaatcctgcggcagcggcgtcaacgtcgcgttccctccgccgctgccccctctgcccccggagccgtcggcgaccacgtccagcggcaacgaccgcagctcctcctccgcgtcctcgccgccgcgggcggacatcaccagcgagaacgagcagctcaggaaggacaaccaaacgctgacgatggagctggcgcgggctcggcggcactgcgaggagcttctgggcttcctgtcgcgcttcctcgacgtccggcagctcgatctccggctgctcatgcaggaagacatgcgagcggcggccggcggcgtcggcggcgagcagcgcgtgcaagagcacgcccgggaggagaagtgcgtgaagctgttcggcgtgctcctcgacgacacccatggcgccgccacgaggaagagggcgcggtgcgaggaggcggctgccagcgagcggccgatcaagatgatcaggatcggcgagccgtgggtcagcgttccatcgtcggggccggcgcggtgtggcggcgacaactgaagtccaaacttgtgcatgccacggccatgacctgatcgaccaggcgaacggcaagcagaaggcatgcatggtgaggttggtggcaagaatggtccgatcaaccaagtcattaggtaaaacgagacgaattaagcacgccaaatacgtgcggccctgtgttaatcacgggttgctaccatgctagtagtaaggtaggaacagtacgaggagtcaaggctgaccgaagcgaagcagccggctcttgtgtctggacgttgtttcagttaacactgaaagcttcaccttactatggattatacattttttagataatggaatataatatcccggtctttacttcgtccggcagctcaacacctacgtacgtacacattacacacactcgatctcttgctccatctcgatactcgactcctaactttgttggtttgatcatcatatcatcatcct

SEQ ID NO: 10152 - DNA, 450 bp, Oryza sativa
  Clone ID: PAT_MRT4530_16500C.1
atggcgcgggtattcagatacgattggtcacgacatggcttagcgcgctgccaggctagaggtgctgatcaacctaataagcagaactgcgtgcagcagaaggccggcgcgcaccgcgggccgcgggcgccccgcccccttcatcacaccatgatgctcatggtgtgcaccgtcgagacgcggctccatgtctccggcgacagcagcggccccggccgcgcgaggcactcctccaactgctgcagcctggcgaccaagtggctggcgccgtaccccaacatggcggggccagccacactggcgccgtgcccgtgccaccgtggcagtagggctgtcgtggaggtgctgactaggccgaagggggcgccagccacactggcgccgccccttataccacggcgccagcatggctgcgccacccttcctctgtgggccgaccccttaaacccc

SEQ ID NO: 10153 - DNA, 1434 bp, Oryza sativa
  Clone ID: PAT_MRT4530_16501C.1
atggggaagaaggggaaggaggcggcgcgggagcggcgggagcagcggcggcgggaggtcacgctcctccgcgccgtgccctacgagccgcaccagcggtggtgggacggcctcgctccgccgccgccgccgccggggcgcgcggtggcggtggtgacgggggccaaccgcgggatcggctacgaggccgcgcgccagctcgcgacccacggcctccacgtcgtcctcacctcccgcgacgccgcgcgcggaagggacgccacggagcagatccgcgcggcggcggggaagcccggggtgagcgtggagtggcggcagctcgacgtgacggacgccgcctcggtggagggattcgcgacctgggtggagcgcacccatggcggcgtccatgtccttgttaacaatgcaggcgtaaacttcaatagaggagcagataactctgttgaatttgctgagcaagttattgagacaaattactttggcacaaaacggatgattgaagccatgatgccactaatgataacttctcctcatggtggtcggatagtgaatgtaagctcgaggcttggtagagtcaatggcagacgcaatagaatcggtgatccaagcctaagagagcgactattaaatgatgatcacttatccgaggagttgattaatgaaatggtcatgaaattcctcgaacaaaccaagcaagataattggtcctccggcaatgagtggcctcagatgtacactgactattcgatctcaaagcttgctgttaatgcttatacaagactcttggcaaggaggctgttggataggcctgagggacaaaagatctacattaactgtttctgtcctggctgggtaaagactgccatgactggttgggaagggaacatttcagctgaagaaggtgctgatactggagtatggctcgccctagtaccccaggagcaagctacaatcgggaagttctttgctgagagacgtgagataagtttctgaggggatcactattcaaacagcaaagtcaattgctcaaaagaaataaaaaaagaatgtcaaaagagccttatgtttataaactacttctactttgagacgtgctgacatgctctattacaaggcatttcatatgctcatttactggaggcagtaaattacccatctctcagaattactgttctgatgaaatttacttaatcaggcctatgctaatctatgaaggcgagtgataactgtttaaaagcaaaccagatgttggctgcaggttgtcaagatcattgacataccacattaatggaaggcccatgatctctaattttcctaatttatgagatcataccaactgtctctcggtcatgaatgaagtggctgaaaaagtggaatgttcaccaggaccactgggatggcaattgggaagcatggcgagctggcaggttcctt

SEQ ID NO: 10154 - DNA, 2119 bp, Oryza sativa
  Clone ID: PAT_MRT4530_16502C.1
cgctgcgcgtccggttgtctctcgtcctgagtctccgactgagcgcctccaatctcaacagccacctcccacctgttccggctccggctagacctcgccgccggcgatccccagcctcagcgcatccaaccgacggaagaacacaaggcgccgcaccgcaccgcagcgatgacgctgatcaccctcatccgcgactacatcgatcgcatgctccacgacatccccgggatgaaggtcctcgtcctcgaccccgataccgtggggatggtaagcgtggtgtacagccagtcagatctcctccggaaggaggtgttcctcgtggagacggtcgacaacgcctccagctccagggagtccatggcgcacctcaaggccgtctacttcctccgcccctcctccgataacgtccagaagctccgccggcatctcgccgccccgcgtttcgccgagtaccacctcttcttctccaatgtattgaagattccacagattcaggtgctcgcagattccgatgagcaggaggttgtgcagcaagttcaggagttctatgctgatttttgtgccatcgacccttaccatttcacgctgaacatacgcaataaccacgtctacatgcttccaatggtggtggatcctcctggtatgcagagtttctgtgatcgggctgttgatggcattgcttctgtcttcctggctctcaagcgccgtcctgttattagataccaaaggacatctgatgttgcaaaaaggattgcacaagaaactgcgagattgatgtatgagcaggaaagtggcttgtttgattttagacgaactgagaactcttccttgttgctggtgattgacagaagggatgatcctgttaccccgttacttaaccaatggacatatcaggcaatggttcatgaacttattggaattgagaacaataaagttgatctaagggaatatcctaatgtccctaaagaccagaaggtcgaggtggttctatcatcagttcaggatgaattttttagggctaacatgttcgagaattttggtgatcttggtatgaatatcaaaagaatggtagatgactttcaacatctttcgaagaccagccagaatattcagagcataagtgatatgtcaaaatttctgagcaactaccctgaatatcggaagactcatggaaatgtaacgaagcatgttgctttggtcagtgagatgagcagaattgtggaggaaaggaagattatgctaatttcccagacggagcaagagttagcatgtacaagtggacaagcagctgctttcgaggctgtcacttccttgctaaacaatgaaagtgtgtctgatattgatcgtttacggttagtattgctctatgctttgaggtatgaaaaggagagtccggttcagttgatgcagcttttcaataaattggcttctcgttctgctaaatacaagtcagggctggttcaattcctcctcaaacaggctggtgttgataagagaacaggtgacttatatgggaaccgtgatctattaaatattgctcgcaacatggctcgtggactcaagggcgttgagaatgtatacacccaacatcagcctcttctctttcagaccatggaaggaattgtaaaggcacgattacgagatgctgattatccgcttgttggcaatcatttccagcagaacaggcctcaagatgttgtgctgttcattgttggagggacgacttacgaggaagcaagatcagtagccctttacaatgcagcaaatcctggagttcggttctttcttggtggttcagtggttctaaattcaaagagatttcttgatgacttaggagaggcacagagaatatcgaaatcgagcagtctagtatgagcaggctcttagcttctacagcttgaaacttggcagtctgacaattgaaacttgtggtgtttttgcatagagaatcaacttcgtggtaaattttgtaatgcacagctttagattcatagtgcaacacaccatacggaataaaattgttcacagttcacctaaaaaaaaattttttgtggtttgcaattattgctgcaaatagagcagcaccgggaaaaattaatatttaaaaaaatttagataa

SEQ ID NO: 10155 - DNA, 832 bp, Oryza sativa
  Clone ID: PAT_MRT4530_16503C.1
ttagttttgaacaaaataggtaatatattttactaagtttttgagcaggctttccacttggtacactatgtgaattaaacttgtcgtgctagtgtaaaatggacacaggggcctcttcaggtggctgcctgttattatcggagacaaaatacctagccatattgtactgatggtttttgactgatgacttattctaattttgcatgcagctggttcaattcctcctcaaacaggctggtgttgataagagaacaggtgacttatatgggaaccgtgatctattaaatattgctcgcaacatggctcgtggactcaagggcgttgagaatgtatacacccaacatcagcctcttctctttcagaccatggaaggaattgtaaaggcacgattacgagatgctgattatccgcttgttggcaatcatttccagcagaacagcatggtttacttctaaatgtggagtaatttttaggagtactggctgattgatactctcctcacaggcctcaagatgttgtgctgttcattgttggagggacgacttacgaggaagcaagatcagtagcctttcaatgcagcaaatcctggagtcggtctttcttggtggttcagtggttctaaattcaaagagtttcttgatgacttaggagaggcacagagaatacgaaacgacagtctagtatgagcaggctcttagttctacagcttgaaattggcagctgacaattgaaactgggtgttttgcaagagaacacttcgtggtaattttgtaatgccagcttagattcatagtgcaacacaccatacggaaaaaattgtcacagttcacct

SEQ ID NO: 10156 - DNA, 2232 bp, Oryza sativa
  Clone ID: PAT_MRT4530_16504C.1
gtcacactgacgtttaatgcaaactggaagaagtgtaaaaagttgacagtaggtgtatcatggtcatcaatgcacaaatatatgggattagcaccctaggttttaacaaagtatagctttccgaagttgccaaaaaaaaaaaactaccacagataagttgtgtagccaaggctgcggtggcggcggagaagacggtggtgaaggcggaggaggaggaggagggtgggggagagtacgacgcgatcgtggtggggtcggggatcggggggatggtggcggcgacgcagctggcggcgaagggggcgagggtgctggtgctggagaagtacgtcatccccggggggagctccgggtactaccgccgcgacgggttcaccttcgacgtcggctcctccgtcatgttcggcttctccgacaaggggaacttgaatttgattacacaagcactagaagcagttgggcataagatggaagttataccggatccttctacggttcatttccacctacctggtgacctctcagttcttgtgcatagagagtatgatgacttcgtcacggagctggttaataaatttcctcatgaaaaggaaggaatcctgaaattctatggcacatgttggaagatcttcaattcattaaattctttggagctgaagtcccttgaggagcctctatatctttttgggcaattttttcaaaagcctctggaatgtttgacgctagcttattatctgccacagaatgctggggatattgctcgcaagttcataaaagatcagcagttactctccttcatagatgctgagtgctttattgtgagcacagtcaatgccttgcaaacacccatgattaatgcaagacaggtcttgtgcgataggcacttcgggggaattaactatccagttggtggtgttggtggtattgctatgtccttggcagatgggcttgttgacaaaggcagtgaaatacgctacaaggctaatgtgaccaatgtaattttagaaaatggcaaagctgttggagtcaggttatcaaatgggaaggagttctttgctaaaacagtgatatcgaatgctaccagatgggatacatttggtaaactcttgaaagttgaagagcttccagaagaggagaaaaacttccaaaagaattatgttaaagcaccatcattcctttccattcatatgggtgtcaaagcctcagttttgcctgctgatactgattgccaccattttgtacttgaggatgactgggctaatttggagaagccttatggaagcatatttttaagtatccctacagtgcttgacccatccttggctcccgaaggacaccatatacttcatatttttacaactgcagggatagaggattgggaaggtctgtccaggaaggattatgagaagaaaaaggagcttgtggcgacagagataataaagaggcttgaaaaaaagctgttccctggtcttcaggattcaatagtcctcaaggaggtaggctcaccaaaaacacaccgaagatttcttgcgcgaaatgatggtacatatggacccatgccacggggtaaaccaaagggattgctagcaatgcctttcaatactacttcaatagatggcttgtactgtgttggcgacagctgttttcctgggcaaggtgtaattgctgtggcattttcagggatcatgtgtgctcatcgagttgcagctgatattggactggaacaaagatctcctgtactagatgcgggtcttcttgggctcctcagatggttgagaacgcttgcttaggatgatacggacaaagatttggttgaccgtcgattgattttacgattacagaaaaacaccttctcacacatgtcatggtcattgcacatttgttttggtgagccatacatggatcaagcagcagtttttgcctcttgggatcttgcttctgcctggtatatacaagaggttggattttcagctgcagtgatccctgaaaagctgaagcttcctggaataattgtacagatttcagttgttatttgggagcaaaaggcgtaaagactaatatggatgcatatatgtacctagagccttatacacatgatgtaacttgttgtaatctactagtatctcctgtatgcccatgttgtcatgttgacaattgagagttacaaacatgcagctgtacatgatgtgtaagccttaacagaacaaagtcagatacccctgccgctttctg

SEQ ID NO: 10157 - DNA, 390 bp, Oryza sativa
  Clone ID: PAT_MRT4530_16505C.1
atggcgtcactcaccgacgcacgacgggaatggggctccggcggcgaacctcgacggaggaggggtggacgaggtggaccttggccgcacgaacccaacggcggcgacggcgcgagtgccaccactcgggacggcgtgtccgtgaacttcgacacgccgcagttcgtcagcgatggcggggaggaccaccttcgtgttggagcgaggcggtgcagcgaggctactcctgtgtcggccagggtccgagctagccgagccgctgccgacggtggaggggacctgttccatgacctccctaggcggccgcagggcgtctgggcgcgccacgccaccaccccgtctccaagccggcccgccgccatccccctctacgccgggccgacgtcctaa

SEQ ID NO: 10158 - DNA, 198 bp, Oryza sativa
  Clone ID: PAT_MRT4530_16506C.1
aaaagaccatcttgagggatgtccttagcattcagaactgatattataagaaacttttacagtgcatagcagcaacgcaattgcttgcaatttatttatttatttatgtaggtattctttatccgcattgccctcttatgaggattccgccacattataaaccgttttgggcgctctcggattggaggggagtgcctg

SEQ ID NO: 10159 - DNA, 178 bp, Oryza sativa
  Clone ID: PAT_MRT4530_16507C.1
aaaatgcacagcaaagagggaacatatcaagggaggaagccaacgaggggctgacaacaccatacaacataccaaaaagtaaacacagataaacggaatatacacagaaacggagccggagagtactgacaaaccaaacataaaccacagagcgcctaattaaccaggaacaaatagg

SEQ ID NO: 10160 - DNA, 615 bp, Oryza sativa
  Clone ID: PAT_MRT4530_16508C.1
caagagctaaaatttcagtcagtgatgatgaggaagcaaagccgctctccttgttcatcttcttcttctgctgctgttgtgtccctctgcaaggtgctcctgttggtcctggctctcatctgcaccctggaaactgtctcagtagaaggagggagagtggcagcagcagcattagttggtgggggcgtaccactgaatccacggtacccggcgattcctgaagaaccttacataggccggagaggcgatccgtacacaggtcggggaggcgaaccttacacacgcccgggacggggatgcaccgttgcatacggatgctatggaggtcctccagctgccaaaccatgacgatcgacatactactctgctactgctactgcatgctcgcttgttatttcgatcgatcaatctcatggcctgcgtagctcaccacataaacaaataaaaactatgcatctaataattaacccctgatctatcgatcgatcagtagacgggtatgcatcaatcggcatcagcagcatatgcgatgtgaattgtgatgtatgcatggtgtatttttgtggtaaataaagtgaagcagatatctatctagtataaaaaaaaaaaaaaaaa

SEQ ID NO: 10161 - DNA, 596 bp, Oryza sativa
  unsure (1)..(596): unsure at all n locations
  Clone ID: PAT_MRT4530_16509C.1
ccgcccttttttttnntttttttttnnttttttttnnttttttttnnnttttttnntttttttnnttttttttttttnttttttttttttttttttttttttttttttttttttttttttgggaagaaagcaatctgggccaagcattggtatattcaggccttagggggggtttttccccaagggacaaaagggggagaggccgggttatactaaagctcccaaaacatttccagccttaatgggggcctcagcgggaaataaacagcccactacccccccctatagctaaactttgtttaaaaaagaccgggggacgtttcctttaaaaaaaggggaaccgggttttgggagctggaaacttttaaccttttcaggggggcaaaaacaaatccaaggccaaaaaaaaaacccgaaaccgaaaaaaaaaaaaagtttggggttaaagcaaaaaaccggaaaaacaaatttaaaacaaggccttgtttaggatttgcacaacggctaataaagggggggaaacgtggccatttgaaaagaacccgttaaccaagcgggccaggggttttttgggagggaaaaacgtttttttggga

SEQ ID NO: 10162 - DNA, 5092 bp, Oryza sativa
  Clone ID: PAT_MRT4530_1650C.1
accacgaagcctccgcacgcccccttcgtcaaggggtgggcaaggcgggagccggcccacggagagaactacccaagccttgatcactagggtagttcttccttcactccgaaggtggtgaactccaaaccactcacaaactggcaccgagcctcctccacaatcttctcggagaggtcaccgggcaacttctccacaagccgtctaggaggcggcaacctcattatgtagggagcataatagattccttgtccaatagtcccctttgagatggcaatctccttcatcataaggttgataacatcaaaccgacgaccatccataatggcatcaataacatgccaagcaactccgcgtatgtcatcattgttgccgcatcttgggaggatggtggcccttactctgcggttgatcacacttgggagagccctcaaacccgccacctttccatatgtgtaccctcccccttcttcataaaactgagaaaagtgatcaatggggaaggggttgtgggtgtgctcatcatgaaggtcatccccgttattgaagcgaatgtgcaagagctccttgaattcacggcggttgatagagcatcggagggtccccgacatccacttcattgcatcacaatcgccggacacccatacagtggcatagaattgccggatgagatcttcatcaaaaggttgcttcatggtgacaatcctatcaatcccaacggtccggaacatctcttgcaaattctcaaactccggtgtctcaccaatgtgcctccaagaaatccacttgtgttcggcgaaggctttgttggcatacacttgttcatacacggacttttggaaccgtgtatgaaatcttggatcattacaatcgttaggcctccggaattgatcatgatgatggaggatagtgtattgttgagcattcctcaaatttagcacaaattggatggtggaatcgagaggactcccatcatcacttgcctcatcatcttcactattgccactcccattgtcatcaccatcatcacttacatccaactcattaccctcaacattttccatattgtcctcatcactttgaacatactcatctccgctcgattcctcattcttactaacgggatcgggcgtgggctcacgacgaccatgccgagtgtggggaggcatagcaagcatttggcaactaccggatgtgctctttctatccactttgcaaccggcataatccgaatcggaatagccaacaagcttaaatttagcaccttttgggtaagccactaagtgacactccttaggagcggcttgaaaccgtgcacacatgcaaacactaaacatgatatccggcctagatgcggtaaggtaaagcaagctaccaatcatagaacgataaagttttaaatctaccggtttacctccctcatcaaggtcgagatgcccgttggttgccataggtgtcttgatgggcttcgcatcctccaagccaaacctcttgagtagatccttgatgtacttggtttggctcacgaacgtcccatccttgagttgcttgatttgaagtccaaggaagaagctcaattctccaatcatggacatctcaaattccctagacatcatatcaccaaattccttgcaaaatacctcattagtagaaccgaatatgatgtcatcaacataaatttgacacacaaagaaatcatcaccaatgatttttgtgaaaagagtggtgtcaacttttccaattttgaaatcctttgacaaaagaaaatctctcaatctttcataccaagccctaggagcttgttttaaaccataaagagcttttgagagtttgtaaacatggttaggattttcaggatcttcaaaaccgggaggttgttcaacaaagacaagttcggcaatttcaccatttagaaaagcacttttcacatccatttgaaatagttttatatcaaagtatgatgcaaatgcaagaaggatgcgaatagcctcaagtcttgccacgggggcaaaagtttcaccaaagtctaaaccttcaacttgtgtgaaaccttgcgccaccaaccttgccttgtttctcaccaccaatccgttctcatcttgtttgttcctaaagatccactttgtccctatgacattgtggtctctaggtctttcaaccaaagtccacaccttgtttcttgcaaagttgttgagctcttcatgcatagcattcatccaatccggatcacaaagagcttcatctacatgttttggctcaagacaagaaacaaacgagtaatgttcacaaatcgaagcgacacgagatcgagtttgaacacccttactaatgtcacccaacacttggtcaattgggtgatccttggaaagagcggtgtgtattcttggaggtataggtggatcttgtgccttctcctcctccacttcaacttgagcttgacttggcgaagcggaagtagatggctcatcttgagtggaggtggatggcttgtcttccacttcaataggcttgacatctccaatagacatgttcttcatagctctcatcaagccttcatcacctttgttcttgttgtagacccggtatgccttgctatttgaggcataacctagaagaaacccttcatcacaccgactttcaaatttggttagtctaacaccctttcggtaaatatagcacttgcaaccaaaaactcgaaaataggcaacatttggcttcctcccaacaattagctcataggaagtctttttcaagagacgatacaaataaagcctattggttgcatggcaagcgatgtttatggcttccgcccaaaaggaatcggaaacaccatattcatctagcatagtccttgccatctcaatcaatgtacgatttttcctttccactacaccattttgttgaggtgagtaggtagcggaaagctcgtgtttgataccaagatcatcacaatagtcctcgatattggaattcttaaattcggaaccattgtcacttctaattttcacaagagtgcaactaaattcattttgggccctttttgcaaactttttgaaaagttcggcaacaatagacttatcatgcaaaaagaatacccaagtatagtgagaataatccaaacttgtttgggtccttggaggttagagaccaaagctttgggcacccaaatggtattctttttaccaccgagtataggggaacccacatatctagcaacaatgctaccatcatgagccttcctaagcatataatgagaatcaaacatgcatgtcttaggaggcttaccaccggggcaatcattcaccaaatgcccaacctcacgacacttggagcaatacttaccattgctcttgacaaaacgagtggcacggtgagaaggtttcttacccttctttggaataaatccaagtccctccttgttaaggatgcaccgttgctcactcaaaatcttgtcaagagtgttcttacccttgaagcacctctccaagctcttgttgagcttagccacttgctccttaagctcattgttctcaacaacaagtgaggcatcacaaatagatacacaagagctagagctagagctagacatatccacaagatcatcacaagaggtagaaatgctagatgatgcaacatgagcaatatggcaagtagtactatcatcaagcaaatcacaagatatgccaacatcaatgagagctccatgttgagtagtggaaaggaggttgtcatgagcttccttaagcttctcatgagaaatggtgagtctctcatgagaagtctttagctcctcatacaagacctccaaaaaagcatgatccttctttagggccttgaacttgacaatctccttctcactataagcatggagctcctcaaacatactcacaagctcatcataggaaacatcatcacaatcatcatcactctcactatcactaagagatgttaccttagaggagccctttgccatgagacaaagtggagcgaagagtgatggagcctccttgatggcaacaacggccatcttcttcttcttggagcttgcattatcactatcttcttcctcggacccggatgaggcggagctctcctcatttgagtcccattccccgatgaaggcctcaatcttcttgccttccttcttgagcttcttcatgagcttgtagcctccactcttcttcttagatgacttgtctccatcatcatccttggaagggcacttggaagcaaagtatcccttctcaccacactcaaagcacctcaagttggagagagtcttgttgggtcttctatttcttctcctatttgagttggagccctttcctctctcctttctccttcccaagaaatcattgaaccttctagcaagaagggcaatctcttcttccaagttctcattgacttcattcaccttgcccttgcccttgtcttcaacttcggcttggagagcaatgcacttcttggaaggtgaggcttcctccatttcctttttcttcaacttatacatgtcattggtgttgatcttccccaagaggcttgccggtgtcatccttgacatgtcggagttgatgagcatggtgacaagggtctcatacttctccggtagagccctaagcatcttttgggcaacctcgagatcggtgtagtttgccccaagccccttgagatcattcacaatgacattgagcctcccatacatgtcattcacactctcatgaggcaacatggagaatgtctcatattggatcttgaggaagtgaagcttggcatccttgtactcacttgtgccctcatggatctccgccaacttgttccaaatctcatatgcggtctcaaggttgctcactctatcaaactcctcttggctcaaagagttgaacaaagcattcatggcttgggcattgagttggaggttgcggtgatcaatctccgtcaagggcgtgccggtgattgcaaagcctacatccacaatactccaaatatggaagctcatagctttgaggtgagtagacattttaattttccaagtggaatagtttgtgccattaaacatgggagccttccctacgtggttcacctcgttcgacat

SEQ ID NO: 10163 - DNA, 1417 bp, Oryza sativa
  Clone ID: PAT_MRT4530_16510C.1
ggatcccccgggctgcaggaatcggcacgaggccccacgccgcgaggcgcgagcttccgcgatgttggccgccgtccggcgccgccgcctactcctcctcccgctgcctctccgcttcttctccgccgccgccgccgccgcctccaccaccaccgacccgaaggtcgtatcctacctgatatcctcctgtggcctcacccctgccgccgccgcccgcgccgccgccacctcgccctggctccccctcgcctctccggacttcgccagcaacgccgacgccgtcgtcgcgctcctccgccgctacgggttcaccgacgccgacatctccgccaccgtccgggcgttctccaggatcctcgcgtccgaccccgcccggaccctccagcccaagctcgactacctccgctccgtcggcatcacggcgccgctcctcccccgggtcgtctccctcagccccgtcatcctccaccgcagcatcgagtcccaccttgccccgctcatcgcctccctccgcgaggtcctcggctccgactcgcgcatcgtcaccgcgctccgccagatgccgttcgccatgcgctgcagccccaaggccaccttcctccggacgctccccgtgctccgcgacgtccacggccttacgcccagcgagctgtccaagctcgtcgccagccagcccggggtcatcctgctgggccccggccgcgccggggagatcgtccaggccgtcaaggacgccggcgtcgagccaggaagccccatgttcgtctacatcttcgccgccttctccaagctgaaggcccccacgctggagaacaagttcgcgatctaccgcagcctcggcttcggcaaggacgacatcgccgtgatgctgcggcggctcccgaacgcggcggggatctcggaggagaggctgaagaggaccgtcggcttcttgaccggcaaggcggggctgcgccgcgaggacatcgtcgcgtacccgaacctgctgtcgcggagcctggactcccacgcccggaggtgcgcggtgctcgccgtgctgaggagggaagggaagccggaggggcagcaccgcgtgccccatgtgctcgtggccagcctcgcacggttcatgaaggcgtacgtgaggcggtacgagggggaggtccccgatgtcttgcgggctatcaatggcgagatccccttcgagggctttgggcttggcgagttggagaagaagaagccacagcggcaggagaagatcagaagtggggcatggccatgcttggaggagcagccgaacatgagaacatgcacgtttcttccccgcgccggccgcgcctgccacatggtgcaggtgaactgtgtttgtaagcttgcaaagccgcatgtgaggtacagcttcccagggttatcaacatgcatgcagaagaatatataa

SEQ ID NO: 10164 - DNA, 1195 bp, Oryza sativa
  Clone ID: PAT_MRT4530_16511C.1
ggttgattgggataaatggcagaaactctgatttttttttccccaaaaaatttacagtgtgctaactggctaatcgtgtccagtgatgtttattgtcatctatacgtatacatggcacagttctatacacaggattcagatgatcagatcgaagagctagcgggttgcgatgcagcttgtttctctgctacaccctccgttccttgttcggatataagatatatagccagaaacacttgtattttggtagagcaatccgctgcgtcttgggttccagcgtcatttgactcattttgtactagcatgtgttcattctgttgaatgaatgtgcgtcgtggttcagttagccgccttatccagagttttcttcaggtccagaagtttcgaccaccgttggctgtaacgcttcttctggttaccaccatattgccatacgacagtagatttttcgcatgcctctgagcatgaactcttggcagatgccgttagccgtatcgtctcttggatcacggagtcaagatcaacctctacacctggtctcacgtagataacagatggatcgctgtctccaatatcaggcatctcactctgttctttcctggttgaggacagcaccgtgaggttgaactgctcatcaatctttgcgcagtacggcgaggagcaggaatcgcatattttgctgaaggacgtgaccactcggcctttgattgacattccaaactgagtatgctgctgaactaggaggtgcaccaggacgtcggcgtcgtcgttctggccgtcttcgatgaggtcgtctaggtgcagctgccgcagcgtcaggtcgaagtcgctgctccactgatcccctccgccgcacgacgtcccgacggacacgaggctctgccgcgaccccggccccctcctgcggctcctcctgaggttctgcgtctgcgcgatctccggttgcttcggtgacggctccgcggcaggctcgtccgggcgcccggctgcaggcggctgcgagtgggcggcggcgaagcctctgcacctggcgccagcggagtgagtcctgcagctcgggagctgcggcgtgatcggcgggttcggcggcagctgcagcctcaacgcggggctgcaggctctcgccatgatcgattttctctcgcgctcccccaagctgaggctccaccccggggatccactagttctagacgcc

SEQ ID NO: 10165 - DNA, 955 bp, Oryza sativa
  unsure (1)..(955): unsure at all n locations
  Clone ID: PAT_MRT4530_16512C.1
ngaaagaaagaggagcagaagcagataagagaagcgcctgtcctcctctccggcgaagcctctgcctcctctccacttcttctagaaccttccgcgcttccgtgctccccaccgccacctcgcccgctcgctgtccccagatggccccctccctcctcgccgccgccgcctcgcccttcctcctccacggcgccgccgccgccagtggcagccgcaggccgctcgtcgccgccgccgccaccggccgccgcgccgcctcctccctccgcgtcgccgccctcaagtacgacccttccaaggtggcgccgcagtccgaccgggtgctcgtccgcctcgaacagattcctgagaaatctgttggaggagtcctgctgccaaaatctgctgttaagtttgagaggtatttgatgggtgagattttgtctgttggtgctgatgttaatgaagttgaagctggaaagaaggttctcttctctgacataaatgcttatgaggtggacctgggtaccgatgagaagcactgcttctgccgtgagtctgatctgttagccgttgttgaatgagtttttactccaaaatcggagtgtccaattccacaggctagaacaaatcccaaatttattatctgctatgtgatggcgatgagttgaacaatttgatatgtcattctctacaaatgaattttggcttctaggagtataaattgggacagcaaaaaaaaaaaaaagcagtcttattcacagttacaccaatatactgaaaaggacgacaactcacgggccgtcgttttacaacntcgtnactgggaaaaccctggcnttacccaacttaatcnccttgcagcacatccccctttcgccagctggcntaatancaaaaaggcccgcaccnatcgcccttcccaacanttgcncaccctnaatggcaaatggcaatttntaanctttaatntttn

SEQ ID NO: 10166 - DNA, 587 bp, Oryza sativa
  unsure (1)..(587): unsure at all n locations
  Clone ID: PAT_MRT4530_16513C.1
ggagcagaagcagataagagaagcgcctgtcctcctctccggcgaactcntgcctcctctccacttcttctagaaccttccgcgcttccgtgctccccaccgccacntcgcccgctcgctgtccccagatggccccctccctcctcgccgccgccgcctcgcccttcctcctccacggcgccgccgccgccagtggcagccgcaggccgctcgtcgccgccgccgccaccggccgccgcgccgcctcctccctccgcgtcgccgccctcaagtacgacccttccaaggtggcgccgcagtccgaccgggtgctcgtccgcctcgaacagattcctgagcgtgaatcgaaacatctaggtttaggtggaatgctgaaatctgttggaggagtcctgctgccaaaatctgctgttaagtttgagaggtatttgatgggtgagattttgtctgttggtgctgatgttaatgaagttgaagctggaaagaaggttctcttctctgacataaatgcttatgaggtggacctgggtaccgatgagaagcactgcttctgccgtgagtctgatctgttagccgttgttgaatga

SEQ ID NO: 10167 - DNA, 338 bp, Oryza sativa
  Clone ID: PAT_MRT4530_16514C.1
aaacacgggggccaaaacgggtacccaagcaaaacattttaaaaacccttaatttatgattcaaacggaaccaaaccaacttgaaaaaacggggcttttataaacaaattttttttgggggtacaaacaaaaaaacaaacttcacgattggggaaaaaacttttcgagcccaaacaaaacaagttagagggggcaaaagaaaaccgacaaacgattttgggaatttttttcgctgggacgggcccctaaaaaagggaggccaaagccccttttgggctgttaggcggttagctggatcataccttaacagaccttgaaaaaggtaaatgaaccccccc

SEQ ID NO: 10168 - DNA, 1261 bp, Oryza sativa
  Clone ID: PAT_MRT4530_16515C.1
ataattctatggtttctaattctttttttttttggacagatggaatttatttactaatatgtaatatacaacggtgtcatctttcgtcagttcacatgtcaccggttgatacttcgatacagcgaagcttcggtttaatcctgggattagctaggtagtttaaacactgacgaccaaactgggcttgaatggaaggcagtttcacctctttcctacaaggcgaggcaaattgatctttgctttgacttatgcaacaggagggcatgacttggtgtcatctgtggtatcaacatcagaaggcggcatgaactgccacatcggaaatcctgggtagccaatcacaggcatcatcagcttctgcccggcagcttgcccttgaggagcagtgaatgcactggctgggataaccggagggtgtggtacgaagcttggtcgagcattcaggaactttatctgctgctccaggctctctttctctgcttcagcttttgctctttcacgcagtgtttttctcagccttcaggtgcgtgcgcttggatggcctgacagaagcacaaattgacagtaagctggaggagcttgccaaggctggggggtcgcttaaacctaaataatgtttgcttagccaacctgttcagctttaattatttccaaataagagaaacgcatgcggaggttgttctttcatatgatctaagtactatgacatgtcaaattaagcgctgatctttacaacctactgctaggaatgctactgttttctcttgctcttcgttacttcgtatattgtcctccagtatgtcatgtaaccatggcatcgattctatggtctaatttttctgcacctggtaatgtcatcagaaacttagacacataagcccatgttcttgatgctttgttgcctgatgcctttcaatgatcaaaaaaatttatttgccctcgggcttttgccatgttcacagtccacagagccattgatttcagcacaggcgttcgaaaccgcggtggcaggggcgacgggctactgcggcggcgccggcgactgtagccccgcctgcggaggagcgggcgtcgtccagtaaaagcctccggcgggggcggcgtcgaagccggcggcggcggcgaggtcgtccatcagaggccagtcgaagacccacgtggagccctccggggagcccatggctgcgggggggtggggccgctccccgtgaccgatttaagaggccccaccaggctagggtttcgaggtcgcgaggaacga

SEQ ID NO: 10169 - DNA, 1647 bp, Oryza sativa
  Clone ID: PAT_MRT4530_16516C.1
atggagatggagctaccatcatgggcctcagtactggtcattgtgctcgccgccgtcgtcttcctcctcgccaccattctccgccatggccgacgcgcgtataggctcccaccagggcctaacccgtggccgatcatcggcaacctcaacctcattggcgcgctgccacaccgctccatccacgagctctccaagcgctacggcccgctgatgcagctccggttcgggtcattccccgtcgtcgtcggctcgtcggcggagatggccaggttcttcctcaagtcccacgacattgtgttcaccgaccggccgaggaccgccgccggcaagcacaccacgtacaactacaccgacatcctctggtccccctacggcgcctactggcgccaggcgcgcaagatgtgcgtcaccgagctcttcagcgcgaggcggctcgagtcgttcgagcacatccgcggcgaggaggtgcgcgcgctgctgcgcgacctgcacggcgcggcggcgcccgtgctgctcagggactacctgtccacggcgacgctcggcgtgatatcgcgcatggtgctgggcaagaagtacgtgggggttgagggagcttctgccggcaacggcggcggcggcgaggggacgagcccggcggcgacgccggaggagttcaagatgatgatggacgagctgttcctgctgagcggcgtgctcaacatcggcgacttcatcccgtggctagactggctcgacctgcaggggtacatcaggaggatgaagagagtaggcaagaaactggatcggttcatggagcacgtcctggacgagcacgacaaggtgcggcggcagcagggtgataggtttgcagcgagggacttggtcgacgtgctcttgcagctcgccgatgaccctaacctcgaggtccaactccggcgtgataatgtcaaggcacttactcagcttctttactcaggtgatcgtcctttccatggcacacggtgtaagctagctcttccatatgtggtgcaggacctgatcgccggcggcacggacacctccgccatcaccgtggagtgggccatttcggagctcctgaggaagccggagatcctcgccaaggcgaccgaggagctggaccgcgtcgtcggccgcggccgcttggtcaccgagacggacatgaccagcctcccctacgtggaggccatcgtgaaggagacgatgcgcgtgcacccggtggcgcccctgctggcgccgcacgtagcccgcgaggacgcctccgtcggcggctacgacatccccgccggaacgcgggtgctcgtcaacgtgtggaccatcgcccgcgacccggcgctgtgggactcgccggaggagttcatgccggagaggttcatcggcagcaagatcgacgtgaagggacaggacttccagctgctgccgttcgggtccggccgccggttgtgccccggccacagcctcgggctgaaggtgatacagctgagcctcgccagcctgctgcacggcttcgagtggaggctccccgacggcgtgtcggccggcgagctgagcatggaggaggtcttcggcctgtccacgccgaggaaggttccgctcgaggtcgtcgttaagcccaagctgccggcccacctctataccgggccctga

SEQ ID NO: 10170 - DNA, 363 bp, Oryza sativa
  Clone ID: PAT_MRT4530_16517C.1
atgccgttcaccggccagttgtcgctggtgatgagcatgattggcatgaaacgtgaggtcggtctcacagaaggttaccgccatgaccgcaacggcgcgggcgaggcagccggcgtcctcggatggcgacgggccatctcctccagcgcacgaagcgtggagtccctgctgactaccaagttccccagcgccctgcatgtccccgccgtccatcctcgcccgcagccgcgacatcaggtcgcccaagtcgccgtgcgcgacgtcgaacgaaatcacgtcatgtggaaaggtggcaggccaccagatagaacactcgccacgcgggaggacttcatggttgatctcgctcagctggtagcttga

SEQ ID NO: 10171 - DNA, 437 bp, Oryza sativa
  unsure (1)..(437): unsure at all n locations
  Clone ID: PAT_MRT4530_16518C.1
ctgaaatcagccaacagatacactagaaacaactgaaattgttacacgtggagagtgattatactccgtgccattgatggtaactagtatagtcctgacgatcgatcgatgatcggtgtacatatctatctatttatctagaggggccgttcctcgtcgtcgacggcgaggatggtgctgaggttcatggggtgcatgtattcggtggagccgtgcatgaactggccgacgacgatgcggttggccttctccgttgggtggaacgcgtcccagaacgcgaacgcctccctgtcgtcgcacacgttcgacgccgccgtgcacagtccgatcccgttgtacggcccctgcccgcagcacgccacctgcacgttcgtaaaaccgtagttctgggggttggagatgtagtcnaagttcatgcgggtggtgttggcggggac

SEQ ID NO: 10172 - DNA, 285 bp, Oryza sativa
  unsure (1)..(285): unsure at all n locations
  Clone ID: PAT_MRT4530_16519C.1
ccgcatggagaactgnggtttttcnngggattatggtgttgggtaataanattgggcancttgagcancctgccttgggtgaatgatgatatncggntcttctntgtaccctgggcaaatttctgnctttntcaancagtaatagtncggtntgaantccantgtctgtanctgcaaanagtttgttnnnaatcagtgatcttttgncgtaatattntcatatntttatacgngtttcagttcgtcaaaaaaaaaaaaaaaaaaaaaaaaaaaaaaaaaaaaaaa

SEQ ID NO: 10173 - DNA, 823 bp, Oryza sativa
  Clone ID: PAT_MRT4530_1651C.1
tcgccggctcataccctctctcctatcctggtcatcgataacgtcagcgtggatgcacaaagtctctagaaatgtaaattgcacaaatgtaaatgagacaatcaaatgagaaaaaggagaccagaaatttttcaccgaggttcggaaactcgccggtttcctactccccgttgaggcgagcccaactccaccgctcaaccacgaagccaccgcacgcccccttctcaaggggtgagcaaggcgggagccggcccacggagaggactacccaagcctcgatcactcggggtagttctttcttcactccgaaggtggtgccggtcagaccgtgctctaaaactagccgttgtagggttgtcattgggccccactgcctcgactggtcagaccgacatggggtggccggtcagaccggcctcggctcggttagaccgccaccagctcggtctgaccgaatacggctccggcggctcgggattggccatcccagagcatgccatcccggccatatgaccggccggtcagaccgggcaacacctgccggttagaccggctatgtggcagcggtcagaccggtagtgaccctgcggtcaggccggctgcataggccggtcagactagccattaggccatggtcagaccggctctggtcctgttacagtgacaggggttcgtccaatccacaggctaccgatttgtagtattttctaagagcatctccaacagcctctccaaatctaactctccaaacactcatatagccaactctccatttgatttggctagtcaaactagttgttcactccaacagcctctctatcta

SEQ ID NO: 10174 - DNA, 159 bp, Oryza sativa
  Clone ID: PAT_MRT4530_16520C.1
atggcgctcacgtcgccggcgtcgcgcctcgactttccagagcaccacggaatgggaggcggcgtccttcgcagtctgccccacggaatgggctgggccatgttgcgcggcccaagatccggtcttgtttctagcattaacgtgcgagcagcccaatag

SEQ ID NO: 10175 - DNA, 540 bp, Oryza sativa
  Clone ID: PAT_MRT4530_16521C.1
agcatatatacatatggtgaataaatgatgaacttcaatgttcttctgaataaaaaaaaaaaaaaaaaaaaaaaaaaaaaaaaaaaaaaaaaggacaaacgatctaaaatttacaaaaaaaacaaacacaaacatgcaacaaaaataaacactaatataaagacacctaaaaaaaaaaaaactgaccggggcgccccttttgagggtcctgggtttccctccccggtttcccaacttaatcgcttttctttacgtccccctatttccatttccctgcccgccttttaacacccgcgccgttggaaaacccctgcggttccccaccttattcgcttagtggcactcccccttttcccccgctttattaacaccaaaagggcccgccccattcccctttccccccttttctcccccttgctttgcaaccggccccccccctgttccccctctttatccccccgggttggggggtttccccccaggggccctgttcctttggctccctccttggcccccattctttgcttttcgtccctttct

SEQ ID NO: 10176 - DNA, 505 bp, Oryza sativa
  Clone ID: PAT_MRT4530_16522C.1
aaaaaacaaaaaccccttttagcacccaaagcccgactttaaaaattaccggaaaaaatttttttgggcttgaattttggaaacaaaaaaaacaaatccttttccagctacaaaaaaacccgcttaacaacaaaaaattttaaagggggttaagaaatctccccctttttttaaaaaaaagctttttttggggggcctaggccacaaaaaccctttcacttaagggggactttccatcctggaaaacaaaagctcccaaaaaaaatttacttggccttgccgttttcaacagcagcaggggggggggtaaatttatcccaggcctttatccaggggaccatgggattgggaagcttgaaaaaaaaggggggaattttgccgaatttttccctgacctgctcggggagggaaagggaacccttttggacgggggccccccccttggggaggggggggttttggaaaaaggggaaaatttcctcctgccaaaaaaagccccgggcca

SEQ ID NO: 10177 - DNA, 465 bp, Oryza sativa
  Clone ID: PAT_MRT4530_16523C.1
gacgaacacggagatggctatagcgctaattgaactatgaacacgtggacaggattcttaccatatcaattattgcaggccctggagaaaggctataacgtgcaccggagggcatacaggtacttacaggaagccataacagagtccatgcacatggaaaataagttgatacacataacgctaattacatttgcaaccatacgcgaagccacctaaattgtcccaagctagatacacaatatgtggcgaaatgtgatagacaacacgaaggtgacagttaaattgcagacctacacctagctatatgatctagggagcggaatacagtggccaggtcactatgcaaggtgggtaatgaggagactgggacatactcaccgtctgccgggtccaaaggctattgagagcctaggcgatgaattagatcacctatacgaggctccaagacactggctgttatttttt

SEQ ID NO: 10178 - DNA, 201 bp, Oryza sativa
  Clone ID: PAT_MRT4530_16524C.1
gcccggcgatacagaatttctcagaaaccgccgagtctctaggttccgatgactatgtcttgatctctttaacgctctttcactatgcccttgacgatcaggaaccttatattattgttcctccccctaaatgaagtttattgatgactagaactgccattatgaagttgttttagattctcctaagctgtcaatttgacc

SEQ ID NO: 10179 - DNA, 243 bp, Oryza sativa
  Clone ID: PAT_MRT4530_16525C.1
atggcgccggagcggcagattggccgcttccgcgttgccatccgctttgtcttcggcgtggcggtggcggtggtggtggcaatggcggccgtgctcacggccggcagcatggccgcggcggcgccgaacggcctcacctacaaaggcttcattccgaatcagcccgtgtgcgctcggtcgtgcgtgccagggaggtccaacttgccgcagaggggttgcttgaagatctaccgatgccggtag

SEQ ID NO: 10180 - DNA, 837 bp, Oryza sativa
  Clone ID: PAT_MRT4530_16526C.1
atggtggaggcaatgaatagtgtggcaaagttagacgaggggctgacaaaggaggagaggaacctcctctcagttggctacaagaatttgattggtgcaaagcgtgcggcaatgcgtatcattggatccattgagctaaaggaggagacaaagggcaaggagagtcatgtaaggcagactgctgagtatcgtcgcaaggtggaggctgagatggataaaatctgctgtgatgtcataaacattattgacaagaagggagattactaccggtaccttgcagagttcaagactgggactgagaagattgaagtgtctgaactgtcactcaatgcttatgaggcatgtgatccttttttcattttcaacttgtttctgttttctcaagtcacttgtttcattgagttcaccatttatcaagtcttggttgtatatactgcttccaaaactgcgcagacagatctcactccaactgaccctatcagacttggtttagctctgaatatatctgtcttctactgtgagatcatgaactcacctgacaaagcttgccaacttgctaagaacgcctttgatgaagctgttgcggagcttccctccctcagtgaggagaattacaaagatagtacactgatcatgcaacttctgagggataatctagcactgtggaattctgatatggctgatgatgcagacgatattagggaacgaacagatacaactggtgctaaaggtgaccctgcagcgtgccaggtgcgcattgatacgtgttgccatctaacttatgagagctcaccagcgcggtatgtatgtgaccatgttggttttctagccctgtga

SEQ ID NO: 10181 - DNA, 447 bp, Oryza sativa
  Clone ID: PAT_MRT4530_16527C.1
aacaacaaaggggaactccgtccctaattttatttttttttgttatcattatcacaaacattgggaaagcagcttccaaacatgaaaactggtagctgggcctagcaaacatggataattaattaagcaagggcccaattaattaattaatccctaagggaaaaaattaatttaatccatgccccccccaaaaatgggggaggcaaaggaaccggccgggggctgaaggttgcaccggccgtaatccgtaagggcgctcgccatcccgggaaacgtcggggggtccaaccccggggccccgtgctgggaaaatcaacccgggaaacccgggcccccttttccgggaaccaccccgggcacaaaaacccttagggggttgaaccggccctgaattggaacgggggggaaactcccgggaaacacggttccagaaactcccgggggggt

SEQ ID NO: 10182 - DNA, 192 bp, Oryza sativa
  Clone ID: PAT_MRT4530_16529C.1
tctttttgttgacgtaataccatccattttttttattgtcgacgaacttatcaaataagctctagatacatatcttgtgcgtatatagccggagatcctatctcacatatcctcacccaacgtacattgtcgtacttttacaatcataaccgttcggcttagggcagggaagaaaatttcaccggtaaggat

SEQ ID NO: 10183 - DNA, 616 bp, Oryza sativa
  Clone ID: PAT_MRT4530_1652C.1
tgggagccatgtattagaatatttcatatgcgtctaaatttttttttttttttggggcccattaagctacaaccatataccttaaagactaagttaagaataaagcagggagggacacgcctatttcttttttttgataaagcagatagagaaataaaccagacgcgcacgacccgatcaatggaccacagtcaagcgtcggaaacgactcgatgagaaaccgagggcacaccgcgaacaggtctagccgacgggagaccgccgcgggagcccacaccatcgggaggagccaagtggccacatacgtctacgccggacgctcaggccgcaccggagcccctgaagcgcgcattcaaggccatacgtgccacaaacataagagatatcgtgcagtcaggagcgggaatgggagacctgtgcccccaagtaatggtcaccgaaggaggcatagaagccaggaagaccaagaggagagaggacgccagcggcaagcagccactacgctctccaatcctttcttagcatatacactctgcctgcaccacgggggggagaacacgcgagcagatgctcgagggagatgtgcagaaatgtaaggtaggagagcaagagcgcg

SEQ ID NO: 10184 - DNA, 530 bp, Oryza sativa
  unsure (1)..(530): unsure at all n locations
  Clone ID: PAT_MRT4530_16530C.1
tttccccccccctttcaaccgccgtggccgccgctctaaatactggatcccccgggctgcacgaattcggcacgaggaaaccacacgtacattatattaacaaccctgccacgcatgacgacatggaccacgactacatcatcacatcaccatgatgatacatgatccatccaagctagctagggatccatccaacattgatccacacacgcacacactgacaactactaccaccgttttatttacgcgtcacaacaaaacgcaaggcctgcctacatataactgggtactaatgcaagcaaattaagcctccatcaaagctctgatccacagtaccagcatccataccataaatcctcatgcaccgggcgacaccaccatccattccctttgcacgggcaccaaggagcagcccgcctgcagctggtgccacacttgcaggttgttgcaaccgcagccgccgttctcgccgcttctccgccgccatctccatttcctcccgaagcttccccctttgttngggattngaa

SEQ ID NO: 10185 - DNA, 351 bp, Oryza sativa
  unsure (1)..(351): unsure at all n locations
  Clone ID: PAT_MRT4530_16531C.1
cggcacgagggagagagagagaactagtctcgagtattttttttttttttttggggacaaggccgctaggttccaggccgtcaagaantcttcggctgattaagcacttggggattatattttgttgtgatgtgattaaaatcgcgtgcgctaatcggggtttgtaactttgtatacttgtttggtttgaatcaatcgtcgtgtagtacgcagggttccccaaataaccgtgttaggtgggattaacgtcacttatggttgggtggttatcacggtaactgtgcggttaccgtgagatatatcgtggtttcgaaaagtataataatcgtgtgataaccatatggtttctgt

SEQ ID NO: 10186 - DNA, 342 bp, Oryza sativa
  Clone ID: PAT_MRT4530_16532C.1
atgggaaggggacctgctcggggtggtggaaccggccagatccatgctggccggccggatctggcggtggggcagccagcggcggggctgagcgatgcggcggcggtgtctggtagtggtggcagcggcgtcgagaattggcagcggcggaggaaaccaccagatccgcgcctggatctggcgggacagcagccggcggcaatgtctggtggcggggatggcgagggcggcgaggtgatggcggcgctcgacgacggcgagaaggtgcgggaggatggcgagatagcggcagggatggaagggcaacagcggctgcggtggtggcgaccgtcaccatggtag

SEQ ID NO: 10187 - DNA, 218 bp, Oryza sativa
  unsure (1)..(218): unsure at all n locations
  Clone ID: PAT_MRT4530_16533C.1
cgctctgacctgactacgacctccctaccgacttttacctactacgggaactttggacccttcgacggacgacacttcggnaccgacggcctgcaacctgcctcaacgacacctgtgtgcctgtgcactgcactcactgctgtgcctacaacctgcctgtgcaacattgcctgccactgcactcaccccttccaactgttgctgtgctgatcactgca

SEQ ID NO: 10188 - DNA, 1293 bp, Oryza sativa
  Clone ID: PAT_MRT4530_16534C.1
atggagctcacgacggcgctgcccgcctcgccgccgccgccgccgccgcaagaggacttccgattcgacggcccggcgttcagcgccttcccggagggggtggcgtcggctggcaccaacccgttcttctccgccgacgccatggactccaacccgttcttggccacggcggtgacggcgccaccgtcgcccaacccgttcgagctcaaccaccagtccgcatcccccggcgccgccgacccgttcgacctcttccagcacttcaccagcgcgcccgccagcccggcgcgcgccgccgccatatacgcgcagttcgacggcggcgtcggcgacgggaacggcgccgaccacgacatggccgtcgtcggcgacgacgacgacgacttccagccccgcgcgtcgtactcatctggcactgccacctccaccgtgccgttcgactgggaagagaagccggggaagccgaagccgaagagcgagctcgccacctgcgcagccgccgcgacgtcggccaacgttggcgaggtggacgacgccgacttcgacttcggcgtcctcctcgacaagagcgtgcaggtgcccgaactgacgacggccgacgaactcttcgacaaggggaagatccggccgctcaagccacctccgggtctgctcgacggcggcagcgtcgcgtcatcgccacggtcaccgatctccaagtcgccgatgtggtctcccagactacgcggcaaggtcggttccggcgtcgactttgatccgttctccaccgccctggcgaaggcagccaagggcccctcccctctcggcgccggcgccaaagacaccgccgacgccggaacagcctcctcgcccaagaagccagaccccgtctccgtcacgtcgccgcgctgcattcctccggcgacgatgatcaatggcgggaggaagaagtggcggctcagcgacatgctcctgttccgcaggtcagcggcgaaagctcgcgccgccggcgccaacatcagcaaggagccggtgttcaagtactcgccggtgcaacagctcgggacgccggtcaagaaggcgaccgcgggtcagtccgccgccgccaacggcgatgtctccgccgggaagcacaagaagcagagcaagaaggctacagcggcggaggacggcatggcatcgccgcaccggcagagcgtgatggggtgcgtccggctgaaccccggcctgcaccggctggccaaagggttcaacggctcgtcgctgcacttcggccaccgtcgcgccgccgccaggtctgtgatgaacaggtaa

SEQ ID NO: 10189 - DNA, 619 bp, Oryza sativa
  Clone ID: PAT_MRT4530_16535C.1
gtgcgttcccgtccaaagccgccgccgagtgcgatttagcttctacccggggtgaatcgcgccaattcttgccgcacggttagattgaagataaacggtggtttcccctctcacaattcaaaccattcatccccgagccggccgttttcaccctcgctgccgccgcgcgtcgcgcccggattggcaccaacatgtcgacagccgatttcactcgcggtcaagtcaatctttcaccgtatactaagccctaaccgaagccctgcgccgagttttacctcgccacaccaagccgaccaccgccgcccccgcgctgctctgttcttcgccgccgagaagttttttcggccgcaattcttcatctcggcatatctcgccgctaggccatccacacaacaaattaacccctccgccgccgctcgccgtcgccggagaaccctagttccctcccctcctcggccgcaacccctttccccctccatcgccgcctttggggaacggccggaggtaggtagaagaagagaagagagagagactgacaggtcttgaggattcttctgactcaatagataatatcaatcaacctcaggacatcgagcaaggcaagttaccatataccttt

SEQ ID NO: 10190 - DNA, 390 bp, Oryza sativa
  Clone ID: PAT_MRT4530_16536C.1
atgaatggaatagtgacctctatccctagtacaataggtcctcacaaaaggactccgacaaggaaccatcgtctgaggaggaggatgatgacgagacccatgatgaggacgagagcagcggaggaggttgtggaggcagaggtaaccaaggtgggtgcagaagcgaaggccgaggagagggcctcgattgccatggtcatggcggctatggcggctagcacgagtgacactgttgaggaggagggtatggctggagccagagcaggtgccaaaggaggcccatgtgcagtcgaggtgccggagagggcccgatgcgccgtggtgtcagagtcagccacaagcacgcagccgagacacatgagggcggcgctaatgcagccgtcttgctga

SEQ ID NO: 10191 - DNA, 507 bp, Oryza sativa
  Clone ID: PAT_MRT4530_16537C.1
ttagcgtagcacgtaggagtacgcgtatatggccggcggcaggttattgccgtcgacttccggcagcaggcagccatccatggccggcttagacggcggcggcgcaccaccggcggcgtgtgacccaaacaacttgccggcggccatcgttcttgtgtttccggtgatggtggtcgcgctgctgtgttggagggcggcgaggacccgccggaacaaggacgagtgccggcggctggcccggcgccggcgctggcgaaggcggcggcggtgtcggccggcggcagggcggtgctcgccgggcaggtggacgcgtgggtcaaggaggcggagagagtcgtcctcggctgcacgagcagccgctggccctgccggttcgtgaggtgcgaccgccacggcgagcagctgagcgtggtgaggatgaacctggacgaggcgtacgaccgcatccttcccgtcgtcgcccagatcgacaccgcgcaccgcctgcatcacttgctccagctgcag

SEQ ID NO: 10192 - DNA, 646 bp, Oryza sativa
  Clone ID: PAT_MRT4530_16538C.1
cttgttatcactagaatcctccaacttccccttctgttgcatccccatgctaaaataagaacagcctagccaaaaccctctattaggaacaacagaaagccttaaccaggagcaacactgatgggctccattggcaacggccggaatggctcggaggttggcatacagatcccagcgatggggaacaaggaagtgctggagcgacctgccataccaagatggccacggctaggcgtcgtcatggtggcaactagagctgttgccctggtgatggcagtgctctcaatggctctaatgatctctgccaagcagcggggtagtctcaagatcttcggcatcgagatcccgctttatgccaattggtctttctctgattccctagaatacttggttgggatgtctgcagtttcagctgcctactgtctcgctcaacttttattgactgcacacaaggccgtgaagaatgcccctgtggttcaatccaggaactatgcctggcttctgtttactggtgatcagatcttcgcatatgcaatgatgagtgctggatcagcagcggcggcagtcgcgaatctgaaccgcaccggcatccggcacacggcgctccccaacttctgcaagccactgccacgtttctgcgacttgt

SEQ ID NO: 10193 - DNA, 159 bp, Oryza sativa
  Clone ID: PAT_MRT4530_16539C.1
atggtttctccaccagtgttaactcttgattattatttcaattatgatggcatgtgcaggatgctcaatgatggtctggacggaagacgcaagaactggattgtgatgattgaagatattaatgcggaagaacaagatattaatgcggaagaacagtga

SEQ ID NO: 10194 - DNA, 4125 bp, Oryza sativa
  Clone ID: PAT_MRT4530_1653C.1
agccacattagagaagtctatgacatttaactcattcctcaacttgcaaaagtgggtttcatcaagaggcttggtaaagatgtcggctagttgatcctcggttcttatgtggctaatgactatgtcacacttggcaacatggtgtcttaggaagtgatggcgtatgtcaatatgcttggttctagaatgttggaccgggttattggctatctttatggcactatcattgtcacataggagtgtggttttggtgaaggatatgccatagtccaacaatgtttgtttcatccaaagcaattgggcacaataactacccgccgaaacatattctgcctcggcggtagagaggtctacggagttttgtttcttggatgaccatgacacaagggatctaccaagcatttggcaactaccggatgtgctctttctatccactttgcaaccggcataatccgaatcggaatagccaacaagcttaaacttagcaccttttgggtaccacaagccaatagtacaggaatgctttaaatatcttagaatccttttcacggccactaagtgacactccttaggagcggcttgaaaccgtgcacacatgcaaacactaaacatgatatccggcctagatgcggtaaggtaaagcaagctaccaatcatagaacgataaagctttaaatctaccggtttacctccctcatcaaggtcgaaatgcccgttggttgccataggtgtcttgatgggcttcgcatcctccaagctaaacctcttgagtagatccttgatgtacttggtttggctcacgaacgtcccatccttgagttgcttgatttgaagtccaaggaagaagctcaactctctaatcatggacatctcaaattccctagacatcatatcaccaaattccttgcaaaatacctcattagtagaaccgaatatgatgtcatcaacataaatttgacacacaaagaaatcatcaccaatgatttttgtgaaaatggtggtgtcaacttttccaattttgaaatcatttagaaaagcacttttcacatctatttgaaatagttttatatcaaagcatgatgcaaatgtaagaaggatgcgaatatcctcaagtcttgccacgggggcaaaagtttcaccgaagtccaaaccttcaacttgtgtgaaaccttgtgccactaaccttaccttgtttctcaccaccaacccgttctcgtcttgtttgttcctaaagacccactttgtccctatgacattgtggtctctaggtctttcaaccaaagtccacaccttgtttcttgcaaagttgttgagttcttcatgcatagcattcatccaatccggatcacaaggagcttcatctacatgttttggctcaagacaagaaacaaatgagtaaagttcacaaatcgaagcgacacgagatcgagtttgaacacccttactaatgtcacccaacacttggtcaattgggtgatccttggaaagagcggtgtgtatccttagaggcataggtggatcttgtgccttctcctcctccacttcaacttaagcttgacttggcatagcggaagtagacggctcatcttgagtggaggtggatggcttgtcttccacttcaataggcttgacatctccaatggacatgttcttcatagctctcatcaagccttcatcacctacatcatccaaattctcatgtccctcttgggagccattagtctcatcaaattgaacatcggcggtttcttccacaatacctttgttcttgttgtagacccggtataccttgctatttgaggcataaccaagatcatcacaatagtcctcgatattggtattcttaaactcggaaccattgtcacttcttattttcacaagagtgcaattaaatttattttgggcccttttgcaaactttttgaaaagctcggcaacgatagacttgacatgcaaaaagaacacccaagtatagcgagaataatcatcaacaatcacaagacaatgactattaccaccaatgctcttataggttgttgggccaaacaaatccatatgcaagagctccaatagtctcgatgtagacatgatactcttagtaggatgagaacatgcaatttgcttgccggcttgacaagcactacaaagcttatatttctcaaacttcacatctttcaagcccacaactagatcacgttttgaaagtttgctcaattgattcatgccaacatgggctagcctcctatgctaaagccaacccaatgaagtttttgcaactaaacaagttttcaaatttgcttcactagaattgaaatcaaccaaataaagatttccatatctaaaacctttgaatacacaagacttgtcaagaaggctagaaacaataacttcttgcgggaagaaagcacatgacaagccaagatcacaaatttgagcaaccgaaagcaaattaaaatttagagatttaacaagagagacattatcaattgacaaatcattggagatagcaattttacctaacccaattacctttcctttgctattgtctccaaatgtcactttctcttgttcatttcctcctacctcaaatgtggtgaacatagccctatcatgtgttgagtgcatccactgtcaagcacccaatggctcccaccggtgcggtagttcaccaccgagtataggggaacccacatatctagcaacaatgctaccatcatgagccttccattgctcttgacaaaacgagtggcacagtgagaaggtttcttacccttctttggaatgaatccaagtccctccttgttaaggatgcaccattgctcactcaaaatcttgtcaagagtgttcttacccttgaagcacctctccaagctcttgttgagcttagccacttgctccttaagctcattgttctcaacaacaagtgagacatcacaaatagaaacacaagagctagatctagagctagacatatccacaagatcatcacaagaggtagaaatgctagatgatgcaacatgagcaatatggcaagtagcactatcatcaagcaaatcacaagatatgccaacatcaatgagagcttcatgttgagtagtggaaaggaggttgtcatgagcttccttaagcttctcaggagaaatggtgagtctctcatgagaagtctttagctcctcatacaagacctccaaagaagcatgatccttctttagggccatgaacttgacaatctttttctcactataagcatggagctcctcaaacatactcacaagctcatcataggaaacatcattacaattatcattactctcactatcactaagagatgttaccttagaggaaccctttgccatgagacaaagtggagcgaagagtgatagagcctccttgatggcaacaacggccatcttcttcttcttggagcttgcatcatcaccaccttcttcctcggacccggatgaggcggagttcttgagcttcttcatgagcttgtatcctccactcttcttcttggatgacttgtctccatcatcatctttggaagggcacttggaagcaaagtgtcccttctcaccacactcaaagcacctcaagttggagagagtcttgttgggtcttctatttcttctcctatttgagtttgagccccttcctctctcctttctccttcccaagagatcattgaaccttctagcaagaagggcaatctcttcctccaagtcctcattggcttcattcaccttgcccttgcccttgtcctcaacttcagcttggagagcaatgcacttcttggaaggtgaggcttcctccatctccttcttcttcaacttgtacatgtcattggtgttgatcttccccaagaggcttgccggtgtcatccttgacttgtcggagttgatgagcatggtgacaagggtctcatacttctctggtagagccctaagcatcttttgggcaacctcaagatcggtgtagtttgccccaagccccttgagatcattcacaataacattgagcctcccatacatgtcattcacactctcatgaggcaacatggagaatgtctcatattggatcttgacgaaatgaagcttggcatccttgtactcacttgtgccctcat

SEQ ID NO: 10195 - DNA, 489 bp, Oryza sativa
  Clone ID: PAT_MRT4530_16540C.1
atggcggccaccctcccgtacgccctccgcaagcagctcgaagccgccgacaagtgcttctccgacggcaacatcaagggcggcaagatgcacgccgacatggccgccgccctcttctcctccgcgcccgaggcccagtgcgcgcaggccgccttcaaggtccacgccgccgccgccgccgccgccaccaaggacaagaccaagaccgaccactacgccgtcctcggcgtcaagctcagcgccaccggtaaaccggacgccatcaccaccgacgcagtcaggaagcagcacaaggcgctctgcgccatgttcgccaccgccaaggacaccagcgccgccgtggccgcctacaagctcgtcgacgaggccttgtcggcgctcacggacatcaagaagagcgacgtgatggcgccccctcctccaacgtcgacgtcgacctactcgtaccagcaacagcaacagcgatcaacgcttatgtctgtttactag

SEQ ID NO: 10196 - DNA, 2158 bp, Oryza sativa
  unsure (1)..(2158): unsure at all n locations
  Clone ID: PAT_MRT4530_16541C.1
atcaggaatccggagcccccctcgtgagttcgccagcgataagactcgtagtcccccccgcctggcgctccccccatccatcccgcgagcgcgagcgagccgacgcgccgccgttcgtcctgctgcttccgccgcgtcgtggtgagcacatcatccgccgccgccgccgatccccatccatcctcgcgagcgatcaggggcgccgtcgtgttcgtcctgctgctatggcgacggacttcttctggtcgtacacggacgagccgcacgcgacgcggcgcagggagatcctggccaagcatccccagatcaaggagctcttcggcccggacccgctcgcctttctcaagattgctgcagttgtatcacttcagctatggactgccacattactccgagatgctagttgggtgaagatactgacagttgcatatttttttggatcctttttgaaccacaatctcttccttgcaatccacgagctcagtcacaatcttgcgttcacaactccgagctacaatcgctggctaggtatatttgctaaccttcctatcggtgttcccatgtccattacattccagaagtaccacttggagcaccaccgtttccaaggtgttgatggaattgatatggatatccccagccaagcagaggcgcatgctgttaagaatactctaagcaaatctgtatgggttgtcttccagctgttcttttatgcccttagaccgctgttcctcaagccaaaacctcctggcctgtgggaattcaccaatttgattatccagattgcgcttgatgccagcatggtggtatccctgatccctcttctcgtgagttcgcccgccctcgccctcgccctcgccctcgcctgggccgatccccatacatcccgcgagcgcgagcgagccgacgcgccgccgttcgtcctgctgcttccgccgcgtcgtggtgagcacatcatccgccgccgccgccgatccccatccatccttgcgagcgatcaggggcgccgtcgtgttcgtcctgctgcttccgccgcatcctggggcgttttgtgtctgatcgcttgtcctctgtttgatctgcagagagcaaatggtgatgtcaacagagctggtgatctattgactgaacttgaacatcctatggccaagagcaatgaagttgactcaagtgttgggactattcatcccccaagtggaaaggaaaaacctccaatggttgagttaccagagtacatgcgggacgattttaatgggaaagttgataaatctgattctgcaccaaagagagagactttgaataatagagatatagaggaatttctattttctatgcttggagaaggattcaagctcagcatggacatgatccgtgaggttctaggcagctgtggatatgacattaagaaggatgcagcagtagaatgctcttctacaaagggaagctgcctagaatcacaatccacctttaggttcttgcttcttctcttcattattgaactagttgcacataatgaggaagattaccagaactatcgtagggctgcgaagcagcattgggatatgatgaagcaatactatgagaaggctgttgatgcttttagggagggtaaccagaaagaagtcgagtatcttcttggggaagtgatgaagtatctggagaagaaatcgattgtgtggactgaagaggaatccaaccctgggaccatcctcatcccaattaatcagaagcaggatcagcaggattaggttcatgtacaaaggtggtggctctcagtgacaaactgacagaaagtcgatgttcatagctgcggcatcattgatgtccattttgaaccttactacagtagttctttcccttctccttttgggtatttgaactgtggaagttacgtgcactgcattcgttttgtctgcacattgcagacatttcgaactcattattgccncctcgctagtgccagaaggaagaaagaactgaggccatggtccgacagaaatgcagcagtactagtactagtagtaacattcttgtcatctctagcatcgtgtcactacttaacagcgtccgctcggcagatgaatggtctcacttgtttaaaaaaaaaaaaaaaaaaaaaaaaaaaaaaaaaaaaaaaaaaaaaaaaaaaaaaaaaaaa

SEQ ID NO: 10197 - DNA, 480 bp, Oryza sativa
  Clone ID: PAT_MRT4530_16542C.1
atggcggcgacggcggatccgcgggcgaagctgcccgccgcgacgtcgacgcaccacctcgagccgtgggggcagccgtcgccgccgccgccaactcccttcgatggtgggatcgaggagctttgggtaaagctcatggctgcaagcggacggtgcaacgaggctgtggaacccgctacagcggacacggtggcgcccaaccgcctccatgttgtgggcggcggcggtgcccatgccgtcctcgtcccgacgccagaaagcgtgccgttcttggtggcgctcaccccggaggagattgaggaggacatctatgcgccgtcgtccccctccctcccgcgaatagccgtcgcaatcatctggacgtcgtcgtcgtccagccccgacaccagcaaccttcccggccaatctggcggcattactcctgtctccaacgccacctcgatctcattctctatgttgcccatattagagcaagtataa

SEQ ID NO: 10198 - DNA, 126 bp, Oryza sativa
  Clone ID: PAT_MRT4530_16543C.1
atgagatccggccttcacaaacttctcccggccaaccacacgcagagcggtggctcgggagtgacacctagccgtctaggagtcctcaacctccaagaaccaaagacagagagcaaagttctatga

SEQ ID NO: 10199 - DNA, 758 bp, Oryza sativa
  Clone ID: PAT_MRT4530_16544C.1
ttcctccgtttttccattcctgtcggtcggcggagcgaggggggaaaggaggagcgcggcgccgcaatggcggccgccggcggcggccacagtggggatgcccgacggtagcccggcggagctccacgacgcgggcgtgcagcgacaagttcatttatttaacacataccaccttccccggcaccacggcagcatcatgatgggccagatcaccccacggcgatggcggcagcgccgctttccgccgctgacattccaatggacggtgcaccccatcgagctgtggagctggttcggcgtctccggcggtgagcagctgagcttggcgtccgctacaccaaggtcaagctggtcggcgagttcctccagcgaagcggttcaactacggcattgtcatcgccaattcgctgctgagctatccgaggaaatccggcgacgccgtcaacgagatgacgagcctgtccaacctcaccgaggagctcacgctctacgtccccaccgttccggagccattcccacgtggacggttcgggtggccattccttcagctcaagatgttctcgcttggatcacttgtcggtcgagcctcgccagcgtcgtttctagggacgccagttgcagaaggacgcagtggctgatgaacccgcagcggcgctgctgaccgtcttcatgggcgcctggttttaaattcttcttgttttttaaataattcaggggggttaagtgatccagtaaattagtttgggatagaaaatgcc

SEQ ID NO: 10200 - DNA, 712 bp, Oryza sativa
  Clone ID: PAT_MRT4530_16545C.1
gtcggtcggcggagcgaggggggaaaggaggagcgcggcgccgcaatggcggccgccggcggcggccacagtggggatgcccgacggtagcccggcggagctccacgacgcgggcgtgcagcgaccttgcgcaggcgtcgacagggaggcgcgggcgtgtgcaggcgtcgcgggcagctggaaggcgcgaacaacgcgggcatcgacggggcaaggcgggagagaaggaggacggcggcgcaacggcggccggcggtggccggtgggcggtgggcacggaggtcaagctcccagccctcaaccgagctcgagcagaagggaggtggtgctcaccgacgctagttcatggtgctgctcgttttctcagctcgatactctcccgctcgtcaagctccaccacttgaccgaacaaatcgcggccacgctgactcaaaacagagcgagcagaaaaccatgggaggagggaaaatagcaccttccccggcaccacggcagcatcatgatgggccagatcaccccacggcgatggcggcagcgccgctttccgccgcgtcttcatgggcgcctgggcggtgacatcgtcaccggccactcgtcggtggatgcggcgccagagctggagctgctcccgtcgacggagtctgtgaacaccgtctcgctcggcgcctccctcacattccgtcctgctgccgtcacgtctccataaagccat

SEQ ID NO: 10201 - DNA, 1269 bp, Oryza sativa
  Clone ID: PAT_MRT4530_16546C.1
atggcgatgacggcggcggcggtgacggtgccgctgggggtgctgctgcggcgggaggtgacgagcgagcggatggagcggcccgacgtgctgtgcggggaggcggcgcgcagccgcaagggggaggacttcacgctgctcctcgccgaggccggggagcgcgtcgccggcgacccgtccacctccttctccgtcttcgcgctatttgatgggcacaacggatctggagcggccatgtacgcgaagaagaatctgttgaacaatcttctacgtgccattccttcaggtttgagcagggatgagtggcttgcagtgcttcctcgtgcgcttgtcgcagcatttgtcaagacagacaaagatttccaggcagtagcggaaacttctggtaccactgttacatttgtagtaatagatgagtgggttgtaacggtagcatcagttggtgattcacgttgcatactagaatctgctgatggttcattataccatttgtcagctgatcatcgctttgactccaaccaagatgaggttcaacgtgttactgcatgtggaagcaaggttgggaaactgaatcttgtaggtggcccagaggttggtcctctaagatgttggccaggtggtctgtgcttatctagatcaattggggatatggatgttggtgaatgcatcattcctgttcctcatgtgaaacaagtgaagctatccaatgctggaggcaggattatcattgcaagtgatggtgtatgggatgatttgacttttgaaatggcacttgagtgttctcgtggattcccatcagatatagctgccaatcgaattgtgaatgaagcaattcatcctcggggactaagagatgatactacctgcatcgtggtggacatattacctccagaaaaactagctccaagtcctcccacaaagaggcaggggaagattgtattcaataatatgtttcgccgaaaacatacagacgtatcctttatactagatcgagagtatgctgagccagatgaggtggaagaaatatttgacgatggttccgctatgctttctaaaaggcttgctgcaggttatgcactccagagcatgtttgagcccttcagctgtgcagtttgccaagtacagttgaaagctggccagggaatttctgtacacagcaatccattgcaacacgaaaaattgcaaggatggcagggacctttcctgtgccaaagctgcaacgaaaagaaagacgcaattgaagggaaacgacctccaagagattcttga

SEQ ID NO: 10202 - DNA, 244 bp, Oryza sativa
  Clone ID: PAT_MRT4530_16547C.1
caagtgagatcagaacacatgacgagaggtgagtcacagaatgaccattcgagctagacagccatcatagatatgttaccagtttacgtacttgaccagatagatatcaactcattttagaccgattcttccactatgatgtaacattagacggctatagctctaagtataggtaatggtatgcaagcaaaaccctttagtagtcacgcataatataatttgaagtatattatcaaaaaaaaaa

SEQ ID NO: 10203 - DNA, 717 bp, Oryza sativa
  Clone ID: PAT_MRT4530_16548C.1
atggagatcagaaaggaaggaggcggcggtcagtggcggatggcgtgggcggagagggctgcgaggacggcggcgcggtggagagaagggggacggcggtcaatggcggatgaggaggcgtggttgtcgtcgacggagtgtgaggcggagtcgggcgaagacgaacatggcaagggagtcgcgtatgagatcggggcggcggccagtggcggatcggagaccgcgggatccagaggatctcaccgtggatgtttgcgcggcagagcggtggctgaacggcgagacgacgatggactaaaatgggggggcggggaggacgctgtgtcggcgacgcggtgggggaggacggcgatgggcgacgcggtggaggaggtcggcgatggcggcactggggttgacggcgtggtgggggagcgacggcgatggcggcgctggggtcggcggcgtggtgggggagcgacgcggtgggggagcgacggcaatggcggcgctgtatcggcgacgcggtgggggaggacggggatgggcgacggcggtggatgcgatggatgcggccgcggcggtggatgcgatggatgcgggcgctaccccccgatgcgtgaggatgagccgaggagttgggtggggaacgttgcgccgttggatttagcgatccgatggctcgtactccgcgtatctgccagggttggagtcaccgcccccgatacgaaattttaa

SEQ ID NO: 10204 - DNA, 2608 bp, Oryza sativa
  Clone ID: PAT_MRT4530_16549C.1
atgagggcgcccagcagcactctccttctccaggctccagcaaacacacaaaccacggaaccaccaccaccaccagcagcagcaacagcagcagctcagaggagaggagaagagcaagttaaaacaacttacaagcaatggagtacagctatccctgcaacagctgcagctgcaacaaggagaagaggcctccgctgaagagggggcagctcaagctgcagatcgccaaggccctgggcagcctcgtggtgcccggaaagaacagggatcacagcttcaggagatgagcgtcgtggtgccccggaggcaagaactgggagccacagctcaacacttgagcagcagcgcctgcaaactgatggaagttctggtgtactacggtggtgggcataggaattgtgcatagttgttggtgtgtagttttcccccctttccgccccgtagcgtatggcttgagacttcgagagtatctcgcttcctcggcaattgctttgttcttgagtgaagaaatagttagggagagactcggaggtgtgttcctggcagtctcatgtctggtttggtaatgtactgatgtgcagcataattttgatggtaatgagagtgttattagtactttaaaaaaaaaaagaaatggcaagcttttgttggtatcggagctcgtcgggtgaaaggctactatgagtctctccttgcagctgatgatgaaagagagaacagcaaaggttctgattctccaactatggaagggaaaccaaaaggatcgccattttcttctgaaaagtggaaagggcaaatagagaagaagaacacccatggaatttctgtgttctctcaagttacatctcttgttgcattggcattgacaggcattatggatgattattttgatggctacttttctgaagaaatgatagaatgtcaggttgatcagcttgttttagaggagttagtccgggagaaatttccaaaactagtaaatcacctggattacctcggcgttcaagttgcatgggttactggaccatggtttctatctatattcatgaacatgctaccatgggaaagtggtcctgcgcttgtgacaacaaaggatgctggggatgctgtgacccttttacagtctttggctggttctacttttgacagcagccaacttgttttaactgcatgcatgggttatcaagctgtagacgaagcaaggctgcaagaactgcgaaataaacaccggccatctgttatatcttcaatggaacagagagcaaaaggtcttcgtgtttggagggacaccaatggccttgcgtcaaagctctataatttcaagcgtgaccctgaaccattggtgtctttatcaacagaacaattaagtgacttgacagaaactagttctggaagtacagatgacatgtatagtggcctgactgtcaacactgagattgattctttgcctgatccaaaagaccaggtcgagcaattggaacaggagttatctgatctaaggcaagctctattagacaagcaggaacaggagcaagcaatgcttcaggtcctgatgcgtgtagagcaagaacagaaagtcactgaggatgcgcgcatattcgctgagcaagatgctgctgctcagaaatatgctgcacatgtgctccaggaaaagtatgaggaagctatggcttcactagcacaaatggagaacagagcagtcatggcagaaactatgctggaagcaacactgcagtatcaatcaagccagcaaaaggcacaattgccatccccttcaccttctccaaggctccagcaaacacacaaaccacggaaccaccaccaccaccagcagcagcaacagcagcagctcagaggagaggagaagagcaagttaaaacaacttacaagcaatggagtacagctatccctgcaacagctgcagctgcaacaaggagaagaggcctccgctgaagagggggcagctcaagctgcagatcgccaaggccctgggcagcctcgtggtgcccggaaagaacagggatcacagcttcaggagatgagcgtcgtggtgccccggaggcaagaactgggagccacagctcaacacttgagcagcagcgcctgcaaactgatggaagttctggtgtactacggtgcctccaggggctccatgttccgtagccatcggtctaaagcccctccgctccgccaccgcttccgctatcagcccatctgccgagcgctaactgccatgatagatcgccagatccttcgagttacccggtccccgctggccgctgcgccttccctgacgaaggcaccgcgccggcgggttgccttcattctccgattcgctggttcgctgcacggatttgctgcggcggtgaccccggaggcagcagatccggtgccgccgaagccggatctagccccccggcagatggagcagcaccggccacgccacatcgaggtggcggacggcaaactcgaggcggcagacgacgagcgcgcggcgagctcgaggcggacgaggcggcggccggacgaagcttcgtcggcgagggcgacgagagtagcctactccgccgcggatctgtcgcctccgccacccccgccgcggatctga

SEQ ID NO: 10205 - DNA, 764 bp, Oryza sativa
  Clone ID: PAT_MRT4530_1654C.1
aaatataaattgcacaaatgtaaatgcgacaatcaaatgagacaaggaaacaagagatttttcaccgaggttcggaaactcgccggtttcctactccccgttgaggcgagcctaactccaccgctcaaccacgaagccaccgcacgcccccttcgtcaaggggtgggcaaggcgggagccaggccatggagaggactacccaagcctcgatcactcggggtagtttttccttcactccgaagaccgtgctactctacaatggctagttttctagcgattgtagggctatcattgggccccactgccgtggccggtcagaccggcctcggctcggtcagaccgccaccagctcggtctgaccgaatacggctccggcggctcgggatcggccatcccagagcatgccatcccgaccatatggccggccggtcagaccggcctatacccgccggtcagaccgccactgcctggccggtcagaccgccactctcttgccggtcagaccggccaaggccatcggtcataccgccactatgtggtcggtctgaccgcccctggtcaggccagacagtgagatgcaaagagattgtccaggatagcttcttcggccttcccggagccgaacctgctacggcgaagtcgtcccccttcggcgtacgctcttcgccttgcgccctttgtccaggaggcctccagctcggctgcgtttggtcgaagggcctcatgccatatcgccaacaagcccctcacgggcaagggtgaga

SEQ ID NO: 10206 - DNA, 999 bp, Oryza sativa
  Clone ID: PAT_MRT4530_16550C.1
atgacgaggacgccggcgtctctctccttggccgtcgtcgccgtctcggtggcggcggcggcgctcctcctcgcggcgctggtggcggcggacggccagaaacaacaaggctacgtgcagccggcgtaccggcggccggccgccgggctgaaggccgactactaccaccagtcgtgcccggacatggagggcatcgtccagcgagccgtcaagaaggccatcgccgccgactccaccctcgcccccgccctcctccgcctcttcttccacgacttcgccgtcggggggatcgacgcgtccgtgctggtggactcgccggggagcgagaggtacgccaaggcgagcaagacgctgcgcgggttcgagctcatcgagtccatcaaggccgagctggaggccaagtgccccaagaccgtgaaggtggactactggccgctgatgtacgggaggaaggacgggaggaggtcgagcatggtggacgccgaccagtacgtgcccatggggcgggagagcgtcaccgacctcatcgccttcttcgagtcgagggggctcaccgtgctggacctcgccgtgctctccggtgcgcacaccatcggccgcgccacgtgcgccgccgtgaagccgaggctgtgggactacgccggcacggggaggcccgacgccagcatgagcccgcggtacggcgacttcctccgccgcaagtgcgccgccgccggcgacggcgggtacgtctacctcgacgccgacacgccgacggagttcgacaacggctactacaagaacctgctgcgcgacatgggcctcctggagacggaccagaagctgctgccggactcgaggacgggggagttcgtcagggagctcgccggcgcgcgcccggagctgatcaggcaccagttcgccgactccatgcgccgcctcggcgccgcgcaggtgctcaccggcgacgaaggcgaggtccgcctcaagtgctccgccatcaacagcaactcctactga

SEQ ID NO: 10207 - DNA, 1536 bp, Oryza sativa
  Clone ID: PAT_MRT4530_16551C.1
cagaaaacgagggaaaattcctgctgcatctcaagcggaaacctcaacggggtgacataaggcattcgaacaaccaaaaaggctacaaaacacagtgtcgatcgaacagtttgtataatatggcgaactaagctaagctaagctaaccctgagccttagctaagcatcatcatcatcatcttcttcttcttctagctttcaattcttctcctctagcactatgctttaatttgctcacatcaaggatttgagcgaccgtgccttcacgggcttcctccacctcttccgagcctgctggctcttattcttcctagcgtcaccgttgatgccggctcggagcctgccgatccgcgccgcgtcgtcgctgctctcctcgtcgccgcctgctatcccggcgatgtcgtcgtcgtcgtcgtcggagctggagaaatcatcccgagctgccaccgcagtcgtcgtcgacgccagcgtcgtctgacgatcagtagtagtagtagcgtcatcaccattaccgctcctggatttgttacctgcactaggatgaggatcagcaatctccggcgaccgcgcttcttcttcctcgtgctgttcttgttccaccggcggaggctgatcctgcatgttgtagttgttgctgctgctgctgctcctgcaatgcctcttggtgcggaacgggccgaaccctgcgtagtagtagaacccctcgccggaatccgccaccttcttcttccgcgccttggaggagctggtggaggtcttggaggacgcggtcgccggcaccaccgatgacggcggtgacgccggtggagcatacgtctcgtcggtggggtcgtcgtacagcgggttgtagtagccgcgcttctggtcggagtggtagtcgcagagggagttgggctgcctcacccgccgctggcagtgccacctcttgccgtcgttcttcttgcatgtccagacttgtgctcccccggcggcggagatggcggaattggagtcatcctcttctttcttgagctttggtttcttggtaggttcgtcctcctccttcaccgccgccgctgccgcctctttcttcttcgccgtcgccggtgacggcttcttcgccgtcttcttggcgaacttcttattaggtatcttggtgctgaactcgccggccgcagctagccccttctgcttgacggcggcgggcatgctggtcgggaagagccagctagcccggctggcgacatggacgaagtacttctccacgacgtcctcctcctggggatcggagatgttgagctcgccgataaggtcccatggcgagcggctgagctcgcagggctccccggaggcagccgcggcggcgaagcaggtggcccccgcgccggattcgtggctccccgggtacgggagcggcggcggcgtcgccagcgcgagcgggaggagctcgaatcctggcgccgccgcccccgcccccgtcacgggcggcgggggcgccgcggcggaggcggagtaggaggagccgaggaggcgggacgcgcacttgcggatccgcat

SEQ ID NO: 10208 - DNA, 453 bp, Oryza sativa
  unsure (1)..(453): unsure at all n locations
  Clone ID: PAT_MRT4530_16552C.1
caccttaccaggttcagtgcatgnncccnncnnnnnnnnnannntanagatcccctatatttatgtcatgcattaatgtgtttaccaccaaatcattcangaaaatgctcgtttacattcacatncattttccattgttgtgtaaattatactatttatcattcaaacttcttcacactaatgaataaagcaaaatgagcacctacaaaaatttcttttaatgtacccatctttgaacctcatccaccacattactacataccgtccatattacattcctttttaagaacagagtcactgtttactgtttcttttcataaccttacctttccacagacacaaataacacacacttaacttttttaccttaaacctcttccatttaatgctcttggcaacaagacgtattaaaatctatacaaattttcccatttcaaacctatacaaacacaa

SEQ ID NO: 10209 - DNA, 210 bp, Oryza sativa
  Clone ID: PAT_MRT4530_16553C.1
ggcacgaggattcaagcattatacagcaaaatagaaagatctagtgtcccgcagcaatgaagatcattttcgtctttgatctccttgctatttctgcatgcacgcctctccgagtttgatgttttaggtcaaagttataggcagtatcagttgcagtcgcctgtcctactacagcaacaggtgcttcgcccattataatgagttcgtaag

SEQ ID NO: 10210 - DNA, 319 bp, Oryza sativa
  Clone ID: PAT_MRT4530_16554C.1
cggcttgtggaggaatcatctccgacaacgacgatgaattttttttggccgcaacgcaaattgtgcatagctattggcactctgtcaatgcaccaaaacatggcggttctatcatgggtcatgaatcgattgatcgcaacagagaagcacacacttgagaggataatcctacctacggtccagttttattcaagcgcaggaatagaatgaaccgacctctatttctctgcacaatgaatgcaataaaggatcacgatgactattttgtgcagaagagaaatgcagctggtatactatcgttccggtgtgaccaagccgt

SEQ ID NO: 10211 - DNA, 245 bp, Oryza sativa
  Clone ID: PAT_MRT4530_16555C.1
cttatgttctcgtggagattccggcgaggatttccgcgagcatggaggcgatcgatcgagatcgtccgccgccgccgccgcgcaggtaggagggaggggagagagacccatcatgataaactgctagacctgtcatctgaatgaacctgaactgctacagcatgagatcaaaaatgcctaaaaagcgtcttacatacgatcttatcaagagaactcttacttcagttggtgctaaaaatgttgac

SEQ ID NO: 10212 - DNA, 603 bp, Oryza sativa
  Clone ID: PAT_MRT4530_16556C.1
atgacggttgtgatggttggaatggtcgtggctggcgcctacggagactacagcgcacgcgtttcagcgggctttgtgcttagcctgcttcaggagcatggctgcgaccatattaaagattttcctgagctattgaagggggcttggctcgagaattcccagtgctccggggcggccttgagggccttccaaaaggacttctgggaggatggcggcaaggattgcacgaagacccggcttcgcgaacaacttgaaaaattgacgaaggataaggaagccgctgccaccaaccccagggtggaccctaggccgtcggagccaagcgatgaagaccgagaccaccctgaggtttgcggccgaaaaatatgcgatcggcctccctctggggattggcgagataaaaatgagaaattcatggtggtgaagggttttccgacgaccaagtctccttttcggcccgtttaccacgagatgttaataaacggcaacagctacaaggttataagtgttgccagatggatgcgcgcacacccaggtcgaactttagaggactatgaccgttatcgtgtgtcgtgccgcgaagatagcaccaatttttggtga

SEQ ID NO: 10213 - DNA, 153 bp, Oryza sativa
  Clone ID: PAT_MRT4530_16557C.1
ttgtttcgccctttttcttttttttttcaaagttgggcaaaaaccaaggtttgcatttgcactattgttacaccctgagttgtggaaattttctagataaatagactttgcagacatatgatttattggcctggatggctcatagatcataac

SEQ ID NO: 10214 - DNA, 499 bp, Oryza sativa
  Clone ID: PAT_MRT4530_16558C.1
tcttccatatacaactctctctctctctctccaactactgtgtcgtctcgcatcggtcggtgtcgcgaccacccggtcgccgacggttgaggtttcatttcatatatatatttttctctttttcttcattatttttttttatttttttataattttcaatataacataattcgtttagttatatcctttgagcatacaaaagaattgactataatagaaagttttttcctttttttttatcatattttattttttgttatgtttatcttttgattttttaaaagaaacaaccctcttattcttactttctattttatattcatattttcttttatttatataacttttctataaaatgcaaaaattaatattcttatttcccttttcatagctattttttttaaatatatttccttataatatcttatcatctattgaatgaagcacccccagtggggattgtttttattggggccttgttatcatagaaatttctttt

SEQ ID NO: 10215 - DNA, 1449 bp, Oryza sativa
  Clone ID: PAT_MRT4530_16559C.1
atggaggatcttccgggtgcagcacttgcagagatcatgaagaggattacaaggacaagtgatctaagttctctttctcttgtgtcgaagcggctctacaccattgatgcggagcacaggagtactatccgtattggtcgtggcctttggcctgcaaaagaagccttgttaacactctgttcccgattttccaatctgcggaaagttgagatcaattaccatgattcgacacgtggcgatgggaatcagatcgacaaccaaggacttcttacgctttcaacttgctgtccattgctgactcatctcattttaagcttctgctattacatctatgactctggtctagcttacctaacattttgcaagaagttagtttccctcaggctgaactctgcaaaaaatataacatcaagtgggcttctcgctgtggctgttggttgcaagaatctatctggtcttcacctcatcaattgcaataaaatcagtggtacccttgaatggctgaagtaccttggcagtgatggatcattggaagaacttgttgtaaagaattgtggaggaatcagccagtacgacctcctattgtttggtccaggatggatgaagctcgagaggtttgtgtttgaggtcagtaatctttacaacatattgagacttcgagatccctcattcgtggcgaactaccagcgtagctatgatttctgctgcgagagtttgaaggatttgcgtttgagagggattgcaaccgtggaagaaataggacttcgttctcttctgggaaaatgcaaatcattacagatactttgccttcattttgttcttggtctaactgacagtgacatgatcacactctcccagaactgcagcaacctcaaaagcatctctcttcagcttgagcctgttgtcggtgtaggacctcaaggtagagttttcaggatgccattgactgatgtaagcctcaaggctctagccctcgggtgccgtatgcttcagattgttgagctcgcagtgtattcccgtcacacttcttatccagaaattggcttcagtcaagagggccttgcgacgctcttccagtcttgcccaattcgtgaacttgttctgtgtggtgccaatatcttcgatgatgaggtgatgaaggccctctcatctgcacaattcctggagactctcaagcttatggattgcaaacggataactgatgccgggatgcgcttgcttgccaatagttcatctttggttaacctcacattgcaggattgtcgcggttttaccgatgatggagtcagtgaggtcgtacgtgcacggaatttggattctctgattgttcaaggctgtcgcgtttcttggaaagctgtgaagggggctgccaaatctgttcgctatgatcgtaattgcccggtctatggccgtctaagtagatcgagcatgatatccactctggattag

SEQ ID NO: 10216 - DNA, 420 bp, Oryza sativa
  Clone ID: PAT_MRT4530_1655C.1
atggagatccaatatgagcttaattcggatagggatccgaataggagtcctacgagccttggaggcccgagtgatggatcctatatattcgtgaggggtgtgaccggcggaggtattgcatcaccatgggaatacggcgaggagaacgcacgaggaggagaaggtcgagccggtgcgatcgactacttcctctacatcgacgcgcactacttcgcgagaattccttcgacttcttagcgccttcttccagtgcgcagcgcgtcgagtggtaactgccatgtggctgccactactcgtatttcccctactactccatgtctctctgccaccaagaggtcgagctccaccatgccattgccttgccgttgtgcttcaactccacagccttcaccaccgctgctgctatctttcatgagcccg

SEQ ID NO: 10217 - DNA, 397 bp, Oryza sativa
  Clone ID: PAT_MRT4530_16560C.1
ggggcccaccacaaaagattctttaaccattttttggaaagggtttagggtttgggccaaaaaccgaaggggggggaaaccccttttggtcccaaaaaaagaaggccctaccaaaaaacccccaaaatccttttttcaaaacgggggggggctttcccaccatttaaaccttccacgggggaaatttttccccccccttttttttttcaaaaaaatctttgcccaaaagggccttttcaaaaacagcccggcaaaagggggcaaaaccccggggaaacggggggacaaacaactaaaccccggacgaaggaaaaagggtgggcactttggggaacttgggcccccccccctggaccccccgggtggccctgcctttacggggccggccccctttttt

SEQ ID NO: 10218 - DNA, 1237 bp, Oryza sativa
  Clone ID: PAT_MRT4530_16561C.1
ttttttttttgagagaactagtctcgagtttttattttttttttttttttttttttttttttttttttttaagtgccaattaacttgttaccacatccaaaacggaaattgttatacatggacggtcctacgatacagtgacagatacagacatacagtacgtgcatcaaacgaaattattattcccctgattaactgtttgggggagaaggtcgtaagagagcacgcacgtacttagcaaaatatagatcagggattacattacattacattacatatgccctgtaattactggattacaggacactgtttgcattggcttctctgaagcctgaagcctgaactgaacacacacatcatatccagccggatgggatgtgttcattggggtgatgagcaaccatgtctgctgcttcattgctcagatggtccatgtaggcctggtgatggtgagcatgagggtgatgatacccaatctgcagggaatggtcaccctgatctgggtgagggtggagaagaccctgatggtgatgaggctgatcagcaagaacagtgctagaaccgctgtgcccaccaccatcttgccaggacatatggagcacattctctgcactggtttcctgtaactttttcctcaagtctttgttgagatcttgcagctgttgctccttgctcttcagatcaaacagctgatcaagcagtgcttggttctttcttgacctgatttgtttgagggatacttctatctggttctcaagctgctccagctccttcatgcttagtgggcccaaatcctcaccaagaatatttctctgtgtggtttgaagaaattcaactcttgttttcagcttcaggtattcttggtaattaatttcgttttctggagctgctgcatcctgtgagttgtagttgcagctgcggtacctctccaaggttttgtacatgcatgatgagctggagaactcgaagaggcggccgcggccggagaagatgatgagggcgacctcggcgtcgcagaggagggagagctcgtaggccttcttgagcaggccgttcctgcgcttggcgaacgtcacctgccggctgatcttgttctcgatccgcttcagctccaccttccccctccccatcttcttcctcctcctctcctctctctctctctctactactctatcccctttgcaagctagttttatggtggtgtggcctcgtgccgaattcctgcagcccgggggaa

SEQ ID NO: 10219 - DNA, 394 bp, Oryza sativa
  unsure (1)..(394): unsure at all n locations
  Clone ID: PAT_MRT4530_16562C.1
atacggccggaggcgacgggcggaagcagagaggaatttatagangaggcagggagggaccccccccgccgcgccgagagaggccgagcacaaaggggacggcgaccgaggcaggaggggaagaaacaggaccggaacgggatgcaggggaaccgggagctccttgaggaggcgcagatgaagagccagccggcggagcacacaaaccaggagacgctgagggggaacagaaccgacggcgaccaccgcacactggagaacgagcacatggcccgaggcaccacggaggaccacctgcacgaccagcaacccaggagccgagggactggaccggacccaaggggcgcgcaacgagcaaggagccgcccgaggacaagagcaccggcacgacgca

SEQ ID NO: 10220 - DNA, 609 bp, Oryza sativa
  Clone ID: PAT_MRT4530_16563C.1
atgtcagtctcttcttcccctcccctctccacctctcttcctctctcctcttcttttctctcacttttctcctcagttgggcagcacagccggcggtgggggaggcgggagtccggcggtggcggtgacgaggcggcagcggcgggcgatgaggcgacgacgctggagaagggagacgcctgcatccgccgcctcgccttcgcctcccagccccgtgggtctcctcgactcctctgcctgccgaatccaccaaccgtggcctctctgagctcgtcggccgcctgcaccgcagcggggttccttcccaagaacctcctctccatccgctccctcaccatggtctcccgccgacaacgacgacacctcccaaccggcgatcgagaccagcagaggcacgggcgaaggcgatgctatttgtatgagcctgatttgagcaggattgtccacccaccatctggaaatcatcagggtgctgattgcgccaaaattgaaggcctattggggactactacatgtgtgaacctccaagaacacttcatcgtcgtcctgtcgttgacaccttcatgcgactttaatttagggttgctagctgaaaaaaatgtgccgtag

SEQ ID NO: 10221 - DNA, 326 bp, Oryza sativa
  Clone ID: PAT_MRT4530_16564C.1
atgcagctcaacccgaaagcaagaactcgccgaaacaaaacgaaagtaaaacggtggcgatgcgccgagattgtattgaacgcgactctatccatgcgtggcaatcctcatgaagcactttaactcaacccgacaacgtatgccgtgtcacattgtcggattcggactcaatcggctagccttgtccaactcggactctgccgatcctggtcgcagccgattcggactttagccgatccttgctctgtttccggaacgatttccatcttggattccactccgccccgaccttcatctccgatactcagattaccaaatttggttgt

SEQ ID NO: 10222 - DNA, 165 bp, Oryza sativa
  Clone ID: PAT_MRT4530_16565C.1
tcaccaaggtacactctactagcataagccgatcgaccgtcttctcgatccatatcttccggtggagttcttggtctatcttcttactattccaccttattctcacaggtttttggagtattttgacactttcaccataaatgatttatgtctgaactcgtcatt

SEQ ID NO: 10223 - DNA, 558 bp, Oryza sativa
  Clone ID: PAT_MRT4530_16566C.1
atggctacttcttccatccttttcttcttcctcctcggcggcctcaccgtcgccgtcgccgcccacggcacggcgaacgacgacaccaataccatacgcctccccagcgacggagcaaagtcgccgaagatgccgacggagaagaggccgtggaagtgctgcgacgacatcgaggagcagccggcgagcatcttcccgccgttctggcggtgcaacgacgagctggagcccagccagtgcgccgcccagtgcgaggtgtgccaggaccaggaggcgtcgccgggccggctcatctgcggcgacgtctactggggcgccgacccgggccccttctgcacgccgaggccgtggggagattgctgcgacatggacatctgcagcaggtctctcccgccgatctgccggtgcgccgacgaggtggagtcgtgcgccgccgcgtgcaaggattgccagcagctggagtcgtcgtcgtcgtcgtcggagcctcctcgctacgtctgccatgattggttcagaggcgagccaggtcccagttgcacacccgacgaacacaagtaa

SEQ ID NO: 10224 - DNA, 351 bp, Oryza sativa
  Clone ID: PAT_MRT4530_16567C.1
ggaacccccaaaaaaaacggtccctaataaattaagggggcaatttttggggaaaactaattaaatacctggggggggccaaataatgatatccatgggtggagacattttggtttttttggcaagaaacaatactttgttacagggcggggttgaccccaaaaaagattttgaataaatgggcggaaattttgggggctggtttttttttccccagggggggcctgcccatcctagggatcctcaggaacccggggggccttcccagttgaaagcctggcgccatagcctaaaaagggggggggttgtttgcccgaaacggggccgtaccgggggggggggccaaaaccc

SEQ ID NO: 10225 - DNA, 676 bp, Oryza sativa
  Clone ID: PAT_MRT4530_16568C.1
tagtggatcccccgggctgcaggcgaatcccctcatggtaccgttaaatctttcaatgctgtcctaaccattggtgtatattgctgtttttttatatgcgttcatagaaattttagcaatgttttactactagttagaaggtgatggcttctcatggttgcaccagatcgagcactttcattagatcctaggcccagaaactttaagaaaaaaaggaagcattctacaaatatgtgggtaaatcaataagaataacacatcactgtaatattcttcaaaatttgctgctgaatttcccttcacagcgcaattagataacttgcatttaggtacccagatctgtgattgtcttcctaatatgttccacttgccaagtcatccacactgaaaaacaaaagcatcattgtctcttaaacttactggcacacttgtatttatgtattaatatgtggcattgataataggctcctgatattttagcttagagacaaagggaatgtctctgtctctatttgaaatagaatgcaaatgtgagtaaatttcagagatttgaagcattaccagttgaaacgacaaattggagatgatattaaaatattttaatcctgaaacagaatgaattcagttgaatggatgccaaatttcagtatatatgctattctttctcccatcaact

SEQ ID NO: 10226 - DNA, 372 bp, Oryza sativa
  Clone ID: PAT_MRT4530_16569C.1
tcggttctttttcctgcaaaaaccactcctagctaccttgtagttatgtatgcatactgctagtagtatgtgtataaatagggaagcatggagtggtttttgcctctttggtgcacatgtgaaacaacctcaagagttctttttcctgcagaaaaaaaaaaaaaaaaaaaaaaaaaaaaaaaaaaaaaagaaaaaaaaaaaaaaaaaaaaaaaaaaaaaacaaaaaaaagaagaaaatacaaaagaaaaaaaaaatcaagaaaagaaaagggggcgcccattttgggggttcaaaatttcagaccgcaggctggggaacaaataggtttttttaggggtcatcaaagtgaaattgctgggcccaattttaaa

SEQ ID NO: 10227 - DNA, 2208 bp, Oryza sativa
  Clone ID: PAT_MRT4530_1656C.1
gtggggaggagaaggaggacgcgccgaagtggaaggatgagaagcatcacgacgacgatgatacacaaatgcttgggagctctccaacatttggactcgagaatccaatgtacccactcgagtgtgcaatctccccacagaagcattcaagtctccaacgtccgtgcgcaagccacgaacatcctcatgcaaagtttcatgcccggtagacaagcgttgaatgctttcacttagggtattaatagccccaagtaccgggttgaagtattcgttggattgcattccaaaataggcatactgcggatgaaagaagacatttggatcatacccatgaggaggaggaggtgctgaacttgagctagctccaggatgagaggagggcgccgtcctaggagcacggggagctccaggctgaaggcggggcttgtactgcttgtgcttcttcaaatttggcccagcagccccaagcttgtcttgaatcaatctcatgatgtaaggggcataatagataccctgagtgaaggtccccttagagatggcaatctcttgcatcatgagagtcacagtgtcgaactgacggccctgaatgatggcatcgataacgtgccaagccacccccctaatgtcattattgttacccaggcgagggaggatggtagctctcacaatcctgttaaccacactcgggatggttctcaagccggcaaccttcccatgtgtgtaccgcgctccatcttcataaaactgagagaggtagtccatggagagcggattatgggtgtgctcctcatgcaagtcatctccaaagtccaagcgaacattgaggagccgccggaattgcctcctagagatagaacactggagggtgtcggacatccacttcatctcacaatagtccccggccacccacattttctggaaagcggtgtgaaaacggggattcggggtgtcccgaggcctcaaaaactgatgatggtgcctcaagatggtatactgtgatggattccgcatgttcacaacacactggatggagggatcaatgttcatctcatcacttccttcatcctcatcctctccacttccactgtcatcatctccactttcatcctcgctagccccctcaacattggcctcaacctcttcatcactttgagcgtaatcctctccgctcgattcctcaggctcactcacgggatccggagtgggcgcacgacgaccatgacgagtgcggggaggcatcaccggctatatgcggccggtcagaccgccggggtgctgccggtcagaccgggcccaagaagccggtcagaccgcgcatatagcgccggtcagaccgcctcaattttattttgaaacttttctcaaattccttctcaaactcattttggggtttaatctcattttggccaaaaacaagaatatagtttctgccgaaacatattccgcctcggcggtagagagggctacggagttttgtttcttggatgaccatgacacaagggatctaccaagcatttggcaactaccggatgtgctatttctatccactttgcaaccggcataatccgaattggaatagccaacaaacttaatttttgcaccttttgggtaccacaagccaatagtagaggaatgctttaaatatcttagaatacttttcacggccactaagtgacactccttaggagcggcttgaaaccgtgcacacatgcaaacactaaacatgatatccggcctagatgcggtaagataaagcaagctaccaatcatagaacgataaagctttaaatctaccggtttacctccctcatcaaggtcgagatgcccgttggttgccataggtgtcttgatgggcttcgcatcctccaagccaaatctcttgagtagatccttgatatacttggtttggctcacgaacgtcccatccttgagttgcttgatttgaagtgcaaggaagaagctcaactctccaatcatggacatctcaaattccctagacatcatatcaccaaattccttgcaaaatacctcactagtagaaccgaatatgatgtcatcaacataaatttgacacacaaagaaatcatcaccaatgatttttgtgaaaagagtggtgtcaacttttccaattttgaaatcctttgaaaataaaaaatctctcaatctttcataatttgcccgagggggtaagacgtaaccacagtgacc

SEQ ID NO: 10228 - DNA, 289 bp, Oryza sativa
  unsure (1)..(289): unsure at all n locations
  Clone ID: PAT_MRT4530_16570C.1
gacacccccntttaaggggggggggattaaaacggtgctgaactacttacattttttaatcaaccacaattaaccctcatgcacgcctccaaaaaattctcgtcggtcaacatatacttacgtactcctataattgcatatcttaacatcttccaccttatatcattaattcataaactcaagaactcatgcagatagatctacagacttatatatatgaaccctgctctatacatgaaactacgtcaacctccttagaattctcctaaactactcaccaactaatggt

SEQ ID NO: 10229 - DNA, 1102 bp, Oryza sativa
  Clone ID: PAT_MRT4530_16571C.1
atggagctcgccatgggtgccataggcagcgtgctcccaaggctagctgagcttctcaaggaggagtacaagctacagaagggcgtcaagaacgacgtcgagtccctctcccgggagctcgcagcgatgcacatcgccctcgagagagttgccaaggttccaagggagatggtagagctcgatgtcaagctctgggcctctaatgtcagggagctatcatatgccatcgaggatgccatcgacgcctttgtcgtgcgtgtcgcagagggcagcaaccttgtcgatcctatcaaccagggattcttcaagaggatccttcgcaagacgagtgatctgatcaggaaagggaaagctcgccgtgagatcgccgaagggatctgtgacatcaaggagcttgcagatgaggtggcagagctgcgagcaaggtacaagttcgatgcagcagctgctgcaacgactccggctacggccaccgtggatccccggatccttgctctttacaaggatatcacagagcttgttggcatcgaagaggccagagatgagctgatcggcatgttgtctaggcctgcagacgacgaccaactgaatatcgtgtccgttgttggatttggaggattgggcaagacgactcttgctaaggttgtgtatgacaagctcagaggccaattcgactgcgcggcttttgtttcggtgggtcaaaatcctgacttgaagaaagttttgacggacatgatatatgaccttgataggcagcggtatattagcattcataactcaaggatggatgaacgcctccttattaatgaacttcgagattttgttcagaacaaaaggtacatcatcataattgatgatatatgggatgaaaaactgtgggaatatatcaagatgaagcctctttctgatgatgcctccaaaaggctattctacaaaaggatatttaagcatgataatgggtgtcctccagaactggaacaagtatcaatagacaggattggtgaattgacatcactgctggagttgtccccggtagatgtttttcgaagaacatcctctattgatgttaatggtgactccttcagcttgctaaaagcattgg

SEQ ID NO: 10230 - DNA, 816 bp, Oryza sativa
  Clone ID: PAT_MRT4530_16572C.1
atgggacggacgagaggaagtgaaccaccggatcggattcgctggaggaaggcgcacaccggtggcgagaaaagggggaaacttcatcggagcaacgggggttcgattaaaaggggtggaagcatatccttggttcaaggaatccagttccggcgacggatgggacaaaggagtaccaaggagggccggcgacgagcggtggcctccgggagtggacggcaatggccgcgaggccatgccaggcggcggcggggctcggggcgatgtccacgcgcgttcgggagtgccaccgagctatcacgcagactagagggggcgagggagagcgaggaaggggaacgggaggaggcactgccgagccgggacgggcgctgtgacgagcggccgacggcgcgggagcaacctctccgacctcgggccggggaaggggaagatgacggcgcccggagtcctcttctcgcgtccttcacacgcaccggtctccctggtgcttcggcgacggatggtggcgatgttggtttgggagaaccgaccttgggtcgttcaaggagaggagctgtcggtcgggcgtggtcaaggtggtggcaggcggtgacgctgatggtggtcgggcaaaacgaaaaaggaggaggagaaagggagctctgctccttgctgtttcgggaaaagttgaaggagggagagggacgaaatacggaggagccaaggaatggattcaaggtggactcggacattttggaatcgggacaggtatttggcgaggattcaaaggaggcgattgaatttcggagacttgagtcggaattggaattttga

SEQ ID NO: 10231 - DNA, 624 bp, Oryza sativa
  Clone ID: PAT_MRT4530_16573C.1
atggcgaggaggagctgcagcatgccggcggcgggcgccgggccggggtcggcggcggcggcggtgaacacgataacgccgtgcgcggcgtgcaagctgctccggcggcggtgcgcgcaggagtgccccttctcgccgtacttctcgccgctggagccgcacaagttcgcctccgtgcacaaggtcttcggcgccagcaacgtctccaagatgctcctggaggtgcacgagagccagcgcggcgacgcggcgaacagcctggtgtacgaggccaacctgcggctgcgcgacccggtgtacggctgcatgggcgccatcctcaccttgcagcagcaggtccaggccctcgaggccgagctcgccgccgtccgcgccgacatcgtcaggcacaagtaccgcctcccctccgccgccgccgtgctcccttcctcccacgcctcgcacctcctcgccgccgccgccgccgcacgccagctgcccgttgctggcaccatgggggtagtgacgacggcgacgctgccggcatcggcgtcgtcgtcgtcgacgacggcggtgtacgccgccgcgtcgagctccacggactatagctccatcaccaacgagaatgtcccctattttagctga

SEQ ID NO: 10232 - DNA, 474 bp, Oryza sativa
  Clone ID: PAT_MRT4530_16574C.1
atgacggcgcccggagtcctcttctcgcgtccttcacacgcaccggtctccctggtgcttcggcgacggatggtaagggcgactgcagggcaggggcgacaaggcgcgattgtggcgacgagagaaacgagtgagggagatgggaggggctcgggtttttataggtggcgatgttggtttgggagaaccgaccttgggtcgttcaaggagaggagctgtcggtcgggcgtggtcaaggtggtggcaggcggtgacgctgatggtggtcgggcaaaacgaaaaaggaggaggagaaagggagctctgctccttgctgtttcgggaaaagttgaaggaggagagggacgaaatacggaggagccaaggaatggattcaaggtggactcggacattttggaatcgggacaggtatttggcgaggattcaaaggaggcgattgaatttcggagacttgagtcggaattggaattttga

SEQ ID NO: 10233 - DNA, 362 bp, Oryza sativa
  Clone ID: PAT_MRT4530_16575C.1
ccgagagattcgcggacgcctggggaggtggataccgctgcagccgtaggagaggaacgacgtaacaagcgacaaatcgcgtatgggagtagtagataggcatacacgcgtatactccaaaatccgacaccgagaaggaactggatgacgtgtccatgatcgggcaagagacaggctggtgaaatgagacatttatggcgccggacgctatgactgcttaaccgacctctgttagtaaccgggtcatgaatcaattaaggtacgttcggttagtatgccgcactgtaccgtgtacatcgataataccttactgacgatgtactgaaagcttctaggccgctgagaggacatatacactgtgg

SEQ ID NO: 10234 - DNA, 600 bp, Oryza sativa
  Clone ID: PAT_MRT4530_16576C.1
catcgagcgacttttagttcaggcggtggtatcggagttccccacctcaaaaccctagctaggccgcctcgtcgccttcccccctacgcatccccgaccagcaccggcaccggcggcggcggcggctaccccccttcaatggcgactgtgccagttaacccgaagcctttcttgaacaacctgacagggaagcctgtcattgtcaaacttaagtggggtatggaatacaaaggatatcttgtttctgtcgactcttatatgaatctgcagctggctaatacagaggagtatattgatgggcaattctctggaaacttgggtgagatactgataaggtgcaacaacgttttgtatctccgaggcgttccagaggataccgagatagaggatgcggaatgagatagcccgggccatgtccagattgattattgtaatatgctgctgacatgaacaattaagtgtcatgtacaactgatgcagattgacctggatctttaactatgccatgatatggtaatgttatgcgttgaaactgtcgttgctcggaatgtgtgagatcatatttcgtaagaaaataccatttgcctgtcatgattagcc

SEQ ID NO: 10235 - DNA, 692 bp, Oryza sativa
  unsure (1)..(692): unsure at all n locations
  Clone ID: PAT_MRT4530_16577C.1
gtgcacccattgtttctgtttgttcttcacaccagttcacgatgagacacttcgtgtccccccttcttgcacttggctgcctcattggcaatgccgcagcagcatggcccaatggacccttcaaaacttctggcagatggatagtcaatgccaataatgagaaggtcaagcttgctggcgccaactggcctggccacggtgaagtcatggtccccgagggtctacagtaccagtccatcaagggagttctgtcagatatcaagggcattggcatgaacgccattcgtcttaccttcgccacagagatggttgatcagatctatgccaacggcggcaaggacatcgatatcaagactgctttcgaagagggtcttggaaaagagaacggaactattgttctggcaaaggtgttgaagaataaccctacctttactgccaaaacaacacgtcttgaggtttacgacgccatcgctgctgagtgtcttcgtcaacagatctacattaatcttgacaaccacatctctgagggcaagtggtgctgtggtggtgaggatggcaacacctggtgnggagatacccaatttgacactgccaaatgggttcgaggcggtgcctacatggccgctcatgctaagaagtgccccgcaaaggtctctcagtctcctcccaacgagcctcgcgagcctaccaac

SEQ ID NO: 10236 - DNA, 1875 bp, Oryza sativa
  Clone ID: PAT_MRT4530_16578C.1
tcaaccgtccgcgtcgagcgcggccgagagagcggagcgtgtccagatcgcgtgactcccccacactccgctccgctccccccgcggccacgcgctcctcgtcggcttccgcttcctcccaccacctcgcagcgttgcagggcgtgggcgtgggcggcggacatggccggcgagaagaaggtgttcgggttcgaggaggtggccggccacaacgtcaccaaggattgctggctcatcatcgccgggaaggtatatgatgttacttcttttatggatgagcaccctggtggcgatgaagtgttgctagcagtaactggcaaagacgcaaccaatgattttgaagacattggccacagtgaatcagcaagggagatgatggagaagtatctcattggggagattgatgcttcaaccatcccagtaaagcgtactcatgtcactccccagcaagcgcccggcaacccagacaagggcgatgacatgctcattaagatcttgcagtttcttgtccccatcttgatcttggggcttgcatttgctatccggcagtacaccaaatctgagtagatctgttattacaatgttgataatcaatatggtccatgaagctatattaggtgaaatgatttggatcaaaagaactaaataatgatatttgttgaggggaacggtatgttgtattgttatattatggagtattatgtatcccgaacatccgtgttacatatttgtgcccaaatattgttcatttggaacggctgggatatggaataacataacaaatgacttttgtagcgtataaataaacttctacatgaaaactacagcttgagatggggagtaagaaacccattcatcattagcacgaactgcatccaagcggataattcgttgccaagtctcaaaatcctcaattgtgcgtacagatttcacaggacgagcagccttagataactcgctatcattttccatgtttcctcctgtgttggaatatctcgggatactttcttgttcatcctcagttaaagattgctgaactgaggcgacaaccatatgagatgtttctacatgagtcaggccacttgattcactttcttcctcactagatgaactagatgaagaatgatttccatctgtcagcttctcagggcttgttttagatgtgtcatcctgcacttcttctcctggattggcagatggattttcctcctcactaacaagatgatcttcgacaaaagatttttcagccacttcttcagatacaacgggaccaacagtgtcatcgccaacaagatgctcttctacactagatttatcaggtacttcttcagatccagctggattgacagtgtcttcgcctttttcagaactaacacactccacatgtttggctccagcggcttcatttgattgtttgttctcttcattgatgtagacagattttcgcaggcaatggttcctcaataacagataacctttcctgttctgtgccttaaccgcgtctctttcagattctgaactaccaagactgtaaactcccagaaggaatggccagacctgtgctctgatacttggctcaatccctccgcttcgaactttcttcagaagcttcactccgccgtccttaagcttcccctccggcgtgaacaagctgacccattcatggggcttaagcgcggccttcctccgccgccgccaccacggcgatttgagcccacctctgcgggaggagacaacgatcacgacgagcacgaggccggcggcggccgtgacaccgacggcgacggcggtgttccatcggccgccgccatgggctccgccgagggggccgaggaggcccgcggcggcgcgctcgacgaggccccacgcccacat

SEQ ID NO: 10237 - DNA, 215 bp, Oryza sativa
  Clone ID: PAT_MRT4530_16579C.1
actcggacgcgtgagctttgatcttcccaatgatatttattattacctacacagaattgggaagacagtgaggtcacaaaaaagtgatcctgcaactgatttattaaatgaaaatcactattccatgcccaggtctttacctgaactaattcatgaatgtaatcaagaggtacctccgcggatgcctcggtatcctcgtcggccatcctatggtg

SEQ ID NO: 10238 - DNA, 175 bp, Oryza sativa
  unsure (1)..(175): unsure at all n locations
  Clone ID: PAT_MRT4530_1657C.1
aagctttgcnnnccttaancntgccatccatatgtggtatctntcctaactnctacattgcggcgaggacgatgnccaccgttgggttgtctggtgactgaattgtaatagtataatggttcaaatgttaaaaatanntcatgccgatcatcatcatagcgcatgagccagttga

SEQ ID NO: 10239 - DNA, 372 bp, Oryza sativa
  Clone ID: PAT_MRT4530_16580C.1
gatctgaaactcacatgattataactcacgacaaaaggggctaaacatttttggtttggtagtaagttcaggggggggcataattagcattgcccaagctgcaggtagcttcagggaagtgaaggggaggaaaaagagtatctgttccagcacaaaactactagcattacataagcacataaaaaggtatgatccttttaaaacattttcccacgccaaaggtgaatggggggaaaatcttaggcggacttcacggtggcggattttatgatgtcaatgaattcaggcttcaatgaaccacccccgacgagaaaaccatcaacattaggttttgatgccagctccttgcagttcgtcaccagttccggaacc

SEQ ID NO: 10240 - DNA, 2913 bp, Oryza sativa
  unsure (1)..(2913): unsure at all n locations
  Clone ID: PAT_MRT4530_16581C.1
aaaaaaggcatgacattagatgataactatataagataaagaaccgctcattttacataattactcttttcagcgatacctgaatgttattcttacatatttgtagtctagtgggtgcaacangtgcaaggcaattcctgcanctggatcaagttccgcagtattccaacagaccacagtcccacaacttgcctgactnntagaggtgcannnaccgttgcaagntccattctggggaaccccttccttgtgcccgtttaaggaacaccattaatagtctacgtttaatatttataattaattttcaaacatccgatatgatagggacttaaaaatagtttcatctaaacagggcctcagtcgtctctccggaatttattctggtgaagtcaccaatctagcaattccagcacaggatcttgtcaatgatcagcaatcagcggttcggcccacattcagttcagcactttgggcttcccggcgagcatgaaggccttgaacacgagcttcctcgccaccgccgggtctccccactccgcctccacccccttcatcacgtccttggtcaccgcctccaggtctactcccttctccctcgccgtcgtcacgacggagccggtcttcaggaacccgacgaggtcgtccagcgtcatgtccacctctatgtcgacgtcggccggctcgccctcgcggcccacgccgacgggctcgaacgggaacggcaggtcgcggtacctgtccatggccagcctcgtcctcgggtccatatacgggcgcatggccgggtacagctggccgtgcagcttgtcctcgaacgggtggatctcgtagttgtagccccacaccgcgaggacgccgccgggcctcttgaggacgcggttggccacggcgtagaagagcgggatgtcgaaccagtggatggaggtcgccaccacgacgaggtccagcgagccctcgccgccgaccatggcgacgaggtcgtcctcggagaggtccaccggggtgtgcaggtaccgcaccttggggtgcgcgacggcgtggcggatctgcccctcgctcgcgtccgtcgcgaccacgctgtcgtagtgctccgcgatgctgatggaggcctggccggtgccgcagccggcgtcccaggcgcggtggtggccggctgtgagggcggcgagcttggagaaccaagcgtcagggtaccgaggccgcttcttggtgtacgtctccgacggtctctcatacagcccagccattcttgctctctgcttcttctctataacctccaccggaccacagctccagtcctggactgtgaagagcgcgaattgttggggtggatctgattcttttccaggagcaatctgataatgcagctttgcatctccaggagttcccaaaggtgcaccagtgcaggaacagttatcaaccatataaagctcccacttcttgatcccacacttatctaaagcagatgccagtcttgggtcatccaaatctggacaagagccatctgggctaacgagcactgctccagtgtatgctagtccagcggcctgagcggctccgtgataatggaacagaccccagctgaaatcatctgaaacatcaacgattgtccaaaactcctttgaaaccacaccattatccagcacactgaagtaaaatgtaccagggatgagagctcttcttactcggtactttctgcgcctccaaaccagttccccttccagggttctgacttgaaaaattggctcataccaaaatgaacctttagcttttcccctgtaaaataattgatactgacatgggaattgatcatatgctggattttgtccagctacaactctccaactccattccaagttgtccaaccatccaacaaacatgtcttctgcaagttcatggcttagcatttgttctctgaacatggttagtgggggtacagagggcttactggggatctcggcattgagatcaagacaattgttcttctgcaaaacacataaagaaaaggcctccagatgcggactctcatacgacgcaatgcagcgatagttgcaaacttgatcagttggagaacatgaatttaaacactgaagggctttcctacagttgggatcgaacagacaattcagtatctgaggaccacaatttcttatcatacagcttagggtagacagaccttttgccctaaggttttgcagcatatcaacaggtcttatgtacgcattaaccacaacaagtaagcaaaatctaatgtcatctgaattatgcctttcccaggcattagatacagccttaaggacttcagcagattccttcatgccacctgtttctccaatatttgttagcttgcaaaacatgtcctgacgtccagtgtattgaacatacctgccacctaacttgttttctaaggttggagatgattgaaagcagattatattgggaatgtcctcactgttatttataagccactgaacagtctcctgactcgttattgcaacattgactagcatatcacactgtgccagctctttcctaagttcatcatggccaattgacttgtctgtgaagacaagcatttcaaatccttcgtcaacccacttcatcctattagccgtgtggcgcataacctcctcccatggcgtgtccttcagcgggctgatgctcccgtcgcctactatggagactatgcggacggcgcccttcccggtgatggttccgccggccccgccgccaagctcgcccgcggcggcgcgcggtggcccgagagagcggacgccgccggagtagcggcgggcgatggtgcgcgaaggggcaggcacggaagcggtttcatggaggtggcggcgagtaggtaggaagaggcgagtggtggccgccgcggaggcggacgtggtgggcgtggctgccatgtgc

SEQ ID NO: 10241 - DNA, 238 bp, Oryza sativa
  Clone ID: PAT_MRT4530_16582C.1
gtgacactagtagaatactcaagcttgcatgcctgcaggtcgactctagaggatcccctatagtctgaaaggcagcgaagaaaaagcccctgacgagctacgaggtatgagctgcctgatgttggtgatacctgacgaaaaatccgtccgaacggctgtgatggatatcagcttttgctgcctcttcctcctgactttgtttcatcggctcatcgccatttcgcctttcgtcaatctc

SEQ ID NO: 10242 - DNA, 251 bp, Oryza sativa
  Clone ID: PAT_MRT4530_16583C.1
gggagaccaatatttcagtgttttcagcaagtaacaagttcacggactgccggactggccgcacatcacacaaaaagagaactcaattcttccaaataaggatttgcagtgacctatttgtttggcttactgcccttcaaggaagaattgagtgacctatttgtttggcttactgcccttcaagtaacaagttcacggactgccggactggccgcacatcacacaaaaagagaactcaatcggacgcgtgg

SEQ ID NO: 10243 - DNA, 366 bp, Oryza sativa
  Clone ID: PAT_MRT4530_16584C.1
atggccacgccgtcttgcaaccgcactactgcagttaccacgccgaacgccgtggcgaccatggctttcccgtgccctgtccggccggcggtgagcagcgacgcggcgaggcggccgccgagagaaggcaggcccatcggccttggactcgtctctttcctcgggctcaagcgctcggcggcggccggccgccggcggggtggcgcggccgaggcccgagggggaaggagacggcggcggtgtgtggcgtggccggtacgcctccatgccttatcggtgctcgtgttccttcgcgtcgaggagtggggaagcggctggagaaatggctctccggcttccggcggcgaggccgccatgttcgcctag

SEQ ID NO: 10244 - DNA, 439 bp, Oryza sativa
  Clone ID: PAT_MRT4530_16585C.1
cggcgtcatttattaaaaaacggaggtagtactattaagttcggtatatattcatcactcacaatgacgcgaaatctcctttatatttattggtggcagatcaagataaaagcaaggaattggactgggagaagagattcaggatcataagtgaaattgctcgagggctacagtacctgcacgaagaatctcggttgaaaatcattcaccgggatctcaaagctaacaacattctactagattccgatttaacccctaagatttcagactttggcttggcgaagttatttggaggggaccagtcgcacattgtcacaaatcgtgtagctgggacatatatatacatgtattcatgccggagtatcgatggaccacatgaactctttaagtattttatttacttttaagataagagaactcttcttggtgacatggcaaa

SEQ ID NO: 10245 - DNA, 422 bp, Oryza sativa
  Clone ID: PAT_MRT4530_16586C.1
tccggtggcaccggcggcgggaacggcgccccaccaagtctgccaaggcggctgtacgtctggcccggcatcggggggcctcccgcgacgaacctgccggcggggatcccccgcccccttgggcgcgcgcgatgcccgcgatcgcccgctcccgcggcgagcaatggaggcggagcgcgagcgagagagacgggagaggtagccgaggtggtggcggtggtgagagcgagcgggggaggaggaggaggcgcgagtcgagtgcccggcacgtgaccgctcccgctcgacgcccgaggtggcctcggcccgccgcggccggagtgggtacgagcctacgagggttcacgaaaccaccgatggaatttcggttcgtgaaaatcagtcggtcatttgccgtgaaaccgctaggtatcggtttgtga

SEQ ID NO: 10246 - DNA, 648 bp, Oryza sativa
  Clone ID: PAT_MRT4530_16587C.1
cggacgcgtgggattgcggcaagaatcaagaacttagcacgacaacacagagagattttctcaagagagattttgaggttttcggagatgcagggcgggaggagcgcgagcgcggtggaggcggcgaaggaggcggcggcgaacgtgggcgcgtcggcgtgggcggggaaggagaagaccaaggccgtcgtggaggccaccgtcgacaaggccagggcgcccgacacggcggccagggacgccgccgacgcgcgcaaggcggaccgcatccgcgaggtcgaggccaccaagcgccacgccatgcgcgccaacgccgccgcctaccacccgtcctcccccgccgccgcgccgccgccaccagctcagggcacagcccgtcggggtcggcggacgcgcccattgacagctcggcggcgcccgcccccgcacacaccgccgcgggcgctggggtcgtcaacagcggcgtcgcgccgcccgggcgccatcgccggagcggggggtgccttgggccgcccggcggcggccgcggggggagacggaagcgccgtcgacgcgcccggcggcggcgacgtggagggacatgcaggcggcgtgccggtggccgctacagagggcgccggcgccggctatccgccggcgcatgtctga

SEQ ID NO: 10247 - DNA, 217 bp, Oryza sativa
  Clone ID: PAT_MRT4530_16588C.1
ggataaaccgggttgcgttgtcaagccgccttacacgccccaaatgactgaccaggaccccatgagatgacttgggtgatttgatccccgatgccagccaaatactgatggtgtgggtggatgaactacacaggagactgatctacgttgggtgatgttgatcctccgatccacgccaaaactatgttggtgatgaacaacaggaactactacgctt

SEQ ID NO: 10248 - DNA, 436 bp, Oryza sativa
  Clone ID: PAT_MRT4530_16589C.1
cattccctttgtagaaatgaccaatttggttaatgggtctttggggaaagggtacggccttggctggaaacatatgcatcattgcaagagcaggaacaaggacaaatgcaatcaagatagcattataatccttgtggatatggcaagggtccatttgggagtagctgcactaacagttcgaatgagaccttttgcaccatgacggtaacgcaaaacatcaactgcatggatttcaaggatgacatgcccgacttagacaacatggcgagcatcattcaacatcctcagtgacgaccattcttaatcttgtacagataaacatccgattagctgaaggcgatcgacgacagcactagaggaggataagaaattctggatagagatgaacctccaaattcttaatgaacggcagggcattcttaaccagtactacacc

SEQ ID NO: 10249 - DNA, 1014 bp, Oryza sativa
  Clone ID: PAT_MRT4530_1658C.1
tcaagaccacttcttgctcaatagtttcgatatggtcaagtcagtaccaccaaatccatccatgacggccttcgcagagtgaaactcagctctggcggttaggctgcttctaacaactatgcatggcataccaatgcgctcagctgcaagaacgccagattggctacctgcgacaagaacacagttttgcacgtcccgtccaacatactcggatccagcgcgtagagtgacaataatcttctcggagcttttagacgctgcattgatatcaacactaagtttcagaatggacgcaacttcttctgctatcctctgcttttctgcagaagcagccttttgtgcttccttaactagctgttcatccaaactggaggctactccttcaccaagaacaagttgtccatataagcttctttcaacctcttctttcccaacaatatgtatttttgatgttctctcttggcctaatttttcaatgatatatcttgaagttttctctccatttctcccgtatgttgtcaatatggcgacaggcacaccctcattaagcgcatcatcaatgaactgttcaactccaggccgcagtggtaagctatcagaagctgagaacacttccaaagctttcagcttttcacgaagaacacttttcataaatgattctttctcgttagttggcaaagaagtaggccacccaatattgttcgcacctacattgaaagcttggcgattgccgaagcgatacacatctgcaagaactccttccacttcgaggagcacggcgatatccggcgacgcggagccctgcgacgacgaggaggaggaggcgcaccggagcggcgggatacggcggccggagctcgggggaacggcggcgcggagagggagagaggcggccgcggtggtggtggaggaagaggaggaggaggaggaggaggaggcagggatggaggaggagaaggccttggcgacctccggcggcgaggcccggagcgggaggcagcgagcggcggccat

SEQ ID NO: 10250 - DNA, 123 bp, Oryza sativa
  Clone ID: PAT_MRT4530_16590C.1
atggagtataagtacaactgtcggaacaaaggtgctggttctagacccaaaaccggcacctttgtcttcctaaccggcacctttgtgtggggcatgaaaagcactattggaagaaaggtgccg

SEQ ID NO: 10251 - DNA, 343 bp, Oryza sativa
  unsure (1)..(343): unsure at all n locations
  Clone ID: PAT_MRT4530_16591C.1
gcagcggcaaccaagggcggcacgttgccccgcgcggctagaccgctagtagactagtcccacgactccccatccctcctccctctctcgaccactcccgtggactcctctctcctncccttccctcccntcccccgngcgcggtggtggttcgccggagcgcagagcagcagcagcaaaaggccgcgagggccgccgtcgggatccccgccgncgccaagatgaacgacgccgatgtcgncaagnagatccagcagatggtgcggttcatccgccaggaggccgaggagaaggccancgagatcttcgtttcggcgaggaggagttcaatatttgagaagtt

SEQ ID NO: 10252 - DNA, 3864 bp, Oryza sativa
  Clone ID: PAT_MRT4530_16592C.1
atggtggtgctgcctgacgtcggcatcgtcctcatgctcacggtggtggcatctggtcacagagggagagccaacgcgggagggagggagagccgacgcggcaagagcattcctcgcggcatgggtggcgccgtgtgcttttacttggcttggcttgggtggtggggcaattggatctggactgacaagtgtttggtcgctgacgatgacatagaggcacaccctcttcgctgggcaccgcatttaaaaacaagagtgggtgtgctacctagtttgttacctgaagttggcatggaattcaatactgttgatgaggcttggatgttttgggttagctatggtggtcaaaaaggtttcgaggttagaaaaaggtactcaatcaaaaggaaatcagatggaaaggttaggtcatgcagatatgtttgtgcaaatgagggtcatagaaaggaggataaaagggatcatctaacaaagtgtccaagagctgaaacgagaaccgattgtcaagttcgcatgggtgttgtgctagatcaggagaaagggaattataaagtggctgatctagttttggaacacaatcacatccttcaattgccagaaacctcgcacttgatggtgtctcaaaggaaaatttcagagttacaaggttttgaaattgagacagctgacgatgcgggcattgggcccaaagcagcacatcagttggctagtatccaagttggtggctcacttaatctcaattacattctccgtgaccccaagaattatttacagggcaaacgccaacgagagatggtatatggtcaagcaggaagcatgctcatgcattttcaagataaaattgctaagaacccatcatttcaatatgcattgcagatggatagtgaggagcaaatagcaaacatattctgggttgatgctaaaatgctcactgactatgcatattttggtgatgttgtcagttttgacactacttttggaacaaacaaggaaagtaggccttttggtgtatttgttgggttcaatcagtttagggaaacaatggtttttggtgctgttctactgtatgatgagacatatgagtccttcaagtggttatttgagaccttcctaaaagcacataatggcaagcaacctaaaacaatctatactgatcaggattctgcaatgggaaaagcaattaagaaagtgtttttagaatcatggcatggtttgtgcactttccatatcatgcagaatgctgttaaacatgtagctgaactcgaggatgaagaatccagtaattctcccaaacagactgccgaagacaacgaggaagaacaaagtattctcacagattttagtgcatgtatgtttgagtacgaagatgaggaaacatttgaacaagcatttagcaccataagggcaaaggcgagcaagcaaagttggttggatagtatatacaaggtgaaagaaaaatgggctgaatgttacatgaaggatgtgttcacattaggtatgagaagtacacagttaagtgagagtgtaaatagtgaactcaagaggcatttcaaatctgattttgatatcattcgatttcttcaacattttgaaagggtggtggaagataaaagagaaaatgagctaaatgctgaatttgaatcaaggaagaaaatacccagaataaaaatgaggacacctatgctaatccaagctagcaagctatacacaccaatcatattcgaagcttttcaagctgaatatgaaagatccatggtagcatgcaccacggcattggaaggcaacaattgctatcttgtggcaattggcagtctagatgaaaattgtacctttgagaaggagtacaaagttgttggtgatcctttagagcaaactagtacatgcggctgtgggatgttcagtagaactggaatattgtgtgcacatgctttaaaagtccttgatttgatgaatataaaatctctcccatcacaatatgtactgaagcgatggacacgtggagcacgtagtgggacagtacaagataaccatggacgaagtattatagagaacccaagattaaatgagatgcttcgctacaaagatatgacccgcaaatttctcaatttggcacttcgagctgccagccatccagggtctaccttgttagtaaacaacgcacttgatatccttaccaagcaagttgaagaagaaatcaatggatttactgataccatagctctaggtcccactgatattactcctccaagtgacttggtgagtacagctcgcctaaagaaaaaggaggtggaaacaaaaacctcaaagcgcaaaaaaaattggcttgataagctgcacaagtccacaaataatggaagtaacaagggaggtaagagaaagaaaaaaggttcaaaggaacaaaagactgcaaagacgggaggcaagaaaaagggaaaagaagcatcagtacatgacaatccagcagggcaaaatatatatcctagtacctctttgcccatggaagaaatgtctgaaccatacatggccatcaacaccttctctcaactattgacgcaatggagtttggttttggtgaataggcttttggtctctgcgggctgcggcacctgccgagattgttcttttggcacgcttgatgaacagcttgatcttttgggcaagtatctccagaatgccattcggtttgacatacaacaaagcaacactcctggacgcagcattaaggagctgaagaggaggccgctgtgttcctccactcactcgctgctgagagacggcgaggaggagttcctcctctccctgactgccgaggaggccgctatgttcctccactcgctcccctcctccattcgccgcgcgctgcctgtcgcggcgcatggcctgctcgagctcggcacacgcacatcgagctcgtggcaccgttcgaatcacagtgagaacaagtacctgaggtcccctccgattattctccagaaggttgtagaagcttggaggatgccgaggcgggagggtggtcgctctcgctccgccgcctacctcgtcctcttcgcttcctgccttttagctgttgcggcggcatcacaccaggaatttcatgaagctgctggatccagaactcttcttatgtcacatgaacacacaaatcaagtgcattgctcaagggaaagaagccgtgcagcttggaaagctattgatgagtatttgatgccctttgtggaaaaagagaaatatgaactcccaagcaaatgtagacttcatcctggtaatgacatgtttcgggaacaggagcagcataagattcactttgatataaatgaatggcgctgtggtttctgcaagaaagccttccgagcagagaagttccttgatcagcattttcacaatcggcacaataatcttgtggataatagccttgcagatagttgctttcctattaatcaagggcaatctgccagccgtcttcatgaatttctcttgcgccaattctgtgatgcccacacatgcaagaatggctctaaacctttccccaaaggtggcaggtttaaggttatcatactttcatatagcatttacactttaaacatgccaaataaacaaacaaacagattctacctggctctctgtgccttaacaatagtacttttgccactgttctatctcatagtattcttgcaccagagccatgccctgcttcttccctatgcagcccctcatgcagatgcaatcgtcaagaagcaaacgtgtgctttttatgtgagttcatcccttgaaatgtgggtttacatgaccgtttacagacaatctcatgagactatatgtacattgaagaatgaaaatgtgtatccaatatttagtaggctctaa

SEQ ID NO: 10253 - DNA, 225 bp, Oryza sativa
  Clone ID: PAT_MRT4530_16593C.1
atggtcatcaaagctaaaggaaaagggtcatcagcgctggaggagaggaccccactgggttacccatacacgcgggacatgggtatatgtattggtttctgcccgctagtgttttggggcatcaaggatgttgttaccgtccccgtcacggccaagggccgcgtcagccactttgtcgaggcccagatccccaaggatctgccatcggtgaggctcgacaagtag

SEQ ID NO: 10254 - DNA, 734 bp, Oryza sativa
  Clone ID: PAT_MRT4530_16594C.1
aattctgtgatgcccacacatgcagaatgggctctaaacctttcccaaaaggtggcaggaaccaaacaaacagattctacctggctctctgtgccttaacaatagtacttttgccactgttctatctcatagtattcttgcaccagagggaaatgaagaaaggcggtcaaaatttaagacgaatttcgaaagttgtccaaaagaaaaaaccatcttaggtacctaattccatgccctgcttcttccctatgcagcccctcatgcagatgcaatcgtcaagaagcaaacgtgtgctttttatgtgaggtcaagcaagataatttttcgatgccttgcccaagctggagtcttgttgacctctgtagttcatcccttgaaatgtgggtttacatgaccgtttacagacaatctcatgagactatatgtacattgaagaatgaaaatgtgtatccaatatttagtaggctctaatttgaatcctatgggcttagattaatggaatagaaacatccccatataatttgtaatatttgcaagaggcttggaggtaattgtcattattttggtattcgtaaaaagtgtgcctcggtttgggcttttcgtctaaatcctaaggccctctttgtttaggcttataagccaacttataagtcaaaaagtctaagcctaaataaacatgtagcttttccgtttggctttttggaaaaaaaacccccccaaaataaaaaaacaaa

SEQ ID NO: 10255 - DNA, 4898 bp, Oryza sativa
  Clone ID: PAT_MRT4530_16595C.1
cttgtaggagccgcgtcctccgcgcgcgagcgcgtgttatcctcaccacccaccgctcgtcgcctccactccgatcgccgccgccgcggcaggggagggggggagggtatcctcaccgccggtgccctcaccgcggcgacccttcaaaatcccccaggacgccgggaggggatcggctccgactccgtccgagcacgcgccaccgccaccgccaccgccattgtgggccctcgatcccggggcggcgcgcgatgtggcgtcacgcggcgcggcggtcgtcggcgcagatccggcggagcggggtcatgtcgtcgtcgtcgtcgccggcggcccccgctgccgcggccggcgccgcggtgcccggcccctgcatcgtccacaagcgcggcaccgacatcctccacgacccatggttcaacaaggacacggcgttccccatgacggagcgggatcgccttggcctccgcggcctcctcccgccgcgggtcatgtcgttcgagcagcagtacgaccgcttcataaactcgttcaggtcgctggagcacaacacccggggagagcccgacaccatcgtcgcgctggccaagtggaggatcctcaacaggctgcacgaccggaacgagacgctgtactacagagttctaattgacaatatcaaggatttcgcgccgataatatacactccgactgttgggttggtctgcgagaattacagtggcttgttcaggcgcccccgtgggatgtatttcagcgccaaggataagggggagatgatgtcgatgatttacaactggccagccgagaaggttgacatgatagttgtgactgatgggagccgtattctaggtctaggtgatcttggagttcagggcataggtatacctatcggtaaacttgatgtttatgttgccgctgctggtatcaatccacaaaaggttcttccaattatgcttgacgttggaacaaataacacaaagcttctagaagacaagctatatttaggactgaggcaacctaggctggaaggagaagaatacttgtctgttgtagatgaattcatggaagctgttcatgcacgttggccgaaagcagttgtgcaggggacagcaggagttgctctagctggcctacttggagctgtgagagcacaaggtcgacccctctctgattttactaagcagaagatagttgtggtgggagctggaagtttatttcatacaaggtatttcttgtcaaaagtctgtttcctccgttctaattcctctttagaatccagtgctgggataggtgtgcttaatatggctaaacaggcgatgctaaggatgccagggataaacaggagcggggaagggcataatcaattctgggttctggacaaagatggacttattaccaaatccagaaagggcctggatcctgcagttgctcgctatgccagaggttttggtcctgaagaggtgcaagatctccatgagggggctagtcttgttgaagtgctttatactgatcatcaggtcaggaaagtgaagcctcatgtgcttttaggactttctggagttgggggcatatttaatgaggaggttctcaaggctatgaaagaatccgattcccctcgtcctgcaatttttgcaatgtccaacccaactactaaagccgaatgtactcctgaagatgtattcaaatatgttggagacaatgcagtatttgccagtggaagccctttcagtaatgtcactttaggcaatggtagacaagggtacgctaatcaagcaaacaatatgtatctgtttcctggtatcggtttaggagcccttctttcaggtgctcggcatattacagatggcatgctccaatcagcagctgagtgccttgcgtcatacatcacagacgatgaaattcgaaaaggcatcctctttccatcaatctcaagtatcaggcacatcaccgcacgtgtcggcgccgcagtcgtccgtgccgctgttgatgaagatctggccgaggggcgttgtgatgtagacgctagggacctcaagagcatgactgaggcggacacagtcgactttgtggctcggaagatgtgctatggtggtcaaaaaggtttcgaggttagaaaaaggtactcaaacaaaaggaaatcagatggaaaggttaggtcatgcagatatgtttgtgcaaatgagggtcatagaaaggaggataaaagggatcatctaacaaagtgtccaagagctgaaacgagaaccgattgtcaagttcgcatgggtgttgtgctagatcaggagaaagggaattataaagtggctgatctagttttggaacacaatcacatccttcaattgccagaaacctcgcacttgatggtgtctcaaaggaaaatttcagagttacaaggttttgaaattgagacagctgacgatgcgggcattgggcccaaagcagcacatcagttggctagtatccaagttggtggctcacttaatctcaattgcactctccgtgaccacaagaattatttacggggcaaacgccaacgagagatggtatatggtcaagcaggaagcatgctcatgcattttcaagataaaattgctgagaacccgtcatttcaatatgcattgcagatggatagtgaggagcaaatagcaaacatattctgggttgatgctaaaatgctcactgactatgcatattttggtgatgttgtcagttttgacactacttttggaacaaacaaggaaagtaggccttttggtgtatttgttgggttcaatcagtttagggaaacaatggtttttggtgctgttctactgtatgatgagacatatgagtccttcaagtggttatttgagaccttcctaaaagcacataatggcaagcaacctaaaacaatctatactgatcaggattctgcaatgggaaaagcaattaagaaagtgtttttagaatcatggcatggtttgtgcactttccatatcatgcagaatgctgttaaacatgtagctgaactcgaggatgaagaatccagtaattctcccaaacagactgccgaagataacgaggaagaacgaagtattctcgcagattttagtgcatgtatgtttgagtacgaagatgaggaaacatttgaacaagcatttagcaccataagggcaaaggcgagcaagcaaagttggttggatagtatatacaaggtgaaagaaaaatgggctgaatgttacatgaaggatgtgttcacattaggtatgagaagtacacagttaagtgagagtgtaaatagtgaactcaagaggcatttcaaatctgattttgatatcattcgatttcttcagcattttgaaagggtggtggaagataaaagagaaaatgagctaaatgctgaatttgaatcaaggaagaaaatacccagaataaaaatgaggacacctatgctaatccaagctagcaagctatacacaccaatcatattcgaagcttttcaagctgaatatgaaagatccatgatgaaaattgtacctatggtagcatgcaccacggcattggaaggcaacaattgctatcttgtggcaattggcagtctagatgaaaattgtacctttgagaaggagtacaaagttgttggtgatcctttagagcaaactagtacatgcggctgtgggatgttcagtagaactggaatattgtgtgcacatgctttaaaagtccttgatttgatgaatataaaatctctcccatcacaatatgtactgaagcgatggacacgtggagcacatagtgggacagtacaagataaccatggacgaagtattatagagaacccaagattaaatgagatgcttcgctacaaagatatgacccgcaaatttctcaatttggcacttcgagctgccagccatccagggtctaccttgttagtaaacaacgcacttgatatccttagcaagcaagttgaagaagaaatcaatggatttactgataccatagctctaggtcccactgatattactcctccaagtgacttggtgagtacagctcgcctaaagaaaaaggaggtggaaacaaaaacctcaaagcgcaaaaaaaattggcttgataagctgcacaagtccacaaagaatggaagtaacaagggaggtaagagaaagaaaaaaggttcaaaggaacaaaagactgcaaagacgggaggcaagaaaaagggaaaagaagcatcagtacatgacaatccagcagggcaaaatatatatcctagtacctctttgcccatggaagaaatgtctgaaccatacatggccatcaacaccttctctcaactattgacgcaatggagtttggttttggtgaataggcttttggtctctgcgggctgcggcacctgccgagattgttcttttggcacgcttgatgaacagcttgatcttttgggcaagagcaaggttgactggttgagcggggtggaggcgacaggcggggcggagctggacgggcggtggccggagcaggccagtggagctaagcggcggtggccggagcaggggcaaggggccacggcaccgcgatgccgaggggtgactggcggagagaggggcggcgggtggagcagtggagagtggcggcgagctcctgggagatggcgacgggatgaggccgagaggacgccaacggcgaggtggagcacgcacctcaagaagcgggtgtcgccggagcagaagaagggtgggggcaagagcaagaagaagatgacctggaccgacgtgctcgtcccgtccccctcgccatcgtcatcctccaccgcgacgaccaactgctccaggctccagcggcgactcggccgatgcgcagagcaacacaagcaaggaggaggaggcggacaagatcgagatccccatgctcgacccctgtag

SEQ ID NO: 10256 - DNA, 463 bp, Oryza sativa
  Clone ID: PAT_MRT4530_16596C.1
ggcacgaggatgcaatggagtttatgggggaaagttcagttgctttttgttccatgtaatatcctcgaattgtattccgaaaccaacttcttaatataatgggcagagctccaacctttacttcagaaaaagagaaaaggtcaccttctcctaacttactcgctttgttgttttttccattcacatgcgtttgcagcttggcaactagaggagctgacttctggattgatctcctctcttattttccaacaatgagcatttgttgcaggtaatgagcttgtacagcaaaaaaggatcaaatttgaaaccatctgttacagcttatatgtgtttacattgaattagcaagtacaataaagaagggtcaaatttcccttttattacagttaatgagcttgttaaagtctgtctatatattaaggaagaaaattaatggtgacaaattagttgtcaaaatttggaa

SEQ ID NO: 10257 - DNA, 438 bp, Oryza sativa
  Clone ID: PAT_MRT4530_16597C.1
atggacgttgtcctctcctctacctccgccgcgctgggaggaggccggcgacgggagtcagggggcgcggtgggggagaagctcgccgtctcgccgggaggtcgccgccttgccgtttcgccgcgttgccgggaggtcgcctcgccgggaggagaaggggcgagaaggggtggggttggcgtcggacggggaggagaaagggcggcgtcgggcggggaggagcaggggcggcgccgccgtcgggcggggaatgaggtggccggccggccggagggcaggggcggcgccggccggagatgcgcctctcctcccacctgctgcgcgtgctccgccaagctccaggtagccctggagcgtggagacgacaaagctttgttacgacggccgacaggtggtcctgaattccaccgccaaaatcaggaacaagaacaaccatga

SEQ ID NO: 10258 - DNA, 478 bp, Oryza sativa
  Clone ID: PAT_MRT4530_16598C.1
ggtttaagatttcgtcgtaaaattctcgtcaaatggagctatacatgactgtaactgtctctctctagcctgtctgcctagtcttgcctgcacggccttcttcctacatatgatgttgttctggttggcatcccccttcccctcttaccacacaataacctatctagtcatactgtgtggtctgtgccattgattgatcagaaggacacgcaggggaagcagttgttgttgttgatgtaaggagaaggtgaggaggaaagaccaggggcaaagatcacaccccctcccgagaaaaagtgagagagttcttcctagttggggcaagaagcaccgcaagatccgcacgacttggcctcgccatcagaggaggctccgcacttggggcagctggatccgtgcattttgggaataagatagatggacagatttgtcttgaagtagagctgaagtgttttattatgtctgtgatcctcgtgcc

SEQ ID NO: 10259 - DNA, 152 bp, Oryza sativa
  Clone ID: PAT_MRT4530_16599C.1
atgagcggtgactgccgtggccgagcttggatcgacggcaacagcggcggccgtgctcgaggaaggcatgtcctcatgtgggcgggcgcctgtgatcaccgcgccagccgccgacccctgctgcgaatatttgaggagacgaggaaagagca

SEQ ID NO: 10260 - DNA, 3759 bp, Oryza sativa
  Clone ID: PAT_MRT4530_1659C.1
atggcggatgagtcagggagctgcggcggcggcggcggtggcggagggggatgcgaggcggtgaagaagagggtggaccagagcgtggcgttccatgagctgttcgggttcgcggacccgctcgactggctgctcatggcggccgggagcgccggggcggtggtgcacggcgccgccatgccggtgttcttcctcctcttcggcgagctcatcaatggcttcggcaagaaccagcacagcctccgccggatgaccgacgaggtgtccaaggcacagatcgcttgctggatgtacaccggggagcgccaggtgggcgcgctgcggcggcgatacctggaggccgtgctgcggcaggacgtggggttcttcgacaccgacgcgcgcaccggcgacgtcgtcttcagcgtctccacggacaccctccttgtccaggacgccatcggcgagaaggtcggcaacttcatccactacctatcgacgttcctggcgggtctcgtcgtcgggttcgtctccgcctggcggctcgcgctgctcagcatcgccgtcatcccgggcatcgccttcgccggcgggctgtacgcctacacgctcaccggcctcacgtccaagagccgggactcctacgccaacgccggaatcatagccgagcaggcgattgcccaagtcaggacagtgtattcctatgtgggggagtccaaggccctcaactcgtactcggaggcgattcagaacacattgaagctggggtacaaagcagggatggccaagggtcttggcattggctgcacttacggtatcgcctgcatgtcctgggcgctggtgttctggtacgcaggagtgttcatccggaatggccagaccgatggtggaaaggcattcaccgcgattttctctgcaattgtcggcggcctgagtttgggacaatcgttctcgaatctaggcgctttcagtaaaggaaagattgccggatacaagctgttggaggtgataaggcagaggccgacaattgttcaggacccagcagatggaaggtgcctggatgaagtccatggcaacatagagtttaaggaagtggcctttagttatccgtcccgtccggatgtcatgatattccgtgacttttccctcttctttcctgccggtaaaactgcagctgttgttggaggtagtgggtctggaaagagtacagttgtggctctgattgaaagattttacgatcctaatcagggtcaagttttgctggacaatgtggacatcaagacactacaattgaagtggctgagagatcagattggtttggtgaatcaagaacctgcactctttgctaccaccattcttgaaaatattctttacggcaagcctgatgccacaatggctgaggttgaggctgcggctacatctgccaatgcccatagcttcattgctcttcttcctaatggctataacactcaggtcggggagagaggacttcaactctctggcggtcagaagcaacgtattgccattgctcgtgcaatgctaaagaacccgaagatccttctcttagatgaggcgactagtgcacttgatgctggttcggagaatattgttcaagaagcccttgaccgcctgatggtcggtaggacaactgtcgtggtcgcgcataggctgtcaactatacggtgcgttgacatgattgctgtgatccagcaagggcaggttgttgagaccggtacccatgacgagctccttgcgaaaggaagctcaggagcttatgctgctctcattagattccaggagatggccagaaaccgtgacttccgtggcccatccacccgcaagtcccggtcatcccgcttgagcaattcgctgtccactcggtcattgagccttaggtcggggagcttgaggaacttgagctactcatacagcactggtgcagatggccgtattgaaatggtttccaatgccgacaatgaccggaagtacccagcacctaagggttattttttcaaactccttaagctaaatgcacccgagtggccctataccatactgggagccatcgggtccatcctatctggcttcatcggccctacatttgctattgtgatgagcaacatgattgaagtgttctatttccgggacccgaatgcaatggagaggaagactagggagtatgtgtttatctacattggaactgggttatatgcggttgtcgcgtacctcgttcaacattacttcttcagcatcatgggcgaaaatctgaccaccagggtgcggaggatgatgcttgctgttgcattgtttgatcagagactattttcagctatcttgaggaatgatgtggggtggtttgatcaagaggagaacaattcaagcctcgtggcggcacgcctttccacagacgcagccgatgtgaagtcggccatagcggaacggatatcagtcatcctgcagaacatgacctcacttctcgtgtccttcgttgtgggcttcatcatcgaatggcgggtggccgtcctcattcttgtcaccttccctctccttgtccttgccaactttgcccagcaactgtccatgaagggcttcgccggcgacacggccaaggcgcacgccaagacgagcatgatcgccggggagggcgtcagcaacatccgcaccgtggctgcgttcaacgcgcaggacaaggtcctgtccctcttctgcaccgagctgcgcgtcccgcagatgcacagcctccgccggagccagatctccggcgcgctcttcggcctgtcgcagctgtcgctgtacgcctccgaggcgctcatcctctggtacggcgcgcacctcgtccgacaccacgtgtccaccttctccaaggtcatcaaggtcttcgtcgtgctcgtcatcacggcgaacaccgtcgccgagaccgtcagcctcgctccggagatcgtgcgtggcggcgagtccatccggtccgtctttgccatcctcaactacaggacgcgcattgacccggatgaaccggaaaccgagcccgtcgagtccgtccgtggcgacatcgacttccggcacgtcgacttcgcctacccgtcgcgccctgacgtcatggtcttcaaggatttcagcctcaggatccgagctgggcagagtcaggcgctcgttggagcgagcgggtcagggaagagcaccgtcatcgctctcatcgagcgtttctacgaccctctcgccgggaaggtcatgatcgacggcaaggacatccggcggctgaacgtgaggtcgctgcgtctcaagatcggcctggtgcagcaggagcccgtgctgttcgccaccagcatctttgagaacatcgcctacggcaaggacggcgcgacggaggaggaggtgatcgaggccgccaaggtggccaacatgcacggcttcgtcagcgcgctcccggagggctacaagacccccgtcggcgagcgcggggtgcagctctcgggcgggcagaagcagcggatcgccatcgcgcgcgccgtgctcaaggaccccgccgtgctcctcctcgacgaggcgacgagcgcgctggacgcggagtccgagtgcgtgctgcaggaggcgctcgagcggatcatgaagggccggaccgcggtgctggtggcgcaccggctgtcgaccatccgcggcgtcgactcgatcgccgtggtgcaggacgggcgcgtcgtcgagcagggcagccacggcgagctcgtgtcgcggcccgacggcgcctactcgcggctgctgcagctgcagctacaccacggctga

SEQ ID NO: 10261 - DNA, 2541 bp, Oryza sativa
  Clone ID: PAT_MRT4530_165C.1
atggccatctccacctcatccgccgctccgccgcctcgcctcctcccgccccaacctccacccacctcccgccccctcccgccgccgccgccgcctcctcctcccgcccatggcccctcgccgccgccgccgcgaacccgcctccacacccgtgcgctcgccgccgcggcttccgccgacccgcgcgcggcgcacgcggtcgccgtcaagtcgggctccgcggcgtcgtcgggcgcccgcgcctggaacgccgtcatgtgcgggtacctccgggcgggcgcgctggcggatgcgcggggggtgttcaagcggatgcccgcccgcgacgccgcctcctacagcgcgctcatcttgggccacgcgcgcctcgtgcacgccctggccgtcaaaggcaactccccgtgcggcggcggcggcggctcgctcctcgtcgacaacgcgctgctcgggatgtacgtcaagggcggccgcttcgacgacgcgctgaaggtgttcgacgggatggagcgacgggacgtctcgtcgtggaacacggtcctgtccggcctggtcgagctggggaggtacgacgaggcgttcgagctgttcggggacatgcgggacagcggcgttggggccgacaggttctcgctctcggcgctgttggctgcggccgccgaggggttcggcctgcacgagggcgcggcggtgcatgcgttgtcgctcaagtctgggctggagatggatttgagcgttggcaacgcgctcgtcgggttctacgcggagcatggtcattccattgaggatgtggttgatgtgtttgagagaatgcctgcgaaggatgtgatttcatggaccgggttactcaatggatacatggagtttggccttgttgacatggcaatggatgtgttcgaccgtatgcctgtgaggaattttgttacatacaatgcagtgttgactgggtttaaccacaacaaggaaggtgtccgggttacctttgctagaaagtcagggctgcgaggactcgggttgtttaagcagatgctggaggatggactggagatctcagatgtaactgtcacaggtgtcctgaatgcttgtgctattactgcggagaggaagatgagtgagcaggttcaagcatttgcgattaaatgtggctgcggttcaactccttggatcgatgccgctttgatagacatgtgcatcaagtgtggcaggtctggagatgcacatcttctgtttgagaaatggcgccacgaggagagttttcacattgcttggaattctttgctggctgcaagtttcagagatggggagtatgagaaagcactttccactttccttaagatgtttagaagcaatgatgttcagttcattgatgaattcatcttgactactgttcttggagcatgtggagccttaggttttgctgaattcggaaagcaaatgcattgctttgctgcaaaatctgggcttctgagtgctcagggagttggtaatgcgatcattagtatgtatggcaagtgtggggcattggaaactgcagtcaatgtctttaagcgaatgccttgtagagacttggtttcatggaatgctctgatcacttctcatcttcttcatcgccagggagatgagatactggacctgtggtctcagatggagagattgcccatcaaacctgattctgttacctttctcctggtcatatcatcttgcagctacacaagctcaaattctgctgataaatgtagggagctattcctttctatgtcaagcatatatggcattgaaccagctgtggaacactacgcagcatttgttcatgtccttggatgctggggtcattttgaggaggcagagcagcttatcggtaaaatgccgttcaagcctagtgcattggtttggcgatcttgtctagacagctgtaacaggcagcccaacatgaccatgcggaggctagcaatgaggcatctactcgcactggaaccacaggatccatccacatatgtcctggcatcaaatctctactcagaatcagcaagatggcaatgctctgagagcacaaggctgaagatgcgtgaaaagggtatgcgtaagattccagcaaggagctggacatttcatggcaactctattcactcatttttcgcacgggataggtcacatccccagtccaaggacatctacgctggcctcgacgtgctaatccttgagtgcatgaaggctgggtatgaaccggacaccaccttcgtgctacacgacgtcgaggaataccagaagaggcacttcctgatgtaccatagcgtgaagctagctgccatgtatggccttctaatgtcaggacatggtgaaaccatccgcgtcgtgaagaacgtccgcatgtgtggtgattgccactcattcctggagtatacttctgcagctaccggtaaagagatcttgtgcctatggcagacagtagcggccttctttgcttgtcatgacgaggctccactcaagcgccaccttgtcagctcacacagggtctatgttggcatgctgtccttcaccagttag

SEQ ID NO: 10262 - DNA, 498 bp, Oryza sativa
  Clone ID: PAT_MRT4530_16600C.1
cttctagcaccagctggaggtctgcgtcttgacaaaaataatctttcaggtgaatgtcgctcgcgaacagacctacgtgccacctaaataccgttgaaatcaacgtgcctgtagtcttgggtcagctgagttattggaggcggttcatcaatctgcgacggtcctatctcgtgttgtgctgttgacgaccccccaccgtagctacatggttctctgtaggactgtgtgctgccggcatatcccattatttattgggggtgtacattcctacaaaacattgaatccaaagttgtagcgcacacacatactggaactaaaatattttatagtaaattacaatttgtacccgttgtttgtggttgcatgataggtgcttaggagttatgccatgtagctaatttagctatcatattagcaagaatagggatacctcgtttaaaatggagccattctatttgtgaacattggagtaagaaattgtagacttaatttttggaa

SEQ ID NO: 10263 - DNA, 398 bp, Oryza sativa
  unsure (1)..(398): unsure at all n locations
  Clone ID: PAT_MRT4530_16601C.1
caccgcccgccgccgtgcgccgctgtccaccgcccacccccacacgccgccatgcgcatttgcncctgagagagagagattaggaagtggttaagaggaggtatgacatgtggatcccatcatttttttaaaaaagaaaatgctgactggattgccacgcgtacgccacgtaggataaaaccgttctggattgggtcgaggggggtaattcgtccggtattgaaaattcagggtgagcaatgtttggttttcagggtaatttgttcaaccacgatagttacgggggtaatttgtacattttcctttcaagtaagatatgctatttgcgatgagatttatnaatagcatctgttgaacaagttattggaaaatttttnaaaaaanaaaaannnttnaaa

SEQ ID NO: 10264 - DNA, 285 bp, Oryza sativa
  Clone ID: PAT_MRT4530_16602C.1
ggaagcggcgagaactgagaacctggagaaaaccacctgtgacaccattaccgcactcgattttttcgtgttgtcccttttgttcttcccccacacctccaccctaagtagcaaccacgtttcaacacgcgaccaatgattgcatctgacttccgagagcccatttgacttccccatgcaccacgcgtgtgaagaaagtaataattcttttgtgctgctccacccacggatttactctggagctccctgtaattcaccggttccttcatcggcccccaaaaaaaa

SEQ ID NO: 10265 - DNA, 271 bp, Oryza sativa
  unsure (1)..(271): unsure at all n locations
  Clone ID: PAT_MRT4530_16603C.1
cccctctcgagaaaaaaaaaaanatccaaaattttttcgcccttgggttcgaaatcttcgtgccttcctcctcctcgcggcctccaattcgaacgccccagttgctcgcgccgccgggattccccanatcccacctcctccccagctcgcgcggcccaattcgaaggcggttctagggtttcccggcacgaatttagggtttcgggggagcttcggggggtgttgttccttgttccgcctagggtttggaatttggggggcgtggagagat

SEQ ID NO: 10266 - DNA, 297 bp, Oryza sativa
  Clone ID: PAT_MRT4530_16604C.1
ccataccttaatggtattgtggtgaagggtatgggtgtggcgaaaccttttcgtccgcagcccttgacgccgtgccatattggcactatggcgaagggcgtgggttggcgaaacctgttcgcccgcagcccttgacaccgtgctttattggcactatggcgaagggtgtgggtgtggtaaaaggggttccatttcgccttttcggtttgggttccccacgaacggcgccagctgttgtcgaatggacaactatgccacgtcgaaaggcgtggttctcatgtaaaagcaattgtattg

SEQ ID NO: 10267 - DNA, 482 bp, Oryza sativa
  Clone ID: PAT_MRT4530_16605C.1
gggaagaccaagtgaagcagtatatgcggagcaaagttctccatgaagaacctgctcagatcaaacacctctttgtcactctggactctggaggtgcactgacttgagactggtgacaaaagcccttttacccagttgctgcaaattgggatattgaaccagccctgatgctgtattctgagatatctgctgcagtagttgtgtatttggctagaaaaaggaaatttgcagaagcaataaacatgatttatttattttgcgtgtatatagtgttttgcacctgggaagagtaacggaatgcatgatcaacttgcaatattcattcttggcaaaattctcttgtgacatgataacacataaagaaaagcctgctaatcttgacatggatagctccttgcccccgaggattaccataactcagtactattatctgtttagagcttttctggtgaggactaatacagtgtggtttgttcactctg

SEQ ID NO: 10268 - DNA, 405 bp, Oryza sativa
  Clone ID: PAT_MRT4530_16606C.1
atgtcggagattggcttcatcgcactcgtcgaaactcgacgcacctctatctcggaggatatgatacctgcgtcgtccgaccgtggaggaggagctcaacgtggcacgcgccgcgatacgacgtgctgcatggcaacatcaccgccgcggatgcggagtgtttccttcgtgtactgcccactctcccaggaccatccttatgtccgcgtcgtcgtcgctcaccaccccttctggaaccgatccgccagcgccaaccactacatgctctccagtcacgataaaagactagtgttggtctatgagggcaagacaaagtgtgctgattggcctagagcaatttcggaatggtggcgtgatccagagctgtgcgacgaggaggatgtgacggcgatgatggaaaagtaa

SEQ ID NO: 10269 - DNA, 251 bp, Oryza sativa
  Clone ID: PAT_MRT4530_16607C.1
gtgccgccgcgccgacgccctcagtgccgccgcgccgcgccgtgtgccgcgccgtgcgacgccgtcgccaccgccgctgtcgagcccgagggagttgcggatccgagcgagggtcaagacccgcaagactacgagcaaggcaagtcatcactattctttgaacatgttgatcccaattgcaaaatttattttgtttacaaataagattgcatgcaatgatgaatatcctacttgtgaaatatgccatgcct

SEQ ID NO: 10270 - DNA, 355 bp, Oryza sativa
  Clone ID: PAT_MRT4530_16608C.1
cgccgttggcggctccagtttgtaacgcaccctccggtctctgtcctcgagcgcgcgggccttggggctttggacatgcacggccagcttgtgcatcgctcgcaagggctcgagcggctggatcaccgtgcctcgtagtcagccggggacgaggccctgatcaccgcggtaatggccgtcgcgggggagccagaagccgacaatgcagtcctccgcgttgtaacggacgccatcattacctgcttcatccacgtcctcgtttgcaacaacaaaagatgtatgattcattatttcaagaacacgaaggctcacgaagcgcgacgccctggtgagggagatgacctgctgggcctgg

SEQ ID NO: 10271 - DNA, 1044 bp, Oryza sativa
  Clone ID: PAT_MRT4530_16609C.1
atgcagatgcatccgcgcgacgatgatctcgacctcgccgccggcgaagcggcggcgccggtaaagagcggtgacggcggcgagacgccgacgatgggcgccgccatggacaaggagaggcagataccagtggaccccgtgtcgctgcgccacctgggcatggtggccgacgaggactcgccgctgtcggcgccgtccgtgctcacggaggtggtggtgcggtcgtcgtcgccgatgctgccgccgctccggcggcccaccttcgtcgccgccagcctcccgtgctcggcgacctcctccccggtccacggcgccgccgagaccgacaaacccgcagcggcgacgcccagccccacggcggcgatgcgcgccctcgcgcggcagcactccgtcgcgctcgcccactacgtcgccgcgccgggcgccgccgccccggcgctggcgcggagcgcgtcccgcgccgaggggaggtccatggtgccgcacgacgacgagggcgacgccgaggcgcccaaggcgatcgccgccggtgaggacgagggcttcaactgcggcgcgctgtgcatgttcatcccgggcttctccaagaagaagtcctccgcggcggcggcggcggcggtggtgtcgagcatgcagaggcagcagtcggtcggcgcgaggccgcggcggagcagcagcgtgtcgcggctggcgtcgctggagaggttcgagtgcgggtcgtggagcccgccgccaccgatggcgccggcggagcacttggcgcaggaggtggcgaagagcagctgcgccgacgacacggaggcgccggtgaagatggcgttcgtgttcgaccacggcgagccgagggggatcctcaagaagtcggcgtcgtcgcggcaggagccggcgaggccgtcggcgtcgtcgtcgcagcggcacgtgaggttctcgacggcggcggctgttgcggcggcgtcgtgcccgacctccccgtgcgtgaccccgcggctggcgagggcgagggcggagttcaacgccttcctcgaggcggcgcagagcgcgtag

SEQ ID NO: 10272 - DNA, 588 bp, Oryza sativa
  Clone ID: PAT_MRT4530_1660C.1
atgagtcaaaaaaccagcaaggacgaggtgatcggtggaaggtcgccgagcggcgacggagacaaggcggaggaggagctccgcgaggcccgcagcggcgacgacgacgacgacgacgaggccggcacgaggcagccgtacaactgcaccttctgcaggaggggcttcccgacggcgcaggcgctcggcgggcacatgaacgtccaccggaaggacagggttggaagagcgacgccgtcctcctcgtcgtcgacgacggcggcggcggcaaggcgaagcgtcagctacgatacgctcgtgaggttgtttcgtccgccggcgagcggaggaagcgaggatgcggcggcgtccacggcggccggcggcggcgcgagcctgaggtcccgtaccgccgagccggcgccgcaagagctaaggctgtttgggcgcggcgccggccgtcgggaagaaggtggtggtagagatcgacgagatcgctacggctgctgctccaaggatggggatggcaatggtggccatgatcatggggaggaggaggaattggatttggagctgagacttggtggttcaggctctgcaggctcatga

SEQ ID NO: 10273 - DNA, 1605 bp, Oryza sativa
  Clone ID: PAT_MRT4530_16610C.1
ccacgggtccgcgcaggcacgcacggcaccggcggcggaggacgcggcaggagcagcagccgcctcctccaatccccgagccgaacactcgctggcgggcgcgcgcgcgcgcagccggggaaccgggggggagacagggtggtggtggtgaggcgggggcgagcgcaatgcaggagccaaagcacaccgatccggcggccatgcgcggggcgcaccaccgccgggccagatctgaggtcgccttccgcctgcccgacgacctcgacctcggcggcggcggcgcgggggcgttcgacgagatcggctccgaggacgacctcttctccaccttcatggacatcgagaagatctcctccggccccgccgccgcggggggctccgaccgggaccgcgccgcgggagacgtcctcgccgccgcgccccaagcaccgccacagcagctccgtcgacggctccgggttcttcgccgccgcgcggaaggacgccgccgcatcgctggcggaggtcatggaggctaagaaggccatgacccccgagcagctctccgagctcgccggcatcgaccccaagcgcgccaaaagaattctggcgaacagacaatctggagctcggtcaaaagagagaaaagctcgttacataacagaacttgagcggaaggttcaaactcttcagactgaagccactactctctcagcacaactcacactatttcagagagacacaactgggctttctgcagaaaatgcagagctcaagatacggttgcaggccatggaacaacaggctcaactgcgagagcctctgaatgatgcactaaagcaggaactggagaggcttaagctcgctactggtgagatgaccaattccaatgagacatatagcatgggactgcgtcatctcaccagtacacacccctttcttccctctcgcccagcataatgcagcccgccagaacggtggaacccagttgccaccacaatgtccaaccaccccgtcctaatgtgcccaatcacatgctatcccatccaaacggtttgcaagatatcatgcagcaagaccctcttggccggcttcagggtttggacatcagcaaagggcctctagttgtgaaatcagagagcagctcgatctctgcaagtgaaagcagcagcaccttctaaccaggcctacccaccgagcccacagttccattagattcgtttgttcatagcctgacatcctcgcgctgctccctgttctgtaagcttattatttattcaattcgttcgatttagttgaaattgttcgtaattgcagtggctgatctattcccttctgtggacatgattcctgtacccctcacatccatttgttttgggttcatctcctgtgtgctgtgtttgggattatcagggcaccaggactggctttctccgagaatactgtgttctttgtggtcgtgtggacttgttcaccatggattcaattcaaccttttgaaaagatgcatgtattctctgattttttttctcagtcatgtacatgtcactgttatgctagtttgattgatgtgtactgtggaatttgtggataacaaaaggagttaagattgggattgctgggaacc

SEQ ID NO: 10274 - DNA, 901 bp, Oryza sativa
  Clone ID: PAT_MRT4530_16611C.1
tcgtcatcttctccgcacacgctacactcctctcgatcgatcttctcctcccgtctcgatcagctgattcgcccagcctccggtagcttgcttgtgcttcgtatccatggatcctcaccacagctcccacgtccatgccggagccgccactcctaactgcacgtgcaggttgcccaaggaggaggatctagccgccgccgtcgtcgtcgtcgacgtcgaggcggctcctcactacacgtcgttgaaggcggccgaggccgacgtcgtcccgagaggagtcggcggcggcggcggcggtggcgaaggggacggtggcgaggaggtgaactacatggcccgcgcgcagtggctccgcgccgcggtcctcggcgccaacgacgggctcgtctccgtggcgtccctcatgatcggcatcggcgccgtgaacgaaaacaacaaggccatgctcgtgtccgggctggccgggctcgtggccggcgcgtgcagcatggccatcggcgagttcgtgtccgtgtacgcgcagtacgacatcgaggtgacgcagatcgagcgcgacggcgacatcgacggcgccgatgccgcggccgcgagggagaaactgccgagcccgacgcaggccgcgttcgcgtcggcgctggcgttcgcgatcggcggcctcctgccgttgctgacgagcgggttcatcaagccgtggggccccagggtcggcgtcgtgtgcgccgcgagcagcgtcgggctggccggcttcggcgccgcgggcgggtacctcggcggcgccaacatggtgaggtccggcactagggtcctcctcggcggctggctcgccatgctcatcacctacgccgtgctccggctgttcgcgacgatctttcacggcatgaacatctcgtcgtcggcgtga

SEQ ID NO: 10275 - DNA, 394 bp, Oryza sativa
  Clone ID: PAT_MRT4530_16612C.1
aaaaacatgaaaattttcatgagtcaagtatgaaatgtccacagaatacagggttacagcaaagtggtgaatagttgagcatttatttcaggccagatgaaaagaacctaacagagagatagatgcaaactaccaaaattgaaaaacataccacatttcgttttaaatgagaatctagcaggctagcataggcccctttttttcagaaagagagatccgacaataccacgtttttggcaggcattcaatgacagggaagatcattagagcatgtttaatattccactatatggcaaaataacttatgttggggaaagagaattaataaactgaaatagtttggctcttattatgcaggagatagcttttcacattacttaagtttaatacatta

SEQ ID NO: 10276 - DNA, 681 bp, Oryza sativa
  Clone ID: PAT_MRT4530_16613C.1
atggagccgacggcggtggccaccaccgtcgtcactgccacaaagcacgtcgcagagtggcagcgcgacagtacggcggcagcggctgtggaccgagaagcatcaggtctgaggaataactacaacaagtgctctgccatcacgattgagtgctcggaccttgatctgagcatgctggatcgcgagctgctatgtgaggtttcggcatttccttgcaaatacctaggtttgccgctttctcttggaaagcttaccaaggcagacctacagccaatggtagagaagatagctggctgtctcctctcttggacagctggacaattgaccacgatcgggtccaccctcgtcgagtcaattctgacatctatcctggtccatcttctaattgccatcaatccaacgaagtgggttctgaaggggactgacaaagtgcggtgcggattcctgtggcaaggagtggcggaggcaaaagggggccattgccgcttggcctggacgaaggtttgtgctccaaagcaacttggtggccttggcatccataaccttgacctcttaggtgttgcacttagtacaaaatggctttggtcgcttcgcacagcgccagacaagccttggcaaggcttgccgatgctggttttgcagcgtgagaaggatctccttttagcctcaacgcgatggtag

SEQ ID NO: 10277 - DNA, 1607 bp, Oryza sativa
  Clone ID: PAT_MRT4530_16614C.1
atgaacagacatgaagaatttacagagtggcacgtagggacggaatgcttggggcagttggcgttcttcggggtgcagtacagcctggtgacattcctgacgacgcaattgcggcagggaaatgcagaagcagccaggaacttcagcatgtggcagggcacctgctacatcgctcccctcgccggtgccatcgtcgccgactcctgcctcggccgataccgcaccatcctcgccttcttctccatctacatcatcgggatgggaacgatggcgctgtcgggggcgtcgccggcggtcatcagccggagcacccagccggccgtcttctccctggggctgtacctcatggccatcggcgccggctgcatcaagtcctgcgtggggccattcggcgccgaccagttcgacggcggcgacgccatggagaggcccaagaagagctcctacttcaactggttctacttcgccatgtacgtcggcgccctcgtctccggctccgccatggtgtggctgcaggacaacttcggctggctcgtcggcttcggcgtcccggctctctgcaccgtcctcgccatggccagcttcctcctcggctccgccatgtacaggtaccaccaggcaccagcctcatggcagaactgtggtgcgagcttgccaggtcgtcgtcgccgccatcagtaagaggaacgtcgcgctgcctcacgacagcttcgtcctctacgacggtccgccaaagtgcgggcagaagctggcgcacaccgaccagttcaggttcttggacaacgcggcgaggctgcggcggcggtggcggtgtcatcgttggtgggggggggggcgaggctgcggcggcagcggcgcagccgtggaggctgtgcacagtgacgcaggtggatgagctgaaggtgatcgtgcggatgctgccggtgtggaccagggccaccgggatcgtctactgcatggtgctcgtccagcagccgctcttcacggtgcagggccgcgccatgcgccgccgcctcgggttcggagctggcgcgtttgccatcccggcggcgtcgctccactctgtctacgccgccgccatgctcatcctcgtgccgctctacgatgccgcggtagtgcccgcggtgcggcggctcaccagcaacaagagggggctgaccgagatgcagcgcatcggtgccggcatgacgctgtccgtcgccgccatggccgccgcggcgaccgtcgaggggagacggctggcggccgccggcgaggtgagcatcgcgtggcaggtgccgcaatacgtgctgctcggcgccagcgcggtgttggcccacatcgggcagctggagttcttctacaaccaggcgccggactccatgaggagcctctgctcggcgctcggccacatgacgtgctcgctcggcagctacctcagctccgtcgtcgtcaccgtcgtgtcccatgccaccgcgaggggcggctcgccggggtggatcgccgacgacatcgacgacggccacctcgaccgcttcttctggctcgtcgccggcctcagctcgatcaacctcgtcgtgttcatctgctgcgcaaagcgatacaagtacaaggattcaatcaattaa

SEQ ID NO: 10278 - DNA, 441 bp, Oryza sativa
  Clone ID: PAT_MRT4530_16615C.1
atgatggcatggcgtgacgtggtcatctccaatgatcgtgggtttggaggagcggctgcaacacttccgtgtgtggcagcgacggtggccactctcctcatacaaggtagcttggatccggcgttccgcagcgatcagctcgacgaatatgcacaatggtggtgggggaggggtgaggggccgctggagtgccgtccaggtggtggtggggaatggcagtgctacagtgatggcgtgccggacaccggcccttcctcagaaaggaacctccagcatgtggtggctgttgggggcgatgtggatgttgcacgggagggcatgagtttctccgggcgaaggcctagtccgtttcagggccagcaggggcagcactttcaggcgctgcaacctccttggaggcgtcatcgtggtgtcttcttcccttccgagaaatcgttgtag

SEQ ID NO: 10279 - DNA, 1338 bp, Oryza sativa
  Clone ID: PAT_MRT4530_16616C.1
ataaagtagcatggattcagagttccagacacgctagggtaccagtataaaacattatcaaggtctctacatccagaatgccacaggattctcaagcatttcactactaactccttgaggaatgtttttgtactctcgaaattggcggctattgccagtcgtaagttctccattcttaccatacatcatagaaaatgtcaccaattgaataaacggcaccgagactgagtgatccaggcagcactccacgacgcagaatttgcttccaccacccatgctaacgagggtgacacccgtgaccaactcatgatcagacacagtagtagctagttcctccctggtgtatttcaccgcctggccattctcgcaatcgtcagatatcacatccattgagcatatgcgccaactggtggtggtgccaggttttctgctgagcccaacccaggcgtccaactcagcgatgaagtaagcacgaccggagaacggcagctgccactggccatggttcttccacatacaaccattcctcacagactccgctgtgtcaaagctaaaggtggcagaggactcaccgccaatgctgacaaagatagttcgcccatccctgtgcacagcgtaggaggtgacatgctcatgctggaatggaggattaggaagagcgtgccacccccatacaaagtcctcctcctcctcttgatcatcagactcgtcatctggcggcgggtagagcagctgaaatgaaccgacagagagagcaaagagccttccaccaacagggatgtagatggggtcaactggatccggcctttgccgagggccaaccaccaggctccgcatgcgaacgtcatagatagggataccagccatgggattgaagctgaactggggatccacgggctgcattgccaaaatcttggagtcaaaggcaccagcaaagtacttgggaccagcacggggtgcctcgaaactgaatatggccggtggcatgctgtgctccccatcaccgtcattgccaaccgacaaatcgatcttgcgaatgctgtatccccgtgaccagtcatcaagtacaagataaaggtgtcgccgcttttcgttggggaagtagtttcccttccaccccaacataatgctccaaccaccctctaccttaaatcggaaaagcataatacccgacaaaacagcagacgacgagccggagcgctcgggggagcggcggcggcatccggtgcgctcggagatctgaggaagcgccggccgcgggcggcggcggcggcaggtggcgtgttttggtccagcgagcgcgatgtgccgcgggcgagcgaggagcagcggcgccat

SEQ ID NO: 10280 - DNA, 683 bp, Oryza sativa
  unsure (1)..(683): unsure at all n locations
  Clone ID: PAT_MRT4530_16617C.1
gaaaaaatctctcccgtctccgtatcctccgctccttcgccatctcgcggtcgcggctgaacaggggagggggaggggcgccgatctccatctggcgaggagagcagagcaggggaggggatcctgattgtttgttcccccaaagtttgggggttcaactgaaaccccatgcccccccatgtcccaagttggatccgccggtgagggatccaattccatggcggctgctcctcctcctcgcctcctcctcctcgtcgtcctcctcctcgtgccagtctccaacgccatctactgcgaggaggatgattgctatgatcttctaggagtcaagcaggacgcgaacgtatcggagatcaagaaagcctactacaagctctctctcaaacaccatccggataagaatcctgatccggagtcacggaagctgtttgtcaagattgccaatgcttacgagattctaaaagacgaatcaactagggggcaatatgactatgctattgcacatccngaggaggttttctacaacactgctcagtactatagggcatactatgggcataaaacggaccctcgtgctgtgttaattggctttcttctaattatttcagcatttcaatacttaaacccagntcggagggtatagtaaggccatagaaactgtgaagcaaactcctgctacaaaa

SEQ ID NO: 10281 - DNA, 1410 bp, Oryza sativa
  Clone ID: PAT_MRT4530_16618C.1
atggaacaacgaaaatattggagcgatcaagttgtgcacgttcacatgtttatccggccgattgtaccggcaacagtacaaatagagatggattccaggaaagtagctatctgttattatgcttttcttgttgtcgctagattagatacagtcatgaaacctgccgatcgccaggagtctccgggtgaagacgtcggcagcgacgcacccgactggggattcttcagcgccgtggtctctggtttgcaaacacaaattttgctttcactggggaacctttctagccaattttgtgaaacacaaaagatgttgataacgatggtccatgataacgctaaatttctggaaaatattaataatagaatgacaaacgttgaacacaatcaacaactacaattacagcaagtcacggatttaactcatggagaacaacattttccaaggaaaagatacatcaaggtagagtatcctaccattataggaaagagggttcgaggagtcaatggtagggccgttgcttatccatatgaccattacgaaaaaaacattagcacaaagatcattaatgtgtttgtcaagcattttggacaaactagatcaattaaacgacataaacatatttaccaggcctacctagagaacccatcagttgtgccaatgcttatcaactatggctattatgatggtgtcgagctaggaaacacaaatcaaaatatgtacaaatccgctgcagtcaactatgtgaataatgatatgattttcctaccaataagaacttcaataggctgttggtacctcggagttctggactgtatcagaaaggaggtgtgtgtccttgactcaatcgacacaactgaagatgacttgaaagaacttaagtttctgatgaaaggcatccgcaaatgtgtccgacttgtcctcgatgagaaaattgtagagaaccctaggtgggaagattacaatgttccaacttggaaaatcaggataagattcacttgcctagcaaaaagggcaggttgccttccatctggactaaaaatgttgccactaaaaatattgccaatgaagttgctcagattcaaggtatcacatatcattgttgtcgcctgtgaaaaatgtcttgatctggctcttaaatatgttgagtgctgtttgaagcacaatcagcactttgagcagaatgagccgcacagcaacagcatctatttaagcagcagcagtacagttttagcagcagcaatttcagcagcaacagcagtacagtttcagcagcagcagcagcattccagtttgagcagcggcattacagttcagtttcattccagcaacagcagctcagtttcattccagcaacaacagagcagttccagcagcagcacaatttccagcagtagcagtaccacaaaatga

SEQ ID NO: 10282 - DNA, 195 bp, Oryza sativa
  Clone ID: PAT_MRT4530_16619C.1
atggcgagagatgcgcgggcgggatccgccatggacgtgggagagcttgcatgcagcgaattagcggaagtcgtcgccacccttgaggaatccggcgttgttgacgaaaaaatcgaacacaccggcctaggagatctgcttaactcctgtgcaggtccaaaggttggtgagatgcgggcgtgccagtcagtttga

SEQ ID NO: 10283 - DNA, 3768 bp, Oryza sativa
  Clone ID: PAT_MRT4530_1661C.1
atggccggaaacgagaacgtagtggctacaacccggggcgactccatgtcgaaggatcctcccgccgaagcggagatcggagcgtcgacgacatccgagcccaagaaggatcctagtgcggccaagccttgtctttccgacaggaatcacaagccgacgaggattacttccaaggtgacaaggtcctggtgtcctatccacaaaaccaggaaaaacaccctgcaagcctgctgggtctttctcaacgtccatgctgaaattcgtgcctgcaaagagcatggaattcagcgtacctctccaactcgtgatgtctattgtcctattcacaagacaaagaatcacgacctctcgagctgcaaggtctttctcagcgccatgaaggcgccatctcctaaggtccagcagtcacacatccccatcagggataaagacaaggaacaaggagcgacgccaatttcggatcgatttgttggggtaatcgacatcgatccccacgaaccatcagtcttgcacctcctcgaagactatggatcatcgacaacgagcacgccgcgtgaggtattggctatcgacgatgtcggcgcgtcagcgcgcaccaatgcggaagcggagaatcaagtgactactccggcccagcatatcagagccgtcaacgcaatactgagggaaaccccctacgatcccgttctgaacgacgatctcgcacgttggacagaacgattacgggaatcagtgaccaacctcagcaacgcgttcgaagaggccgctgctgtagcgcacccggaacagccaccaactggcgatgctaatgacctgtggcagcaattcatagccaacttccaaggaacttacaagcgccacgcgatcgaagacgacctacatgcgttgacacagaacccgggcgaatacttgagggattatgttcggcgctttaacgagtgcagaaacataatccccgagatcaccaatgcttctataattcgcgctttcaaatccgatgtcagagatcgctatactactcaggagttggcaatgaggcgcatcacgactactcggagattattcgaaattgtcgatcgatgcgctcatgcggatgacgcactgagacgcaagaacgacaaaccgaagaccggaggagagaagaaaccagccaaggacgcacctgagtcgagcaagaagaaaaatcgcaagagtgggaagaggaaagctcaatcggaagttttcgcaacagaatacgcggaccctcccaagtgcctagacccacaaggcagcgacatgaagaaagcatggtgccatatacacaagacggacagacactctctagaagattgcctcgtcttcaaaaagtcactcgcaaaacacatggcatcggaaaaaggcaagcgaggggctgcgcccaacatgaagtggtccgagcagaagatagaattctcagaagaggaccaccccaagactgctgtcatcccagggcaatatctgatcgtggtcgaacccactattcggaatatcaaggtagcacgagttctgatcgacggcgacagcctaataaacctcctcttcgccagcaccttggacgcgatggggatcccacgaagcgagttgacacccaccgatcaacccttccatggaatcactcctcagtcatcgtccaaaccattgggcaaaattacgttgcctgtgactttcggccaagcaaacaacttccgaacagaacagatcacctttgatgccgctgaattcgatacagcatacaatgccatcattgggagagctgcactcgcgaagttcatggccgcgtctcactacgcgtatcaagtgctcaagatgtcgggaccgaagggaacaatcactattcaagggaacgctaagctggcagtacaatgcgacaagcggagcctcgacatggtcgagcacacgccaagcccacccgccatagctgagccacccaagaaaccgtccgacatgccgggggtacccagggaggtgattgagcacaaactcatggtgcgacccaatgccaagcaagtaaagcaaaaactgcggagatttgcaccagatcaaaaacaagccatacgagaagagctcgacaagcttctcaaagctggtttcatcatagaggtacttcatccagagtggctagccaacccagtcatggtgtggatggccaacgggaaatggagaatttgtgtcgatttcaccgacctcaacaaggcgtgtcccaaggatcacttccctcttcctcgaatagaccaactggtggactcaacatccggctgtgagttgttgagcttcctcgacgcttactccggctaccaccaaatcagcatggcgagagaggacgaggagaagacagcattcatcatgccgttcggggaaacactttccagcgcacggtccagggcgcacttagcaaccaactcagaaacaatgtcgaggcctacgtcgacgacattgttatcaagaccaagacaagcgactcagattgacgatctgtgggaaacgatcgacaacctccgacgatatcgcctcatgctcaatccagtgaagtgcacgttcggagtaccatcgggcaagctactcggcttcctcgtctctggtagaggaatagaagcaaatcccgagaagatcaaggcaatcgagaacatgaagtcgcctacaagactcaaggaagtacagaggctaactggatgcatggcggcactaagtaggttcgtcgctgggatgggagaacgaggacaacctttcttcgctctgctgaaaaagcaagacaaatttgtatggacacaagaggccgaaaaggcattcattgcactcaagcgctacctatcaaatccacctgtacttattgccctcaacctaatgaagaattatttctctatattgccgccacgccatattccgtttgcactgtcattattgtcgagagagaagcgggacttggcacccgacgcggggctgcatcggtgttcgatctccggtgaaggggatcaaactgactggcacgctcgcatctcatcaatctctggacctgcactggagctaagcagatctcccaggccgcatgcaattcacctcaacttcagggcaaccaataacacagccgaatacgaaggactactcgccaggatcagagttgcggctgcactcagagtcaggcaactgatcgtgaaaggggattccgaactagtcgcgaaccaggtgcataaagattacaagtgctctagccccgagttatccaagtatctcgcagaagtcaggaagctggaaaaaaggttcgatgggatcgagaagtgggtcgaagaacttccatcagtactatgggtcgcgcgtaccacaccgacaacgtctaacaaggagacacccttcttcctcgtgtacggctcagaggccatgctccccaccgagctacgacatcaaagtacacaagtacagaagtattccgatgaggatcaggaggagcagcgaaacgacgatgtgaatctactcgaggaacatcgcgaacgagttgccattcaagcaaccgactaccaacaggcccttcgccgttaccacgagaagcgcatccgagcacgcacgctttcaatcggcgactacatcttccgacgggttcaaagccaagcagggcgaaacaagctctcacccaaatgggaaggaccgtacacgatcacacaagttctgcggccaggcgcattcaaaattgcagacggcgatggtcgcgagttggcaaattcctggaacattgatcaattacgtaaattctatgtataa

SEQ ID NO: 10284 - DNA, 342 bp, Oryza sativa
  Clone ID: PAT_MRT4530_16620C.1
ttttattttgacaatcactctaagacgtatgcaattgcgtcttacgaaagcaagtgaccctgagagcactgatctttgtaaagatgcacacagcttactgcaggagaggataacaaaatagaagtctataaaaatctatagaagggatcaaatatgcttgactgaatgatagagatggaaaaatgaagaagtgatgactgttgtttcacaatgtattcatttcatctatcctataattgtagtggtgtgtcaatgtgtgatacttctagatttttccagctccattttgccagctccgtgtgtgttaatgattcagaaatcgtggaattgcttggaacatgt

SEQ ID NO: 10285 - DNA, 771 bp, Oryza sativa
  unsure (1)..(771): unsure at all n locations
  Clone ID: PAT_MRT4530_16621C.1
ttggttgnggattcgggggagcatctctcccaacaccntcnaaccagatnggtgggatggnggccttggnaccccccnattaaccnaatatggaagtncanangccccccaatgttcnacnnccaacaaccnggaaccntgnaacccnacccaccngctgttacccnaattcnatcnaggtttgggaancnattccgntccantccnccncnctccctncccngaatnnaattcccccggannnnaccntcccccantccnagaacncaacccgtcctganntttnnnccaccantantantccggnttnncatttggnaccctncccccacccccaannttttggcccccaantttccctttcccggttgttgcncnacnagcggggccattcttccgccaccacccaaggaaggccaccttcnnnccctggtttaattaaccnnncccnaaaattttttggcncccccttncagaaaantcttncttggggaanaaaaaattngccttattcttnnanncctcctcctccncttccctttggggggnccttttnaaggcctcccaaancctnaaggaaaaaactgttttggganattttccttttccntttgccccccccnaanccnaaaaaaagggttttnttnaaaaaaacaanncccatttgganttttttttnnaaaaaaaaatttttttaaaaaaggcccnaaanatccccccggntnttttttnntttccccntttttttttcccccccccttgngctnggaa

SEQ ID NO: 10286 - DNA, 307 bp, Oryza sativa
  Clone ID: PAT_MRT4530_16622C.1
cccacgcgtccgcccacgcgtccgcccacgcgtccgggcggtggctctggtggcgctgatggtggtggtggtcggctccgtcgtcgcggcggctgctggcggagaggagtactacggcggcgtcgcgcgcgcggcggatgggtgcgagccggtgcagggcgtggtgcccaaggacccgctgacggggtgccgaacgtacctgatgcggtggtgcggcggtggcgacccgccagaggtgctggcacgttgctgacaccaacttaggtaggtgtcggcgcactgtcgatgctacgcgctgtacgccatg

SEQ ID NO: 10287 - DNA, 618 bp, Oryza sativa
  Clone ID: PAT_MRT4530_16623C.1
cagctctctctctctctctctcgttcttgcgggcctgcgacaacggcgtttgaggaaatggcggcggcgtctgcgggtccatcggcggcgctctgagggggcggcggcggcttgaagccgacccccgccggcgcctgctggtggaggtagagggcggcggcagtgggatccgcgccggcagccggctgtgaagggaaggggcggcagttgcgggatatgcgccggcggccgtccgtgaagggaaggagcggcggcggcgggatccgcgccggcggccggctgtgaagggaaggggcgatggttgcgggatatgcgccggcggtcgtccgtgaagggaaggagcggcggcggcggctcgcggaggaaggtagtggcggtggtggatcccccagaggctgcagtggacctcgacctcaacctcaacccgagctcgaccttggctatatgtttatgctttattgaatgcagtttgggatccacaaaattagatgttatgctgtcgaatttttgtcaaaattagatgttatgatgttgaatatgttataattgtgacaaattttgtctaatttattttgtcaaaattctgacaattttaagtcaatccgtaaaatgatccaa

SEQ ID NO: 10288 - DNA, 1298 bp, Oryza sativa
  Clone ID: PAT_MRT4530_16624C.1
tgcatgcgcaagatcgatacccgcaacaacaatggcgcaggtcgaggacgacggcgcgaggagcttcaacctgcacgtccgcatcgagcgggcggcatgggaggcgacgaacccggccgcccctcccttcctccccctccgtctcgccaccgcccgaacgcaaagccggccagccgcaaggacggcggtggcggggcgtctcaccgacctcgcttcaggcggacaagggagcgtccacgacggggcggtggtgaccgccagttccgggctgctccggccggatctggcggggtgacggctgcgaaggcagtggtggttgaaggcggcggggatggcgtcggccgagggcgtgaaggcgacggcggtggtccctgcgcggcgacggctcggtgctcggcggcgacggtggcggtgtcccctagatctgtgcctctcggccggatctggagggtggcccgcggtggtggtcgacttgcgacggcttgcgacggcggcggcagtggtagtcgcggcagttggcggcggcggcgtcggctgacgatgccggtggaggacttggcggcggcgcggcggagggcgacagcgaagtggccgttggcagtggcggcggttcgcagaggcggtggctggcatcggtggcagcgacgacggcgtccgacttgcggtggccgtgactgtggagacggtggcgacgtcggtggcggggaaggagtcgggtgcgaggtgaggatgacgacggcgaggtggctgggcgttcaacagcagcggctgcggtggtggtggccgcgactcggcgcggcatcgtttggtggagggatcggagaccggctttggcgcagagaggcgtagccgatggcagcggaggccggctcggcgcgagaggcgcgggcggcagagatggaggccggcttggcgcgagaggcgtggccaatggtggaggaggcgacctaggtgtgaggaggagctgccggtggttttggtgcggtcttcggcgcacgaaggttggccggcgggggacgccggtgcaggggtcccacatgtcggcagagcttgtgtggtggtagagcattggtgcgtcagccgtggatttgcaggtggtgagcggcgggtgaaaactcagtccggccttggccggaccgacaacgatggttcattccccctcctgagggcgttgtcgtgctgtctcacccctcaaggccgaattatctcacatacatgtggacccaaatactatttgagagattgaacaaatggcaacacccattaggctattactcttgaatatagaaaaatttagc

SEQ ID NO: 10289 - DNA, 1373 bp, Oryza sativa
  Clone ID: PAT_MRT4530_16625C.1
gcacgtcgcagccaacacctcacaccactctcttccaaactccacatctctcacctcctctcgcccacccaatcccttccgccttctacccgccgccgccgccgcgacgagccggaaaccctagccgagctccgaggcggcgtgcgcgagcgcgagcgcgggcgcgggtgtgggggagccgagagatggaagtcggcggccgcaagaggggcaagcccgacggtgcgaacggcgccggcgggaagcgcgcgcgagaatcggagtcatttcaaaccggtgtaggaagcaaatcgaagccatgcaccaaatttttcagtacctctggttgcccctttggtgagggttgccacttcctccaccacttccctggtggctaccaagctgttgcaaagatgaccaatcttggtggtccagctattgcgccgcctccaggaagaatgccaatgggaaatgctgttcctgatgggccaccaacacccactgttaagactcgcctgtgcaacaagtataacactgcagagggatgcaaatggggggataagtgccactttgcgcacggtgagagggagctcggcaagcctatgttgatggatagctcaatgcctcccccaatgggaccaaggcccactggtcactttgcacctccaccaatgcctagccctgccatgtccactccagcaagctttggcgcttcggccacagccaagatcagtgttgatgcatctcttgcaggtggcataatcgggaggggtggggttaacacaaagcagatatccagagtcacaggggccaagctggccatccgtgatcatgaatcagacaccaacttgaaaaacattgagcttgagggcacatttgatcagatcaagaacgctagtgcaatggtgagggagctgattgtcagcatcggtggcggtgcccctccacaaggcaagaaacctgtgggaggatcccaccgcgggggaggccccggaagcaacttcaagaccaagctgtgcgagaacttcaccaaagggtcgtgcacttttggcgacaggtgccattttgcccatggtgaaaatgagcttcggaaatcagctgctgcttgagatccattgtggtttgtagcgattagtcattgtaactcgaaactttgagggctgatgctgaattttctgaccgtttaggcttatgtgctgtcttgttttacctctggattctttattgcattttatttttgagctatttctcgtacgcctggttatgtgattatgttatcccttttctcctgcgatgttaaagcctactgtggttgatgattactatgcttttcataaaattaatgctactgtgactgtttctctggcaaagtgagcagtctcgttgattgttgg

SEQ ID NO: 10290 - DNA, 363 bp, Oryza sativa
  Clone ID: PAT_MRT4530_16626C.1
ggggcaccaaagaccgggccccccaaaaaaaaaatttttccctgggaaacggccaaaaaaaagggggaaaaaaaaatttcaggggggggaaaccctttcgagaaaaacaaaggggggggggggaaaaccaaatttttaaaaaaaattttggacccccaaagcaaagctgggacagggggggaatttttacaggaacagggttcctttggggggggaaaaccaaacccctggaagggggggaacatttagcaaaaagaaacctctccgttttgacggggaaaaaacaaaccctactttttattggttttaaagggtgaaaggggggctccccaacaaaatgaatcgggaacccgagggtttttt

SEQ ID NO: 10291 - DNA, 321 bp, Oryza sativa
  Clone ID: PAT_MRT4530_16627C.1
atggcatggcgccaccttggaggtgtggcgtctggccagatcgatggcgggcggttgacggtagtgccgatgtggcggggcgtggccgagtggaggaggagcttggccgggcagcggcaccaagcgcagggggaggcgccgacgcacgcttcgccaccgtggacgaccgacgtcccttcacatgttgtgaatctcgccagcgccggggaggactacgaagccgtcgacactcgagtccgtacggccgccggcaaccagctcctcccgatcccctccctggagcatcatctgcacagcggcgcggccaagctcgccggttga

SEQ ID NO: 10292 - DNA, 1598 bp, Oryza sativa
  Clone ID: PAT_MRT4530_16628C.1
gtcgcatcagcatgtcaatcgatcatctcttctcttccagcaaggaagcagcagagaagacaatggcagcatcggccatgaagctcgccatggcggtggcgtgcgcgctggcgctcgcgtcggcgtgccacggcctgcagctgggctactacaagcagtcgtgcccccgcgtggaggccatcgtgagggacgaggtgaagaagttcgtctacaaggacgccggcatcggcgccggactcatccgcctcgtcttccacgactgcttcgtcgagggatgtgatggctcggtgctcctggacccaactccggcgaacccgaagccggagaagctcagcccgcccaacatgcccagcctccgcggcttcgaggtgatcgacgccgccaaggacgccgtcgagaaggtctgccccggcgtggtctcgtgcgccgacatcgtcgccttcgccgcccgcgacgccgcctacttcctcagcagattcagggtcaagatcaacgtcccaggtggacgcctcgatggccgccgctccctcgactccgacgccctcaacaacctgccgccgcccaacttcaacgtgaaccagctcatcggcgcgttcgccgccaagggcctcgacgccgaggacatggtggtgctctccggcgcccacaccgtcggccgctcccactgctcctccttcgtctcggaccgcgtcgccgcgccctccgacatcaacggcggcttcgccaacttcctcaagcagaggtgcccggccaacccgacctccagcaacgacccgacggtgaaccaggacgccgtcacgcccaacgcgttcgacaaccagtactacaagaacgtggtggcgcacaaggtgctcttcgcgtcggacgcggcgctgctgacgtcgccggcgacggcgaagatggtgtcggacaacgccaacatcccggggtggtgggaggacaagttcgccaaggcgttcgtcaagatggcatccgtcggtgtcaagaccggctaccccggcgagatcaggaggcactgcagggtcgtcaactaataatatatatatggagtccaacgcgtgttccatgaaatttacggattggtacgtgttgtatcaggattaactcccgcattgtcttgtgtagtgtctttcgtgttgacgattatgtatgtcctctcctattatgtaagcgtgtaatatgtcgctctatcatttaagaaccttggaatatatttttggagtaaagacgcgtaacaaaagaacctaaacgaggagaacggcttccgccactggcgccgcgtcgccgagggcatggcggcggcgcgctcggggcgccgcccccgccgctcgcccgggcagtgccgcgacaggtggcgcgaccacctcgcccgcgacgtgtaccaccgccccttcaccgccgacgacgacgccgagctcgcccgcctcctcctcaagcgcgacggcgacggcgagcggtcgtggaaggacatcagcagggcggcctactgccgcacgtcgcgcggcatgaggcggcggtggggggagctccgcgacagcgacgcgttcctcaggaagctgtggtgtcctcctccgccgccgatgcagccgtcctgctga

SEQ ID NO: 10293 - DNA, 336 bp, Oryza sativa
  Clone ID: PAT_MRT4530_16629C.1
atggccggatctacactggtagctattatcatccagctagctactagccgccatcgtcggctggccgcgacctgttttgtaacatggaggttgggttgtgtgtcaggctgtcatggggacccatatgcttttatatccattttatatttcagggacaagtgtcactacaactcgcaccaaattcatgccggcggttgggttggttggtggcagctgcacaacacggtcgcaaacctaacgccagctagctctctctgcattgcctttgcattcattcattcagagacattatctgaatctgattctgctgcctatgtagctcctgccatgggtctt

SEQ ID NO: 10294 - DNA, 2439 bp, Oryza sativa
  Clone ID: PAT_MRT4530_1662C.1
gcttccgggttgccctctgggcccccatcgctggccctcggggtgctttggctggtgggcgttcgttcctgatgaacaacatgaatcttgcatggttaataacataagacagactttttttttttttttttttttttgatgcccaaagatatatatgaatatatatcgagtaaaataaaaactcttgttggaattcttgtatacaactattttataaaacccaaagagaggggcaaaaattaatagagtaaatatcagctgttcttcatcaatctagagctccctttgggtatacatgcttctttgttgatgaacaatattatttgcgaacagcttaaatatgtactaaaaaaccatctcatttgaatcaaattaagcaaacgaaggggaaaaattaattgaaagaaagaacttcttttttttttggttagctaggttgctatgagcctctgatgatcatgccaccatctgctcctgctccggccactgcgcgaatatgtcgccggcggcgtggccgtccttgacaagagagttcacccatgacacgtccggctccgccgccgcggcgtgcgtcgccaccggcatggcggattggccgcggaacgcgaacgacgccgacttgcggagcttgtgcagctcgtcgccctggacgccccagtccagcttgccgtccggcgagccccagtccgagagaatggacggcgcgccggtcgtcgccggcgacatgagcgaacgcgccgccggggcgcggcctccgcggtcgatgaagctctggctgcgcttggcgaacgccgaggcgcgggagctcatgatcgccttcgccatggagtggtccagcccgaacgcggtgttcgcgccgcccaccatcggcgaggtcggcatgtgcatctgcgtggtgtccgccatggagctgtacgcgggcatgtcgccggcctgcttgagggacagcgcgtggagctgggacagcatggccgggtcgacggagccgagcaggtcggtgtagtccggcacggccctcgccggcgacgcggtggcgaggccgttcgccgcggcgccccagctcgccctcggcgacggcgcgccggacaccttgtcgaacagcttctgctggtactggtccagcgcgagcatctcgaggtcgaagtcgagctcccgcgcgccgagcgccgtcttgaggcggctcgctggggacgacggccaggcggggctcatcatcgccgccgccgccgccgccatgtcgagcccgttgggcggcgaggagcgcggcgacgatacggtgggctgcatgccgacggacacggcggaggggttgacggcgcggagctcgtcgggcttgtgggcgaagaagcagatgcggcgcgcgcagccgacctcgtccttgcagaggcgcgtcctgtactgcgccgggtggagccagcactcgaacacgccatgggcgtactcgcacgcgtcgcccttgcggcacgagccgcccttgcggaactccgggcaaggcacgcagctgtaggagtagcggcgagggtcgcggcggcgcgcgttctcgccggggtggacgaaggggcactcggtccagtcatgggagtaggcgcgggagcacggcttcaccttgaagctgtacatgcggaactcgtcggtgctgaacagtccgctcttgaggtcgggcagcgtcaggtcaggcgggtactccttcttcgcctcctgcggcggcggcggcgacggcggcgaggccgacttcttcggcgacgacgacggcgacacggccggcgacttgagcagcagccggatggccttctccgccgcggtggcgcgcgggaggaggtcaccggcgcggagccccgaagccgagagcgcgtcgaccgacgcccccgcggcgagcaacaggcgcgtggccgcgaccgcgttcgccgcgccaccggcagccgccatgtgcagcggcgtggccccatccgtctccgacgcgcgcgcggcctccgccggcgccgccgccacgacatacccaagcacccccgtgctcccgtacagcgccgccaccatcgccgccgtcctccgctccatcccgagcctcgccacgccgctcgccgaaggcccataccacaacccagccacgccaagagacaccttctcctcctccacgaccctcctcaccgccgccacgtcgtccgctgccgccagctcaagaagcaaggacgccgccatcaccgtcgcctccttctgctgctgcggcagcggcggtgtggacggcttgcgcggcccagagcacatgacacacacaaacaaacacgcacgcagagtgttcgaccgagttcttgttagtcaaaacaaacacctagttcttgatttcttgttaaattcagagaggagaagaagaacaagaagagggagaagaggaattctcgatcgatggatggatttggagagtggtgcgggcgcgtgggtcct

SEQ ID NO: 10295 - DNA, 1185 bp, Oryza sativa
  unsure (1)..(1185): unsure at all n locations
  Clone ID: PAT_MRT4530_16630C.1
ttttttntcncnntnggngggggggcttttgggcngggggccncccccttttttttccgggngaaaaaaaccnggnaaaggnggtnnccnntcnctncnnnggggggggccccccccctcnccccnttccccggaaaaananancccggggggcccttnttttggcggnccggnggggcccccnttcaacggcccccccctttaatggccccaaccccntttnaatngngggggggtttttcccnggggncgggtcccctcccccccccaatctcncaacctcctnccttnccacncccnccggngcttcggggtttccctttccngggggnnaaggtaaaactcccgggccctggtcctcggntccccctctcccnggggggnngccttttccntcccccgggctccnnttnccggggccnttttggggtttccccgtcccngntcccccgggccccccttcgggnaaantnatttccccccgggtcccccngggccccccnggngggggccgntcctcntgcnnaaataantttngngccnttnnaacctnnncccncccnggntttctttttttnggcnggncntcggccggcttntnggngggncttnggcggggttttggggggggtttcccccgcctttcccngcntttcccngnnttcccntntttnngggnaantttntttcncccctcnggnntcncggntnaaattttcncttttctcccgcncntttnggntnaaagggtcccntttcctccctcttttcggntnggngggggcggggggggctttttgctccccctggncccccggggggggggttttttttcgggntcccncncgggggtccccnngtggggncntctngntgggggccccctgggtcccccccnctttttcgggtcaaaagngctcnaancggcgnggggcnaaaaatttcgcgtgggggggcctnttnnggggggggggaaanacccctnccnccccnggggngnnccccccccncggggggccccccgngacgggggctcttctgnttngggggctcccggcnggggggcgccccngcggggggggctcctcttccgggcggccccnggngnggggggggggggntcccccntntnctcaatacnncctnttcgggggngtntntttccccccntnnggggggtntttt

SEQ ID NO: 10296 - DNA, 891 bp, Oryza sativa
  Clone ID: PAT_MRT4530_16631C.1
atgccactagaattttataaaattaaaactgtgtcactgccatcactttttccatccatcaacttccctttccgtcttcttcttcctttctcccgtcttcctctctgcatctcactctgcatcttccgcaatgcctgcgcaaagccatcccgtgccggccgcatgtccgtgcatggtgaagaggatggctggggaggacgagtggtccacaccaagggccgggcatggtggccggagatgaccaccgtcacggtggcaccatcgtctggatcgcgtctggcggcgctggtcaagtcgtgcatcaccatcgtctggatcgcttcggcgctgcacgtggccgtcaactccggccagtacccctacggcggcttctcgccgaaccggccgatggctcaccatcggcagatgccggagcgcggcacggaggagtacacggagctggagcggcgcccggacgcggcgttcatccgcaccatcaccggccagctgcgcacgctcctcggcatctcgctgatcgagatactgtccaagcactccgacgacgaggtgtacctcggccagcgcgacacgccggagtggacgttggacacagcgacggaggcgttccggcggttcggcgaccgtctcgtcgggatcgaggcgcgcatcgcggagatgaaccgggttaccgggacccgcgccacaggaatcgcacggacccgacgaggctcccctacacgctgctgtcccccaaggccccaacacctccgacggctaccacaagctacttccgcgggcgctcctcaagtccggccaccaccttgccatcggtcgatctccctcaacggctcccctcacaccaaatccttgcaccaccggatttgcctcgccgaggagaacccattcccctag

SEQ ID NO: 10297 - DNA, 386 bp, Oryza sativa
  Clone ID: PAT_MRT4530_16632C.1
gccacgcatccggagcaagagctcaagcgcgggaacgtggacgacaactccgacgatgacgctgccaaggaggctgccagcttgaccatcaaggagaacattatgaaccaccctgagcagatcgctcacgggtatgcttgacagatggactgccacaccgccaagattgctgacaaggtggctgagctggacaccaaaactgacagacgatctgacaaggagctggagaaggagcccaacggctagactaacggggacgctaggatggccaacatgattactaccaagcccacggttgcggagacctcctctgaggaccgtcctgtagtgcgtgacgcgatgcatgacatgaggcaaaccgtggctgatagcgtcatcaagaacga

SEQ ID NO: 10298 - DNA, 310 bp, Oryza sativa
  Clone ID: PAT_MRT4530_16633C.1
ctcacgcatacaaccacacatccgcactagccatagacacagcaaacaagattacactgctgctcgccaccaccgccgctctcttacacgggctgaactccacctccatcatacccgtcgaccgccactcccgcaattccagctaaggcaacgtcaacaaactcggcactatcaaacgcaagcaattgcggacggatcaagtgcatacaaatgtggccaattgagggcatcaagaagttcgagaccctatcgtacctgccaccactcaccgtggcctgctccgatccaagtgagtgccctgcctcgagtt

SEQ ID NO: 10299 - DNA, 1784 bp, Oryza sativa
  unsure (1)..(1784): unsure at all n locations
  Clone ID: PAT_MRT4530_16634C.1
cgatggccgccaaatcccaaccggcggaggcggcggagctcgtgggctcatcctctccggccgtgacgccgccgccgcctccgacggagacgcgggcctccgacgatggcgattcggagggcgatgacgaggctgcgaccgactttgagagaatcaccgatcaccagctgcaggagtcgatcaagcggacgcgccactcgctggggctgtgcgccaggctgcgtgacggcggtgtgaagtttttgaggagaatccgccgcatggagaaggagcttgatcgccgccgggccgccgggctaaggaagggtgtcataacttggaggccgacagtgaaatctcctagccaggatgattcccatgcctttaaggatggtgacaagctcaactgggtaaatacttctagcaaacaccaccaaaatgtacctattactcctacaacgaattatggacaggctgaggattcagcatttttcaaagaactaagttattttggccgagaaaaacacgcaagccttaagaaagttgagcaaagctcaagaactacagtgagtcatcaaccgaaaaatcatgcagtttgtccaaagcgagctgatgataaacaattgcacatggacaataagattattgtcaacaaaaggaagttaggttcgaagagctgtctcagaaaaagaccgaaaaacaactcttttgattcaaacggcatgtatgataaactacatacaaaagatgtcactttggggagatcaactaagaggtgggagcatactaagaatcacatcactgagttcaggggcctatttgattctaaagaaagaaataaaaagaaggatgtggttctcttggatgatgaagatatggaacctgctaaatcaattaatgttgaaatggctcataaatggactgatctcgaaacttttgagctgatctgctctgatatagaatgccttgagcctgaagaatatttgaaatcacctgttataaacttttatatgcagtacctcaggaaatctagaacatgtggagacttgtacattttcaatacatatttctatagcaaacttgaagaagtactatccaggatgggtgaccatgatgattcacaattcagcaagttaaggaggtggtggaaacatatagatatatttagacaaccgtacataattctgcctattcatggagacttcctcatagcagaatggcaacatctacagaatgattcttcttatactatccccttttcagggagaatatggaatcatctatcaaaaaatataaacaaggaaaaagttcaggtgccaagtcagcgtaataagtatgactgtggtatctttatgcttcattacattgagaggtttattcaagaggcaccagagaggctgacaagagagaacctttgcatgtttggacggaaatggttcgatcccaaggaaacttctgggctgcgggacagaattcgggcactaatgtttgatgcatttgagagtgctcggatggatgatgaatcgtcgcagtccgagtcacattctgatgatcaatctggagatgaagataaagacagggatggagtcatggttgtggtgattgactaacgatggatgaatggcacctagctttacattatgtgatggtacagtttcaggctttcagcaatatcggctctcaaatgtcacgctgtttattagctgaaaaatgtctgtgctgctctggagactgtactagaaaaggatgcgccagtggtgcttagcgatgcaattataaaggncncncnnncgcacatttcttgt

SEQ ID NO: 10300 - DNA, 269 bp, Oryza sativa
  Clone ID: PAT_MRT4530_16635C.1
gacggtggtccatgtgcttctcgcggggatcttgttctcgtagtcaccggttacggatcggatatgacgccatcatatgacgcgatgacatggactatttccacgcaaagctcctgatggagttctacggtaacctgtagttgaagacctgtggtacaactggcctatggtccgaaacataaacgtaatccgttgccagctagccgccgacaagcccttctacgacaacgagtggaacaacggcacctcctttttctacaccccggccc

SEQ ID NO: 10301 - DNA, 1927 bp, Oryza sativa
  Clone ID: PAT_MRT4530_16636C.1
gctgcaatggcagcatgtctggtcgtagtcaactagccagccaccaaagagagagctatcatccatggccgccgtggcggcggccgagaaggcggtgaggtgcctcggccgcggcttcgacatggccggcgacctgaggctcaagtactgcaagggcggcggcgccggctgcctggtcgagaggcgcggcgagacgacgccgctcaccgtgccgggagtcggggtgatcgccgacgtgccggccgacgtgaggtgcgacaagggcgaccgcgtccggttcaagtccgacgtgctcgagttcaacaagatgtcggagctgttcaaccagaggagttcggtggaagggaagatcccgtcggggcagttcaacgcgtcattcgacctggacagcgggtcgtgggcccacgacgcgccgcacaccaggtgcctcgctatggacgggtacttcatctccctctttgacctccgtctcgaccaccgccacctcgccctcgatgcaggtgtcctcgccgacgtgccacccgcctgggacccctctgccatcgcaagattcatcgagaagtatgggacgcatgtgatcgtggggctgagcatgggcggccaggacgtcgtctacgtgaagcaggataagtcgtcttctctgtcgccgtcggagatcaaggagcatcttgacaggctcggcgatcagctcttcaccgggacatgcgccatgccacctctgcactgcaggtccaaggacaagttcaagataccggaggccttcaacgtgttcgatgcacaagtagctcagcagaggcttcacgggatcaccactcttgtatcaagcaaggagggtgtgacggtgatatactccaagaggggagggaacacgacggtgagcagccactcggagtggctcctgaccgtgccggcgatgcccgacgtgatcaacgtcaagctcgtccccatcacctccctcatcaggggcgtgcctggcactggcttcctctctcacgccatcaacctctacctcagatataagcctcctgtcgctgacctgaggtacttcctggatttccagcatcactgcgtgtgggccccggtgctcggcgagctgcctctgggcccttgctcacaccggcaaggctccagcccggcgctgcatttcagcctgctgggctccaagctctatgtcagctcaactgaggtggttgttccgaagctgccggttactggcatgaggctgcatctagagggcaagaaaaacaaccggctgggcatccacctgcagcacctgtcgacgacgccgacgttcgtcgccgccgccagggccgacaagccgccggtgtggcgtggcacggaggcggtcaccgacgaccggtactacgagccggtgcagtggcggatgctggcgcgcgtctgcaccgcgccggtgaagtacgacccgcggtggtgcgccggcgaccgccgccgccgccccgccgcctgcgtcgtcgccggcgcgcagctccacgtcgtggcgcacgacgccgccaacaacgtgctccacctcaggctgctctactcccagctccccggctacgccgtcgtgcagtccaagtgggcgcgcggcgcggcgcggccgccgtcggggaggtcgtcgagtttcctgtccatacccttctcggggtcgccgtcgacatccagtggcgccgccgagaagggaggccggccggagcagggcgcctcgccggtgggcgtcgccaacgtcaactccggcgtgttcgccggcgggccgccggtgcccgtcggcgcgcagaagctgctcaagttcgtggacacgtcgcaggtgaccatgggaccgcaggatagccccggttactggctcgtcaccggcgcaaggctggacgtcgacaaggggaagatcatgctgcatgtcaagttctcactgctagcccaagtttcttga

SEQ ID NO: 10302 - DNA, 404 bp, Oryza sativa
  Clone ID: PAT_MRT4530_16637C.1
aaaccttgtccagtctttggatggatgacgtcggcgtcttttggcgtcgtgaccctcgtgagggcgttgttttggagtcttcgtgtcgtagtggtgtcgttagctcggtggcgatcggtctcgcatagtgatggccggttcggtgcttggctttcctctctgtagtgtgtgtttggacggttgacacatggtttggggcgtgtgctctggtgcacatcctttctcgacagccagctgtcgatgtaaaacgtacatcctttctgccagctgtcgatgtaaaacttttcttgtaactttttctttccatcttaattacattgaatgacctttgaatgacctcctttggtcattccggcaaaaaaaaaaaaaaaaaaaaaaaaaaaaaaaaaaaaaaaaaaaaaaaa

SEQ ID NO: 10303 - DNA, 303 bp, Oryza sativa
  Clone ID: PAT_MRT4530_16638C.1
cgccgcggcgtcgtggcgcggcttcgtcgtgacgttgtcgctggtgccggccgcatcgaggtcggggttggcatcgtcggcgcggcggagtcgtgttcggccgcgacgacgtcgccggcggcgtcggcaacgaggcagccggcggcgatttggggagagagagagagatcgagattggatagagagagagggaggcggcggcggctctcatcccagagatgcggcggtagcggaggcggcgacgacgacgcgcgcgagacgacggcaagatacgatggcggcgtcggcgcggggatgccctag

SEQ ID NO: 10304 - DNA, 348 bp, Oryza sativa
  Clone ID: PAT_MRT4530_16639C.1
atggcatcgcagtcggcgggcctgctgttcgcgctgctcagcttcctcatcttccccgtcatctgggccgtcccagagtcgctcatcaccgccgagctctccacggcgatgccggggaacggcgggttcgtggtctgggcggaccgcgcgttcgggcccttctccgggtcgctcatgggcgccgccgccgtgcgctccatcctcgtcgtcgtcctcctcatcatcggcgccgccttccgctgcgtcctccccggcgctccgccaccgcccacacgtcgccgccgccggagccgtttgagagagagaggaagattgggggtgaagaatacccagttttgtggttcgggg

SEQ ID NO: 10305 - DNA, 5913 bp, Oryza sativa
  Clone ID: PAT_MRT4530_1663C.1
atgtttttgggaagcgcaaggcgcgactactcactgttcgtcaacatctacttcaccttcaccaatatgtcgaacactggagacaacggcaacactggatacaaggagaaggaggctcccgtcaacaccaatggaggcaatactgcctcaaactccagcggaggaccattcttggggtggactttgcttgtagaaatgtacacaaatggttggatcatttgctggactatacattttatattgttatggattcggaagaagcacttacaacttgccaaggaggctgatgaccttgttgagcagcagagaggtagcacccagcttggcagaacttactatgagatccttctaagatctgagaatgatcacagtgccattcggaatgccaagaaatatttcaaatcatccatgaagctagcaagggttctaaaggagaatccatcgtctcagaagtctctcttcctaaaggagcttattgatgcgtacaataatatgggcatgcttgaactggaactggataattatgaagaagctgagaaattacttgttcagggtctgaagatatgtgatgaggaagaggtacaccagtatgacgatgctcgcagtaggctccatcacaatctaggtaatgtttatattgaactacgcaactggaacagagccaagggccatattgagaaggacatagagatatgtagaaaaatacgccatactcaaggcgaggcaaagggatttataaatctgggggaggtccattcccgtgttcaaaagtatgaagatgcaaagctttgttacaataaagctcttcaaataacaaagtgcttggaagatgaggatgcactaatggaccaaatccatcagaatattgaaactgttaccaaagcagccaaagtacttgaggaaatgaagatatacgagcagaagctgaaaaagcttgccagagacacttctaatgctcgtggaacatctaaagagaggaagctcctccttgagcagtatgcttggctggctaatcttatggagaaggcaaggatgataactgcatggccaaaactcaaggaattttcgaaaggacaaaagagggtagcaaatgaactccatgacaaggaaaaacagagcgactctcttttggttataggagaatcttaccaaaagcttagaaacttcagcaaagctcgtaaatggtgcatgaaaagctggaatatgtatcgatcaatcggaaacttggagggtcaagcattagcaaaagtgaacattgggaatgttcttgattcttgtggtgactgggctggtggcctttcaaacgtgcaactagatgcccttgaaaacatgcattacagtcacatggtcagatttgataacattgaagaagcgaaaaaactgcagcaagaaatagacaacctgaagagaatgtctgatcaacatgaagcaagggatacagttagtgactattgctcagaaactgaaagtgaagatggcaatgtatctgataatatcctcaatacagaggataatgatgggaatattgcaaataatagttctgaggaatttgatgatgatgttgttcttgcctcacttgttcataaaagtaggtcttctaagaccaaagcatctaagatgcatagtagtacaaagaatgttgatgggtcatgtggcatggatgagagccctgaagaagatgtaagtaaatcatttagcaaccattatggtagaaagcgtgttcgagttgtaatatcagatgatgaagctgaagaagctcctgaaattgatcagtcaaaaagaacacttactggtcgagcagatagtctgtctacctcagagcgaattgcaaatacagcaaacagaaacagaaatcagcatacctctcatcccattgagaccagagaagtagacagtgtctgcactccctgccctgctgaggaaagtatttgttcattcaaatctggtagtcctgtttgtcatggtaatgatggcccagatttaggagcttctagcatagggaagttatctgtgtccaaaccagcagcgagtggttccaaggttggtacacttgcatcaaacagtcggccccaaggtcaaaatgctgtcggccttcaatcctcagatgctgatcataagttctgggtgttcaaaattggtgaacatttggtttacttggacgcaaatgcatgtacacgtgagggtgcctttagcattgagtctcttaaagttgaagtggcatgcgtgtactatcttcagattcctgatgataagaggtccaaaggtttgttgcctattattggggaactcaagtgttgtgggaaggtactagatgacacagactcacgagattatattgatcaacttgcctctgaacagaagtccattgatgttgttattgatgttatacctcatctgatataccatgtttataatgaagattgggtgccaaagcggctgatgaaattgtatgttgatttctgcacaaagttatcagaagcgccaaacaagaagctcttaaagaaattatataatcttgaagtctctgaagatgaagttattgtgtctgattgtggactccaagacctgtcgatcacaccttttcttgatgctctaaaattacataaaacaatagctgtgttggatctttcccataatatgctaggaaaccaaacaattgagaggcttcaacaaatattttcttcatcaagccaaacatatggtggcttgacactggatttacattgtaatcgatttggtccaactgctttatttcaggtctttttactatccctaaacttgtttatcaaagtgaaactacagatatgtgagtgtgctgttatgactaatcgattagaagtacttaatctgtctgggaatcgcctcacagatgcatgcggttcttaccttttcacagtcctacagaagtgcaaagaatgtgtcttctgtttacatatcgtaacagcactgtacagcttgaatgtcgagcaatgttctatcacatcaagaacagttcagaagatggcagatgcactgcatgaagggtctgtcctttcacatctctccttaggaaacaacaatccaatttctggaaatacaatgcttagccttctctccaaacttgcctctctgaaaaggttttcggaactaagcctgactggtataaaactgaataagttaatggctgataagctgtgtctacttgcacaatcctcatgcttatcaggatttctgctaggtggaactaacattggatcaggatgtgaagctattggggtattgctttcgaatccccaatgcagtctcagatctctcacccttgatagatgcaatcttgggcttgctggcatcgtgggcattattcaagcactagcaggaaatgaccgattggaggaactacgcattgctgagaacacaaacctggcactacagagaacattgcagtacgatgaagacgcgcaggatgtatcaccaggtactgaccaaaaccaacgtaccaatgctgaagcgaacgatcgcatagaccctgataagatggaggtgccggatagcgaagacgaagaggcagtctacgaggatacccgtgcagcgaccggctcagatgggagctgtgcaagttcatgccagagaaactcctcttctggttgccatgccatccaagaactcgctgatgccatcatttctgcaaagcaactgaaggtgctcgatctcagtcggaacgggttgtcggaagaggatatccagtcactgtattctgcttgggcttctggccctagaggtgatggaatggctcgcagacatgttgccaaggaggtgaagagacttgcagatgtagtatgcctggtcgacatccccaaacaccagacgttgaccaagaaaagcgactcattgattgacgatctacgggaaacgttcgacaacctgcgacgatatcgcctcatgctcaacccagagaagtgcaccttcggagtaccgtcaggcaagctgcttagcttcctcgtctctagcagaggaatagaagcgaatcccgagaagatcaaggcaatcgagaacatgaagtcacccacaagacttaaggaagtacaaaagctaaccggatgcatggcagcactaagcaggaagccgaagaggcatttattgcactcaaacgctacctatcaaatccccctgtactcgtcgctccccaacctaatgaagaattattcctttatattgccgccacgccatactccgtcagcactggcattgttgtcgagagagaaagtccaacgaccagtctactatgtcagcgaagctctccatgacgcaaagaccagatatccacagatccaaaagctgctctacgcggtaatcatgacatcaagaaagctacgccactactttcaagcccacagagtcacagttgtctcctccttccctctcggtgaagtcgtgagaaacaaagacgttgtcggccgcattgcaaaaagggtagtcgagctaagtcagtttgatgtccactttgtaccacgaacagccatcaaatcccaggtactcgccgattttgtagccgattggactatgcctgataaccaatcagacaaccagatcgacaacgaaacgtggacaatggcgttcgatggtgcactcaacagccaaggagtaggggcaggattcgtcttgacatctccttccggagatcaattcaagcacgcaatccacctcaaattcagggcaaccaacaacacagccgagtacgaaggactactcgccgggataagagcagcagctgaacttggggtcaaacgactgatcgtgaaatgggactccgagctagtcgccaaccaggtatacaaagattataaatgctctaaccccgagttatccaagtacctcgcagaggtcaggaagctggagaaaaggcaagaaccactcgagcccggcacctttttggacatcctgacaaagccatcagtgaaagaggccatcggcgagattaacacagccgcccccgacatcagctcggaggtcacagaggcggaacacgccatcgtcgatatcgagaccacagatgactggcgcaccccactgatcaagttcatcaacagcgaagagttgcctgaggacgacgcagaggccgagaaaataacccgtaaagcaaaaatctactgcatgatcggcaacgatctatacaagaaagcgccaaacggagtacttctcaaatgcgtctcatccgatgacggcagacacctcctcctcgatatacatgaaggaatctgtgggtcacatgccgccggtcacacattggtcgggaaagcttttcgacaagggtttttctggccaaccgccctcaaagacgcatgcgacatggtccagcggtgtgaagcctgtcaattccacagcaagcacacaaagctacctgcacaagcgctccagaccatccctcttacttggccgttctcgtgctgggggctagatatactcgagccattcccacgaggacaaggcggctacaggttcctattcgtggcgatcgacaaattcactaaatggatcgaagcggtacccacgggagaaatcaaggccgacaacgccatcatgttcatcaaggggatattttgcagatacggactactgcatcgcatcatcaccgacaatggctcccagttcatcagcaccgatttccaggattactacatcgggctgggagtcaaaatatgctttgcttcggtttctcatcctcaaagcaacggacaagtcgagagggcaaacggcatagtactacaagggattaagacccgcgtctacgacaggctcatgtcacacgacaagaaatgggttgaagaactcccattagtactatgggccatacgcaccacaccgacaacgtctaacaaggaaacacccttctttctcgtgtacggctccgaggccatgctcctcagcgagctatga

SEQ ID NO: 10306 - DNA, 707 bp, Oryza sativa
  unsure (1)..(707): unsure at all n locations
  Clone ID: PAT_MRT4530_16640C.1
attctcccatcgacccttcaatcgcttgggctctttaagctcagcatcttccttttctttctttctccagcattggatgataagtccaattcttgttcattctctttagtcgtcgcccaccatgagttccctccgtttccttgacctggtcaagccgttcgtgccgttcctcccagaggttcagcagccggagaccaagattcccttcaaccagaagcttatgtggacggccctcaccctcctcatcttcctggtcatgagccagatgcctctctacggtatcgtctcctccgacaactcggatcctctatactggctgcgaatggttatcgcgagtaaccgtggtactctgatggagttgggtatcacccccatcatctcctctggcatggttttccagctcctcgctggcacccacatgatcgacgtcaaccttgacctcaagtccgaccgagagctttaccagaccgcccagaagcttctggctttcatcctctccgccggtaccgccactgtctacgtcttctccggtctctacggacctccctccgaccttggtgctggtatcgtcttccttctgatcctccagctggttgntgccggtatgattgttatcctcctcgacgagttgctccaaaagggctacggtctgggcagcggtatctctctgttcattgccacaacatctgcgagtcatcatgtggaag

SEQ ID NO: 10307 - DNA, 177 bp, Oryza sativa
  Clone ID: PAT_MRT4530_16641C.1
tactacactgcaatccggagcggctacggttgcgttcgcttctacgactcggatgaagataaaggacatggtgttagagagttaatttctgatggtggtctcgtatcccacaataggtctgagatgggtgtagaggtggtgacagccctcaattacactgaatccctccctgtccag

SEQ ID NO: 10308 - DNA, 489 bp, Oryza sativa
  Clone ID: PAT_MRT4530_16642C.1
atgaagaaagccaccagcggcaccgcacgacgtaacgaccccgcgtcgccgtcgtctccggcagtcgcatactcgcactggcgcactgctagtggactagtgtcgctgccaccagtggtgtgcagtcgttgctttggggctactcgccgcatatttgagggcctgtcggtgctggtgcgggggcgccgctgtcgaggaacccccgacccggacttcacgctgttgcgggcggatcaagcggcccctcaccggctgtcgaccccgccgcctgatctgaaggatgagcgcgcggctgctggctccatctgtgctgcctggttcattgccaacaccgtcgttcggatcccggcgccgcccaggcttgccggccgcctccccctccccctcgaccatgctcatcgcactgtcctcgatgcccgcctccccacgccatgcctcgacctcgccggtcgtgccaaggttgtcaggtgcgggaagtggctacggtga

SEQ ID NO: 10309 - DNA, 433 bp, Oryza sativa
  Clone ID: PAT_MRT4530_16643C.1
ttggttttttaacaaactggggacttaatttttaaagattccacaaagaaggttcacataaacaacacatgtcacagtatagaaagcttcaagcaaaccctgcataagcgaaaagcaaaagtttaccacaaccagacacacaaactgaaaaaaagaagcccacacggacagaccaaaggatagcagcaaaaaacaagcggggcccaggcaccaggcaagaaccctgaacccccctagaaccccccacccctcaacaccctagtaaccaacccccgaactaagagccgacctccccatagcccttctccagcgcggccaggacctcgcgggccctggagaattccccacctgcatgccctaaaccaccaaccaatggaccaaggggcgcttggagaaaacgaggtcgaactcgatgccgatgcggaagaacacc

SEQ ID NO: 10310 - DNA, 659 bp, Oryza sativa
  unsure (1)..(659): unsure at all n locations
  Clone ID: PAT_MRT4530_16644C.1
ttggtttggtttggaattcccggcccttttnaaccgnggttnaattgggggccggtttggtaaaaaaaaaccaagggggttccttnntccccctcttnaattgggttggtaattgggaaagnaaaaaatttggtaattggcccaacnnaaaaagnccaacggggtttataagggggcgttccttcccgcaaanaaaagaccttnttggnaaaaaaagaaaaaattgntgggggaaaaagggggggggttggtaaaaaaaggttccnacttgggggaaacaggtttccggtttttcccttttcccccccctnttccctnttcccgcaaaatttccttccctnggnaaaaaggcctttaattcccgcaaagatttatcctttttcccncgntttttaacctttggtttttgggaaaaaaaaaacattggtttgtttttttttaagggggaaaaaccttaaaaacccccacgncccaatttttgngttcccccaaggggggaagaaaaaaaaaccttggggggggaacccccngcccncnanaaaaattggcccnaaattccctttttccccccccttaaaaaaaagncctttggcccttggtaatttggcccncaattggggggaaaanggaaaaatttgggggaaccccccccacaacct

SEQ ID NO: 10311 - DNA, 525 bp, Oryza sativa
  Clone ID: PAT_MRT4530_16645C.1
atgtttttcatcgagtttaggcagagggtgcaggctagaggagactccaggtacagcagacgcgtcggccgggaaggagcgtcgggtagaggaatgcacctgagggatgacacggtaggcagggaggagccgcaccagccggggatgagccctgggcaggggaggtgccggcggaccaagaccacgtcgggcggctcccgcgcttttctaactgtggatgggggctgtgcagtagagcccctgagactgggggctaggaaaggggctatatttagtgtccctgctggagatgctcttacacgagccgcctgcagagatgtctgtcagaacatgcacacaccagtacatgatgagagtatgaaaccgatggagattgcaagcgaaacagctgcatgcaatgcacaccggcgtcgtttctatgtgtgcatagtttgtcctggcctggcctcttgtggagagtttgaacgagctgatgaggaaccaggttccaatcttccgataggtaaggataaatcaattgtgtag

SEQ ID NO: 10312 - DNA, 295 bp, Oryza sativa
  Clone ID: PAT_MRT4530_16646C.1
ctaattctcggccgaagctcctaactcacccttgcccgtgaggggctgggcgcgggccgtcgtgtcgccctccggccccacaagaccaaaggcatcttgggtgaaaagtaaatggcgaagggtgtatgccgaaggaagaagacttcgccataacaagtccaacttcaaggagacccaaggggccatcccagccgctcaggcccgtttgccattgggccaacattcgccaattggcccattagaggcccatgtatccaaattacactgtgtacccacacagacgtccctttcataa

SEQ ID NO: 10313 - DNA, 263 bp, Oryza sativa
  Clone ID: PAT_MRT4530_16647C.1
acccaactaagttgttcaaggtctttttgaagaagcctgaagaatcagtgggaatgcaatattcagatccagaagggctccacaataagaggatcgtcattttatgtgaccggtcagaccgggtagtgtgtgccgaccggtgggagcacggcggtcagaccggcggcggcgacaggcgcggcaggcaatctcggcggtcagaccggagattcaacaccgggctgtcacaccccaatctgataccggcgtacaacggcacctga

SEQ ID NO: 10314 - DNA, 190 bp, Oryza sativa
  Clone ID: PAT_MRT4530_16648C.1
atggccggcggcctcggtgacctttggccttccacgacggcggagggagcggtcggcggcaatgcggacggcgaagcgggtggtgggcatcctcccacccggatctggtggcgggagcagtcggcgatgatgcgggcggcgacgtggtcggcggcggcggacctcctcccgcccgaatcgggcggcagcg

SEQ ID NO: 10315 - DNA, 295 bp, Oryza sativa
  Clone ID: PAT_MRT4530_16649C.1
tccccgggctgcagtgaattcggcacgaggcgaaacaaaacagccacgcccacgcgcgctccggccaccaccaccgctagtggcgcgcgcgtgctcgagtggtagtagctagcttagtccagccaggcggcggcggcggcggcgcggcgcgtgccatggacgaaccagtacgtggtgatgccggacatcgcggcggacgcggccatgccggggtcatcgggccagcgcgccgctcttcgcgtgccgtggcgccgcggccgtgtcggcgtcctccatgctcggcggcggcggcgcg

SEQ ID NO: 10316 - DNA, 1233 bp, Oryza sativa
  Clone ID: PAT_MRT4530_1664C.1
atgagaaccaatcctactacttctcgtcccggggtttctacaattgaagaaaaaagtacagggcgtatcgatcaaattattggacccgtgctggatgtcacttttcccccgggcaagttaccttatatttataatgctttggtagtcaagagtcgagacactgacggaaataatcgagttagagctgtagctatgagtgctacagatgggttgatgagaggaatggaagtgattgacacgggagctcctctcagtgttcctgtcggtggagctactcttggacgaattttcaacgttcttggggagcctgttgacaatttgggtcctgtagatactagtgcaacattccctattcatatatctgcgcccgcctttatcgagttagatacgaaattatccatctttcaaactggtattaaggtggtcgatcttttagctccttatcggcgtggaggaaaaatcggactatttgggggagctggagtaggtaaaacagtacttatcatggaattaatcaacaatattgctaaagctcacgggggcgtatccgtatttggcggagtaggggaacggactcgtgaaggaaatgatctttatatggaaatgaaggaatctggagtaattaatgaaaaaaatcttgaggaatcaaaggtagctctagtctatggccaaatgaatgaaccgccaggagctcgtatgagagttggtttgactgccctaactatggcagaatatttccgagatgttaataagcaagacgtgcttctattcatcgataatatctttcgttttgttcaagcaggatcggaggtatcttccttattagggagaatgccctctgcagtgggttatcagcctactcttagtacagaaatgggttctttgcaagaaagaattacttctactaaaaagggatctataacttcgatccaagcggtttatgtacatgcggacgatttgaccgaccctgctcctgctacaacatttgcacatttggatgctactaccgtactttccagaggattagcttccaaagggatttatcctgcagtagatcctttagattcaacctcaactatgttacaacctcggatcgttggcaacgaacattatgaaactgcacaaagagttaagcaaactttacaacgttacaaagaacttcaggacattatcgcaattcttgggttggatgaattatcggaggaggatcgtttaactgtagcaagagcatga

SEQ ID NO: 10317 - DNA, 674 bp, Oryza sativa
  Clone ID: PAT_MRT4530_16650C.1
cacgaggattgtgggggtttgtggcggaaaattaactctctaagtattcccgtgttgattggtatgcatatggcacttccatatttaagcggtaatttgtggaatgtcttcacatggctgtatgagaacattctgcagaagtctgccttggtgggattctgtctttcaggcccttgagtttacctgttgtttatcctaagcacaacaaaaaatgggtcgaagttattgcatcatgagacagttgatttgtgacagctaataaacagtgtttatcgaacactgttcttgcaccttagacattttgtccaccgtgagcttcctattcctcatgtgatgctgaagaagattgtagctggatgttagtccaatactccatccttaggcactcaactaggcatcagcatgcatactctactgttacatgggctcggtagttactagttgcattatttttcaacttaagagctagtctgagcatgaaaaactaaacagagaagtacataaatggaacggccagctgaataaagaaaattcatctgatgtattatcctttaggttgccacaatacactaactttagatggcacaaggattatttaatttaaaaacctgatgatggtgccatcagcctgtgaatatggtggtggtgtgtggcaaggggatgaagatgggggg

SEQ ID NO: 10318 - DNA, 585 bp, Oryza sativa
  Clone ID: PAT_MRT4530_16651C.1
atggccagcgacatggactcaggcaagcctcccagcggcgtcgccatagatcaagcttgtcccaagcaattgtggatcaacctcattctaggcagtaatggtgtggttcgaccacatcttggcagcggtggcaacgttcaagcctatcctagtgtctacggtgaatttacaggatactgctgtgattttatgtggtccggtcagaccgggcaggggttgccgagagaatcaataaagttgtcatccactttaagagttcttcgatttgtgtttaccgaggttcggcggtctaactggcagcgcaccgacggtcagaccggcggcattgcggcggtcagaccggcgggcacacggcggttagaccggcggcgacaggagtcggcagccggcgttctcggcggatgtatcactccacccaaaatcctttatattttggggcgcaaggaattaatagttcccatagcagtcaaacctcctaagtttatacacagctccataagcacaagcttggctcgcagaacattaactgtcatgaaacgagcttgtgcgttgtggacttgtgggtttgtggcagtacctttctga

SEQ ID NO: 10319 - DNA, 314 bp, Oryza sativa
  Clone ID: PAT_MRT4530_16652C.1
tcgcccacgcgttcgcagatgctcattgtgccagcaacactctgtagttgaaagaaggcacaaagagaaggatgtgctgacattgcattcaacacaaacgctagctctatagtaagccacatagcaagaaagagtttcatcgtacgggctattcaaaatgatgttctagcatatgcatatcgcatgtcacgagaagaggctcagaggctcaaacgtaccaaacgaaatgagtttggtgcattcactcctctgcaactcatgagctgccaagacatttataatgggtcgaacatctcttaagatagcactgcgga

SEQ ID NO: 10320 - DNA, 365 bp, Oryza sativa
  Clone ID: PAT_MRT4530_16653C.1
tcgggctaggctttcctcaatttgtgggtcggtcgtagcgttgctggtcgctctgttctcactgtcggcactggagctgctcgctctggacctgtccttccaatagatcggttgtcgcatgctgccatcacactgtacaatgttgatctacaggatgcatgtgatgcctttatgtgacgaacaccacatgcactggaagggcacacatgatcacatagaggaacgatatctgcttactgtcagttgcgaaaggctacccacaactgtagtgggggacataacactggagagggctgctgtgcctctccgttcagtacagctgctacagactgcacaaccagtgctaccgaagcggtgaccggtac

SEQ ID NO: 10321 - DNA, 600 bp, Oryza sativa
  unsure (1)..(600): unsure at all n locations
  Clone ID: PAT_MRT4530_16654C.1
aatncgcgggnantcccgggggnntttttgntccccgggcggggnttttttcaaaananaanccnngggggtttccganttangaaattatcccngggngnttanttggggccccccttcccnngaanttgngggganaaaaacccntnccnggganttttccgggggacttggaaaaanttgggggttttcggnggggggccctttcntgganggngngggggnttnnccccccnggaaaaattgccccttttnngnnanatnggggccncggttcggncccccgggcngnattttngngtcacccctngnnnnaagtttgnggtggacngggggggcccccncaatngggtgggttgaanaaatcnnaaanncccccgcggtngggttnngnttcancnatnanaanggttttttttttgaanaattnngntnnnnnnnnnnttttgntntcgtnngggggngtngggtacccngccnacannnttnngnnccataatnnacgcaanaangaacaaaataaatattnagaaaaaaaaaanaaaattaaaaaaaaacaataaanaataanaaagnaanaaaaaaaaaaaaaaaaaaaaa

SEQ ID NO: 10322 - DNA, 382 bp, Oryza sativa
  Clone ID: PAT_MRT4530_16655C.1
ttgatttttaatagcgggaagacccaaaccagctcgccctacattgaccaaatcggatcgggccaaatcctcctccccttcgtcgccgctgctgtaggctacccaaatctcgccgctgctgttggctactcaaatctcgccgctgctgtaggctacccaatcgctgcaccatgtgtggtgactgctgcggccgcggtgccgggggagcctgccgaggcgggggcggccggcgccggcagcaggaggaagcggaggtgctcggggacggcgctcgccctcgtggcgctggcggccgccgcggaggtcgccgtcctggagggcaccgccggaggtgtcttctacgtgggcgactggtggctccacgagtgcgccaagtgggaac

SEQ ID NO: 10323 - DNA, 1032 bp, Oryza sativa
  Clone ID: PAT_MRT4530_16656C.1
accccccgccacccccccacacccctcatcccccacaccgtgccggccgcggcaacgcacgctcgacggacccggcagcccctcaaccacacgacccccctcccccccaccctaacgcccccacaaccacccacaccccacacacccccgctccccccggccggcggggccccgaccagacacacaccacaacaccacacaaccgccccacacaaaaaaaaaaaacccacccgtccacccaccccacaccgcccccccccccaccgtcacactcacccccccccccctagcctcccttcctcacccacccccgcccacccccacccccaccacgcccacgacgcaccccacccacccccccccagcacaccccccccgcaaccccaaacacaaccccataacacccccccccatcatcacccccccccccccccccccccccccctccccccccccccaccccccccccccacctccccctccccactcccccaccccccctctcaccccccggcggccacagcccccaccccccctctcacatgggacaaacccccctctctcactctctctagggcccacacccccccccccctcccacctcggtcaaagcgtcctccagccggtcaaattaacccgcccattgactccctcccccgcccaccacctccccgtccgcgcggtcgcttcccctccccgccgcccgcacgcctcgcttctccttcttggcttctccccctcgcacgcgtgtgcgccgtgggcccgcgctttccctccccctccgcgcgcctcgcttctccttctccctcgcgcacacgcgcacgccagctgcgccgctgtcccgccagccggcgcactcgcttctcctccccgcgtcgcactgcctcccgccctcccccatcccccacgcgccagccatgccgcggagctgcctggtacccataatctctacagtagcccctgagaccttcacagtcgaaaagataatcttctctcggtcgaaagctgtagcttctcatcgtcgagtagcca

SEQ ID NO: 10324 - DNA, 220 bp, Oryza sativa
  Clone ID: PAT_MRT4530_16657C.1
atcgattcaccgacggacacctcgccgccgccgccaagattgattgccaaatgtccagcaagaacacccgaagcacatttatcctacaatttggtggaatgcggcttggagattcagatctggctacccgaccttatgctgggaatggttgtcctggagattcaaaccccgtcattgtcgccagcatcataaagacgacttacggcggattttataccaa

SEQ ID NO: 10325 - DNA, 1063 bp, Oryza sativa
  Clone ID: PAT_MRT4530_16658C.1
gcacgagggccgcggagtcctctccaaacttcgcggggaaaaaaattcggagccgccgagcggcggcggcgcggcggggatggagtaccgcgacaagctggtgctcgcgcccatggttcgcgtgggtaccctgccgtttaggctactggctgctgaatatggtgctgatatcacttacggagaagaaataatagatcataagtttttgaagtgtgaacgtgttacaaatgaatctcttggtactactgattttttggagagagggactgatactgtagtattccgtacttgcccacaagaaagggatagggttgtattccaaatgggaacatctgatgctgtgagggcactgaaagctgctcagcttgtgtgtaacgatgttgctgctatagatatcaacatgggttgtcccaaatctttctctcttagtggtggaatgggagccgcattactctccaaacctgagcttattcatgatattttgaccacattgcggaggaacttggacactaccgtgacatgtaaaatccgtcttctgaacacacgccaggacactgtggagttggctcgccgagttgagaagattggtgttccagcccttgctgtccatggaagaaaggtcaaagacagaccaagagatcctgctaagtgggatgagattgcagatgttgtgtctgcactgtcaattccagttatagctaatggagatgtatttgaatatgaggattttaaaagaattaaagatgctacaggtgccgcttctgtaatggttgccagaggtgccatgtggaatgcctcaattttttgtcccaaaggaaaaacaccttgggaggatgtcaaaagagagtacgtgagaaagagtattttgtgggacaatgatttgaagagcacaaaacaaaccataaaagaaatgataatgcactattcttgccttgaattccctgaaggaaaaggtgtgaacaagtgtgatacaatagctgatttagcgaaactatatggggaagagtactacaatttcgttctttcaaataggaattgaccatgagtatcatagcatttcttg

SEQ ID NO: 10326 - DNA, 1530 bp, Oryza sativa
  Clone ID: PAT_MRT4530_16659C.1
atggatgcccactcagatgatgagatagctatccctttaagtgatgacgatgaaaggtttaatacaccaaaaaagaaaccaagcattcctctcaattgttcctcatttactcctgattgtgatgaggagataacgcctgcagttgggatgaaatttgaagacatcgaagctgttgagaaattctacaaatcctatgtgcatacagtaggtttttcagttcgtattgggcagcaaaagaagttgaatgaggtggttcagtgcaagtgtttcatgtgttcaaggcaaggatggaagtccaagaaaggaaatgaaatttctgatccttccaaaaaaagaccaaatgagaagattgagtcatacatttggttgtttaagacgtttttgcatgcaatgggagggaaagcacctacactcatcataactgatgaagatgctagcatgaaagctgctattaatcaagtccttcgaaacacggttcacaggctgtgtatgtggcatatcatgaaaaaaatatcagataagattgggcctctatggagagaaaataagggtaatgagtggttgtcaaaaagctatgatatccgtgaatcatggataccggcctacttcatggacatatctctagcgggcattctgagatccacttcaagatcaaagagtttaaattcattttttaaccgtttcattcatctttttgagaaactccgagaaaagattgtagcagctagagacattgttgtgttaaagacatgggagaatgtttacaatgattatggcaaccttctggaagaaatagctattgactcctcagaaatggccgtgagaaagaaaatttcagctgcatgcaacaagtttgaagatctcattcaaaaggctaagcactcagctgaagccatagatttcttaacatcaagtgtgttaagccttgaggcacctttggaccaaatggtcgctggtggcaggcaaactagacaggaagaatttgagtcatttcttggttgcaacattcctactgaagttgacatacttccaacgaccgatactcattcaagaggaagaatcaagagaataagaagtaaggaaaataaaaatcaaggaagtaacacaagtaagtaccaaggtggcaaggaacgaataccacgcttgtgcaagatttgcaaggaaatggtttttcatgacagccgcaattgtccaaataaaactagtatcagattacaaggatttgagagatattacattcaatttaatctagatgaacatttctaccatcaatggcgaccgactacgagaggaaaggacgacgacctattcaccgcccgatttgtggcggccaccaacggcgacgaagacgctgaggagatgcagaggtacaggattgcaaggatggcaacgaaggaagccgaaggggcagcgggcggtgttgctaccatggtccagccatgggtgacgggctgcggcgtggttttcgggccatcgccgcggccaccatgcacatccgcctcctcctcattaacctgcaaaggaacctag

SEQ ID NO: 10327 - DNA, 1056 bp, Oryza sativa
  Clone ID: PAT_MRT4530_1665C.1
atggcagagtacgagggactccttgccggactcagagtggcggctggactggggatccgccgcctcttggtattaggcgactcccagctagtcgttaaccaggtcttcgatctggtccggcgatgcagagcgtgtcagttccacgccaagcaaatccatcagccggcccaggccctgcagatcataccgctgtcgtggccatttgctgtctgggggcttgatatcctgggaccgttcaaacgggccccaggcgggtttgagtatctgtatgttgcgatcgacaagttcactaagtggcccgaggcttatccggttgtcaagatcgataagcactctgctcttaaattcattaagggtatcacggcccgttttggagtacctaaccgtattattacggataatggcacccaattcactagtgaactcttcggcgactactgtgaagacatgggcatcaagctctgcttcgcctcacctgcccaccccagaagcaatggccaagtggagcgcgccaatgcagaaatcctcaaaggccttaaaaccaagaccttcaatattctcaagaagcacggcgattcatggatcgaggagttgccagcggtgctctgggcgaaccgaaccacaccaagccgagcgaccggggaaacgcctttcttcctcgtctacggcgcagaagcggttctcccatctgagctcaccctgaggtctcctcgggccaccatgtactgcgaggctgatcaagatcagcttcgtagagatgacctcgactacttggaagagcgaaggcggcgcgcggccctccgagctgcgcgctaccagcagagcctgcggcgctaccatcagcgccacgtccgggcccgatcactctgcgtcgacgacctcgtcctacgccgcgtccaaacgcgtgctggattgagcaaactctcaccaatgtgggagggtccgtatcgagtgatcggtgtcccccggccgggctcggtacggctggccacgggcgacggcacggagctgccaaacccgtggaacatcgaacaccttcgtcgcttctacccctga

SEQ ID NO: 10328 - DNA, 484 bp, Oryza sativa
  Clone ID: PAT_MRT4530_16660C.1
agaggggggcccctttttttttttttttttgtggccaaactgctagggacaccagcagagacaatcactacagctgtgcatggctaaatggattgtgggcaggcgacctcccttcacggggagagtggccgtaccgtaaccaattcaagggtggcaataatcataaaacggactcaacatgctacgctagactatacagtgctggaacccgaaccgcgcacgagacacacagcttcgtcactgatcgggcttcgactgaccaggccttgaccaatcttggcaccaacctaacaaaaccgtagtacaagaggaagcaccaatctagcacaggccggagacttacaaattccaaccatggtgctgggctgacacacgccccaattaagcgctgctcttgggctcgccgacggcggcggcgacaggatttgaattcctggccggagcccttgggggaaccgggacagctacttcatggatcttgccc

SEQ ID NO: 10329 - DNA, 286 bp, Oryza sativa
  unsure (1)..(286): unsure at all n locations
  Clone ID: PAT_MRT4530_16661C.1
gtggatccagcattgcactgaaaacttgctcccatcgattaaacgctctcgcgtcgccctcccccgggcgactcgggaggcgacgccgccgccgtcctcctcctcctcacgtctcctccccccgcctcaccgccgcctgagcggncaccggcaaagccttgcgcccacaagctaggacggcggcggtggggcctnatctcgcctccacgcactcggcggctggggggatgccttgagtggcaggcnggnggtgcctagatccgcgccggncccggacggatctaag

SEQ ID NO: 10330 - DNA, 300 bp, Oryza sativa
  Clone ID: PAT_MRT4530_16662C.1
atgtcccagtcgcgggggcgggagggggacgaaggaagggaaggttgggacgttgggtgcctgcgcgggggcggagggcgtgaagaagaggccgaggaagggcgcggcgcccggtgggctgcgcggaagcgggcacggaaggctggcgacgaggtagtggcatttggtcaccggccatccaggactgcaacctgtatggccttgcttcgggtccttgtacccttgtccaccacatctttatcagttgcattcgcaatcgatggtatgcaggaacagaggactaatggttcagaagagtaa

SEQ ID NO: 10331 - DNA, 1584 bp, Oryza sativa
  Clone ID: PAT_MRT4530_16663C.1
ctacacagacgcagctcttcccatgaaaccgaaacggcaaatgtcccattttgcgatgtgaatatccgtcgacagcgaagcgcctgtacggaattttccaagatttaacggctctgtgctttcggtggtaggcaacgtacccgtcgacagcgaggcgactgtagtgactttgtctatctccaggatagatttgtcctcgttaccatttttaacccctacaatatcacagtttccccggataaactggcacaacccgatcggttggacgccgcccgcgatctccgcgaagaggctctcgaggttccgccgcgacgacccgccgggcgccaccgccgccgccgccttcctcctcatcgccgccgccttctcccctccccccatcacctccctcaccgcggcctccacctcgcgccgcccggcgtcccgcgccatctccaccccgaccccccactcctcgcacgcgtaccggcagttggtcacctgctccgagaagaacggccagcacagcatcggcacgccggcggcgaggctctccaccgtcgagttccacccgcagtggctcaggaacgcccccgtcgcgcggtggcccagcaccgcctcctggtcacaccaccccaccatcagcccccgcccgctcccgctcgccaccacctcctcctcgaacccctccggcaacagcggctcgccgtcgccgtcgccggcgtcgcgcaccatgtccggccggatcacccacaggaacggggcgccggcggcggcgagcccgcgcgcgaactccccgacctgcgccctccccatcaccgtgatgctcccgaagttggcgtacaccacggcggcgtcggcgtgggcgtccagccacgccgcgcaccggccgtcctccctggcgatggtgttggggaggcgggcgcggatggcgtcgagcgcggcgcgctccaggccgtcgaaggtgttgagcaggatgccgtcggcggcgggcgcgtcgagctcgcactgcttcatggtgatgttgagcatcacgtcgtcggggtcggtggtgcggatgaacgtcggcaggtcgcggaggcggacgccggcgatcattccggcgacccagtccaggcgggtgtccaggtacccgttggtcaaacaactctcatatttgagtggcacgtagccacgcttgacgagctgatcgaagttgaggtaggccaagaggccgcaggcgctgtgcgtgaagaagaggtaggtcgggatgcccatctccttggtcacgtgcaccgcgaaccccatggcgccgtcggccaccacgaagctcaccggcgggacgccgccggcggcggcttcccgtccgagcctctcgaccagcgccctgacgtggccgggccccgtccgccgcgtggcctcgcagatcgcccagatgtcctgcgtcgcgtcgagctccgccggctggcccggcggcgggaggccgtcggcgccggcgacggcggcggcgccgcgggagcggaggaggcgggcgcggttgaactcggtgtggacgaaggtgacgtggccctgcgccgggtaggggatcagcaccacgtgcggcttgctcgccgccggcgacgccat

SEQ ID NO: 10332 - DNA, 237 bp, Oryza sativa
  Clone ID: PAT_MRT4530_16664C.1
cctgatccaaaggacaaaaagcctgagtaatgggatgaccatcatggggtactgttcaaacggggagtggtgccacttccagaatacaatgtacattaaataacgtcatgataattaatatctgtaactacaagggaaaagaggcgatcccatacctagtgagtcgagattgcctacaccacctatacgtatatgtgctgggacatcgttgagcttgctgaatagatgtttgtcagg

SEQ ID NO: 10333 - DNA, 309 bp, Oryza sativa
  Clone ID: PAT_MRT4530_16665C.1
atgactacttgtcgcactgccactagttgtgccgtccatcttcgcgccgaggcccgtacctcttccccaccaacacctgtgttgggcctcatcggcagcctccttgggtggccgccgccgggcggtcccctttgctaccgtgacgacctcagcgcacccgtcggccacctccacctctctccaagccctctctgctctctagtctgtctgcgagcatcggctcccccacttccatgggcacctcccagcaagcgccagcctcaggtgcggcaggtctcagcggcgatgatgaagacgacgagctgctag

SEQ ID NO: 10334 - DNA, 393 bp, Oryza sativa
  unsure (1)..(393): unsure at all n locations
  Clone ID: PAT_MRT4530_16666C.1
tgataaagattggggatacattcaagcccgctcatccggatgcccgccggccaagatcacggcgccatgctggcangggccgtcgacagctcacngctgagtggatttatacttattgtgtcttatagtgtaatttaatttaagggcatttataatcattacttaattaatattgttcactggtgattttgtcacgtcttggtggttggtgtaccacaaggtgacccaaccccactgcaccactggataccactggaagaataacgtataatttantggaaaggtaccaccactacctacccttgggttgataaagtgatggatcacccccaagcccggtcattataaatgggaacatcttttatcatttgctaaaaaaaaaaaaaaaaaaaa

SEQ ID NO: 10335 - DNA, 114 bp, Oryza sativa
  Clone ID: PAT_MRT4530_16667C.1
atgaccagtggtggcaacgaagaaactcttggatacgaccagcagcccgcgacgaagaagctcgggcacgtccggtgggacaatggcatcgggacgaatattgtgaaggactag

SEQ ID NO: 10336 - DNA, 201 bp, Oryza sativa
  Clone ID: PAT_MRT4530_16668C.1
atgcaggcggccgccgcggcgagggattcgcgcctagccctgccggaatccgccggggtcgactcggattggagctcccgcggcttggctatggctatggcggtggaggtgggggtgagctgctgcgacgggggttacggctgtttcgtcctgtcgcgccagcggtggaatcaacggcggaggcggcggaatccgcggtag

SEQ ID NO: 10337 - DNA, 276 bp, Oryza sativa
  unsure (1)..(276): unsure at all n locations
  Clone ID: PAT_MRT4530_16669C.1
cccacgcgtccgatcgcaaatcttgatctgtgggtggatttggtgggttgaaaactccatcttttatggggcaaggctatgcgaaatccttgatgctcccatggagttctcctcccatggggcaagaggtgaagaggcagtatatagaggaggagcaagaggtggaagcgaagagaagtaggtgagaataggaaggacgaaggataaggagaggtggctnccncaccacttagtattaatgatcaaaataaaggtggactggcttgcacactgaat

SEQ ID NO: 10338 - DNA, 1546 bp, Oryza sativa
  Clone ID: PAT_MRT4530_1666C.1
attatgagaaccaatcctactacttctcgtcccggggtttctacagttgaagaaaaaagtacagggcgtatcgatcaaattattggacccgtgctggatgtcacttttcccccgggcaagttaccttatatttataatgctttggtagtcaagagtcgagacactgacggtacagcaattattaatgtaacttgtgaggtacaacaattattaggaaataatcgagttagagctgtagctatgagtgctacagatgggttgatgagaggaatggaagtgattgacacgggagctcctctcagtgttcctgtcggtggagctactcttggacgaattttcaacgttcttggggagcctgttgacaatttgggtcctgtagatactagtgcaacattccctattcatagatccgcgcccgcctttatcgagttagatacgaaattatccatctttgaaactggtattaaggtggtcgatcttttagctccttatcggcgtggaggaaaaatcggactatttgggggagctggagtaggtaaaacagtactcatcatggaattaatcaacaatattgctaaagctcacggcggcgtatccgtatttggcggagcaggggaacggactcgtgaaggaaatgatctttatatggaaatgaaggaatctggagtaattaatgaaaaaaatcttgaggaatcaaaggtagctctagtctatggccaaatgaatgaaccgccaggagctcgtatgagagttggtttgaccgccctaactatggcagaatatttccgagatgttaataagcaagacgtgcttctattcatcgataatatctttcgttttgttcaagcaggatcggaggtatctgccttattagggagaatgccctctgcagtgggttatcaacctactcttagtacagaaatgggttctttgcaagaaagaattacttctactaaaaagggatctataacttcgatccaagcggtttatgtacctgcggacgatttgaccgaccctgctcctgctacaacatttgcacatttggatgctactaccgtactttccagaggattagcttccaaagggatttatcctgcagtagatccttcagattcaacctcaactatgttacaacctcggatcgttggcaacgaacattatgaaactgcgcaaagagttaagcaaactttacaacgttacaaagaacttcaggacattatcgcaattcttgggttggatgaattatcggaggaggatcgtttaactgtagcaagagcacgaaaaattgagcgcttcttatcacaaccgttttttgtggcagaagtttttaccggttctccgggaaagtatgttggtcttgcagaaactattaggggatttcaactaatcctttccggagaattagacggcctacccgaacaggctttttatttggtgggtaacatcgatgaagctagcacgaaagctataaactttgaagacgagaacaaattgaagaaatgaaattaaatctttatgtactgactcctaagcgaattatttggaa

SEQ ID NO: 10339 - DNA, 1585 bp, Oryza sativa
  Clone ID: PAT_MRT4530_16670C.1
atggagggtatccctggatgggcttctcaaaatctgaaacaacccgataagggtactacatctcacaatgggtgtcctggctcaagtcgaatgaggcgcggtggcgaacggcaagcgccgcgtgaggtggacgatggcgacgggcgcgcggcgtggccgacggcgacgacgtgcgcggtggccgacgacgacgagcgcgcgggctggccgatgacatcaattgccagatccccttccctccgccgcggggtcgtcgccgtcgccgtcgagggtcgtcgccgtcggagtggcggcggagtggggcttgccggatctggcctcgagcagcgacggcggcggcttgccggcgaggtcagcgcccggtcgccctcctcccgctcccctctctccctccagccgtcgccgtcgccgtcgccgaccccggactccgccaccccgtgctgcctcacgggtcgcctcgctgacaactccaccctcaactccgacacccccggcacccccgcccagcgccgcctcacgggtcgcctcgccgacaactggctcgccctcctcttcaaggctgccgagcttctcctcgccgtcgcgatggcgtctggtggagcggatcgacgagcaggcggcgcttccctatactttgtgtaccgggtctggcctgtcagcccatcgtgccgggccggcccgaccgtgccgggccagcccagcgtgctggtggggaggcccaggcacggcccgacggtcgggctgtgccggcacgggcccgacccaaggcgggccgtgccgtgcttgggccgggccaaaaaggcgtgccgtgggccgggccttcgggcctcgggccttatggccaactatacttcggagcgaaggtcctccttcgaccgttgaggagtatctcattctccgccttgacctcaacgacctgccgaaacacgcgcttgagaagctccatgaggtcactgcggcggtccctgctggtgggatcgaacgcctgagacacggacacgatcgctcggtacgggaactccatctccagcagccggcacacttcctcgcccagcgtcgacttgccgacgccgccgaaccccacgatggagaacaccttgacatgctgctccccgacgagctgctgcttgatcagcagctcgaccagggcgtccgcctagcccttgatgccgacgagttggtggctgtcatggcgggcgtcgcggttgacgccgtaccgggcgtggcgctcgctgatggagagggcgcttatctcggcggcgaggcagcggcgctcgcggtaggtctggaggcggtgcttcaacctgccgcgcacgccgtcgcccgggcggcacctgatgcggagccaatagaggccgacgcagtcctcggcgtcgtaggcgagctcgcgcacctgcttcatccactcccggatgaagtggtccacggcggcgccgtcgtcggcctcagactacatccggaagagcgcgttcatggtggccagctcgtcccgcagctccgcgacctcgccgcggacgccgctgagctaccggtactcctcacccagcagctgcccaaccgtgctcacaagtatagttggccataa

SEQ ID NO: 10340 - DNA, 242 bp, Oryza sativa
  Clone ID: PAT_MRT4530_16671C.1
gcattaattacttcacaatctatttctatcctatgacgagcatgccagatagtaatgcacttcatatgccgtgcagcacttttttcctcttgcatttctgtaatcaatttcctttcttgatctctcgtacaaacctcgtgaagccttcaggaaacagagaaatggcctaaactagttgggccgtatatggcctttacctgaaaggaccactcgtatttatcaaacatgttattcttcacttg

SEQ ID NO: 10341 - DNA, 161 bp, Oryza sativa
  Clone ID: PAT_MRT4530_16672C.1
tgcttttgtgtagctttgtggaaagttaatatagaacgttgatgcatctgaaatctgaacttgatggtgcagttctgtatatgccatgaacctgtgtattccatgaatgttgagaacatatgaggatgctagaatgcagtaaatctggaaattttcttttc

SEQ ID NO: 10342 - DNA, 159 bp, Oryza sativa
  Clone ID: PAT_MRT4530_16673C.1
atggggctcgccggatctggcctcgggaggtggcgacggcagtggctcgacgacggcaacgacaacgacagcacgacccacgccaagctagctcagaatctccgagctggtgaggcgagtccaaacgccaagtcaccgcactgtgaatggccttactag

SEQ ID NO: 10343 - DNA, 393 bp, Oryza sativa
  Clone ID: PAT_MRT4530_16674C.1
atggcagaggtggccaatgtaggaacaaagtcatccatcaatggcaatgaaaacaccagccatagaagcagcttgaggcgactgatgatgaaaacgaagacgcccatcaacagcggcaaagtccgccaactgtataggcagaaacaccagtcggcggcaatgaaggcgagccggcggccggcggtgaagacgtggatgcccatggacggtggtgtgaccaaccaaccgcggagacaccagtcgacggcggtgaaggcaagccggttggtgaagacgtggatgcccataaacggtggtgcggagacaccagttggcggcggcgaaggcaagccggtcggtgaagacgttgttgtcatcagcaacggcggtggcgaagacaagccggcggagtag

SEQ ID NO: 10344 - DNA, 199 bp, Oryza sativa
  Clone ID: PAT_MRT4530_16675C.1
gcgcagatgctcagagaatgctcaggcgagggcggacctgacggggatagatgacacacgccatgtcctccatcagcggactcgcgcctggcgtgcatctcccctccgggcccatacgcgccagcggtaggcccatgatcatcgtcctgagcgccgaggccgcccccgccatgcgttcggactggaccctacccccttc

SEQ ID NO: 10345 - DNA, 1842 bp, Oryza sativa
  Clone ID: PAT_MRT4530_16676C.1
atgttggagaaggagggcaagctgatcatgagccgcgaggatgaggagatcatggcctggttcgagcggacgacgcgcgacgcggccgacgtgcagcgggagacgctgcggcgcatcctcgccgagaacgccggcgtcgagtacctccgggagctcggcctcgccgggctcaccgacgccggcagcttccgcgcccgcgtcccggtcgtcacccacgccgacctcgacccctacatccagcgcgtcgccgacggcgacgcctcccccgtcctcaccgccaagcccgtcaccgccatctccctaagctccggcacgacgcaggggaagcgcaagcgtctcctgttcaatgacgacctcctccgttcgtcgatacggttcttccatgccagctacgcgttcacgaacagggcgttcccggtggaggacggcagggtgttgcagttcatgtacggcagccggcatgagacgaccaagggcgggctcacggcgacgacggtgatgaccaacctgctccgcagcgaggagttcacggcgtccatggcggccaggtcgcggccgcggctgccgagctgcagcccaagcgaggtggtcttctcaccggacttcgacgagtcgctctactgccacctgctctgcggcctcctcctcgctggcgaggtcagggccgtgtccgcctcgttcgcgcacagcatcgtcgtcgcgctccaggcgctcgagcgggtgtggcgggagctgtgcgcggacatccgccgcggcgccgcgtcgccggcgcgggtcaccacgccggccgtccggcgagccgtggcgcccatcctcgccgccccgaaccccgcgctcgccgacgcgctggagcgccggtgcgccgccctgggcgactggtccggggtgatcccggcgctgtggccgaacgccaggtacgtgcaggccaccatgacggggtccatggagcactacgtcaagaagctgcggcactacgccggcggcgtgccgctggtctccggcaactatgcctcgtcagagggggtcatcggcatcaacgcggagcagcacgcgccgcccgagtccgtcgtgttcaccgtgctgcccgacgccgcctacttcgagttcatccccctcaagccgccctgcaccgacgccgccgccgacgacgacaacccggccgccgccggctcgtcgtgctacgtcgacgccgacgacgccaaccccgtcggcctgacggacgtcgtcgtcggcgagcactacgaggtcgtcatgaccacgttcaccggcctgtaccgctaccggctgggcgacgtggtgaaggtggccggattccaccacgcgacgcccaagctcaggttcgtgtgccggcgaagcctcatcctgtccatcaacgtcgacaagaacagcgagcacgacctccagctcgccgtcgacagcgccgccaagatcctcgccggcgacggcgagaaccacaagcagctcgagatcgccgactacaccagccacgccgacacgtcgtcggacccgggccactacgtcgtcttctgggagctgaacggtggcggtgaggaggacggcggcggcgtgctgcagcggtgctgcgacgagatggaccgggcgttcggcgccgacgcggggtacgcccagtcgaggaagacgtgcgccatcggggcgctcgagctgcgggtgctgcggcgcggggcgttccaggaggtgctccgccactacgtcgccggcggcagctcggcggggcagttcaagatgccccggtgcgtcgcgccgtccaacgccggcgtgctccgggtccttaaggacaacaccatcaacattttcttcagcactgcctacgactacgattga

SEQ ID NO: 10346 - DNA, 1055 bp, Oryza sativa
  Clone ID: PAT_MRT4530_16677C.1
tttttttttttttttacattacaggcattcagtctaaattaaaattcaatccaaaatcaaaattcagtctacaccactattaatctagtgccaacttaagaaattcaaaacgacctgggatgagaatcgcaaacatattgcaggttgattcataaaagtcggatcaccaacatcttccacttcctcatctcgcaacattttgaagtccacaatacatacataaacagcagatgcaagattctactacagacaatgccatagaactcaagaaacatccatgccagttgcttgcttgttcagtgggtgaaggtgtagaagacggtgccgacgtagacggcgagcgcggtggtgacgaggccgacgagccctgcggcggccttggcggcggcgcggttggtggcgcagccgagcgtgccgaggcggatctgcacgaccatgaccatggacaccatgaggaagacgcagccgacgacggagccgacggcggaggcgagcatcccgaggcggaggaggcgcgcgtcgatgtgggcgtgcagcgtgtcgtgcgggtccttggagttgatgaggttgagcgccagcttgagcccctgcgccacgaggctggagaagaggaaggaggagaaggccaccacctccagcaccaggagggaccgcgccaccccctgcccggcgtcgcacgacgcgtcgccggcgaggctccggagctcccccgggtccgccagggagaggcccacgaacacggccaccgtgaacagcgagttcacgttcaccaccccgtccagcgccgtcacgtgcacgctcgtcgtgttcgccgacagcgccgccggcagcttccactcgtacccgcggtgcccgccgccgccgccgccgttgctctgctcgtcagattcatccatggcaggcgcggcgtgcggcgcggtgtgttgcggcaggcgcggcgtgcggcgccggcgcggccgcgcgactcgtggggcggcaggcggctgccggctgccggctgggcgcaccggacctgaccggcgcagggcggcaggccccacgagcaggtccgccat

SEQ ID NO: 10347 - DNA, 431 bp, Oryza sativa
  Clone ID: PAT_MRT4530_16678C.1
tgtgtttttttttttgcaacttgaagaggaatgcttgcaagcactagcaattgtaaatgtcagcaacacgtatttacgaaacccaatctacatgcgtacacaagcttcaatggtgcctcttgcaccagaatttctgcatgggcactcctccaagcatgcaaccgtctgcagcgctcctctataccttttgctaatgccaggagatcaacgtctgtacaaccaatgctactactactactactaagcaaagttcctaccaacacatgtagcatcttcatagtccatggagagcctatgagcaaaaggtctttccttgtagcatgaactggctgcctctggcatgaaagaataagcaatagagcgccagtcactaccaaggagcgactgaatgcaaccaaaatcactctacaatcgggacttgatcatggggg

SEQ ID NO: 10348 - DNA, 534 bp, Oryza sativa
  Clone ID: PAT_MRT4530_16679C.1
atggcgtcggcgatttcccgagctgctgcccgcctgccacttcttcgactgtcatcgcaagcccttcttcctacccagatcgctcgcttccgatccgagtttgtccagcctaacaagcccaccgcggacggtatcaaattagcacaagctgtttgtgacacagagatgaacctggcaagtattctgttggtgcagaaatctcttgatgagaaacttgcacaacacaaacttctttcaaatgtttcgctgtttgaggataaggaagtgagtcagaggagtgaagaacacagcaaacaactgaccgtacaggacattcagatgaaaaaggacgagttgcttagtgatattcggagggttgagatccttgaaggtaccttacgcagcttgcaaaaaactagatttcagagccaagataacaacatatgtgctcaaaggttgaaaggcagcgaggatggctttacattatgctactcacctttagatttcgtttcttctgctggctttttctatgtttattattattattatatgtag

SEQ ID NO: 10349 - DNA, 235 bp, Oryza sativa
  Clone ID: PAT_MRT4530_1667C.1
atgagtacaaccacagcctacgatgatccagaccgaactggcaacccgaccctgggtcccagctcgtcccaagccaacccaggccaaccattccacattttagttgttgagcaaattttaagaattaaaacactgacttggactgagccacaaactaagccttacccactagacatgtggaagtacggtagtgctttgcaacagaggcccgagcttaatccttatagtacccgag

SEQ ID NO: 10350 - DNA, 350 bp, Oryza sativa
  Clone ID: PAT_MRT4530_16680C.1
aaaaattatccctacaaaggattgtgcatattcagtcaatggtgcttccatttctgaaaccaggctactttcactaaatggcacaaatgcccctttgtgttatttgctatactcaactgttgtgattggagatgttttgcgatagttactacatgcattgattcttccatccctatatcccagcatggcacatcactctgtcaggatataatgcacctccaacagactgtatgtaatctaagcatgagaacatgcttacttactgagtgcctgaatctaacaggaggtgtatatccttaaatcataccagtacgtctataagaccccaatttaaaaaaaaaaaaaaaaaa

SEQ ID NO: 10351 - DNA, 871 bp, Oryza sativa
  Clone ID: PAT_MRT4530_16681C.1
tcatacgccgcatccttcgttcacgccgccgccgcctcgcgctcttgccgacggccaccgcgccgcctcgccggtcgccgctcccacccttccacggcgaccggagccaaagacggtgaccggcgggcgcgacgacgcgtcagctggaggggtgacctcggattcggtggagggctgatggctccgacccagctggtcgatcgctgcggcggcggcgcccccgcgagtcgctgctgtgagcctgtgatcgcctgtgatgggggtgtccgtggtggcgcaggcgccatgggggaagtaactcatgagatgggatgtggccgcaggcgcgattgtcgctgtgatggcgcccttggctatgcttggggcgacgatggtggcactgatgcccatggtattgcagccccaacaagctggacctatgatgccattgttggcacagccgcctttggccatggcactcctcactgaggatgcgaatttcttcattccgtgccgcttcgtccacttgtgcagctgagccttctgtccttccgctggctccatcctcgtccatccgccatacacgcgaacccagctcggcgccaacgtcatccatccgctgcctcccagcatccaccgcaggagaaaccaagctgcgacgcatggggtcccatcctccctcttccctctcgtcgatcccatcccccaaaacactcgagttacgacgcgggagagcacacatccgtggtgcaccgcgggaataggaagcggcagcggcggtgcacggactcccctcacccccattgcgatgtcgctgtgatgccgtacccacatgccagagctgcgatggagctgctgcctttgtgcgcaggccttccaacttattgacatg

SEQ ID NO: 10352 - DNA, 310 bp, Oryza sativa
  Clone ID: PAT_MRT4530_16682C.1
attcgctcattctggtgactcgagatagtgaaagtcaggtatacgagctagctggcgtactactacttcattagcaacatgtcctttggtgttgttctaggagctacattccgaacttgtttttcttaggtgcaactagactatacttcttcgttcccacaaaaaagatcgacctagtatggaaggtcatattttctagtatagcgaatctggacaggctgcccatattccgtgtaataggaaatgacaccttaatactaggctggcttcttttggtccgagggaagaggacagtagttgctctactagg

SEQ ID NO: 10353 - DNA, 924 bp, Oryza sativa
  Clone ID: PAT_MRT4530_16683C.1
ccggccgggaggcccatcattctaagtccactaaactctcctggctactccaccgccgcacgtgacacgtcatacgccgcatccttcgttcacgccgccgccgcctcgcgctcttgccgacggccaccgcgccgcctcgccggtcgccgctcccacccttccacggcgaccggagccaaagacggtgaccggcgggcgcgacgacctaggggaatgtgtacctcacctaccccacatcgtccccgcacccgcattccctaaacccccaaaccctagcccgctcctccgttgtcggatacgccaacctgctatatgcgagagaagggcatccacaactgtttgatgatctccaccggagccgccgtttaccggagtaaccgtgcttacgcgtcagctgggaggggtgacctcggattcggtggagggctgatggctccgacccagctggtcgatcgctgcggcggcggcgcccccgcgagtcgctgctgtgagcctgtgatcgcctgtgatgggggtgtccgtggtggcgcaggcgccatgggggaagtaactcatgagatgggatgtggccgcaggcgcgattgtcgctgtgatggcgcccttggctatgcttggggcgacgatggtggcactgatgcccctgcaagcggcttcggtgcccacgattggtggttcattcgtgatggtggacttgtgaccttgccaccgcctcctccgcaagacgaatttgtgatgatgatgcagcctatgatagccttccaccttattgacatggtattgcagccccaacaagctggacctatgatgccattgttggcacagccgcctttggccatggcactcctctactcaagcttcaacatctggactactttggttcgttctaacactccacctcccctgtactttacattggcaacataa

SEQ ID NO: 10354 - DNA, 772 bp, Oryza sativa
  Clone ID: PAT_MRT4530_16684C.1
atggtcaccgacagcctcagtgttgctagaagagcctctcaccctgggctttcatcaagcttatctaatccaatgtcagaagtcaccacacctttccatcctgctgcaccatctgatcttcgtttcaatcgttttcgacccacatttgcggaaagtgattggatatacaaaagtttgtttgtctgctatgtagatcgggaggcaataaatgatgatgaatacttgattgctgcatggttgagagataataaacgagatgaagagcagtcaagccatctcgaagttagaagctttgacttcgatggtgctcgtcagtcgtcagatctatgcttactctccttcagttcctaggacttggatttttaatacgatggagttttgatcccatctccctgtgcagatgaaatgccactggtccttgtgatttggaaagcaggacggtgtcacgaatacatttacaatcttgtacatcaggatagtgtgaaatgtttgtaactttggaattgacgatgggttaacctatcttgttctgatgccctggaatgctgtggcatctgaatgcttacatgctttctgttaaaggatcgccagaaatattgtgtaactggccatagatggttcaagagtcaattgtgctaaaaaagtttaaattcatgtgcataaggataatctaccagctcggaggctctatgatcagataggattcaggatggttgacttcgatggtgctcgtcagtcgtcagatctatgcttactctccttcagttcctag

SEQ ID NO: 10355 - DNA, 854 bp, Oryza sativa
  Clone ID: PAT_MRT4530_16685C.1
aaactagtggatcccggcccgaggcgctcatccctcctccgcttcttcctcctcagcctctcatccaatttttccattcccagaaatcgagcgaggaagctaagctaaaccaatcgaaggccacggccatggctgccgctccagccaccacgtcactgctgagcgcgctgctgcagcttcccctggccccgttctccgggaggaggtcgccgccgccgccgtcggtggtccacgtggcgcccccgcgctcgccgacggcggcggtcgcggcgaccaaggggtacaatgtgcagatcgtggtggacgagaacgagggggaggagtccatcttccggcggttccggcgggaggtgatgagggccggcgtgctccaggagatcaagcgccgccgccgctacgagagcaagaaggacgagcgcaagcgcaaggcccgcgaggccggccgccgcaaccgccgcaggcgtatgatggaggagcctaggttcccagaagacgatgctgattcagaggccgcgaggagggctcgtgacgatgaaaaggataactgggagattgacggaattctgtgagtgaaacaatggagttcatagccattcagatgcaaagtttccatgttttgagttattgtttttttggtccgcaaagcacaaactatatgagttgtcggccttaatttcctcttcaattgtacggtttgaatgtactaaatcttagctaatgcagcatcctttttttttttttacctctgtaccttttccagtttgtttgcaatacattttgcaaatatgagcctataattataaaagagtaaatattataccaaaaaaaaaaaaaaaaaaaaaaaaaaaaaaaaa

SEQ ID NO: 10356 - DNA, 474 bp, Oryza sativa
  Clone ID: PAT_MRT4530_16686C.1
atggcgtcggcgcgcggcggatttggcggcgccgccttcgggagggccggatccgccgccctagggagcggctgcggctacggcgatgaccggcgcgcagcgggggcggcggatctggtgagtgggcgcgcggcgtcggcgacctctggccttccacgacggcggcaggagcggtcggcggcgacgcaggcggtgggcatcctcccacctggatctggcggcgagagcgtcgtccagtctctagtccatcgtgtgagattaattcttgacctcggcctcgtcaacctctccaacaacagcattacagcacggcatctccatatgaaaaatgcttcttcggcatgggagcttgacgaggctggcgagagcggaggccgaggaggtgcacaccgtgccgtccccaagccgccgccgttgcttcgctgggaaaagaggagacagaaggcatgtctcttttttttattatttttttag

SEQ ID NO: 10357 - DNA, 331 bp, Oryza sativa
  Clone ID: PAT_MRT4530_16687C.1
aaaaaccaaggcttgccaatttgttttcagaccgtttttaaaccttttgccacattaagatggggcaattaattttttgccgttgaacccacacttaataaacacttgtggccccacttgttattgaaatggggggggcaattagttttttgcaaaatttaaacttggcaattgttaaaaggccccgttttcagaagcatttttccagttccacggggctttttgtggcctttaaactgttccatcgacgtgtttgccttccaatgggcaatgaacaagattttgggattttttaggtttaatgcattttgaacccccgggcttccatttt

SEQ ID NO: 10358 - DNA, 133 bp, Oryza sativa
  Clone ID: PAT_MRT4530_16688C.1
agaaagaagcattctctgatgcataacttctccgatttaatttaatccataccttgaagggggtcctcagctcagacacttgaatttggacccttgggcgggtatgaaaatctaccccaaatgccctcgcgat

SEQ ID NO: 10359 - DNA, 249 bp, Oryza sativa
  Clone ID: PAT_MRT4530_16689C.1
atgtcggggggctttggatccgacggcctctccgtccgcctcccctcgcctatggtggtgtccctcttccggcttcgccgccactgccgccagagctactcgctcttagcggtgctgcttccgagagcgagggcgatggatccacctccaaggcagccagatcaatgtgctggcattgctcccaaggtcgggggcgacagatccgcccctaggccgccgaatctgcacgctggctccgctcatacctga

SEQ ID NO: 10360 - DNA, 258 bp, Oryza sativa
  Clone ID: PAT_MRT4530_1668C.1
atggccagcaagggccatcctcccggaggattcttcctgcacgtccagtgctaccgccggggatcacgtcgccctgcgcctcgatttgcagggaggggacgccggtggggggagagccaacgccgcgagatacgccccccaagctcgtcgccctacacgtgccaccccatccagcgaagaggacggaagctcgccggccacgcccagccgaagggagcgccgccgccaatgggaaaagaggagtggcagccggagtag

SEQ ID NO: 10361 - DNA, 333 bp, Oryza sativa
  Clone ID: PAT_MRT4530_16690C.1
taacactactgagtatggggatagctgtgccgctccgcaggtacggataccatattctaggcacgctcctgatgaacggatgaactttcgaaagcattcatgcttgtgaagcattgcaggtcgcaacattccttgcctaacgaaacagttccacaagctccctctcttgcgtaaagattgagggccaaaaatccctcctgtagtaaagctatagagtggtttagggacctcgccctgaaaaaccttaaaagaacctcggaaactttggtataattcttgggctttatcatccgaaactctgatgtagttcttgatctttggttccacccaata

SEQ ID NO: 10362 - DNA, 508 bp, Oryza sativa
  Clone ID: PAT_MRT4530_16691C.1
tgtggccgccgttccacggtgatgaaggtagggaggcggcagatggcgaggaagacggcgccggagacagagaggagaggactttcatgtccaaccaggactagtatctacccataggtataaatatgcacactcgaggtcattgtaaactatctcacaaatcaatacaactactattggcgcatcaccaccctccttaccgaggtttttacttatcatccggccgtactcagcacctgacgcggggctgtatcggctttcgatctccggcgtcctttaactaatcaaaaccggtcacaataggttattcagtggttttgaccccggttttttcctatgtgacggctgagttagcttgggacccgcacgtgccccaaatgtcaggctgccacgtcatctctctctctctccctcctctctctctctcttcctcctctctctctctcttctcttctcttctcttctcctattctataggcaagccggctagcggctggggaggaaccgg

SEQ ID NO: 10363 - DNA, 2319 bp, Oryza sativa
  Clone ID: PAT_MRT4530_16692C.1
atggcggcggcggcgctgcctcgcctcctcctcgccgcggcggtgctgtgcgccgcgttcgcccccgtatcagggttcaccgacccctccgatgctttagggctttgggaattatatcgaacattggattctccatggcagctttctgggtggacatctcagggcggtgacccctgtggccgcggtggtgaacaacggccatggcatggagtcctttgcagggattcgtccattgtcgctttaaatattagtgggctaggagttggcgggtggcttggtctggagctgctcaagttttactctctgaaaatacttccagtctttaatttctttgcttcgctgaatcatgacgaccgtagggatgtgagcttcaataacattgctggtgaaatcccgcgcaatttgcccccaagtgtggaatacctaaatttcgcagccaaccagtttgaggggagtataccaccgtcactaccatggttgcacactctgaaatatctgaacctcagccacaataagctctctggaataattggtgatgtttttgtcaacatggaaagcttaggaacaatggatttatcattcaactctttcagtggtgacttgccaacgtcgtttagctcattgaagaaccttcatcacctttatttacagcataatgagttcacaggatctgttattttgttggcagaccttccattatcatccctcaacattgaaaacaatagcttcagtggttatgtgccaggaacttttgagtccattcctgagttgaggattgatgggaaccagtttcaaccaggtttcaaacgtgcatctccctcatttaccaggagtgctcattcaccaccaactccacatccacctccatcttcacctccaccacctatgtccccacctccaccagcagttaaggaaaatttgaaacacaagcccgaacctttgaagccttccttaagccattcttctatgtacaaccataatcagcacaggaagtcacactctcgagtgacagctgctgcaatagctactgttactggtacagcttttgtgctcctcattgttggcttggttctgaaaagctgcacatacagtcctaagagcaccgctaacaatgccaaatctccacctgccaatgtggaaaaagtccctaaagcaaatgaggtcttgtactcttggaattctcttatgaatgactgtgaggcttcctctagtgacgtcattaagcctgaaagagctatgaaaacaaaagtttgggccaagacatccaaaaactttctaactgcaaaacagtttcaagctgttgacatcttagcagctaccaggaacttcagtaaagaatgctttattggtgaaggtttcactggccaagtttacagaggtgattttcctggtggccagctcctggctatcaagaagatcaacatggtagatctgtcattatcggaacaagatgagctcatagacatgcttgggaaaatgtccaatttgaagcaccccaatatctctgcgcttgtgggctactgtgtcgagtttgggcactgtgcacttctatatgaatatgcagaaaatggctctcttgatgatattttgttttcagcagccacaaggtccagggctttgtcatggaaagctcggatgaagattgctcttggagttgcctatgctttggaattcatgcattcgacgtgctctcctccagttgttcatggaaatattaaagcgacaaatattttgctcgatgctcagctcatgccctacctcagccactgtggattagccaggctaagccaatttgtcagtgccataagaacggactcagaagctctcaacagtggtaaaggctatgttgcacctgagcttactgacccagcaacagatagcatcaaggctgacatttacagtttcggtgtgattttgctcgtgcttttgactgggcagaaggcctttgacagttcaagaaggcagaatgagcagtttctagttgattgggcatctcctcatctccataaccttgattctttggaaagaataactgatccaagaatacatgcatctatgccacctcaagctatctctacgttaggcaacatcatcttactctgcatcaagaaatcaccagagctccgtccgccaatgacagtcataacagacaaactactgaagcttgtccagtcgacaggtcttcaaaagaccagcacgacgacacaacacttggaggttgatgctcaggaaccctctttcaaaacaaccagaccgtatttcgagccatcctttacagtaagtcaaagtgcaaccggaggctgcatctcccagagataa

SEQ ID NO: 10364 - DNA, 602 bp, Oryza sativa
  Clone ID: PAT_MRT4530_16693C.1
cggggagatcgagccgcccgcgtcgccgtcgccaacaggcaccgcccccgtcgccaaccggatcgtcgagagcccggtcgttcccggctctaccgcttcgtccgcgaggagctcggctgcgtattcctcaccggcgagaagctcaagtcccccggcgaggagtgcaacaaggtgttcctcggcatcagccagggcaagctcatcgaccccatgctcgactgcactcaaggagtggaacggcgagccccttcccatcaactaagccacagatcccatcgccattgccacttgccatacacccatcatcgaggaggagaggagactaaaaataaaagaaaacgaaccgcttcgtgtatcttcagaccacaaaaagacccctgtattttcttcgttcgttgccgtttggtttatagtgatctcgtgttctttgtgttagctgctctgctcagcttgccacgccactggcggcacaagcagcggcttttctaagatattgtcgctaaactgtattttggggtgaaagtattgctactcgattccatcccttaaaaagttgtggtaatagaaatgttttgatcctataaaaaaaaaaaaaaaaaaaa

SEQ ID NO: 10365 - DNA, 354 bp, Oryza sativa
  Clone ID: PAT_MRT4530_16694C.1
agagacacaaaaaccaccgttagtatttccagactaattatagacggagggggcagacagcaagcccacgctccgatgctccccaagaccactaatgaagaccgcacgatactaggacaggaacacccggcaggcaagccatgagcccaacacactattttacgatactcgaatgatgggcaccaggcccacacacgcacagcacaactgtgtgtccacctttaatgccaaatggcatacctgcactatggcttccatcagtggctcaccctactgaacaggcactgggcacatgagccggtgcgccaactaagacgtgctggacagggttatgagcccatcgaaccctggagg

SEQ ID NO: 10366 - DNA, 351 bp, Oryza sativa
  Clone ID: PAT_MRT4530_16695C.1
aaattaacgatacatgtttaatcaaatcatccggaggatacaacatgctggttacattaaatctagtatccaaagaatcaaattacattccagaccaaaatatgattacctagaaaatttaattaccgtcacacactcccactcaactaaggtacattcatacatgctctgcttaaactaccactacaccgtcggatcttagctactacaagtgtacacatggtactgtcggtgccaccatatcgatcgtctatttgtgctcacttgctcaagacgaagttggtcacctatgcccaggccatgttggcgacgaactccatgacgttgtcgaagaggttctcgatggtgccc

SEQ ID NO: 10367 - DNA, 368 bp, Oryza sativa
  Clone ID: PAT_MRT4530_16696C.1
cgtccgcggacgcgtgggtttccatggcgctcgccgccgccgccaccaccttccgccctcgcctcgtcgtcaccgccaaagccgacaacaccgacactcgccgtcgccactggaaggccggtgagttccccttccccacctcttccgacactccccgccggagcgcccgcaccgccgagcgtgcgggggataagccgagggatgaagatggggatagcagcaggaggactgggcgcaggcactggaaggcaggcgaattcccgggcacgcaggaggactccaggcgacctcggaggagccccatcaagaacgtcaagaagcggtttgacgcgcgcgcccaggccaaggcgtgggcctgcaccgtcacc

SEQ ID NO: 10368 - DNA, 533 bp, Oryza sativa
  unsure (1)..(533): unsure at all n locations
  Clone ID: PAT_MRT4530_16697C.1
gcctgctnacagtnnaaaattccccttgtgtgggcncgcctctgtcctcctcgaatatccccggcggccttcgtncangccggtgaaccgggnagggnagnaggnnggtcgtgccccgctcgcccttagtttctagtatacgtagtgcgggcgtacgtctctgttagggtgcgggtttttgcccgtgttctcgtgttctatgtgcgatggaaagttgagagggcgggggcgggtggcgcgaattgaggccggtgacggtgngaggcgacaaggttggcgacggcggcggcgcggatccggttcgcggcagcggcggcggcgcggatccaatctgcggcgacggcggtggcgcggaccagctccgcggcaacggcggcggctcgaacgcggcccgtggcgacggcggcggcgcttttcctgtccgcggcggcgccggcggctcggacgctgcccgtggcgacggcggcggcgcggttcccgtccgcggtggctccggcggctcggtcgctgcccgtggcgccggcggtggcgcg

SEQ ID NO: 10369 - DNA, 468 bp, Oryza sativa
  Clone ID: PAT_MRT4530_16698C.1
atggccgctgccggcgaccataggggcatgggcgctgcctcccgccggccgcgccgacgtggccgcctccgagcgcgccgtgtggccgcctcgtggggcccggccgtcagccgcccatgctctcaggtgcggctgacgcgtggggcccacggcgccggctgccttgggtgtctcgagtggagctcagggttcatcaagtggtatcagagctttcgttgctcgggagttcagcacattcaacaaaaggaggagaatggtgtacttgagaagaaagatgatgaagcacctgcgatatctaaagaaagtttgcaaggtaaattaaatggtgctgagataaatgaagagcaccatatggaaaaaccgaggatggttttccatgaagaaggggaggatgatgtgaccaaggctactacggataacatcatggatgaacaagatgatatcaagatcaagtactccaagtgctga

SEQ ID NO: 10370 - DNA, 210 bp, Oryza sativa
  Clone ID: PAT_MRT4530_16699C.1
ctggaaagggggctgggacatccgacaacagatcccaacgcaagaacctaacacccaagtggtggaggaacccccactgcaggcaatttcaaaccagaggagatgcagtgcaatgcaagcagctgggatgcagggatattcgcacaatacaggcagctgtctgggtttaaaggaaatttgtcgatgaatggattgggaagaacacaaaac

SEQ ID NO: 10371 - DNA, 5587 bp, Oryza sativa
  Clone ID: PAT_MRT4530_1669C.1
atggcgcccccaatcgtcgggaacggccgcgcttttcccggccaccaaccatggccgccggccgccattcccgtcaccgttccgccctctcccccgcctctccctcctcgccggagcgtcgtccggtcgcgccgtcgcctcctccagcatcgcagtggcctccccttccccggcttgccctccgtttcccgcggagacccccggagctgcgttcccgccgtcgcccttccctttcctccgcgccggccgcctccagccgcctctgtctccctgcctgagcgccggttgacgtcgccaccacctccctcggctccgcgacgccgccctcatccccggcatcacctcctcctcgcccgaatttcgccggaacaccgtcgcccgcgccggcctctccttcctcctcgtcgacgtctcctccggcagccccttccgccgcgcccgtgcatcagccggcgctgccgtcccctccctcggcgtcgccgcatcgccctccaccccggctgctcctcggtttcgccggaacgccgtcgccgcgccggcctctccatcctcttcgtcgccagcgtcctttcggccgccccttcctcctccccggctcgtcggcttgctgcaccactaccatcttcggcatcgcagccgcgacgtcgtcctcggcctcgcctcccctccgaccgaacaccgccggtgtccgtcgtcgtcttcaccgttcatcctcgccggctcgccgtctcgcggcgccgcctccgtcgtcggcatcgcagcggtgtgttccacgccatcctcgcctccgtgcagccgctgccggctgccctcgtcgtctcctcgccggccccggtcgtcgtcgtcctctcgtcgttcccggtcgttgtggcgttcgtccctccgtcaagccgttctcgtccgccgcccgcgtttcgtcaagtgtgcagcagccccgtcatcgtcttcgtcctcggctccgcgtcgtcaagcctcgtgccggccgtgtctcgccttcgttcagggatcgccgccgaagtcgttccctcgccgtccgtctcagccgcgcccgttcgtcgtggtcgttcccacgcctcgtcgcgtggtggtaaggatctctcctctcgctgccccgtcctcgtcctttcggtgtcgccccgtacccgttgtgcggtcgtcgaccccggtacccgtgtaccggtgtcggtagtcgttcacgtgtgcgggtggtgaccgtgtagtgtccgtgttagtgtgtccgctcagtagccgcgtggtttccatgtgtgcagcccgtgtggtgtctagtggagtccgtttgtcggccactcgcctcggttgacacacggggtccgcttccgtcgacccgtggaccgtctctgtgtactcggttttctttttatatattgttattgcttctttataggcttgtagctttgcttgtgtgcttcgcgtagcttctgtcgttccggaggttcccgaagcgtgctttgtggtcgtcgccgaaggttcggaaggccgttctctctctccccctctattcaaaacccccaaaatggttttaggctgggctcgaggtgcgtggttgggttttgttagtcgtacctcgggtactataaggattaagctcaggcctctgttgcaaagcactaccgtacttccacatgtctagtgggacaaatgaaggctacacgagctgcggcccggtagtcgagatgtcatggcacagggccggtgtcctgctgctaggggctcagtcctgcctacctgtcccgggggttccggccgtaggtggggttgggtcgatgtacacctctgatcagagtataatctattcgaatagccgcgccctcggttatgggcaagcctagcaatgtacccaagttagtgttttaattcttaaaacctgcttaacaactaaaatgtatatatgtatcgttgctggtatatgtatctcttctcaacatggtcgttcgagagaacggcaagcaaggtggcttccacgatagagaaagagggagaggaagagtgaagagaggaagaacatcctggagggagaagagaggcggcggagggagcaccgctgccggatccgcccgcggtgaccgccaccgccgacggatccaccttcggacgaagccgatgccgtcgtcgccgtcgacgctgccgttgagagggtgccgtcgctgtcgaggccgacggggagagggagagagagagggggggaaggacgaccgtcgccgtcgtctccaccgcaccccgccgtcgctgcgccgtgcaggcgagacaggaaggagagccaccgccgccaccgccgctagtgtggggaagggcgccaccgccgctcgccatacggaagaaaaaaacagaaaaaaaaaagaaacccgtaaacggaaaatatacggaaggaaaaacagaaaaaaaaaggaaacgtacgcaaaaaaaaaatgcgccgtccaccgccctcctctccgcgcacgatgcgtgtccagtcgcgcgcgttctagaaacgcgttggcagcaagcagattcctagctagctcgatccatcgaccatgcgttttacggatcgccaggagccagccagcaactacccggccccgtaatagtcaaagcgttactattttaggtcggagggagtagctgctaatgagatttgacttatgagtaagtagaaaggtcgagggtcggcgtggcgtcaagcaaagcagcagcaatacctcctctcctccctccccatcaacacccccctcccatgcccctcctctaccgcctcatccccgtcctcgcctcctccggactcacggccacctcctctcctccctccctgccgccacctcattcccgcactcgccgcctcaggcctcctctcctccctccccgccgccccgatcatgtatccagagtatgatggcgtggaagccgtcctggttagccttgtcgaggccccgcacggcacggaagtggcacactaccttccctcccgcgcccctccgccactgcctcatccccgccctcgcctcctccggcctcgccgccacctcctctcccctttccctttttggcaggacgccgggagttcgtcacagccgggcggcacgtctgttgcgtcggcctcgctgtctgcgcagttctggcaggacgccacccctccaccgctatgtgattttgagcagtggatcgacaccgagatcaagccgcaaaacaaggagcgtttggagtacatgcggcaatgggatgcagagcgcaaggagaagatagagcagagacgcaaggaggaggccgcagaaaaagagcacaaggctgaggcggaaaggaggcgtgttgctgcgtacagggaggagcgggagcggaagcttgagcgtgcgcggcgagcgaaggcagcaatggaggagaaccccgatgcacagaggaagggctgctgcttccggcgatcgccgccagcgccgacaagggtaagggcgtcgtcgccgggaccgggaacgtcgacgccaaaggtaagaccacggcgatggcgccggcggccagcagcacgaatgctcctaacaaccagggcgccgcaagagggagaggaacagcctcgccgcgcggtgcgcacgcctcggcctcggagggtcctcctcctagtccgcgccaccgccaccgccaccccccgccgccgccgaagacaccgccgccgtcatgccgcccgcgccggcggtgccgccacctgatgccgccgcggtcaccgcggggccagagcctgcgccggcgccggcgccggggacgttgatggtgtggtcggggccgagcgtggtgctgaacctgtgcggcggcgaccaggccttgtgattggtatatttctggaacattcgctaacatattcaataaagtatatcaccttaagtacgtgtggaattttcgcgtacctttgtagggaccatcctcatacgattggtacatttccggaacatttgttttacatgttcaacttaaaatattagccagcttaaaattcctggaaaagtagtgaaaagcagctgaatttgatatccttattttacattgcaattcttgaatcctaacaagtgcatcgatctactggcctgttctatatatatgtacaggtggacagagagcgtggtatgttcatggacactgcgacggctgaagagatcgccggtcagaccgacatggggtgggcggtcagaccggccctctgctcggtcagaccgccatcagctcggtctaacagaatatggctccgtcggctcgggatcggctatcccagagcatgctatcccggccatatggccggccggtcagaccggccaacacacactggtcagaccggcccaaacagggcggtcagaccggcgatgccggccggtcagaccagcactcggccagaccacgaagggtccaaatgatatagagttcaacaaaacaataaagaacacacaatatagagtaatggtcttcattcttgaggaggagaaggaggacgcgccgaagaggaaggatgaggagcatcacggcggagatgatatacaaaagcatgggtgctctccaacatttggactcgagaattcaagacacccactctagtttgcaaccttcccaccgaagtattcaagttgccaacatcagtgcacaagccacgaacatcctcatgcaatgcttcatgcccagtagacaagcgttggatgctttcacttagggtattaatagccccaagtaccgggtttaagtattcattgggttgcattccaaaatatatcatgatttgatcggctggttggttgaagtctatattgatgatgtggttgttaagtctaaagaaatagaagaccacatagccgatttgagaaaggtttttgagagaaccgggaaatatggcctgaagatgaacccgacaaagtgtgcttttggtgtatcggctggccagtttttgggatttcttgttcatgagagagggatcgaggtggctcaaaggagtgttaatgcgatcaagaagattcagcctccggagaacaagacagaattacaagaaatgatcggcaagataaattttgttagaaggtttatttcaaatttatctggcaggttagagccttttacaccattgttaagattgaaagccgatcaacagtttacttggggggcagagcaacagaaggctttggatagtattaaggaatatcttagctctcctccagttttgattcctccacagaaaggaataccttttagattatatctgtcggccggtgagaagtcaattggctcagtcctgattcaggagcttgaaggaaaagaaagagttgtattctatttaagtcgtcggctcttagatgcagaaactagatattcccctgtggagaagttgtgcttatgcttatatttttcatgtacaaggttgaggcattatctattgtccaatgagtgcactgtcatatgcaaggccgatgtggtcaagtacatgttatcggctccaattttgaaaggaagggttggaaagtggatattttccttaactgagtttgatcttcggtatgagtcaccaaaggcgatcaaagggcaagctgtagctgattttattccgcaacgtcctcataaatctacccta

SEQ ID NO: 10372 - DNA, 275 bp, Oryza sativa
  Clone ID: PAT_MRT4530_166C.1
ctcgtactctcaaccccaccctttctccccaccatggtggcgatctccgagctcgggtgagcggaagagaaagaatgcggccgatttgaggagggggatggggttttcgggtggatttgtgaggggatcgatcatgagtatggaccaggttgggaactcactaactgatcgtattgaggtctctgctcacaatgtttggattggaaaaggaggcgcatacactggagagatcagcgcggagcaattggaggacattggctgccaatgggttattc

SEQ ID NO: 10373 - DNA, 491 bp, Oryza sativa
  Clone ID: PAT_MRT4530_16700C.1
gtcgccaggcgcgccaccctctttgaggagtcttataaaattcatcatgatgtaattgctgcctgctggaaaaaattgtcctcccacacacaactcaccacatcctaccagccagaatcataagtagaacctgctggggcgcctaatgaatcagcctaccatcattagttgcgtgctccctactgccttttcaccagggaaaacacctgtgccgcctgcttcattaattaatccaacaccccgcgagaagaggctggctgattatgggctgttcttctgcttccttcattaattacttgctctcctcggtcctgctgctgcgaccagcgtcatctcactactcagaggcggtactgctgttctccacataatgggatgacaccggaagaaacatcttatcaacaagacgccaacaggccgccaacaaccaaaaagacgcctcgttggtggcgttccatcatatgctcccccctcccgaccatcataacaat

SEQ ID NO: 10374 - DNA, 2207 bp, Oryza sativa
  Clone ID: PAT_MRT4530_16701C.1
gtcgatccccgggagccaggaacactccccccgacttctcaatcattgaaaccctggcctaggccgttccgcgcttgaccactactcccgtccgctcccacctccatctcgcgatccctagctcgctcgctcgctctctcgctgggtgctgatccaaagccttcgatcccctcgactcaggctctagcttagccatggatgaagaggcgcgcgccgccggatgctccccagcgccgccccgcgcgccggctgcttcctgtggcgctgccgccgagctctgcctctgctcccctacaggtgtggagggtatcgagcaggtgcctggatgtccgtgttttgaggacgccggcgctgtcgtggtgagtggagaggcgccggaaggaccgggggttttgtgctctgaggatggcgctgagctcaaattggctgagcagggtgccctggatgtgagattaggttctccggcagtcggaatccatgagcagcagctgttgcatcgtggtacttcaggttccgatgaagctggtgcaatcaatgagatttcacccgttgaggtgtcgccgtcagaggctagttcaaatttggatactgctggggctattggtggctcccctctcatgttggagtccctgccagagaccagtgatacccgaggatgtgaacaagaggttatgcccggtgttgttgtagggtcatctaatagggatgcaagttctgaggtcggtgtcgagtcggagcgtggctcggatgcggacggtcgaaatggccttggtgaaggggaattggtgtcgagcgttgatggaggcggcgccgagaagagctcaaaggtgactggcgtcttgtctgaagaaggtgtggacgggatggaaacagccctggagccgtgtgtggcgtctgttggctccatcacgcaggttgaggaaggtgtggacaggatggagacgagtttggatgactctgaggcttcagacggctcaaccacgcaggattttgatactgacgtggagacggagtcgagcggttcaagtatagaagaacaagacatgggatacggagtgcacatcccacacacggaacaagcgatctgtgaagtggccaggggaaacaagagttcagaggtgaagagctctgacaggatgtcttcagtaaccctaccaacacttatattggcttcaggtgcagcaatgctacctcatccttcaaaggtgctgacaggtggtgaagatgcttattttatagcttgtgacggttggtttggtgtagcagatggagtaggtcaatggtcatttgaaggaatcaatgcagggctgtatgccagagaattaatggatggttgtaagaaagctgttatggagagtcaaggagctccagagatgagaactgaggaagttcttgctaaggctgcagatgaagcacgatcccctggttcttccactgttttggttgctcactttgatggtcaagtacttcatgcatgtaatataggtgattctggattcttggtgataagaaacggagaaatatatcaaaaatcaaagccaatgacttacggcttcaattttcccttgcaaattgagaagggggatgatcctttcaaacttgtacagaaatacacaattgatctacaagaaggagatgccattgtgacagcaacagatggcctttttgacaatgtctatgaggaagaaatagcagctgtcatctccaaatcattggaagccggcctcaagccttcggagattgcggagttcctggttgctagggcgaaggaagtgggcagatcggcaacctgtagaagccccttctctgacgcggctcttgcagttgggtatctgggttactctgggggcaagctggatgatgtaacagttgttgtatccgttgttcggaaatctgaagtttaaactataagcctctttttggcttaagtgaatgcagctcctagattttgccagagctgcgtttgctggcgaatgtccatgagcattccatgtgaggtacccccaacctcacgtgtacatatgataagctgtatgttcctcgtggccatgatcgcagctactaagtaagttgcgattgcgcttctctgtctcgagtgaagcagctgtgtttgtgtgactacggaaaaaaaaaataagaaaaaaaaagggcggccgccctttttttttttttttattatttttcggacgcgtgggcggacgcgtggg

SEQ ID NO: 10375 - DNA, 414 bp, Oryza sativa
  Clone ID: PAT_MRT4530_16702C.1
ctgaacaaggcatagttttattaccaatctcatgactatcatgagtcccatacttaacctctgagccactcgggcttttgaatagattgtggattctagacatccccaaacatagacccttgtcagtggtacgttctatcccatcctctcaaaaaaacatgatacaggaaaactaggcctgtgcctgctgcttttatcacaatggactatgttcatgccagtatgtaagaacactgacctgccacccaatggaatagcaccagatttctgcggcctcacaatagactctgtcggccctagtgaaaaggccagtcaatgggctcatcttaaagtctgtattctatgtaggaaaggatgaattacagtttaaacacctgttataatcttcctagagtcaactgcgacggctctgtc

SEQ ID NO: 10376 - DNA, 2646 bp, Oryza sativa
  Clone ID: PAT_MRT4530_16703C.1
atggctatgaagagagtggtgtttctgttgctgcttgtggcggcatctgcattggtgaagtcgtcaagaggaggaggaggaggggaggagaagttggggaagttctatggatggcggcgccatctttcttctggaccagctgcctcttcgttggttctcagtggggatctcgtagacaaaatatggtcagtttgcttacaagacatagttagcccagaggatacatttggctttggggaatcatttgcctgggatgagttatcgagtcattccacggaagatgaactgaaggcaacactgttcatggaacttatggctcttcttccacctgagaaatcttcttttacttatgattgtatccgtgcaaactgcttcagcctgggtgttccacaaatattcagtgttgcactgagcaactatcttgagagccagaaatcattggtcggttcaaacttctatccgagacggcgtttggtagataaactgatcggagatgctccttccatggctccagctttcgcaccatccatgtcctctggcggtgaagttcactctcccctctctgtggcggaggcaccacttacaccttccaactctctgaacatggaacctcccagcccatattatcccagtaaatctgcacacaagcatcagggagtggcacctccagtttcaccttcagaggagtatcatgactacatgaaagtagtcttgatcgctgttcttccaacagccgcactctcattcctagctgcatttctatgtttctactgctgtggatgcaacaaaagcaaggtctcggttggcgagcaacgagatgaccatcctcttcttcacttgcagttctctaacttgcctggttcgtcacctgatgtgcatgttcctgccagcccgcttcataaggatgatcatggggttaggccatccaatgctggtgtaagcatgagcaagtgctttccatgttgttttaaaacctcaagtgatgccacaacacctacactagtaactggaggaacacaggagaacaatgccacaagtgatgcccctaaactgatgcctccgccacccccacctcctccacctccacctccacctccccctccacctcctccgcgtccacctcctccgcctccacctatcaagaagggtgctccaccacctgcacctcctaaagccaccatggcaagatttcctaagctgtcacctacagagtcaagtcgttctgaagagtcatctgcaagcgagctggccagtgaatcgtctgaaactgaggtgaatgctccaagagccaagctccggcctttctattgggataaagttcttgctaatcctgatcagtcaatggcctggcatgacatcaaatttggttcttttcatgtgaacgaggagatgatagaagaattgtttggttatggtgctggcaaccaaaacaatgtcaaggacaaggaaatttccattgcagatccttcacctcagcatgtttctcttcttgatgttaagaaatcatgcaatctggcagttgtttttaaggcaatgaatgtgagggcagaggaaattcatgatgctctggttgaagggaatgaacttcctagattacttcttgagacaatcttgaggatgaaaccgactgatgaggaggaacagaaactcaggctttataatggggactgctcgcagctaggcctagcagaacaagtgatgaaggcactaattgatattccttttgctttcgagaggattagagctttgcttttcatgtcctctttgcaggaagatgcttcaagtctaagggaatcattcctccaattggaggctgcttgcggtgaactcaagcaccgcctttttctgaaactactagaagccattctcaaaactggaaatcgtttgaatgatgggacgttccgtggtggtgctaacgcgttcaaacttgacactcttcttaagttatcagatgtcaagggagctgatgggaagaccacattgctgcactttgttgttcaagagatcattcgatctgaaggtgttcgcgaagcaagactcgccatggaaaatggaagaagtccaccatttcctagtacttcggatgacaattccaatgaatctctacaggaggatggcaattactactccaaccttggccttaagattgtatcagggcttagtaatgagctggacaatgtcaagagagtagcagcactggatgctgatgctttgtctacaagtgtggcaaatctgcgacacgaattattgagagccaaagaattcctgaactccgacatggcatcgctagaagagaacagtggattccaccgctcgttagaaagtttcatagaacatgcagagactgagaccaattttctcctgaaagaagacaagagattgaggatgttagtgaagagaacgattcgatatttccatggaaatgatgagaaagatgacggttttcgcctgttcgtcattgtaagagattttctggtgatgctagataaggcatgcaaggaggttggtgcttcacaaaagaaggcaacaaataaatctcaagccaatggcaactctaataacccatcatcccagtcaaatcctcaggagcaacagtttcctgctgttttggatcatcattttgatagctcagactctaatgattga

SEQ ID NO: 10377 - DNA, 581 bp, Oryza sativa
  Clone ID: PAT_MRT4530_16704C.1
ctaacttgtagaggatgcctaccggaactatcgtctgcgtaccctacgagaaatccaagggtgacatttgcttgtatttaaacgcctgtcgcgcttctgctatcattgatgactcctggcgctatcagattaactgcgaattactgctgtgctacggtcaccatttagactaattcttagtagatgtagagaaagtcactcaataggttgcctggacagcactggacatatcacgcctgcgaacatccatgggaactacacgttatcggagctgtcaggtattgtgactaatgacctgaccattgtaaactactgtaagtatgcgtgcttctcagccctgatgcagctgacacaccaaattatgtgtgtgttacctaaggacagataatgaattgtcttctagcttgattgacctgtgaattctatgcattgcatgatgatatgacggaccctgtaattgttgcagatggtcgcacctacaaagcagaggctatatcagaccggtgcgatcgagttcactatgcttgacacatgacaaacctatttctaccacaccgagatattttggcgcaccatgccct

SEQ ID NO: 10378 - DNA, 213 bp, Oryza sativa
  Clone ID: PAT_MRT4530_16705C.1
ccaacgaacgaggtcaggaccacaacgtggatgttcatcggcatggtctggttaggtttgggttgcatgccattcggcatacatgaaggcacattatcacctagcacacagctacagatatctaaattctggatgccgagtataaaccaaattctaaaaaatgaattaaagccgcagaagatatatcacgaatttcacatatatcgtagaggt

SEQ ID NO: 10379 - DNA, 1674 bp, Oryza sativa
  Clone ID: PAT_MRT4530_16706C.1
ttgccatggccaccgagctcactgagtacttgctgctcctgccgcttctcgtcgtaccgctcctctacctcgcggcgtcgtcgtcgcggaggtcggggaggctgcggctgccgccggggccgtgggcgctgccggtgatcggccacctgcaccacctcgccctcgccggcgcgcccacgcaccgcgccatgcgcgacatggcgcggcgccacggcccgctcatgctgctccgcttctgcgagctccccgtggtggtggcctcctcgccggacgccgcccgcgagatcatgaggacgcacgacgtcgcgttcgcgtcgcggccgatcgggccgatgctgcggctcgtgttccagggcgccgagggcgtgatcttcgcgccctacggcgacgggtggaggcagctccgcaagatctgcaccgtcgagctcctcagccaccgccgcgtccactccttccgccccgtccgcgcggacgagctcggccgcctcctccgcgccgtggcggatcaggccgcgtcgtcgtcgtcctcgccggtgaacctcaccgggatgatctccgccttcgtcgcggactccacggtgcgcgccatcatcggcagccggagcaggcaccgcgacacgttcctgcggctagtggaggacgggctcaagatcatgccggggatgagcttgccggacctgttcccctcgtcgcgcctcgccatgctcctcagccgcgtgcccgccaagatcgagcgccgccgccgcggcatgatgggcttcatcgacaccatcatccaggaacaccaggagagcagagccgccgccgaagacgaggaccttctcgacgtgctcttgaggctccagaaagacatggactcccagtatcccctcaccaccatgaacatcaaatccatcttgatcgacatgttcggcgccggcagcgagtcgtcggcgacggtgctgcagtggacgatggcggagctgatgcgaaacccaagggtcatgcagaaggcacaagatgaggtccggcgagcactcgccgggcatgacaaggtgacagagccaaacttgaccaacctaccctacctacgactagtcatcaaggagacactccggctacacccacccgcgccattgctactgccacgcaaatgcggaagcacgtgcaagatacttggatttgacgtacctgagggggtcatggtgatcgtgaacgcgtgggcgattggtagggacctgacgtattgggataagcctgaggagttcgtgcctgagaggtttgaacacaacgggagggatttcaagggaatggacttcgagttcataccgtttggagctggacgaaggatatgccctggcatcacattcgggatggcgcatgttgagcttgttctctctgcacttctgtaccactttgactgggagcttccacaagggatggcggcaaaggatctagacatgacagaggattttggagtcacaacacaacggcggtctaacctcttggtgcgtccaatccatcgtgtatcggttccagtagagtaaacaatacttgtaagatatatttataataaatgtaattgccaatgtacgtatattagtttcagtttaattttgtttttttataattggtaaaagtcgagtttgacattatatgtttgtggagtgatatatatatcatattaatttaaaa

SEQ ID NO: 10380 - DNA, 1177 bp, Oryza sativa
  unsure (1)..(1177): unsure at all n locations
  Clone ID: PAT_MRT4530_16707C.1
gcgttaggccccaagttagcggcggctttggtgatcgttgccggggatacgtcgtcgcggttcggtgtggatcgggtgctgagtgcccggccgttgacgttcatgggcgggaatgcttacgggttgtatttgtggcattggccgattctggtgattttcttggtctggcagggccgtcagtcggtggggtggttcacgggttcggcgattatcgttgccgcggtggtgttggctattgtttccacgcggttcatcgagcgtccggctcggcggatcaagtgggtcgaggtggcttggtaccggtcggtgccggtggttctggggtgcgtgatcatcgcggcggtgccgttggtgagttggcagggttatctgaagaaccaggttgctgaggcctcgaagaattcttccgcggataatcccggtgctgctgcgttgattccggggttcgagttccaagcaatccaaggnccgatccaaccggncaancgggatttggaacagttncggtgtgggttnggattgcnaaggcanatggccaacnacgtccanacatcaaatcggtttccgtgngtatgngaacaacaacgcgccggcaaatcgatcgtggtgatcgcgactgcattcccaacagtggatgcggccctcaataccaacggaagagaacaactggcagctggtttcgatcatcaaagcggcctgcccttacacggtcagtgtgccagtgccacggcggactgcaacgccttcaaccaggaagccaccgactacgtgacggaacgcaagccggatgccgtcctgacggtcggcactgtggcaagccgtcatcatcggatgaaaccctgacccccggtttcgtcgaagccaccaacaacctgatttcgcaggggatccaggtcatcgcgatgcgggacaaccccaggttcagtttcaacatggccgaatgcgtgatcagcaaaggcagcgaagacccgcaatgcaatccaccgcgatcgtcgttgttcgccgcggcgagccccttcgaatccgtgtcggatccacccgaggggcttttcatgctcgacctgacggactacctctgcaccccggaggtgtgcccgggcgaagtcggcaacatgttcgtctacatcgacgacaaccacttgaccatggactattccgcgaactttggcccaaatgc

SEQ ID NO: 10381 - DNA, 303 bp, Oryza sativa
  Clone ID: PAT_MRT4530_16708C.1
tttcaagtatatcttggtgccacacttggcttacatgcatacaatttggcgttaaattcaggcggggatgggcgagcgcggaggaacacaaggtcgccactgccgctcggagggaggcgaggtcgccgcatttggtgcctctcgtgctgcttcgacggggggaaaaacggggagggggagggagaggagctggggcagcgcacggcgagggcgctgctgacgtcgttgctgtgggtgccggactgtgccgtggagctgcctgagatggtggcgcgagcagggttgagatgtaggacgccgcat

SEQ ID NO: 10382 - DNA, 725 bp, Oryza sativa
  Clone ID: PAT_MRT4530_16709C.1
ttccccctatcaaaccacgcgtcctccccccgcgtccgctagtcgacaactcgtacgccgccatgagcgacgcccaagcgcagcccatccgccccggcgacgtctacccgccctccgccgccgatcaccaccaggctcgccgcgaacgcgacaaggctgtcgccgccgaccaaggtggcggcggcggcgacctccgtgtcaccgaggccgacctccccaccgccggcaagcgcgtcgtcaccgccaccgccggcgggcaggtgatggcgcagttcaccgtgcctgtgccgagcgcggaggaggaaaccaccgacgcggtcaccatcggcgaggcgctgcaggcggcgggatccgacgacaacgagcccgtcggcctcgccgacgccgcggcggtgcaggccgccgagatgcgcaccacggggctggccggcgtcgtccccggcggcgtcgcggccgcggcgcagcaggccgccgaggcgaacatgaggcgccgccccgacggtgacgacggggagaacaaggccaccacgacgacgctgatgaaggacgtggtgggcggcgccgcggaggcgctcccggcggacatggtggccaccagggaggacgccgacagagtggcggccgccgcggcgcggaacgcggccaggcgcggcggcggcggcgggaagggcgtggcggaggcggtggcggcggcggcggagatgaacgaggggaggatggtttaa

SEQ ID NO: 10383 - DNA, 201 bp, Oryza sativa
  Clone ID: PAT_MRT4530_1670C.1
gttgcgctagagctgactgtcatgttggaggagattggtgaatggaatccattttttgtaaaggaatctggccgctttggtggggacgaaggaagtggggaatatggccgctttggtggtgaatctggccctggtggagaaagcagcgcaggagcagtagtagtcttaggtcccgatggagttggtgttgaaggttgctga

SEQ ID NO: 10384 - DNA, 603 bp, Oryza sativa
  Clone ID: PAT_MRT4530_16710C.1
atggtcatagtcatagattcagcttcgttttcttcagaaatagaaattcaggttcagcttcatatttcaggggcccttgactacatgaggcccaacacaaatggtagcctggtaggaatggtcaagatgacaacagggaatcccagatgtccaccccaaaaccaaaacattcactctctccgttcaggccaccgcgtcccggtggatgtgctgccccccgacgggaagctcctcgcctcgtttcgcacgtcgcttgggtcgttcctcgccgcccaccgctcgccgctgccgcgggaggaatgtggccggcgtgatgagggacctcacgggcctcctcgggcaccattacctgacctgcaccgtggtcgggaacagtggcgtgctcctcggctccggccgtggcccgttgacgcgcacaacctcgtcattcacctcgacaacgcacgcgtggcggagcagcacccgcgggagaagaaaagagaggagaagaaagaaacgcggcatgtggccgctcaagctagtgagctttgttccctcgcgaccgctcgactcgatggctgcttcctgcagccccaaatcggctccgctcgtcgcgccgcatga

SEQ ID NO: 10385 - DNA, 510 bp, Oryza sativa
  Clone ID: PAT_MRT4530_16711C.1
atgacagaagcgttgctttgccttccccaacgtcaagctgacagtggtgctcccgagcgctgttggctcaagaagattaccgacttgatgggtgctacccacctccaggcagtggccgcaggcctcgcttctcgctttgggtccatgtctcacgctgccctgagctcatcgcgatcgcatgcggctcgtccggcccctcatcagggcattgtacgaggcggtttgccccgagagtggaacgagcatgggtatatttgtgcttgccccaacgaactgtggctgcacaaggatgcccctgtcaacctcgaggaccagcgcgagaggcgtgagaacaatgtacgacgcgaggagtggtatgccaagttcctaccgagcttaacagagaaatatgatgtctttgtcaacctagtggagttcctccagatctacaccattgcgatccaggcagacaaaggcgatgataatatgatggcaaactatttccccatcatcctcaaggcccaggcttga

SEQ ID NO: 10386 - DNA, 153 bp, Oryza sativa
  Clone ID: PAT_MRT4530_16712C.1
atggtacttcagctcaagaaacaagatggatcagtaacagcagaagcaggacaagaagaaaggaggagaacaggcaactgttgtaaattggatcaggaggtggtgcttcagctcaaagaggagaaatcagagttccatcaggagaacccttga

SEQ ID NO: 10387 - DNA, 519 bp, Oryza sativa
  Clone ID: PAT_MRT4530_16713C.1
atggcgaaggggctcctcaagggcacgacggcccatcgggccttcttctggcaaggcctggctttggcgaagctcgcgtgcctcgcgatatggctttcatcatacagccttcgcccgcgtagtcttcttctgacaaggtccatctccagcgaagtccgtgtgcttcgcaacatggctttcgccatgtggctttcacccatgcagccttctcgggtgtggagcgcaactgcgtcccctcggtcttcgccgtctggtcgaaggacctcgtggtatacctccaacaagcccctcacgggcaaggcctttctgtacttttcggtcatggctcctcgtaaacctgctcctgcttcgaccactggtctagacccgggaaagatcgacgaagagcacaccgggtatcttggtgcttcgctcattgatgaggcggagctagcgaagctggtttcgatcagggtcgtgaccgaagaacaggcctttgcctctggcaaggcggtggtgccgaagcctgacgagaactag

SEQ ID NO: 10388 - DNA, 4557 bp, Oryza sativa
  Clone ID: PAT_MRT4530_16714C.1
atgaacaacacaatgtccttgctgcttctacttcttggcctcagcatccttgcaatgaattctaccgctgctaccaccgataatggccagttcatctacaccgggttcgccggcgccaacctcaccctcgacggcgtagccacggtcactccggcaggcctcctccagctcaccaatggcaccagcgcgctcaaagcccacgcgttccaccctgatcctttgcacttccgcgaccttccggtcgccggtggtggtggcagcggcaatggcaatggcaacgatgtgcactccttctccgtctccttcgtcttcgccatcctctccatctaccccaacctgagctcccatggcatggccttcttcgtctccccgaccaagaacctctccgcagcagcgccgaggagctacctgggcctcttcagcaacaagactgatggcgatgtggccaaccacatcttcgtcgtcgagctcgacaccatccagaacaccgacttcatggacatcaacaacaaccatgtcggcgtcgacatcaacagcatccgctccgtgagatcctaccccactggctactacgacgatggcgacaacggtaacctcaagaacttgacattgaacagccatgagccgatgagaatctggatcgattacgaccaagaaaccacacggatcgacgtgactgttgctccgcttgagatatcaaaacccaaaaggccccttggctcagtgatctacaatctttctacagttttaactgattctgcatatgttggcttctcatcatcatcaggtgacattgactcacagtactatgtgcttggctggagctttgccatcaatggagctgctccggccatcgacataagcaagctgcccaagctacccagagaaggcccaaagagttcatccaaagtaatggagatcaccctgccgatagccactgcgatgttcgttcttgttattggcgtgatcgttcttcacttgttgcgaaggcagttgagatatgctgagctgcgggaagattgggaggtcgagtttggtccacatagattctcttacaaggatttgttcgatgcgacgcaaggtttcaagaacaagagtgctaaaatcttcaagatagaggttgcagtgaaaaggatatctcatgaatcaaggcagggtatcaaggagttcattgcagaggttgttagcattggccgtcttaggcatcgtaacctagtgcaactacttggatactgtcggcgaaaaggcaaacttcttttggtttatgaatacatgccgaatggtagccttgacaagtatctgcatggacaagaagataaaaacaccttagattgggctcacaggttccatatcatcaagggaatagcattaggagtgctttaccttcatgaggagtgggatcaagtcgtcgtccaccgagatatcaaggcaagtaatgtgctccttgatagtgatatgaatggacggctaggagatttcggcctagcaaagttgtatgaccatggcgtcaacccacagactacacatgtcgtcggtaccatgggctacctagcacctgagctagcgcgcacaggtaaaacatcccctcttactgacgtatttgcatttggcgcgttccttctagaggtcacttgtggacgaagacccgtggagcataacaggcaagataaccgggtaatgctagttgaccgggtgctcgagcattggcacaaggggttactgacaaaggcggtagacgaaaggttacaaggcgagtttgacaccgacgaggcatgcttggtgctgaagctagggctgctatgctcacacccggtccctcaagcaaggcctagcatgaggcaagccatgcaatacctcgacggagacatgaagatgccggagctgataccggcaaacctaagcttcggcatgcaggccatgatgtccaatgaagggttcgattcgtacatgatgtcgtacccatcgtcatcgatggtgagccatggcacattcatgtcaggactctcaggaggaagcttgatgaacgtgcaagcggaaatccaaaaaccagaatcaaagcagtatagtgagtattcttcaccgtttgatttgcaatcaacgaatgcggaagagagagtagttaccgctgacacgtggaatcggatccaccggacgtggaaccggatccaccgattttgccactatcacttcaggagtgtagtactatatagaatccgtgtccaacaacaatatagatggcacgtcactcccaccaaccttgctgacccagctgctcgcgtggctttcaagctgaagcatacccgcaccacaattaaaggctggatgcaggctaacaggaaaagaggaattttatgcgaggattgcaagttcaccatcgactacttagattgcattgaagaattcaggcggctatctgaatggggaacggtgcctccgtcgtctggtgcaagacagattagttttggaggtgcaaggcaagctggcatactcgaaacaaagaggaaagctttcttcaaagctcatgctacaaaaaacttcaggaattctcgtataaagacaataaaacacgatggaatagaagttgccgaccactttggaaagtcccaacttatgttttccttctacagccggctcctgggatcatctttgcagccttcttgggagttcgatctacaacacctttactcagatgaagggagagattcaaacttgctggctgctcagggtctaccgttttcacaggaagagattcttcttgctcttcaggcaatgaattctaacagtgcgccagggccggatggtttcagtccaagcttctaccgtgcagcatggaacacaattaaagaggagaactgctcagtaaagattctttccaaagtgcttgcaacacggctgcaaagggtattcctgaggatgatacatttagaccaaacgggtttcctcaaagggagatgcatctctgagaatcttatatatgcgacggaattgattcaagcatgctacagaaggaagtgccaaactattattgtaaagcttgatttcacgaaggcgtttgattccgtcatttggtcaagccttttcaagattcttgctgtccgaggtttcccagaaaactggattagctggattaaggggttgctttcctcctccaagtctgcagtgcttcttaatggagtccctggaagatggatttgctgcaagaagggccttctacaaggcgaccccctatcttcatatttgtttatcttagttgctgatgtgttacaaagattgcttgaaagaaatactgaaatcagacatgcaatctaccaagacaggccatgtaccaccatccagtatgcggatgataccttgattatctatcgtgcggaggaggctgatgttcttgctctaaaggagactctgctacagttctccaaggcaactggactgcaaatcaattttgctaaaagcactatgattactctaaatgtcgatcaaagcaaggaactagttttgtcgggattgctacagtgcaagctggagaaatttctgatgtcttatcttggacttcccttatcaattcataaactgtctgcagcggacttgcagcctctggttaacaaggttgatggtttcttatctggttgggaagcatctctcctatcgcaggcggagcggcttgttctgataaacgcaatcctgagcagcctgccggtgtatgcaatgtctgctttcaaacttccaccaaaaattatagaagaaattgatagacgacggagggcttttctctggacaggggatgatgtctgctcgggagcaaaatgtctggaattgctgcagaacttctctctgagcgatgagatggatttccgcctcagtgcaaagctaggaaagttgacaactaggaaattctatgaggcaagattaccccctggcttgccatctccaatctgggatcttatttggaaatgcagagcacctctaaaagttaaactcttcgcatggcttctggctttctggacgcagatcaacattcaaccgcaagctcaagacatcacgcagttccatcgtttgggtccaactatgcaagtgctggcgctacactggcaggatttgcaattgtatcccatctttttaaaaacgaacccaccgtttgccctcacttttaaccctgttagatgggtcccacgtgaatggataaggatccaagcacccattccttcacagagctcaggtcaacatcccaaaactctagaggaggcggcggcggttccagcatcggcgtgcgcagcgacggcggcggctccgttggaactcgtgtgcgacggccgcggctccagcggaacgcgcggcgacactgacgatggttccggcaagaagcgcggcgatggcggcgaaactaacgtgtgcgcggtgacggcggcggttccggcgggaggcgcggcgacggtggcactcaagtgtgagtcgacagcaagtcttcggcgtggcggcagctgcgtttcatctcccttgcgtggtgaggcagtcggcataaaagttggtgcaaaaatacaacaacaatcaagggtataa

SEQ ID NO: 10389 - DNA, 156 bp, Oryza sativa
  Clone ID: PAT_MRT4530_16715C.1
atgtcgggtgatcaagccgacgacgttcgcgaggaattatccgttgggcgcgacaactccgcatttgtcgagaatgttctcgatggtggggtgtactcgaccacaacctactcgaatgtaaatatcagggattatgtaaaccgtaaacaagcatga

SEQ ID NO: 10390 - DNA, 364 bp, Oryza sativa
  Clone ID: PAT_MRT4530_16716C.1
ggggaagggtatgaaaattagccccggccaatttaggaaacccgggggtagaaagaggatgttttgggttggggcccaagggccggcacgggcccccaggggacgggcttcgggcttcgggggggaacttgcactggccagggttttttttcgaactttcagggggggattattcttcacccccccacaattgtttgggcttttttcaacaacccacatttttgggggggcttattggctcaagagaaattgagggggggctcaatttttaccggggcccccctttttggccccccttgttccccggggcgggggagggccctggcctctttgaactggtgcccccggagggggcccttttttc

SEQ ID NO: 10391 - DNA, 341 bp, Oryza sativa
  Clone ID: PAT_MRT4530_16717C.1
ccgtccgtgttttacacgtgacgttcaaccgtccaagagaggagtcgtgttctggctctacaccaccatcccttcgtgttctcggcgctcgcggtgatcgcgtccgtcgcgcggtgcgccagatcgcgctcgacgccaagacctacaagcttttcgccacgtgtgaggagggccaaatccagcatgcaaatgccaaatggtttgcgtgtaactgatgtctgatgcagctgtagttcgcgagcttttttgtagaggtgtacaatggttcgaggacgcgaaaatgtgtatttctctctgcatggttaaaggaagtgcccaagtaaaaaaaaaaaaaaaaaaaa

SEQ ID NO: 10392 - DNA, 387 bp, Oryza sativa
  unsure (1)..(387): unsure at all n locations
  Clone ID: PAT_MRT4530_16718C.1
aantngnttntcangnnaccgcggcaccgaccacggagcgcagaaanatatctcccncntccaccaaaanacgccccaaaaccnaacccgccnccngccctcctccaaccccaaattgcgaaaaanncccctttgntacggccccanaggnagntattccntcccgaangngtcccctganaccncccaaagntncggnanaaacnccnccgnaaanngtcccgngaaaanaggggacnaaacccttngggnccccncagaaaaccccaaagaaatctcnccccttttcnccccnnnanaccnatntcctccccctgtggggggaantccggggccccccgggggtnttttttnctctaggggtgcacnaananttttggggnggaa

SEQ ID NO: 10393 - DNA, 129 bp, Oryza sativa
  Clone ID: PAT_MRT4530_16719C.1
atgttccaaagtaccatcatcgatcatggatgcaacagaggcgccgaggcggcgtgccgcgtgccactgcaacaacaaccagtagctccaaaggtcacctgcaagggtacaaagtacaaactggactag

SEQ ID NO: 10394 - DNA, 1050 bp, Oryza sativa
  Clone ID: PAT_MRT4530_1671C.1
atgtcatggcacagggctggtgtcctgctgctaggggctcaatcctgcctgcctgtcccgggggttccggccgtaggtggggttgggtcggtactcttgtttatggctaggatgggttgggaactatgtcacgtcttccgtccgtataccgtggtgttgtggaccctcagatattcgacgtttcgccgaaacaaccgctgcttcgtggcctatgttgtggaccctcagatattcgacgtttcgccgaaacaaccgctgcttcgtggcctatggccgctcgcgaagtacacactggagttgtgtgtgtctacgccgccgccggtggccgctgcggccatgaaggagtgtgtgcttgatgagtacgccaccaagcacaggatctccatcgataggtttctccagcttaggatatttgtcaaggtgcatgatcgatttaatgcttctagaatatttctctatatgtattcatgttctatgaaaatgctatcttttggtgttccatgcaaagagaaagcagaatatgaatgcaacaggctgcctgctatgattgatgctcatttattcagagattatcatttagcattctggtttggtctcttctgtgcatggggtcaaccccaggatggtgatctgcatctatggcttccccaccaatgtcgctgccatctagtatattttgtgcattttgatgctctattgctctgcaaaccatggcttttgaatgcactattttggttggacagccaattgcaaggcagagtcaccagatctgaaggcagaatgggcttggattgtggagacagtttagtgtggccttgtgtcacaaggtttgctaagcttggaaaaaaaaaggaagttgaagaaaacaattataccatggaagtgacaaaacagaccatgtaatttggcaatttttgcatcttggctttgtacaccaatgccccggttgtccccgtacattcctgtgcgcgatctcccccgcccctggaggggggcccttaatttcaatggggcttttcgtttgcccggcacctgcccgtgcccgggcct

SEQ ID NO: 10395 - DNA, 717 bp, Oryza sativa
  Clone ID: PAT_MRT4530_16720C.1
atggagccactatctatcttccaattatctgttcctcggggcgaattttacgagccacctccttcatcggagcatattttatcacctggctatcaaattcgtcccaaattcatcagtatggttagggagaaatctttctctggtttaggccaggaaaacccctaccatcatctgcgggaattcgagcagctttgctcgtgccttaagattcgaggcatgaagcaagaggttgttcagtggagattgtttccgttctctcttcatgagagagcgaaacaatggtacacatctaccgtcgagtgtgtaaacggtaactgggagaaattgcgagacaggttctgcctcgcattcttcgctgtaacccgtattactactcttcgtgtagaaattctaagtttccgggagtctgcattctaccttgacataactgctggagggtcattcatgcacaaaactcccgccgaaggcaaggaaattctcgatcgcatatcggaaaatacctcctttgtcgggcagtgtgttgaaccccatccagaggcatttgtgtcaggaagtgaggaaccttcttttgccaagcctgaaaccgagccttcaacatgttcgggtctgactaaagagtcctccctgaagccatcgccggattccaaagacattcaagctccgggttgtgctcccatattcagggatgatcctcatagcgattatgagaaaacctaa

SEQ ID NO: 10396 - DNA, 1490 bp, Oryza sativa
  Clone ID: PAT_MRT4530_16721C.1
atggagcgacctctcttcgagttgtttgctcctcggggcgaattttacgagccacctccttcatcggagcctattttaacacctggctatgaaatttgttccgaattcatcagtatggttagggagaaatctttctctggttttggctaggaaaaccccatccatcatctgcgggaattcgaacagctttgctcgtgccttaagattcgaggcatgaagcaacaaactgttcggtggaaattgtttccattctctcttcgtgagggagcaaaacaatggtacacatttaccgttgggtgtgtaaacggtgactgggagaaattgcgagataggttctgcctcgcattcttccctgtaacccgtattactactcttcgtgtagaaattctgagtttctagcagataaataaagaatcgattggtgcagcctggtctagattcactaatttagttcagtctggtccaaccctgtctatacccgattacgtgctattgcagcattttcaaacgagtttagatagggagtctacattttaccttgacataactgctggagggtgatttatgcataaaattcccgccgaaggcaaggaaattctcgatcgcatatcggaaaatacctccttggtcgggcagtgtgttgaaccccatccagaagcatttgtgtcaggaagggaggaaccttcttttgccaagactgaacccaagccttcaacatcttcgagtctgactacagagtcctccatgaagccatcgccggattccagagaaattcaagctccgggttgcgctcctaaattcagggatggtcctcataccgattatgtgaaaaccttgataggcatcctccctgataatacgccaatagaggaagtaatggcggttctgcttcatgagtcccctgagtctactctagaattgcactccaaagaaccaccatcacaacctcctatcgagcgtgaaccttgtccctctggccatcaaaatgttgttctcgacatttgtcaagaaacaaccttgttcttgcacgatgcatctcttgagaaggagaacctgcaagccatggacaagcttgagacatcaactctagaggatgagaactccacaaatgagcatgaaagcttctctttcaaagtttcctcagtggtcatgctcacataaagaatctccagagtcatgtctgattagtgccacattcttgtgcgagaatcacaaccacctaacagtcctcaactctatcatgtttagaagagtcgagcttgttaccataaataaagcattgccgggagataccccggattatcttgttggcacttgcataattgcccaaaaagagatgcatcctacgtctcttcagcattgcgccgacggagcacgccttcaaggcacaaggttattgcaccagaggaaataaaaagacaactaaggagcagtgtacaataacctcaacattcatagcactctccttggtcctgacaagactatccatc

SEQ ID NO: 10397 - DNA, 780 bp, Oryza sativa
  Clone ID: PAT_MRT4530_16722C.1
atggcttcagctccactcctacaggcagctcaactggggtataagccaaacgtcttctccttctggatcctttttcttcaactgagagaaaaaaggattaatgacgtcatcgctgacatcatcgccggccatggcacggcttccacgcgaccaccggcaaaagagggctcggttgggctaaccgaggacaccaacgtgaagaggacgacgacgcgaactcactggtgcaaagaacaacgacggctggcgacgaggttcgacggcggctcggctcggctcaacgacggcgacggcgctccggtggtcttcggcggctgcgaaggggcggctgaggtactcctcctccgcgcgcacccgacggcggcgacggacggcaacggcgacggctaccgcggcggcgcgacgcggcatgatgtatatgttgaaatctctggagcggtggcatggtcacatgtaattgtcgatatctcctccgtcttgatgtgggttgtggcgcaagtaggcattttgaccatgccaaatcaggttctccttctcaagagatgcatcgtgcaagaaaaaggttgtttcttgacaaatgtcgagaacaacattttgatggccagagggacaaggttcaggctcgataggaggggactcatgaagaagaaccgccattacttcctctatcggcgtattatcagggaggatgcctgtcaaggttttctcttaatcgctatgaggatcatccctgaatttaggagcgcaacccggagcttgaatttctttggaatccggtga

SEQ ID NO: 10398 - DNA, 348 bp, Oryza sativa
  unsure (1)..(348): unsure at all n locations
  Clone ID: PAT_MRT4530_16723C.1
acggctcccnggaaaaaagaccagattcatcgatggatgcatcgccgcactatgctgctgctggctgtgtgacctttgctgcgattagaggaagggaaacagatgagattaaaagatgccttgatattatatgtggatagtatttctacatgggtgtgctgaaaagaggatctttggagcagagaattgaatacaacgaaatgttgttgcagaaagtatacatcccgtaatttctgcgtatattttcgatatatatatagcgcggnataatgaataatgatatgcgtgaagtatctatgtaattcattaattacatagtgtgctcgttttgattaaaaaaaaaaaaaa

SEQ ID NO: 10399 - DNA, 934 bp, Oryza sativa
  Clone ID: PAT_MRT4530_16724C.1
cccgggctgcaggcttcttctatcgtcttctagacttctagttctcatctccgcgcgtcggatccaccattgcaggccagagaagacgaagaatagagttgttcttttagatccggcctcttccccttgctcctgtcactggattgagagttggtcgtcgcggggctggggtaggtggagatgcgggtgtgccgccgatagcaccgagaaggttggggggatggaggagatggtggcagtagcggccggcatcgatgaataggtgggcgatttcctccctgcgcgcgtatctccgtcctctaggtaaatccgtggtggcttcctttggtacaaatggtggatccgagtgaaagaagagcgtgcccaacgcggcacggcggcgagacaaaccggcgtgtgaggcgcttgggtgcgcgagctagagaccggatgaggaggaagcccagcctgctcgtcgccttctccgacagcgaccatcgccttcttccgcatttccccaaactccaccacaaggacgagcacggctgcatggcgtgccggcggctagagcgcgccgccgccgtcaccgatccggagcgatgatgccctgactgtcggctcctcctagcgcagggacttttccggattatgctaatcgagatcattgccgctctgaccgccggctccttgtcatccgctcctcactcactccagatccaaccccgaggccgatgaaaattctctgaagcaaaggggttcaactacggcagcttcgtggcattcattgtatgttagtactaactattagcaatcttgtcacctttattgagaatactggaattcaattcttattctgcttatcaaaccagttaactaattaagcccgtgtaaagcatgcaaggcaatgaagcctttttcatttgaccagaagaagcaacttggtatttccctgcta

SEQ ID NO: 10400 - DNA, 993 bp, Oryza sativa
  Clone ID: PAT_MRT4530_16725C.1
atgaagcaagagactgttcggtggaaattatttccattctctcttcatgagagagcgaagcaatggtacacatctaccatcgggtgtgtaaacggtgactgggagaaattgcgagataggttctgcctcgctttcttccctgtaacccgtattactactcttcatgtagaaattcttagtttccagcagataaataaagaatcgattagtgcaggctggtccagattcattaacttagttcagtctggcccaactctgtctatacccaattacgtgctattgcagcattttcatacgggtttagatagagagtctgcattctaccttgacataactgctggagggtcattcatgcacaaaactcccgccaaaggcaaggaaattctcgatcgcatattggaaaatacctcctttgtcgggcaggatggtcctcataccgattatgagaaaaccttgacgggcatcctccttgacaatactccgatagaggaagtaatggtggttctgcttcatgagtcccctgaatctactctagaacaggatgatcttcatttcattcaaaaagattctggcgagactcttgaattgcactccaaagaaccaccatcacaacctcctatcgagcctgaaccttgtccctctggccatcaagatgctgttctcgacagttgtcaagaaacaaccacattcttgcacgatgcatctcttgagaaggagaacctgcaggccatggacaacattgagacatcaactctggaggatgagaacgacacttttgagcatgaaatttcctctttcaaatttcctcaggaatcatgttcacataaagaatcctcagagttctgtccgtttagtatcacttccttgtgcgaggaccacaaccacctttcgggccttatctttaacatgtttagaaggttggttgtggatgcttttatttatcataaatattgcaaatctcgtatatgttgtggcactaatcttggagtatga

SEQ ID NO: 10401 - DNA, 409 bp, Oryza sativa
  Clone ID: PAT_MRT4530_16726C.1
ttcttctcgcttcgccttctcctctccttgtccttgacctcccctgctccgccgcgccgcagagcgagcgggcatgaccaaggtgcaccccaacgtcgcggtggtggcgccggcggtggtggaggaggagaagggggaggactcttcacaaacattccactacactatacaatctaattaacaccttaaaaaatccttctattctcaaacatcaaaagcacctctctcctaagttctgtagattgattgtgctcctaaattctgttgtttgagcactcaaacattttctttactggtcaatcttagatcacttgttgattattggcattgccatttactggtgaatttattccctcttgttcctctcataaggtccttgttgccttattggtgctgaaggcaagaattt

SEQ ID NO: 10402 - DNA, 552 bp, Oryza sativa
  Clone ID: PAT_MRT4530_16727C.1
atgtgtgcagcaacatggaagagtgagaggaggaccaggcaaggcccaactccgtatgcacaccgcggtgacaaatcgatgctgaaacgactcatccatgggttctacgctgcggctatcgtgcgcctccccatcgatgagatgccagcgctgctacccgccatcctcgacagcaacctctactttgggcccctggatcccgtatccaacattgtcaccaacgtcgtcagccgcctcccgcctgcggctaacgtgatggcgtcggcggttgctgaaagcccttaggtgttgcgctacctgcacaccaccgaggaggatcttgccaccgtccacctcatcgaggccgactgctgcacgcacacattcgacgtcggctcgggcaccaccaagaccaccctccgctgcactacggggggccacgggccacaccgacatggacagccttaccatggccatgcttacaccattgtagaaattctggatgatgaacaagttatccaccctgtggtgaggtgtcggcccccggttttgtacactggaaacctcatgtga

SEQ ID NO: 10403 - DNA, 1089 bp, Oryza sativa
  Clone ID: PAT_MRT4530_16728C.1
atggagccacaatctattttccaattatctgctcctcggggcgaattttacgagccacctccttcattggagcttattttaacacctggctatgaaattcgtcccgaattcatcagtatggttagggagaaatctttctctggtttaggccaggaaaacccctaccatcatctgcgggaattcgaacagctttgctggtgccttaagattcgaggcatgaagcaagagactgttcggtggaaattgtttccgttctcttttcatgagagagcgaaacaatggtacacatctaccgtcgggtgtgtaaacggtgactgggagacattgcgagataggttctgcctcgcattcttctgtgtaacccgtattactactcttcgtgtagaaattctgagtttccagcaaataaataaagaatcaattggtgcagcctggtccagattcactaatttagttcagactggcccaaccccgtctatacctgactacgtgctattgcaacattttcatacgattttagatagggagtctgcattctaccttgacataactgctggaggggatgatcctcatagcgattataccttgacgggcatcctccctgagaatacgccgatagaggaagtaatggcggttctacttcatgagtcccctgaatctattctagagcatgatgatcttcgtttcattcaaaaagattctggcgagacccttgaattgcactccaaagaaccaccatcacaacctcctatcgagcctgaaccttgtccctctggccataaaaatattgttcttgacatttgtcaagaaacaaccttgttcttgcacgatgcatctcttgagaaggagaacctgcaagccatggacaagtttgagacatcaactctggcggatgaaaactccactaatgagcatgaaagtttcactctcaaaattcctcaggaatcctgctcacataaagaatccttagagtcctgtccaattagtaccacatccttgtacgagaatcacaaccaccttacattcttcaattctagcatgattagaagtttggttgtggatgctttcatttatcataaatactgctaa

SEQ ID NO: 10404 - DNA, 198 bp, Oryza sativa
  Clone ID: PAT_MRT4530_16729C.1
atggccatggtaaggctgtccatgtcggtgtggcccgtggccccccgtagtgcagcggagggtggtcttggtggtgcccgagccgacgtcgaatgtgtgcgtgcagcagtcggcctcgatgaggtggacggtggcaagatcctcctcggtggtgtgcaggggcccaaagtagaggttgctgtcgaggatggcgggtag

SEQ ID NO: 10405 - DNA, 1917 bp, Oryza sativa
  Clone ID: PAT_MRT4530_1672C.1
atggtgaacactcgcagcaacgggaatggccccaaaaacaacaataacaataacaatggagagaatcccacacttgctcaagttcttgctcaacagactcagttaatgaacatgatgatgcagcaacttcagaaccagcagaaccagggaaataaccatgcacctcctcagaacaagttagcagaatttcttcgtgtgaggccgcctactttctctagcaccactaatcctgttgaagctggtgattggctgcatgccatagaaaagaagttggatttgcttcaatgcactgatcaggagaaggtctcatttgcatcacatcagctgcatggccctgcctctgaatggtgggatcacttccgcctgaataggactactgctgaacctatcacttggcttgaattcaccgctgctttccggaagacgcatataccatcgggagtggtttctctcaagaagaaggaattcaggtcgctcactcagggatctcgctctgttatggagtatctgcacgagttcaatcgtctggctcgttatgctccggaagatgtgcgcaatgatgaagagcgccaggagaagttcttggaaggacttaatgatgagctttcttacccactcatgactggagattattctgatttccagaagttagtggataaggctattcgtcaggaagacaagtacaatcgcatggagcaaaagaaacgccggattgctcaattcaagacacaacaggggaataatcagaagccgcgtcttactttaggaccccagtccatgccacagggaggttcttcatctgttgttcgtccgcagcgtcatttcttcaacaacaatgctggcaacaacatccgcaatcaagctccacgtcctgttgcagcctcgacacagcaacaacctgccaagagggagcaaggcagcaagcccgtgcgccaaaggctcgtgtcaatcatgtcgctgctgcagaagcccaagatgctccagatgtcaagtctgaaccaaatagctttggaagagattcctatagtccgggagtatcccgatgtgttcccagatgatttacctggatattatcggaggtttatagagaatttttccaagattgctaagcccatgacacgattgcttcagaaagatgtgaagtacaagtggtcggaagaatgttgtgttctgatgcaagatgggaaggtggttgcctatgcatctcgtcagttacgtccgcatgagaagaactaccctactcatgatcttgacttcgcgccgccgtcgccgccgtcgctccagccgtgcgccgccgccgttccggtcatcgccgtcgctcgggaagaccgccgtcgtggtcaccaagttgccgccgtcctcgtccgccccttcgccgtcgccgaagaccgccggagcaccgtcgccgtcgtcaagccaaagagctccgccgtttcaacctcgtcgccgtcgccgtccgttggtcttccgccgctcctttggtcatcggtgcgcacggaggtgaggaacctcggccgcccctcctccttcaccgccggccaccggagctccgccgtcgccgctaacccgagccgccgccgccatcctcctcgtcgccggccgtcgtcgttcatcgtttgtcgtcgtggtgagtaccatcgggttcgtctcgatgtcctctacgccgctctagcgccgtgtgccctagcgccgccgtcgccgccgtcgctccagtcgtgcgccgccgccgttccagtcattgtcgtcgctcgggaagaccgccgtcgtggtcgccaagtcgtcgccgtcctcgtccgccgcttcgccaccgtcggagaccgccggagcatcgtcgccgtcgtcaagccgaagaccgccgccgtttcaacctcgtcgccgtcgccgtcccttggtcttccgccgtcgctttggtcgccg

SEQ ID NO: 10406 - DNA, 1559 bp, Oryza sativa
  Clone ID: PAT_MRT4530_16730C.1
cataaaccaaggatcatggtatgggtgttggagttattgtacactgctccttagttgtctttttttaacctctagtgcaagaaccttgtgccttgaaggcatgttccgttggcacaatgctaaacagacttaggatacatctcctttggggcatgtatccaagtgccaacaagataatccggggtatctcccggcagtgctttgtttatggtcacaagctcgaccatggagacatgtcgctgcaagattagtaccacaaacacatatgagatttgcaatatttatgataaataaaagcatccaaaaccaaccttctaaacatgttagaggtaaggcccaaaaggtggttatggttctcacacaaggaagtgatagtaatcagacagaactctgaggattctttatgtgagcatgaacactgaggaactttgaaagagaagctttcatgctcatttgttgagttctcatcctctagagttgatgtctcaagcttgtccatggcttgcaggttctccttctcaagagatgcatcgtgcaagaaaaaggttgtttcttgacaaatgtcgagaacaacattttgatggccagagggacaaggttcaggctcgataggaggttgtgatggtggttctttggagtgcaactctagaatagattcaggggactcatgaagaagaaccgccattacttcctctatcggcgtattatcagggaggatgcctgtcaaggttttctcttaatcgctatgaggatcatccctgaatttaggagcgcaacccggagcttgaatttctttggaatccggtgatggctccacggaggactctttagttagacccgaagatgttgaaggcttgggttcaggcttggctaaagaaagttcctcccgtcttgacacaaatgcctctggatggggttcaacacactgcccgacaaaggaggtattttccgatatgcgatcgagaatttcctagccttcggcgggagttttgtgcataaatgatcctccagcagttatggcaaggtaaaatgcagactccctatctaaacccgtttgaaaatgctgcaatagcatgtaatcgggtataaacagggttggtccagattgcactaaattagtgaatctggaccaggctgcaccaatcggttctttatttatctgctggaaactcaggatttctacacgaagagtagtaatacaagttatagggaaaaatgcgaggcagaagctgtcttgtaatttatcctagtcaccatttacatacccaacagtagatgtgtaccattgtttcactctgtcatgaagagagaacgtaaacaatttccaccgaacagtctcttgcttcatgtcttgaatcttaaggcacgagcaaaactgctcgaattcccgcagatgatggtaggggttttcctggcctaaaccagagaaagatttctccctaaccatactgatgaattcgggatgaatttcatagccaggcgttaagataggctccgatgaaagagggctcacagaattcgccccgaggagcagacaactcgaagagaggtcgctccat

SEQ ID NO: 10407 - DNA, 1637 bp, Oryza sativa
  Clone ID: PAT_MRT4530_16731C.1
atggagtcacaatctatcttccaattatctgctcctcggcgcgaattttacgagccatctccttcatcggagcctattttaacacctgcctatgaaattcgtcccgaattcatcagtatggttagggagaaatctttctctggtttaggccatgaaaacccctaccatcatttgcgggaattcgagcagctttgctcgtgccttacgattcgaggcatgaagcaagaaactattcggtggaaattgtttccgttctctcttcgtgagagagcaaaacaatggtacacatctaccgtcgggtgtgtaaacggtgaccgggagaaattgcgagacatgttctgcctcgcatttttccctgtaacccgtattactactcttcgtgtagaaatcctgagtttccagcagataaataaagaatcgattggtgcagcctggtccagattcactaatttagttcagtctggcccaaccctgtctatacccgattacgtgctattgcaacattttcatacgggtttagatagggagtctgcattcaaccttgacataactgctggagggtcattcttgcacaaaactcccgccgaaggcaaggaaattctcgatcgcatatcggaaaatgcctcctttgtcggacagtgtgttgaaccccatccagaagcatctgtgtcaggaagggaggaaccttcttttgctgagcctgaacccgagccttcaacatcttcgggtctgactaaagagtcctccgtggagccatcgccggattccaaagaaattcaagctcagggttgcgctcctaaattcagggatgatcctcatactgattatgagaaaaccttgacaggcatcctccctaataatatgctgatagaggaagtaatggcggttctgcttcatgattcccctgagtctattctagaacaggatgatcttcaaccaccatcacaacctcctatcgagcctgaaccttgtccctctggccattaagatgttgttctcgacagttgtcaagaaacaacatcattcttgcatgatgcatctcttgagaaggagaacctgcaagccatggacaagcttgagacatcaactctagaggatgagaactccacaaatgagcatgaaagcttatctttcaaagttcctcagtgtacatgctcacataaagaatcctcagagttctgtccgattagtatcacttccttgtgcgagaaccataaccacctttcgggccttacctctaacttgtttagaaggttggttgtggatgcttttatttatcataaatattgcaaatctcgtatgtgtttgtggcactaatcttgcagcgagatgtctccatggtcgagcttgtgaccataaacaaagaactgccgggagataccccggattatcttgttggcacttgcatacttgcccagaaagagatgcatcctacgtctcttcagcattgcaccgacggagcacgccttcaaggcacaaggttattgcaccagaggaaataaaaagacaactaaggagtagtgtacaataacttcaacattcataccacgctccttggactacgagaaggcagatgtacaaggaaccaagcagagcaaatgcaatactttgttacacctgcataaaaccataaaagt

SEQ ID NO: 10408 - DNA, 3024 bp, Oryza sativa
  Clone ID: PAT_MRT4530_16732C.1
ctactggtcgtcttctaagtctctggggatctgcgacggcgacagcggcgactcctcgctgctccgggagtcccctctccagtcatcctgcacctgcgcggcgaactgcaggttccacagcacgtcctccaccgacggcctctgcaccgcctccttggccaggcacctcaggcagatctccatcaccgtcttcaccgactcgtcggagcaccccttgctcaccgccgggtccacaaagctcctcctcttcgccgtcccctccgccgtcagcgccgattgcagctgttctttcattatctccacctcgtagatggatgtgatgggcctgcctgagataacctcgagtagtatcacgccgaaatcgaagatgtcgagcttatcaccgttcggtacactatcagatggatacttgttgccagatcctccctcggatttcatggtttcagataggatggggatattgtagctgcctattttggcaacaagattctggtctagaagaatgttggtgatcttcagattattcgcaaataggccaggtatgatccctccatgcaagaattgaattcctttggcaacaccaatggctgttgatatcctctgcacccaggtgagctttctcccttctgttccttgtgaaattctgcctctcaggttgccattctgaacgtattcgaagacgagatacaattgcgtgatggtggaatcgtcgagattgtattcgaagcagtgtccaagtgcactgaccaagtgcctgtgcctgagcttggagatcatctcaatgtggtgattgaagctctgggaagtctggctcctcttcaccttcagagacctgattgtcaccggagttccattgcttagccttcctcggtacatctgtccgtgagaatcttgccccatcatatttgatacttcgaaatcattagtagccgcttcgagctcgaccaaagaaaatgatctgtatgctggaattcccagagctcccaatttcactgtctgagatatgtaacgcgcatcggcgaagagcttggaaggataggcgctcgacgcgtgctccacgagcctccgtggcggcctcgcctgcgccctcctcatgctcgccttcctcacggcgaggaagaccgccacgccggcgagcaccgcggcggcaatggcggccgccacgacgccggcgacgaggccggacctggcgccgctgggcttcctccgcgcctggtcgggcacgatgccgacggcgatggcctggttcttgcagaacggggacgggtgctgcgtgtcgtcgccggtggcgaggcagttcgccgagaagagcaccgtcttggaggagtcggagtcggagtccgccgccttgccgacggcgccggcggcgaggcaggtcgggaggctccccgtgaggaggttggacgagacgtcgacgaatttgaggttgttgccgcacgacatgttgccggagagcatgccggtgaagcggttgccggcgacgctgaggtactcgatggacggcagcgagagcagcgccggcatgaacgggccgacgaacctgttcctggacacgtcgagccgctcgaggaggtagaacgacgcgagctccggcgggaggccgtcgctgaacctgttgccggcgagcaccacgctggccaccttccggccgagccgcgggaactccggcccgagcgagttgttggcgaggtcgatcacctggaggttcttggcgccgctcatgtccggcaggttgcccgacaggttgttgctcgccagcgacagcgaccgcagcgacgccatgtcgctcaccgaccccggcaaggtgccctccagcgagttgttcctcaggctcagcacggcgagcaccggcagcctccccagccacgccggcagctcgccgcttagcatgttgtcgtcggcgatgaacgtctgcaggttgccgagccgcgacagcgcgagggggagctcgccgtagaggtagttgccgctgacattgacgatctcgagcgcggcgagccgcgacaccttcccgggcaatgggccccagagtccgagtccggtgagcgtgagcacccggaggtcggggagcctcgacagcgtggtgaagaaggagtcgatggagaacgtcttgggcagcggcggcggcgtcggcgagccgccgccaccgccgatgatgtgcagctgcgtgacgctgtcgccgtagcactcgacgaacgccgacgtggtcttgtagtcgccgccgtagcagaagtcggtgtagttgtgccagtggccgagcaccgccgggtagccgagcatctgctggatcttgagcagcgaccatgtctgcgacgcctgcagctgcgtgctccctggcaccatcgccatcaccaccgacaccaagaacaacaccaccagattcttccctcccatttcttcagcttctcacaagatttcttcagctcctgatcagttcttgatgagcaccaatgtgcaagaaccagcagcaatttctgaactggagcagaggagatgagcagagcagggaagatagcaagaacagcaaaatctgtcttaactttttgtgatcaagaacagtgacagaggtgatagattctggtgatgtgatgaagaagggggaattttctgaagatttgatgctgggaggaggagcaaggagagattgattagctgaaggacagcatgatggcatcaagcaactgaactcttcagaaaaggctgagctgagaggaactacagttattggagagatagctactggtgacctgaaaaaaatgatgtgtgccaaattgaccaatcttttactacagggatctatctgaccactaattcatttcatcccaaagcaagaaagcactggatgccaatgactgcagcagcagaaacatctccagatttgcttctttccttcaagaactggcaacatgagagaagaaaacaaaaattatagtagtatcaggttagagaccaaagcatcacttgtgtaccaagatttgtagcactatcactactcctcgggccgtcctccgccgaattcctgca

SEQ ID NO: 10409 - DNA, 360 bp, Oryza sativa
  Clone ID: PAT_MRT4530_16733C.1
atggcttcagctccactcctacaggcagctcaactgggagaaaaaaggattaatgacgtcatcgctgacatcatcgccggccatggcacggcttccacgcgaccaccggcaaaagagggctcggttgggctaaccgaggacaccaacgtgaagaggacgacgacgcgaactcactggtgcaaagaacaacgacggctggcgacgaggttcgacggcggctcggctcggctcaacgacggcgacggcgctccggtggtcttcggcggctgcgaaggggcggctgaggtactcctcctccgcgcgcacccgacggcggcgacggacggcaacggcgacggctaccgcggcggcgcgacgcgg

SEQ ID NO: 10410 - DNA, 860 bp, Oryza sativa
  Clone ID: PAT_MRT4530_16734C.1
tctaaggattctttatgtgagcaggattcctgaggaattttgagagtgaaactttcatgctcattagtggagttttcatccgccagagttgatgtctcaaacttgtccatggcttgcaggttctccttctcaagagatgcatcgtgcaagaacaaggttgtttcttgacaaatgtcaagaacaatatttttatggccagagggacaaggttcaggctcgataggaggttgtgatggtggttctttggagtgcaattcaagggtctcgccagaatctttttgaatgaaacgaagatcatcatgctctagaatagattcaggggactcatgaagtagaaccgccattacttcctctatcggcgtattatcagggaggatgcccgtcaaggttttctcataatcgctatgaggatcatccctgaatttaggagcacaacccggagcttgaatttcttttgaatccggcgatggctctagggaggactctttagtcagtcccgaagatgttgaaggctcgggtttaggcttggcaaaagaaggttcctcccttcctgacacaaatgcttctggatggggttcaacacactgcccgacaaaggaggtattttccgatatgcgatagagaatttccttgccttcggcgggagttttgtgcatgaatgaccctccagcaattatgtcaaggtagaatgcagactctctatttaaacccatatgaaaatgctgtcgggtcctcccccaacctccagccgctatcgccgcccccatcgccgcgacgccgtcgccctccgccgccggccggtcgccgccggttgccgcctcgcgtcgccgctgtgtgcgcgccgcgccgccgcgcgccat

SEQ ID NO: 10411 - DNA, 528 bp, Oryza sativa
  Clone ID: PAT_MRT4530_16735C.1
ttggtggcggtggtgattgagcatattgattgtgcaagaagacactgcctttggagaaaaacaatagatccccaaaccaaatctcactctcttgcggcttgggatattgtttgcagactaacgaatagaggatgtatgggtattatcaatttggaacatcagaacattgcacttcttatgaagcatcttgacaaatttttcaataagagaaatctcccctaggtcagatttctttggagcaaatattatcataacaaacccctccctccacaacctatgtatgaaaacggctcattttggtggaaagatatcttccagctaattcctctattcagggtaatctccactcttcaaatccatcaaggaaacatagctttattctagaaagaccattggggtaatgatatcctaaaatctagttcccatcactattttcatttgcaatcagtgaggacatatctgtctctgccttccatcaacaagatctctgataattttcaactacctctcaacactcaagcattgcaa

SEQ ID NO: 10412 - DNA, 417 bp, Oryza sativa
  Clone ID: PAT_MRT4530_16736C.1
aaagaggaaaattaaggcacccttttaccataaagggccttggaaaacctatatttccttgcccgagagtaaatgcccggtggggtaactggattgtcctgaacgctcttgtgatctagaaggctcccacgacatcatcccgatagatgaccttagatagggatcgtttagaaattctggaacacgtgaccaagtttaaaccctcactggatgggcagcctgaagagcatatgggaaaagaattataacgccgtgccggcacttcttcctatacccctgtaatactagtgtatccaatgtgatttcattttgttatttaccagcttcagctctgaagatttttgctgaggttgtcatttttgtggatttatatacttcgttctgatgctttgattccaaaaaaaaaaaaaaaaaaaa

SEQ ID NO: 10413 - DNA, 229 bp, Oryza sativa
  Clone ID: PAT_MRT4530_16737C.1
cacttgtacaccctcgacccacgaccttgtgagctgaatgtcactgctacactttggatggccctcatcacccgactggacatgttcagtcaccaccctgcgccgctttcaacgccgctcccgcgccgtctctgcaggcacgtctacgtcagcgacgccgagggtgccacgacttcacctgctccgcgactcgcgctgccgatgggacataactccggtgcgagcgcta

SEQ ID NO: 10414 - DNA, 227 bp, Oryza sativa
  Clone ID: PAT_MRT4530_16738C.1
gacgactctgttgcttgctgtgaccgatatcaacactgattacgacgtgtgcacactggctgacgacgttcacgcacgcaggccactgcataacctaggcccggctgccttcaacgttttccaagtcatttaccagacactgcgactaccctccatccgactgtcgggaactcacccatgcatcgatcaatagtagtgtaagtatgcagccgtaccacgtacagctc

SEQ ID NO: 10415 - DNA, 402 bp, Oryza sativa
  Clone ID: PAT_MRT4530_16739C.1
atctggtcgatcgcccataaccgcgggcacagctattcgaatagttctactctggccagaggtgcataactgtacccacaagacacaatccaccggcatgtcaccgtgcctgcgcagacatgtcaccatgtcgaatgattgtgacaagacccttagcataaccctcccctaaccatccacaccacactaaggtttcacgcccaccctataccccggaggtggacagtcccctcgagcgccgtggtgaatccggcagctggacaaccggacaccccggccgacccaactccatcacgcccaccttcgccaccggtgcctaggaaagggtcgagctatattacagatcaagcagttactcactcccgcttgtggcaagcgctgtatgtattccagggtttctag

SEQ ID NO: 10416 - DNA, 3384 bp, Oryza sativa
  Clone ID: PAT_MRT4530_1673C.1
atgtcctccgtttgcgccgccgcgccgtcgttcgccgttgattcctggacgagggtttacacacatatgccgcgctacaagcctgagtacttgtttggcactaagggatttgtccaggagttgcgtacgatgtcctttgccataggatttgggactgctcctttgtatgcccagattcctcatgatcgtgatgaagagaagtgccgtgtcaaagtcaccttgaacagtaatcgtgaagatatcccatcggtgatgttcgaggctggttggggaagctacattcatgcttgtcaggaggtggcaaggatcaccataggagagctccgcgaaagctacaatgatcggttggccaacactaagtatcgctaccatcctcgccaaccccagggaagcgatcgtggcagctaccttgaacctgcagggattgagaatgatgctaccacaaggcatttggttgagatgctgtgggccatggatgagacccgcgctgagattgtgatagcagctcaagatcgtgaagacaggaatcgcggcaagatctgcaagctggaggacaaggtggatcatttggagaaggaactagccgcattgacgggagaagcaccaccgaaaaaggccagggtttgtcttaccgcaaggaagagagctctattcgttcctcgctaccagttggcgccaaaggttcgtgtggtggaaaaagaagctaccccagccccagcggatcctccggtcgtcaaccaactccagaaccagcagaaccagggaaataaccatgcacctccccagaacaagctagcagaatttcttcgtgtgaggccgcccactttttctagcactaccaatcctgttgaagctggtgattggctgcacgccatagagaagaagttggacctgcttcagtgcactgatcaagagaaagtctcctttgcttcacatcagctgcatggccctgcctctgagtggtgggatcacttccgtctcaacaggactactgctaaacctatctcttggctagagttcaccgctgcttttcggaagacgcacaaaccatcgggagtggtgtctcttaagaagaaggagttcagagagctcactcagggatctcgctctgtcaccgaatacttgcatgagtttaatcgccgggctcgctatgctccggaagatgtatgcactgatgaagagcgtcaagagaagttcctggaaggactgaatgatgagctttcttacccattaatgactggggattatcatgatttccagaagttggtgggtaaggctattcgccaggaggacaagtacaaccgtatggagcagaagaaacgcaggattgctcacttcaaagctcagcaggggaatagaaatcatgggatggaagtagaagatcttagacgtcctttgatggttagtactccgagtaaccaagcactctcatcgcaacgtagcccctctgtcagaatagagattcaaggagtaccatttctggccaaccttattctgttagaatccaaagaccttgatgtcatcctagggatggactggttagccagatataaaggtgtgatagactgtgccaatagaaaagtaactctcaccagcaatgacggtgaagttgtaactgttcatgcattgtcctctgaacctctaaggtcaagtctgaaccaaataacgttggaagagattcccatagtacgggagtacccggatgatttacctgaagagcatgaagaacatcttcgccttgcactagagaagctacgagaacatcaattgtatgccaagtttagcaaatccggaggagttgccgttgatcctagcaatgtggaatccgtaaccaactggaaacaaccaaagacagtttcagagattcgcagtttcctgggtctcgcaggttgtgttctgatgcaagatgggaaggtggttgcctatgcatctcgtcagttacgtccgcatgagaagaactaccctactcatgatcttgagttagctgcagtggtacatgcgttgaagatttggcgtcattatcttttcggtactcgtatagaggtgtacaaggatcacaagaatttgaatagaggtttcgttgcagccttagaagcgaagcccactctcattgaccaggttagagaagctcaaatcaatgatcctgatattcaagagattaagaagaatatgagaagaggaaaagctattggatatttggaagatgagcaaggaactgtatggttgggtgagagaatctgtgttccaaagaacaaagatttgaaagatgcaattctgaaggaagctcacgacactttatactccattcaccctagtagtactaagatgtaccaagacctaaaggaaagattctggtgggcaagtatgaagcgtgagatagcagagtatgtagctgtgtgtgatgtttgtcagcgattcaaggcagaacatcagaaacccgcaggtttgctgcaacctttgaagataccagaatggaagtgggaggaaatcggtatggatttcatcactggtctacccagaacgtcatcgggccatgactctatttgggtgatagtcgacagacttaccaaagtggctcatttcatcccgacagacggacaaactgaaagggtaaatcagattttggaatacatgttgagagcttgtgctttagacttcggtggaagttgggataagaatctgccttacgcggaattctcgtacaacaacagttatcaagctagtcttcaaatggctccttatgaagcactgtatggtcggaagcgccgcactccgtttttgtgggatcaaacgggagaacgtcaggttttcgggactgatatcttaagggaagcagaagagaaggtaaagatcattcaagaaagattgcgtatagctcagtctcgtcataagagttatgccgacaatcgccgcagagatttaagttttgaggaaggagatcatgtgtaccttcgtgtcacgcctcttcgaggggttcatcgttttcacaccaaaggaaaattggcaccgcgttttgtgggaccttataagattgtcagtagaaggggtgaggttgcttatcagttggagttacctcaatccttggcaggtatccataatgtgttccatgtgttacagctgaaaaagtgtttaagggtacctactgaagaagctaatcttgaacagatagaagtccaagaggatctgacatatgttgagaaaccaatccgtatcttggagatagatgagagaagaaccaggaatcgagttatccatttttgcaaggtacaatggagtaatcactcagaggaagaatctacttgggagcgagaagatgaactaaagtcagctcatccgcatcttttcgccagttcttccgaatctcgaggacgagattctatttaa

SEQ ID NO: 10417 - DNA, 330 bp, Oryza sativa
  Clone ID: PAT_MRT4530_16740C.1
atgatcctaaagacggtcgtgaagcaggcagcaaaatactggcctcgacgtgagcgcctggatgccgccatcgaccatgttaataccgagggtgaggaaggtatcaacttctcagcagaacgccagccagaacgcgatgtaaccccagcaggagacgaaattatcaaggagattaacgacgtccttatcgcaatggataagacatgggaagaaaacctgctcccagtctgttcgcaaattttccgtcgtgatattcgcgattcatccgagcttacccaagccgaggcagttaaggccttaggcttcctcaagaagaaggcggcagcatga

SEQ ID NO: 10418 - DNA, 3105 bp, Oryza sativa
  Clone ID: PAT_MRT4530_16741C.1
atggcagtttcactgcaagactggagcaagatctccttcgggtcggtgcgcaaagagatacagcggttggaaagaaggctgaagttcttgcgtaacgaggtgttcacggatgctatcatccgggaagagagacttttggaacagcagttatgtgatctctttgaaagagaggaaatcatggcaaaacagcggtctcgaattgaatggctgaaagaaggtgaccgaaatacatccttcttccatgcccgtgcctcagcaaggaggcgcaccaacaagattaagttgctggttagggatgatggttcctcctgtagcgaatctcaaggcatcaaactcatggctgagcatttctttaaaaaacttttcacctctgagcagtgtgagtcagtagaggaagtcctagaggccattccatgtaaggtggacgaatccataaatgaagaactgtgcaaggcctactcggatgaggaaataaaagaggcgttatttcaaatgggtccaactaaggcacccagcccagatggtttcccagctcttttctaccaatctcattggaattttttggagaatgacatctgcagggcagtgcgtggttttcttacaggggacgaaattccagaaggcctgtgtgactctatcattgtcctgatcccaaagatccacaatctggtgcacctctcaaaatttcggcctatcagcttatgtaacgtcctctataagattgcctctaaagttttggctaatcgcctcaaaatcttcctacctgacatcgtgtcggaattccaaagtgcatttgtgcccgggcggctcattacagacagtgcacttgtggcgtttgaatgcctacactcaatccgaaggcaacatagcaaaaatcctttttttgctctcaagatagatatgatgaaagcctatgatcgaattgagtggtcttatctccaaggatgcttaacgaagcttgggtttgcccctgcctgggttagttctgtgatgagatgcgtcacctcagtcagatatgccgttcgcattaatggggagctaactaggctagtgataccttcaaggggcataagacagggggacccagttagcccttacctcttcctgttgtgtacagaggggttgtcctgtttgctgcaaagaaaggaatctttggggttgctccatggaatcagaaacggtcaccagggtccgccaatctctcaccttctttttgcagatgatagcattttctttgccaagagtgatccaagaagtgttcaggtcctgaaatctaccttacagtcctattgcaacgcatcagggcagaaaatcaaccttcaaaaatcttcgctcctcttcggccgatactgccctgatgccatcaaaacatgtgtaaaggactgtttacaagtgtctaacgaggctcttcaggacacctatttgggcatgcctacggagataaactgtgcagtaaccagctcctttaatttcttgtctgaacgggtatggaagagagtgaacgggtggaatgaccggccactgtcaagggctggtaaggagactatgcttaaggcagtagtgcaggcgattccgacctacatcatgagttgttttcaagttccaacaactatttgtgataagatgaaatcctcaatggccaaccattggtggggttatgaagatgggaggaaaaagatgcattggcgctcggacttggtcatttttaatcaagcgatgttggccagacagggttggcgtattctcacagatccaaattcactttgctcaagggttctgaaaggtaggtacttcccagactcagatttttggtctgcccctaaacctcgatctgcctcctttacctggcgtagtattttgtttgggcgggagttgttgaaaaagggggtgcgctgggctgttggcgatggttcgaccattaagatcacgaaggacaaatggataccaggtgtgcaagcaggaatggtgaatacccgcttccctatccctgatgatgttactgtcgattggctcatgaatcctgaaaggaatgcttgggatgaggagattgtcaaggcagttttcaacgatgatattgcaagagaagttttgcaggttcccataagtcgtcatgggggagaagattttgtttcttggccacatgacaaaagggggttgtttactgttcgctctgcttacaacttagtgagatcaaatttatttgtggtggctcagagttccaatgggagaggacaacactctggagcgaatgtggactcgcaattctggaaggcactttggacaatcaatgcgccggggaaaatgctgatacatttgtggaggtcagtacatgattgtcttcctacagggttccaactccggagacgccatgttcctgctacggagggatgcatcttttgtggtcatgatgatagaattgagcatgtcttccttgtgtgcccctttgctgcaactgtttgggatgccatcaaggagaagtttcagattaacttgtgcagacgggaattatgcaatataaggcaatgggtgtttgatttcctaactcgcagctctcacattcagaagacagtcctggctgttactctgcggcacatttgggaagcgaggaatttttctaggaataaccctgttactacccacccgcgccaagtgattcacaaaattgtgtcgtatgtcgatatgattgtgcagcactgccccaaggataggaatgcctctgggtgtgatctcccccttccagttacaaagtggaaaccaccgccgccaggcatggtactaattaactcagatgctgcactcttccaagcttctaatcagacgggtttggcctttgtaattcgggatcacagtgccacctgcctgcttgctgcaaacaagaggataaccggattgctctctccagaactagcggaagctttggcgatccgtttcgccttggaacatgcaaaggcggaaggtttccagaatgtgttgatggcctcagattgcctgtcagttatcaagagaattcaatctggggcacgagacctttcagttgttggcgttattgtccgtgatattaagaaattggagactgagttcctggaatgctcctttatcgtttaa

SEQ ID NO: 10419 - DNA, 900 bp, Oryza sativa
  Clone ID: PAT_MRT4530_16742C.1
ccttcgtgatccaggatgtggcagttgatagacgtatcccggcgccgccgtggcgtcgaaggggtagggcatggccgcgggttttttttttttttttttagcacatcaagcagtccgtagataacagtaaaacgtttgcttttcgtcaccatagattaatacagagaaaaagaaaatgatgtccacagtatcaaatatcacacatttcactgtgtggaagcactcagtttaaacacattctttgtagtgctcggtagaactttattctgcttggaacaaccaagcaaatattgctggcaaagaacacatgaaactaatctatagtctactccacgcagcaaaatggtgcaaatggtagatcttggagagttcacgtctttatggcttcacttgaggaggagactcaccctgcagagcaggatcagatttgacagcatctagtgtcttgaagaactcctcagggagtgcaacaggccgatgctgcggaacatgtttcgggataagtgtgtcatcttcaataacctcgcattcatagtcatcaggaacaccccatgggtcccattcgatcatcttggcgatgagcttgagctcgtcctgggcctcctcgatgagctcctcgacctggccgcagccgatgcggtcctcgatgcgcttccagtcgtcctcctcctggcagatctggaggcggtggcgggtgaaggactcgacggccttgcggtagccctcgtccttggggacggcctcgatctccttgagggtgcgggtgtagaggccgacgagcacctcccgcgcgttgggcaccacctccagccccacgatccccgtcgtctccttcacggcgcgcgccgcccgcagcgccgccacccctcccccgccgctcaggatccgccgcaggaacat

SEQ ID NO: 10420 - DNA, 2245 bp, Oryza sativa
  Clone ID: PAT_MRT4530_16743C.1
tttttttttttttttttgttttttccagatgaacccaaatattttctcacttccttgacatgtaacaagctatacggatatcccggaagctgtatccatctcctggtcggcatctctatataatgcctgggggtacaatatacccctctcttttcctgacgtgttcacctgtttaaggtgatgagaaaccttgatccccacttgatacgctcacggcttcgatatgcccgatcgttatagtgagttaatgatacctatgctgtgggccaaactttgacaatcgaaatccttttttttttttttttttttaaatgaaggcaattttttttttatttaacttacacatacgacaaaatacaaaactccacaaagctttatgcatgtggttttattttttaatatataatgtcttgggcttaaatcacctcttgagtctcactttcgtttgcatttgagtacccttggtggattttttgttgttgatatctaggagtgaaagcaccaaatcctctttctcaccctgggattcttcaagctacgagtagaatctccaaatgcacacatttgacaaacagaaacagttcatcgactagaaaatttcaaataggagtagcagaactgggatgcataacaacggtttaaacaccttgattgtactatcatgagtcaccatactactaggaataagggggcacatgtttcacaaaactgatgatgcacgaaagcaaagcttctcagtatttgatcggagcaagaatctccagctgaggacccagcttctcctcggctgccttctcagccttgacacgcagcttcgccagttgcttcctcctgtcataggcaaccttggccttctccttcctcttctcctcaagctccctgatggtgtcatagtagttccagccaacctccttggagagctggccgaggaggcagtacttgtgcccaggctgcagcctcagaaccttgagcgcgtcggggatgaccatgcgcttggtcctgtcgtacggcggcggcacgccctcgtacgccttcagccttgccagcgccgcctctcccctcttggtcttgtgcgggatcatgccgcggacggtgcgccagaggatcttggcgggggagcggaagtggatggggccatgggagggcttggtgttcatcctcttgcggaggaagcggaggtacttcatcttctggcggacgaggccgccggacatgcagatctcctcgcagcggacgaccaccacgcgctgcccgttgaggagctccttggcgatgatggaggccaggcggccgagcatgtggtggcgcgcgtccaccaccacgcgcggcgcgcacacgccggagccggacaccatcttcgacttacctctcctctcctggaggcggcggaggcggcggagctagggtttggacgggcggcgggggtggaggcggaatgggagtctgaccgaagaccctgtgtagccgcactcagtttacacacattctttatagtgcccggtaatattttattcagcttggacagaaaaaacaactattgcttccaaaaaacacaaaaaacttatctatggtatacttcagacagcagaagtgtgcaaagtttcgatttcggaggatactcacctttcagagtaggatcagataggacagtaaccagtgtcttgaagaacagatctgagagtgcatcaggccgatgatgaggaacaagttacgggaaaagtgtgtcatcttcaataacgtcgcggtcttagtcatcagtctcaccccaccggtcccattcgatcatcttggcgatgagatggggctcgtcctggccctcctcgatgagctcctcgacctggccgcagccgatgcggtcctcgatgcgcttccagtcgtcctcctcctggcagatctggaggcggtggcgggtgaaggactcgacggccttgcggtagccctcgtccttggggacggcctcgatctccttgagggtgcgggtgtagaggccgacgagcacctcccgcgcgttgggcaccacctccagccccacgatccccgtcgtctccttcacggcgcgcgccgcccgcagcgccgccacccctcccccgccgctcaggatccgccgcaggaacatcccgccaccaccgccgtcgtctctctctctacctggtgaggtgcgggaggggtcgcgaccgtcggacgcgtggtacgtgcgactgatgagcagcggatggggaattgggggagagaggatggagtgggc

SEQ ID NO: 10421 - DNA, 1173 bp, Oryza sativa
  Clone ID: PAT_MRT4530_16744C.1
ccggccgggacgccgccggccgcgccgccgctgccgccgtcgccccgcgcccttctccctcatccccgccgctgtgaggtgtcaactccgtcgccgcctcccctgtggtagcacgaggggaaccagggctcacatgctactcgatcggggcgtaactttggatagccatggcggctatgcttcttcgccttcatccctgccctctcctctttccgccgccgccaccgcacccacatctccgccgccagctggccgtctattcgatcccgaaatcctccttccgatccgccgccgccgcggctcgagctagaaaccctccgcgtctggcctccgtcggtggagccgagcgacggcgcgtgggtgacgattatgatgaagaggaagaggacttgggacaggctctcgagagaacgcggcaacttgtcgagtgcgcgatgttcgcatccgtcgctggcctcgcgtacttcctcagcaactccctcgccatcgagaattactttagctgcttttttccattgccgattgttatctcctccttaagatggggactagaagctggcaggaaaactgcggtggctactgttttactgctattcacattgtctggccctgtaaaagcatcaacttatctgctcatgcatggagtagtaggtctggccatgggtactatgtggaggaggttggagaccaactggaatgtttccatcatactctgctcaattacccgggctctaggggcttgtggatacgttttattgtcgtcatttctgataagagagaatattcttggattgataacagtcaatatacatgcttccctgacatacattctggcggcagctggggtgaacacgattccttccatggatgcaatttatgtactctttggaacgctgcttctactcaactgtggattctttatcttcctactacatataatgtatacaatattcctgactaagctcggaataaagccttcattgagacctccaagatggctggacaaagcaatttgagtttacaggtagagtggcaacttactcctttgtaccttgtgcgctgactgaaaccggagcattcagtgtcacaatgcttcctaatgtagattccgcagagtgtcagcgctgaattcgtcccctgcaaaatcataattagtgtcctttttctttggcc

SEQ ID NO: 10422 - DNA, 195 bp, Oryza sativa
  Clone ID: PAT_MRT4530_16745C.1
atgagacgaggaccgaccgccgccactggggctactattgctcgctgccacaatctagatgttgctgttcgcctctggggctgcaatctacgctcaagctcaagcacaccgttgcaggatctaccacaccatcgggaagccaggtgcggggacgtcatcactgagaatccggaccagacgaccgacctacgctaa

SEQ ID NO: 10423 - DNA, 345 bp, Oryza sativa
  Clone ID: PAT_MRT4530_16746C.1
atgagagcgagcgcgcgaggtgggaaaatagccggcatatacacggtagtgcgagggctggcgaaggggaagaatcgcgcacgaggcggcgagggcgattttaggattggcaacaaaatcgtgccaggaggaactagacagcgaagcaacgccctccacaacgcgtcgcggacttctctccccacgacaccaagcctcgatcgagccaaagaatggctacccaactttgatcacacgtatctttgcaccgtgaaaggcctcggagtgcaaactaggagtatcaaattaatgaaggcatcccacacagctgccagcgccctccacaccacacgcctccaccgctag

SEQ ID NO: 10424 - DNA, 117 bp, Oryza sativa
  Clone ID: PAT_MRT4530_16747C.1
tcttatttgtcttcctctcgccgctgattcgatccgatccgaaccgaaccaaggggtggggaagcaatgacgacgaataggagcgtggggactctggatgaggcggatttgaggtgg

SEQ ID NO: 10425 - DNA, 706 bp, Oryza sativa
  unsure (1)..(706): unsure at all n locations
  Clone ID: PAT_MRT4530_16748C.1
gcacgagctcgtgccgaattcggcacgagcattaccgcccccggcaagggtgacatccccacctacgtcgtcggtgtcaatgccgaccagtacagcccctacgagcccatcatcagcaacgcctcctgcaccaccaactgcctcgcccccttcgtgaagatcctcgaccagaagttcggcatcatcaaggggacgatgaccaccacccactcctacaccggcgaccagaggctgctcgacgcgagccaccgtgacctccggcgcgcgcgtgcggtggagctgaacatcgtgccgacgtccaccggtgcggcaaagccgtggcgctgttgcttcgaacctcagggggaagctcaatggattgtctccgggtgcgacaccgaacgtgtccgaggtcgaccttgtgggtgcatgtgtccaaaagacctttgccgaggaggtgaaccatgcgttgcgggactgctccgacaacgaagctgagggctttttttaggtcttgcgacgtgccgttngtgttccgtcgacttcaagtgcctccgacgtgtngggcaccatctacaccttggcttcaaaatggtcattggggcgaacgacatgggtgaaagggaatcccctgggacgaacaaccaatgggggattcttcggcagaggggtcgataaacttttgccgaaattgttgggcaaaccaatgggaaagggaaaaaacggg

SEQ ID NO: 10426 - DNA, 309 bp, Oryza sativa
  Clone ID: PAT_MRT4530_16749C.1
gattgagatggcggcgccagatgtcaagtacttttttttcgtcggtagcattgtctgaggaagggtagacttgttacccgatactcccaacccccccaaccttcatattcattcttctcaccttattaacttcagcgttacttcgacggcacctgcttttgcattttaagcttcttatgtgactacatctctaacatcttcatgtttccgatgaaagcttactacctcatttacagctaaacattcaacattgcaaatatacccataggccaatctctcattattatgttgctttgctgtttcttatac

SEQ ID NO: 10427 - DNA, 399 bp, Oryza sativa
  Clone ID: PAT_MRT4530_1674C.1
atatgggaaacttgtttgcaaaaatgccacaaattggggggacatacccaaatttatcaaagcgaatttgaaactgaacccaaaattcagggggggaaaaggaaaaaaaaaaaaaaaaaaaaaagggggggccccccttttttttttttttttttttttttttttttttccaaaaaaaaacaaaccctttttttatgggaccagtttaaaacagggggggggcaaaaatttttttgaaactaattaaaaaattttttaataaaaagggccccccgggttaacccccaaagggggaaaggggggaccccaataggcccaccgggggggggccccccaggggtaaacatacctttttatccccccccgggaaaaaccttacccaaaacccaaatttgggcc

SEQ ID NO: 10428 - DNA, 654 bp, Oryza sativa
  Clone ID: PAT_MRT4530_16750C.1
atgattgcaaaggtaacagaggagcagtttggaattaaacctaaggatcagacttctgtgtatcggccgccatatcctgagtggtttgatagggttccacttccaggccgatacaagattccagactttttccaattctcagggcaagatgatatatctacaagggaacatatcagccgatttttagcccagtgtggggaggcatcggctgaagaagctctgaaagttagattgtttccattgtctttgactggatcggccttcacatggttttcatcattgccaccaaactttatcagaggttgggttgatcttgaaaagcaatttcaccaatacttctttgctggggacaatgagttaaagtttttagatttaatatcagttaggcagcaagaaggggaattggctgtggagtatattcaaagatttcgtgatgtccgcaaccgatgttatagcttgagcctaagtgatgagcaactagcagatcttgcgtttcgagggttgtcagcgcctatcaaagatagattctttttccacgagtttgacagcctggctcatctaatacagacggtatcggcttatgagagccgatgtcaagaagaagagaagaatcagttttggggcaatcaaggcaaggataattttgaagcatga

SEQ ID NO: 10429 - DNA, 314 bp, Oryza sativa
  Clone ID: PAT_MRT4530_16751C.1
tttattcaccggatagaacagcgcccccaccaggaggaggagcacgagcaacgccgttgcatggtcttgctggtggcagcagcgcattagcgctgggctggtttgcgtcgggcggggcccttctagccaccttacatgatcccggcgcgagcgacggagggcagttgcttggacgtcggcgacatggtgatgatggacaggttccgcgcttgggagggagcttacaaccggtcgtacccgagcgcaaaaaaagcgctgtagcggttcaatgtggtccgccccaacgcagagtttattcaagccgataaaattgt

SEQ ID NO: 10430 - DNA, 197 bp, Oryza sativa
  Clone ID: PAT_MRT4530_16752C.1
ataaaacttaaagttataatgggtcattcagtaccacacgctttctacaaaagggcacggaaattccacaacgaaagcaggtttcttaccagtggaccaactagaacatgtaagggtaacgtcaacacacatgctgtggcaaaatttaggctttgcctgaatcgaaaggggagaatctgttcttggacccttcctat

SEQ ID NO: 10431 - DNA, 429 bp, Oryza sativa
  Clone ID: PAT_MRT4530_16753C.1
ctcacatgttagtctggggaggtaggggcacaagaatggatgctgacattgaacagcttcttatcaaatggagcaagaggttcagatctcaagactagaaagaaagtttctttttggaacgagaaatgcacttcttgtagcatgctgatctggataggataccttatgagataggagttgcggcctttgatattatactatgtgttcaactcaacggcatgattactgataggagtatatacttgtttatatcatgatgattgccagaaaattctgaactgataatcactttaatatataagagtatcagaagacagaacatagtgaagtaacccgttttctgtaaaaatcaaggtaaaggtggattaaatgaaattcatacctgaggttccttgtatgcttaaaaaaaaagaagatggtgaaagacac

SEQ ID NO: 10432 - DNA, 320 bp, Oryza sativa
  Clone ID: PAT_MRT4530_16754C.1
gtttggggggtttttttttttttttttttttttttttttttttttttctttttttttttttttttttttttttttttttttttttttttttttttttttttgggcgggcaaacccgcagggttttttcaaaaaaacattgaagttcatcatttatgcaccaaaaatataaaaaaaaaggctcccggacaaaaaaaagcactaattatttaaaaaccccacataggcacacacacacaggtaactatagtagccaaaggaccggttttggggggcctaggatacccaagccaggagcaaacaccaccaggcccattggggg

SEQ ID NO: 10433 - DNA, 294 bp, Oryza sativa
  Clone ID: PAT_MRT4530_16755C.1
ctcaggtgtacggtgtaagagatggctggctcacatgcatgggttcacaattgtgctccgctacatgcgggccgcacgtgcatggccttcggacctactcctgttctagggccatggtgacgctaccattcgcgaggacgagcaagaagcggagccagggcattcggtgcgactacatcggctcagccaccaacgttatcattgtgacgaccacgactctgatgctgctcgcggggaggttacggctggcgccctcggcgaacacggaggcgacagcggggctgtatctggagg

SEQ ID NO: 10434 - DNA, 441 bp, Oryza sativa
  Clone ID: PAT_MRT4530_16756C.1
atgcggacacgccgcgagccgtgcgccgacgaggacgaggaggaagagagcatgctccggcgaggcgacgaggcgagagaggcggtggcggcgggcgaacaggcgctccggcggcacgcgcgggcagcaggccggcggctgcgcggcggggaagcagggcccgacggcggctcggtggcgcgcgcgggaagtaggccgacagctgcgcgcggcggggcagcagggcccgacagccgctcggcggcgcgcggccgggcagcaggacgatggcggctctgcggcatgcggctgggcagcagattgcggtgctccggcggcgagcgcgggcagcagaccggcggctacgcgatggggcagcacggcccgacggcaactcggcggcatgcggccaggctggcggcggcgtggctaggcggcgcatggcaggcgtcgaggagctaa

SEQ ID NO: 10435 - DNA, 505 bp, Oryza sativa
  Clone ID: PAT_MRT4530_16757C.1
ggcaattcacccccttttttaataaatcgggctttttttaaaacaaaattgcgggggcaaactaaataccggtgggtaacaagggacagtttggttttggtcctgtttactccttggccttgagctcaacccaggggggggaggggtttccctttttggtggttccaagggggggggaaaatggcctttggaggcccccccccttcccccttttggaaaggatgaggaaaatgggggcaaaaaatggcctccccgttttttttttttttaaggggggcccctccggggagtcaaaaagggatcgaagggttggggggaaaaaaaaaaaaaaaaggggggcattgccggagggcctttttcagggggcctgtttccacctccccgcccgttgccggggggcccgtttacccccggcccgcccgtttgggggccgacaaaacaccccgccggccgtgggggggcgcctttttctgccttcccccccttgccggccccaaagaggggg

SEQ ID NO: 10436 - DNA, 2753 bp, Oryza sativa
  Clone ID: PAT_MRT4530_16758C.1
ccctcgcgtccgcccgattccccaatctgcggtgtggtgtggtgcggtgcgagccggacgcaggcgtcgcctcgcctcgtcgcgcgcgcggctgtagagagagaagcctcgtagacaccctagcctcctccaccggccttgccctcctcgcgcgcacggcctcctccaccggccttggcctcctcgcgcgcacggcgggcggggcgtgcaggtttgggggagtagcgacggcgacgcgcccgacctccgtccacctgcctccatatcgggctgcagcaatgtatgaggaagacaacattcagggagaattgttactcgttcaggcagaacttgatgatattcaagggcaaattagtgcactgatcgatcgtcaagaggagctggatgagcgtgaatcacagctgaaagctctgctcgaagtatctaaagcctccaacaacacaatcaataattccccttcacatggtccacaactttggtcccggagagtcttatgggattctcgggttgataatgttcgtgtaaaggtaaatgggatttattcctagcgggagaataaatgagatgaaagttttttcattttgcatcctattatgcatgttggaaccttccgggtattgaaggccaaaatgagtgataaagatgatgtgatcagagttgatggtggcggagggaaggtttaatgctatccactacctgtcttacgacatcaaaaaattaaattttattttagccccttgatgtccattatctgggaccaggggattaaaatgggagctttaggttttttagtttagatgctagattaaaaggccaataagaaagtggcaaagttagtgagagataagcaatatcaagatgaatggaagatatatacttgtcataatggctgctggtggagggaagaaactaagctatcaactacctgctgtacttcatgccaccattcaaggcgtcgttatttcattgctttagatgaggcacactgctgtagtcaatggggccatgattttcgcccagactacaagaatcttggcattttaaaggtccagtgtcgcagtgttcgtctacaaggctcttgataaaggtgaaggagaactgaagatattgtatgtgacacctgaaaagatttccaaaagtaaaaggttcatgtctaagcttgagaaatgccaccatgcagggcgtctttctctcattgcaatagatgaggcacactgctgtagtcaatggggccatgattttcgaccagactacaagaatcttggcattttaaaggtccagtttcccagtgttcctatgatagcgaacaggtcgcaaaagaactgtctgaaaggggtattttagcagattattatcatgcagatatggatgttatttctcgtgagaaagttcatatgcggctaactctcctaccacctctttttctgatgtttttggaccttgtggcgtttggaatgggaatcaacaagccagatgattcagagctggtgcttaaccagcgtcaggaagataacctggcgtgtcagctactggagaagggatgtagatttagactaggagagaacatagtcaggtttgtgattcaccacagccttagtaaatctatggaaacatactaccaggaaagtggaagggcagggagagatggactaccttcagaatgtattctgtattatcgacctggtgatgttccacgccaaagttcaatggtcttctatgaaaactgtggcctgcaaaatctttatgacatagtacgatattgtcagtttcttcttgtaggaatgtgtgacaactgcacttctagtcttgagctcaaggagatagacgctacccaccatactaaaattattgtttcgcttctacatgatatccaacttaatgaccaaagagctacattgttgcagctggttgataagttcaaggcaaagtggaaagatttaggttgttcaaatgagtccattgatcttaagaaagaaggcattgaacagttggtagttcaacttatactcgatcgggttttggtttataattcacctagtactgctactattgaaacatttatttggagtacttcacttgtaacattaaataaagaagaatttcagcatacagcatatgcaaccaatgcatatgttgccttgggaccactgtggaagccagcactacaagggaacagaccggtcaagcttagcgttgcttttcactctcaggataaaggtagtggatccaaacggactaagcgcaaccagatgagtaatttggaagctaagcttgatgacctgcggagagagctctcttccagtaatggaggcgtattcccacatgctgttctttctgcccagcaaatttccctcctgaaccgccaaaaaccaaccactgttgctgagcttgaaaagcttataggaaaggttaagacaggtaagtacgggagcgcgatcattgagctcatgctgttacatattgattcagaagtagccggaggaaaggcctgtgcatcgaagaggcaaaagaaagataaggaggatgttatttgtgttgagagtagcgaggaggaggatgtttaagcgttatcatggtttttcttttgaaggctaacgaggcaaatttattgttgaaccttgagtgaaccttgagttgtgttgggatttaaacgagttctgaaatatatgtagttgaggaattacagtgtcaagctaaggcaaatatggaatatctagggaatgttttggtttaaaaagaagaacaaaggacaa

SEQ ID NO: 10437 - DNA, 726 bp, Oryza sativa
  Clone ID: PAT_MRT4530_16759C.1
atgggttcagctctttcgggcagcggcagcgggagcttgttggtcctctccgtctccgtcgtcggcatccttttcacctccatcctcctccttgcctactacctcttcctcgcctgctcatggcgccgccgttcccaccaaactgcacgacccacgccgcctcttccttctttcttcttagccgccgatcaaccccgccgcggcctcggcctggaggaggcggccatccgccgcataccaacgctccgctaccagcagcagcagcagcacaacaagcagcagcagtgcggcgtgtgcctgggcgagttccgcgagggggagaggctcaggcggctgcccccctgcctccactccttccacatcgactgcatcgacgcctggctcgccaccgccctcacctgcccgctctgcagggcccatgtcaccgtcgacaccaaccacattgctgctgctaccaccagcacgcggcacgacgacgaccagttgctctccggcgtgcaccagccgatgaggaggtcgttctccctcgactcctgccacctctacctcgccatcattttgcacccgcaccaactctccgactccgacacccgcagccgcagccgcagggaaccaaagcccgccgtcttagagtcagagaggcctagtaggacgctgcgcagatccttcttctccttcagccacactaccacctccccagtcccaactccaatcctccctatctga

SEQ ID NO: 10438 - DNA, 307 bp, Oryza sativa
  Clone ID: PAT_MRT4530_1675C.1
ctcacgctcgcgccgatcggatcggttcgctacagctagccgggaaagagcctcaccatgaccacggtcgcattctggctggccacgctggtgcacgagttcaggctgctcctctcgcccgacccgacacacagcgtctacttgcagaaggtgctaatgctgtcgtgcgagacggacacccacttggccgagacagacagtctcttgcgtgtggagcgatgacttgtccaatctacctaatcagagatgctccatacatagactactcgatggtgcatggtactgcatccgttctaaaaaaaactga

SEQ ID NO: 10439 - DNA, 415 bp, Oryza sativa
  Clone ID: PAT_MRT4530_16760C.1
accaaacattttccaatcacattaatggccaagatttttaccggaaagacaaagtttataccaaaaaacccaaagaaaaagaacaaaaattttaagaagggggacaaaaaaatgggaaacaggggcaagaaaaatgcccaaacacccaaaaggaagggttaagtaccccggggggggaaaaaccgaaaagaaaagggccaaattggaataaagctttattttttcctcccgcccttaggtcttgatccaacaaacaaagccccaaaaaaaaaaaaaaagccgcaaagaaacaggaaaacccatttattaaccctaccacacccataaagagattgccggggtgttaaccgcaagccccaatggaaagagcccaccggcaacgtaaacaggcaaaccaaaaaacggggaaggcaaa

SEQ ID NO: 10440 - DNA, 444 bp, Oryza sativa
  Clone ID: PAT_MRT4530_16761C.1
atgccggcggcgctgaagccgtaccgcgacaacgagctccgtaacctgcgcaacgacgaccagcagggcccgtaccaggagcacgaccacgtctaccgctacaacgtctacaacgacctcggcgagcccgactccgacaaccctcgccccgtcctcgggcgggcgccggccgggggcgcgccgggggctggcggtgagcagcgacgcggggacgagtggcgcgctggctggggaaagggttcgacgcggcacaccggcggctacgacggggtgagggggctgtgcgaccggtgcgcatggcggcgcagcggggcgggcggtagacggcggggcggacagaggcgcacgggggtgcgagacgtggaggcgggagtggcgaacaccaaaagctggagcagcgtcgggaggaggacggggaggaggaggaagagggtgatgccggcg

SEQ ID NO: 10441 - DNA, 1233 bp, Oryza sativa
  Clone ID: PAT_MRT4530_16762C.1
atggcgactccttctgtgagctctggcgactccgttggcgaccgcaatggctattggtctttggatttttgtgttcatttcttcctttggaagaatgggggccctgattggtgtcgtgagtttgatctttggcagaaagaattggatgatgaatggcctgttgttcagcgtcggcagaaatcttcaaaaccacataaagacattcctattaccacagtctttcaacgtttggaattcccttcatcatcttcttctccagcgatcaccggaaagaattttggtcaatggaaaggaaaagctaaaagtttggcccgtaataatgcgaaaaaacaggtggttgttgttaataatgtctctcaatctcggaataaatttgtttgggttaaaaagaaaaagaggagttcttcttctccgaagcaggacgtcccttcctcttccgctgttcttccgcaaccgaatctgattatttctcccgagattgtgcctatggcgaacacaaatccgaatccccttcgttttcttcgtgcgggccaagtggtgcatcaaggaagtgatttgcgcatttcgagagttgatctcactactgctacgagccccccccgatatcatgaggagtttgctttggctttggttgagcctattcttccggaagagctctgggatgatcatcagcttgacgtttggtgggagcaagatcctattcagggacgtgtctttgttagatttatgtacagggatcttgattcggttcctagcaaaatagttcttcaagatccaacagctggtgttggagagtcttggacaatttctgtctttatgtgcttctggtggtatttgtcgatgggggatacccgtagaccagatatagagggtattggggtacgctggtacgaggatcgacaagatcgtagtcgagttgatccgactagatctcccggcgacttggcttcgattagctccggcttcgtaggctgtggtggatgtgttggctctgaaattcgatgccttaggtcctctcggggggtccctttttttaccgtaggtcagctggtctctaagtaagactcagagacattggacccgacacgatataatgacgacccagttctatccgagtaggactctttccatctgtagactccatgatggacttccttaacctatgctgagaacgtccgtatacacacaaacataccatatcgatacgtgacgtatatcgaagggtagagggta

SEQ ID NO: 10442 - DNA, 1270 bp, Oryza sativa
  Clone ID: PAT_MRT4530_16763C.1
tttttttttttttggctcggggccggcccctccggtcctttcttccttgacaacaaaacaagtaaaatagagagttcggcgatttgcactattgtctggaagaatgagttaaaatgttactaaaacttgccaagaaatcatatcgtgcaaatattggccacatcaatagaatatattgacttgtcatgcaacaaactcgataagcatctccagattaatgtacgctcaacccttccatctgacaattggtaaagtagggcaccaattggtagccaacttcaaacaacttgtccttcgatataaggtggcaacgctactgtgagggtttccattaagatacgagaaacgaagaatattggatgagcacgagtcactgtggtcataatacatggcggccagaatcatctcttgatttttgatgtacttgcaggtgatctttcagcaaagtcctcgaaggcatattccattgcattgataccatgcaaacaagttatgcaaagaggtcaatagaatgatgataacatatctccaaaatgtttggttatttcagatactcgagtaaaaacatatcaaagatgtttggctgactatgacttggtttgcttggcaccagtgtggtaataaagctatccactatatatggcatctgcagtcaaatttctaattttatatctttatcaggtttactaagagatttgacagcaacaaagcaaaaaatatattgaaaatcatgaaaaataagtggcactaatttatttctcatagctattacttaaatggttgttttaaagcaacaccaagaaatagcataaatagaacatgtaaatcgaattgcacttggtcatttccaaatatccatgtcataatacagaagaagacttagtgattgagctccaaggttaatatataagccgatctggttatattatgttattatatcacatgaagtcccaaacaggcactgagcaactaaatcatctaatggttagtacaaatgaagttgcagtattttagatcttaatcaagttaaccgtgcgagatacactaatcaaaattgtatttttctgtcaaaaatagtattgctttcacatttacaaatggttaaatgcaaacacaaagcttagccgttaaatctaacactaatgttttctctctccacccagtaaatatcttgactcttgagtctcctaaatcagtgtggttattgtcatttctaaagtcagatactggtccatcagattgatccagtgtacaggtgcatcattgcaag

SEQ ID NO: 10443 - DNA, 1635 bp, Oryza sativa
  Clone ID: PAT_MRT4530_16764C.1
aaaggggtagacctaagtacttgcacgttcgtcttattcaataacttttgtgaaatatgtaaaaaaaaaacttttgtgaaatatggcccttcccttcctttccccaatccgcctcatccgataataccccccacccctctctcgtttcggcggcggcggcgcgcggccggagcccgagctgagaccaccaccacggcaccaccacgaacacgacgatgatggccgcggcagcgagaatggcgttcgcctcatgcggccgcctcctcgccccctcctcgtcgtcatccctccccgccctgccaagaacccggggcagcgtcgccgccagcggcaagcatcccgtctcgttcttggcggcggcgagatccgcctccgtcctctgctactgctccgacgccacccccccctccgcccgcaacccaaacccacgtcgctctcccgatccaaccgcctccgtccaaccgccgccgccgccgccgctccatcccctcgtcgcgcctcgccgtcgcaccacgatgcgccgccgccgctccatcccctcccgctccatcgcgccgcaacgccagattcatcgccgctcccctccctctcgaccgtttctctcggcgccatctccgcacatccccgccagcgccggatctcccttctccgccgccgctgccgccaaatccaccgaaaccaatctacgcggccaccacacgatggatgcatcaccgtcaattccgccctcgccgactccgccacagccgcctactccaccgccactacagttgtcaacgactccgccgccgccactcccgtcgtcgccggctccgcgaccgccgtccgtgctgccaccgcccttgccgccctcgcgctctcctcctcctcctcctcctcctcgaacccctcgtccctcggcgccgccgccacccccaccaagacctccggcgccgctaccaccggctccacctggaactcctccggttccggagcggcagcttcggccgcccccggatccgccgcccgccccaccgatgcgcgcccccgcggccagctctttctcccgtgcctccgcctgctcctcttgcgccgcctcacggagggagaggctgtccgccagccgtcgcgtcgtggcctcggcctcctcgagagcccgctcccgctcggcgagtgcatcctcgcgaaggcggagcgcggactcctcctcggcgcaggcggcctcgtgcgccgccagcgtcgcctcccggagagcagtggcggcctcgcggtccatcaagcccctctccacggcgccggcatgttcttccagcgccatggcacgggcctcaagggcctcctcgcgccgccgggacctcctcctccacctctcgggcgatctccgccagcgccgccttgcgggcttcgagctccgagatgtggcggcggtgagccttacggcccacctccaccatggcgtccaccgagcgccgcccctcctcgacgcgcgcccatgcggcctcgagctccgctcgttccgctcgcaaggcctccacctcccgggcggcctcctcccgagcagcttcctccgcttggcgaacccgggcggcctcccgggcggcctccgcttgccccggccccgagggccgaggcaccccgaccccttaaggaaatctg

SEQ ID NO: 10444 - DNA, 1876 bp, Oryza sativa
  Clone ID: PAT_MRT4530_16765C.1
cgcgggtttcactgctaccccagctgcaataatactcatacacctcacctcgtgccgcccgttgcgacacctcccgtacgtcaatgcccgtggccgccattgatggggaagaaggccggcaccacctcctcctggctcaccgccgtcaagcgcgccttccgctccccctctaaggacgactcccccaacaaggccgcccgcctccgcgacgacaccgacgacgacaagggcaagagggagcgccgcagatggctcttcaggaagtcctcgtcgccgtctcccgcgcctccgacaccgccgccgccacagcagcagcagcagcaatcgagggcggcggccgtgacggaggagcagcggcacgccatcgcgctcgccgtggcgacggcggcgaccgcggaggcggcggtggcgacggcgcaggcggcggcggaggtggtccggctgacgcgtccgagctccagcttcgtccgcgagcactacgccgccatcgtggtccagaccgcgttccgcgggtacctggcgcggcgcgcgctccgggcgctcaaggggctcgtgaagctgcaggcgctggtgcgcggccacaacgtgcggaagcaggccaacatgacgctccgctgcatgcaggcgctggtgcgcgtccaggcccgcgtccgcgaccagcggatgcgcctctcccaggactccatctccttgtccgccgccgccgcctccgccgcgccatgcggcagcagcaagtcctcctacagcgtcgacacctccaccttctgggattccaagtacacccacgacttcgccgctgccgaccgccgctccatcgagcggtcgcgagacggcagcagcttcgccgccggcgacgactgggacgaccggccgcggacgatagaggagatccaggcgatgctgcagacgaggaaggacgccgcgctcaagcgtgagagggcgctctcctacgccttctcccatcaaatttggaggaacccggcgccgtcggtggaggagatggacgtcgatgggcagccgaggtgggcggagaggtggatggcgtcgcgcgcgtcgttcgacaccagcaggagcaccgtccgcgcctccgcagcggcggcgcctgggcgcgcgtccaccgaccaccgcgaccaggtcaagacgctggagatcgacaccgcgcggcccttctcctactccacgccacgccggcacggcaacgcgtcgtaccacgcgtcgtcgtcgccgatgcaccgcgcgcaccaccactcgccggtcacgccgtcgccatccaaggcgcggccgccgatccaggtgcggtcggcaagcccgcgcgtggagcgcggcggcggcgggggagggagctacaccccgagccttcactcgcaccgccaccacgcgtcgtcgggcggcgcggcggcggtgccgaactacatggcggcgacggagtccgccaaggcgcgggtgcgttcccagagcgcgccgcggcagcgcccggcgacgccggagcgcgacaggatgtcattcggcggcggcggcggcggcggcggagcgaagaagcggctgtcgttccccgtccccatcgacccgtacggcgcgtacgcgcagagcctgcggagcccgagcttcaagagcgcggcggggaggttctcgtcggagcagcggtcgaacgtgtcgtcgtcctgcgcggagagcctcggcggggacgtggtctctccgtcatccaccaccgacctccgccgctggcttcgttaagtccccgccggcgtcggcgaggtgttcgatgtaatgcccgtgaggtgttcgctgtaatgtttttttttttaccacgacctcgtaattcatccaaaaaaaaaaaaaaaaaaaaaagggcggccgctcgcgatctagaactagt

SEQ ID NO: 10445 - DNA, 300 bp, Oryza sativa
  Clone ID: PAT_MRT4530_16766C.1
atggcgacggcgtgcgcgcgcacgcgttgccggcgtcggcaaccggcggcggaggcggcggcgcaaaggcggcggcgcacgaccggggcgacggctcgacctggcgcggctaggagggagagggaggggaaagagaagggggaaatgcctcaccgagagtggccggcgtggaggaaaacgacggcgaacggcgacggcgaccacgggcaaacggcggcgacgggtggacgaggtccggaatgccctaagggaggaaaagagagaggtattttcttgagaccatttaaaactccaatttag

SEQ ID NO: 10446 - DNA, 1127 bp, Oryza sativa
  Clone ID: PAT_MRT4530_16767C.1
aaatcttctccttcccctatcatgcatgtcctcttctgttccgactcccgtaggacacttcaaaatcaaactaacacctgcacaacttcgaccgaagaaaatccgacgcccgaggcgcacatacacacaaacaaacaccctcctagtgcggctagtgcggctgcactcgcttcaactgccacgccaatggtgaggaagctgccgctaagctccgtcctctacaccatcaactcggccagggacatcccaccctcgtcgcctccccctccggcggccactccaccggcatggatgtggccttcttgcaagcaccctagagctcattccttccgttcaccgtccgccgcctcggcagccgcagcggccaagaccatcgcgtcgatcttcctcgactccggcgagtcctccttcgccaactcatccgcgcgcatgcaccacgactgcgcctccgacagcctctccaccgagtccgacgtctccgccacggccgaggacatggccgacgccatagtccgcgggctccgctccgaccgcctcctcttcgagccccgcgcgccctccagctccatcctcgataagaagcccgtgcgccgcgccgcaggcggcggcgacgacgacgacgacggcgcggcgtcgttcggcggcggcgtcgcggtggcgttcgactcggaggatccgtacgaggacttccgggcgtccatggcggagatgctggccgcgcacggcgtgggcgactggggctggctggaggccatgctagggtggtacctccgcgccaacggcaaggagacgcacgccgccatcgtcgcggcgttcgtcgaccttgtcgtctccacggcggcaaggggctccagctcctcccgccactcgtcgttcactctcgccgggaccgacctggagagcagcagcgccggcggcggcgccgccggccatatctctttcaggctaaggtaaaataactaaagctagccccgagacaatgcgggctggctacctacgtgtgtgtgtgcgcgtgttaattaattccgtttgtctttgtgctaaactgtagtagcactttccaattgaatgacgaagtagctagctagcctccggttaatcaaaaaaaaaaaaaaaaaaaaaaaaaa

SEQ ID NO: 10447 - DNA, 228 bp, Oryza sativa
  Clone ID: PAT_MRT4530_16768C.1
atggcacctttttccttctctgtcctcaccagcgacggctacgatgatgccctctccttcccctcccatctcgccaggaggcttatgatggctactcttggggcattgattccgggggtgccaagatgcaagatcgatggattcgaagacggctatctgaactccagcgtcagccatgtgaatgcgacccatataaatgttgtttttgaaacttttttcctcgattag

SEQ ID NO: 10448 - DNA, 276 bp, Oryza sativa
  Clone ID: PAT_MRT4530_16769C.1
atgtctagggcttcatcttatgccgccggctctagttttgtggttagggagctgggcgataatagctcctccgcaccccaagcgcgctgccctcctaggcgcgcaacactaacaaaaacaggaaggtccagctttggcattggtgcacttgcaaagtactcctgccggctctgtgctctcgaccgacttccgcattctgcgcttcgcttcctctcggtcgaaagcaagcaagatgatgaagcgaagcttcgtagacaaggctcgttccgtgcttga

SEQ ID NO: 10449 - DNA, 412 bp, Oryza sativa
  Clone ID: PAT_MRT4530_1676C.1
ttaattacgctcgccaaccgaagcgacgttaccatatctccaggcgaagcaaatcggctcgccctgattcgtgcgctgctcaggtgatgtggcagtcttgaagagactgtcaccaggctttaggagtggcgtcacgcccgaccgcttcccttgagaagggcaatcgcccagaggcttgaggcagacacaatcgcccacgtggcctgacaccctcggggacgtcgggcccgagggtgaggtgtccgccctcctcctgatttccccgagggggggtcgggtgactcctgccccggccccgagggccgaggcgccccgaccccttgtgagatttcaccctaagcccccggccgaaccggcaaaggggggcctgtgcggtctcccggtgaggagccacgagctccgtcagtctccc

SEQ ID NO: 10450 - DNA, 501 bp, Oryza sativa
  Clone ID: PAT_MRT4530_16770C.1
atggccaggaaggtaatagctctcgcctttcttcttctccttaccattagcctatccaaatccaatgccgcaagagtaatcaagtacaatggtggggaaagtggtggtggcggcggaggtgggggtggagggggtggtggcggcaatggcagtggtagtggatcaggatatgggtataattatggtaaaggaggcggacaaagtggtggaggacaggggagtggaggaggaggaggcggcggtggcggtggcagcaatggaagtggaagtggatcaggttatggatatggttatggccaagggaatggtggagcacaaggacaaggtagcggcggtggtggaggaggaggaggaggagggggcggaggtggaagtggacaaggtagtggatctggatatggatatgggtatggtaagggtggtggtggaggtggaggaggaggcggagatggaggcggaggcggaggcggtggctcagcctatgttgggcgacacgaatag

SEQ ID NO: 10451 - DNA, 174 bp, Oryza sativa
  Clone ID: PAT_MRT4530_16771C.1
atgatgacaccctactcaattggtggcaccgaccacgctttgggtggtttggatagaaagaaacaatcgcatcttcaggaacatcgaatctacaccaccgacactcacaacgcacgtgcactcacccctatgagcatcttcgaagactgggccggcaaatcctggagagattga

SEQ ID NO: 10452 - DNA, 1142 bp, Oryza sativa
  unsure (1)..(1142): unsure at all n locations
  Clone ID: PAT_MRT4530_16772C.1
atggagccggagcccgaccacaccaaaccctccacctccgccgccgccgccggccaccgcaagcacctggccatgctggagcgcctctccaagcgcgctgccgcccccgccccgtcccaggactcccccgtcgcggccttcctctcccgcttcgccgccgccaagctcgccgccgagtccgccctctccgcctgccgctcctcccccgacgacgcgcagccctcgctctccgccgccgccgcggccatcgacgacctcgaccgcctcgtcgccgaggcctcccactccctcccaccctacgagctccgctccgccctcgccgccgcctccgacctccgcgccgcccacaggctcgccgcctccgatctccgccccaagaagtccttctccttcaggaacaagagcaaagcccccaagaacccaccgcaagatcctcctcccaccttgccgccgcctccagaccagccaaaccccagcgtcgaggcgatcctgccaggactcgggttccggggccggagggacgccacattggtgaaggatctgagggtctccgacgagaaggatggggatttcaccctcgctgatctcgtctcctgtcaggtttacctcaagggcaaatgccgggcgctgcacgttcacaagctgaaggattgccgcgtgttcgtgggcgccgtgttcggctcggtgctcatagaggacgtcgagcgctgcgcattcgtgatggcggcgcaccagatcaggatccacgaggcgacagcgacggatttctacctgagggtgaggagcaggccgatcattgaggattgctgcggcgtgaggttcgcgccgcatgctctcaagtatgaagggattggggaggatttgagggatgcggggctcgaggaggagaccggtaattgggcgaatgttgatgactttaagtggctcagggcagtgcagtcgccaaattggtgtttggttccggaggaagagcggttgcagaccattgacatttcagatgttcaggaacgagagtatgataattaagatgcttgggatggtttgctttcggctcttattatggattattgttctggattggttaattcttcttgatgtttacttggnttaaaaaaaaaaaaaaaaaaaaaaaaaaaaaaaaa

SEQ ID NO: 10453 - DNA, 366 bp, Oryza sativa
  Clone ID: PAT_MRT4530_16773C.1
gaacgattaacaccttgaaccggcagaatataagaggtaagtattagtcataataaaaaaaaaggcctgaagccttaaacctggagcacatacctggccaccatggatgccaactgacacccacccaaacccatcaaattccttggcaaaaaccaactagctaattgaaaaaaagcatattaaaatcttccaggcctcgaatggggtctatcgatgaccaaaccatgggactgtactggcctgcctgggtgattagatactgtacaacatctaagtgggacagcgagggtatggcaccttaatgggggttacatactgctagaaaccctttacacaacttaagggcatcactcagttagagctcag

SEQ ID NO: 10454 - DNA, 535 bp, Oryza sativa
  unsure (1)..(535): unsure at all n locations
  Clone ID: PAT_MRT4530_16774C.1
cacgcgtccgctcgttggctggcatttcctgcccccggggcggcaggatccaagcaagctagcacagccgccaccaacaatttcatcgcgaatcgcaagagcgaggagacgagaatacggccacgaatctgcatccgcttgcccgccccattcccccgtccaaatccaagcagccggcggcgggtgcggttcggtgaatcgaatcgtgggcaaattgttttgttccattccgctgctgcgtcctgctccgattcagttcgtgcgctgtcgataaaaccgatgcttcgccccgcgaaccctagctcggggtgctgcggcggcggcggcggcggcctgtagactgtagtggtggctgtgggacgcgagggtcgctcgctatgccgtggctggagatgtggctgccccccgcgggctcggggggaggaggagaggggatggggcgcgggngcctagttcctcgacggcgaggcggcgcacggagcgctcctcgcggcgatgcccggcatatccgcgtatgtcgatgtgcgacaaagga

SEQ ID NO: 10455 - DNA, 153 bp, Oryza sativa
  Clone ID: PAT_MRT4530_16775C.1
atggcggccaaggtcgaggcgaagatgcgcatgcccccgcaaaccgccaccgccgagggcggcatggagaggcacggcgaacaacgaggaaaggagcagcgcgacgagcggaagctgcagtccaacctcgacacgctggtgctcaccccgtag

SEQ ID NO: 10456 - DNA, 861 bp, Oryza sativa
  Clone ID: PAT_MRT4530_16776C.1
atggcgggatccggcggcggaggaggagtcgaggaggtcgccgaccaccgggagaagcggggcacgccgacgctgacgaccaccatgctcgccgctagggggccgccacctctgccgcctctgcctccgtcaccgccgtctactggctgccgctccccatccgctggccgccgtgcgctcgcccgcctgtcgccaccgccgctccgctcctccgctccactctgcttcaccggccgccgcacgcttgcacgccgcctccgccggccaccgctcagccctgctcgccgccatccgttccttccccgcggcaaagagaattatgacggttgtgagaaggggaaatgtcggaattgccccacaaccgtcattgggagagcatctggagcgtccacgccaaaccccaggatcaacggcgatcagggggccgccaacattgggcgcaatggctggccagagatcgaagtgtgtcgtagaggttacgcgttccatggtcagatagataattggttggttctccgctcacctccaccgcccaatggcgtctgcatgggaattattccgaagctcgtctccaccacccagtcgcatttggagaggggagtaggggctgtagggtgccgggtcactggagaggaagacgccccggccactggcccgtgccccggttcccttatccccttcaccgacgtggcgggcggagtgtccgaccccgccgctaccgccgtcgctctcacccgccacgggcgcgctgcacgcaagcggcttcacggcgacgagcactacagttgtgcgatggcttcatggcttcacggcaacgacgcgggtgcgctgcacgtgagtggcttcatggcttcacgatga

SEQ ID NO: 10457 - DNA, 5916 bp, Oryza sativa
  Clone ID: PAT_MRT4530_16777C.1
tgactgccctagcaagcatgttttggtggtaaaaaaagatggcgagtattcgtcggctagtgatttcgatgaagatacacttgctttgcttgcagctgaccacttatacttggcattatatttgcttacaggagatcaccatataaatggaggagaaatggtggaaaacacccgttcaatcagccagaggttaacaagtggcgaataaatgtacggaagggcacacaaacccaatgaaactcggccgaccgaggcccagcccagttggcccagaaattctccaggttggtaattaccgacctccaatgatggttgttaccatttcctgcgctccaaccatcattaggaggacatttgacaagaggggaagaaatatgccctttggattccatggagcatctctatccttccaagcaacctcgccctataaatactcctcttctccttcattcacaacacacactcccaggtgaaatgctacaacgtatatctgtgcgcttgcggatttacatctgtaaccataagaaataccgaataatgtttcaggcgccattgctaggaattatattactagttatgtcgttaagaaatatcaacatagaccttggcaatctgtcggtctatgttgatgttgctaaagctgccaaatccaaaagtgagaataataaaaatgcccaatctgttgctgataagaaaaatgagatcattttgaaaggaaaatgcttacttgctactatatctgatattaatgaattgattgcatcacctttgttgcttatgctttggtatgcaaggatgctctgattttacttcacgatatgcaatattatttgcctcctcctgctgctaggagaactctaatatttttccaagtgcgttaccaccggggctgccaccactttgagggattgagcaccagattgacctcatccctggtgcttcattgcccaaccgtgcgccatataagacgaatccggaagaaactaaggagatttaatgcgaagtgcaaaaactactctataaaggttatgtacgtgagtctcttagtccttgtgctcttccggtaattctagtgcctaagaaatatggatcatggcgtatgtgtgttgattgtggagctattaacgatatcaccattcgatattgtcaccctattccacgtctggatggtatgcttgatgagttgagtgctgttgttgtgttttcgaaagttgatttgcgtagtggataccaccacattcgcatgaaactaggggatgaatggaaaactgctttcaaaactaagtttgggttatatgagtggttagtcatgccctttggattaaataatgcacctgatactttcatgagattgatgaatgaggttttgtgtgctttcattggtaaatttatggtgatatactttgatgatatattgatttacagcaagtctatgggtgaacatcttgatcatttccgtgttgtttttaatgctcttcgtgatgcacgtttatttggtaaccttgagaagtgaaccttttgcacagatagagcttattttcttggctataaagtcactccgtagggaattgaggttgatcaagttaaggtagaagctatacaaggatggcatgtcccgaagactatcacacaagtgtgaagtttttaggccttgctagattttaccgccgctttgtgaaggatttcagcaccattgttgctccattgaatgagtttactaagaacggtgtgcttttcacttggggcaccacacaagagaacaccttcaacatgttgaaagataagttgacacatgcacctctcctccaacttccagatttttataagacttttgaacttgaatgtgatgctagtgggattggattgggtgatgttttgtttcaagagggaaaacctgttgcatatttcagtgaaaaattgagtgagtctgttctgaattattctacttatgataaagaattgtatgctcttgtgcgaactttataaacatggcaacattatttgtggcccaaggaatttgtcatacattctgaccatgaatctttgaagcatattcgtagtcaaggcaaactgaactgcagacatactaaatgggttgaattcattgaatcttttccttatgttatcaaacaaaagaaagggaaggataataccattgttgatgcattgtctaggagatatactttgttaacacaacttgactacaaaatctctagcttagaaacaattaaagaccaatatatgtatgatgataattttaaagatgtattgctgcattgtaaggatggaaatacatggaacaaatttgtcttcaacgatgggtttgtttttagagctaacaagctatgcattctagccagctctgttcctttgttgttatcgttgaaagcgctcggaggtgagttgattggggcattttggatcaaaaagacggaggacatacttgttggtcatttcttttggccaaagatgaggagagatgtggagagatttattggtcgctgtactacatgtcaaaaggctaagtcccacttaaatccacatggtttgtatatgcctctagttgttcctagtgttccttgggaagatatttcaatagatttggttttgggattgtctcggaccaagaggggccgtgatagcatttgtttttattgtggatagattttcaaaaatgacacatttcttaccatttcataaagctaatgatgcttcacatattgttgttttgttctttcgagaaattgttcgtttgcatggtgtaccaaacataattgtttctgatcgtgacactaaatatcttagccattttggagaacgtagtgggctaaattgaggactaagcttttattttttattacctatccccaaattgatggtcaaactgaagttgtgaatcgaaccttgtatactatgttaagggttgttttaaagaaaaatattaagatatggaaagaatgtttgtctcatattgaatttgtttataatcattagctggattctactataaagatgtgcccttttgagattgtttatgggttattgccccatgctcctatgatttaatgcctttgccatcttttgaaaaactaaattttgatgctaaacaacgtgctgaattgatgtgaaaactacatgaaacaactaaagaaaacatagagcgcatgaatgctaaatataagcttgctggtgacaaaggtagaagggagctaagttttgaacatggagattttgtttggttgcatttaagaaaggatagatttcctgacttgagaaaatctaaaatgatgcctagagctgatggaccatttaaattgttggcaaagattaatgaaaatgcatataagattgacctgcctgcatatttttgagttaactatcaggtgaactcgataccattattacctggggcaaaacctgtgaaccttcgaccctatagatataatcctgctcagaagggtgaaattgaacgacaagtggttgaaatgcaacagcaaggtattattcagcacaactctagcccgttctcttctcaagtgctgcttgttcttaagaaggatctgacatggcgcttttgcatcgattatcgccatcttaatgccattactgtgaaaagtcgatgaacaaaaaacacagcgtttaaaactcacaatggccactatgagtttcgtgtaatgtcctatgggttaacaggagcaccggccatattccaaggattgatgaatatgattttggctcctttacttcgtcacggtgtgcttgtgttcatcgatgatattttgatctacagcagtactctggcagagcatgtttctttgcttcgacatgtgtttcagctattggatagtcatcagttgaaggttaaaccaagtgcttgttttctcagtccagctcaacttatttggggcatgtcattagtgaggctagagtttcgactgatcccaagaatattttagcagtgcagcgatgggcagtaccaaccaatgtcaaggaagtgcatggttttctgggattagcgtgatattatcgcaaatttgtgcgtcattttggtacaatcagtgcgtccactgactggtttacttaagaaacattcagtgtttgtgtggacgtcagaccatcaggcagcctttgaggcactcaaagcagctctgacctcagctccggtgcttgcattaccggatttttctaagacattcgagatcgagactggcgcagttctcttgcaggctggacatcccttggcatttttaagtaaagcactggggcctcgtaatcgcaggttatccacatacgagaaggagtgcttggcaattcttttagcagtcgatcaatggcgttcttatttgcagtttggggaatttgttatcagaacggatcaaaggacgatgacaaaattattggtgatcagcgattggctactcagtggcagcaacaagcgatgacaaaactattgggattgaattatcgcttggtctatagaaaaggattggagaataaagcggctgatgctttatcttgctgtaatcatgttggggaactacaattgtcggcattatctgtttgtattcattcttgggtggaagaagttcagaatggttactctacaaggggtggagtactgttagcctcaactaagatcacgttaggagatggggcaagaacaagtttccggaacgatcactggcttaacggattatgtccaaaggatgtcactggccgtgcaactggatttgttgtctttgcacatggtattttgcgttacaagggtcgaatttggataggtgttcactctgaattgcagcataaaattctgatggctttgcattctagcgttattggaggccattcaggaattcaggtcacatacagcagaatcaagcgtttgtttgcttggccgggattgaagaaagcggtgcatacgtttgtgactgaatgtgctgtttgttctcaagcaaaggcagaacgagtgaagtatccaggttaattacaaccattaccggtgcctgatcatgcttggcaaacggtctctctcagattttattgaaggtttgccgaaatcttctacatttgactgaattttggttgtggtggataaattcagtcgttatgctcattttgtggctttagctcatccatttacagctttggatgtggcgctggtatatctcaacaatatctacaagcttcatggattgccccaagcaataatttcagatcgtgatcgcatctttaccagcacattatggactgaactatttcggcttgctgatactcagttgaaaatgagttcggcttatcacccacatacggatgggcaaactgagcatatcaaccagtgccttgagacctttttgcgatgctttgtccatgcttgtccttccaaatggtcacggaggctagctttggcagaattctggtacaacactacacatcactcagctttggggacatctccgtttgaggtattgtatggtcatcctccacgacatttcggtgcgttggatggagctacttgtgcagtttcagatctagaggaatggcggcaggagaagggaatgattacaggccttcttcgttagcatttgctgcgagcacaacaacgtatgaaatggcaagatgacatacatcgctctgacagggtttcagtgttggagattgggtgtttttgaaggctcaaccttatgcgcaaacttccttggcatcatgagctaatcataagttagcttttcattactttggcccctttcaggttgtgagcaaagtcggtactgtggcgtatcaattggagttgcctactggttgtgctatctatcctgttgtacatgtgtcacagctccgcaaggcattgcctccaactccatcaaatcctgttcgtagtcagcaccaagctaggcagagtttcatgtatcattttta

SEQ ID NO: 10458 - DNA, 1095 bp, Oryza sativa
  unsure (1)..(1095): unsure at all n locations
  Clone ID: PAT_MRT4530_16778C.1
ttttttttttttttttttttttttttttttttttttttgtttttttttaaagacaaaggaattagcaatgtatactcgcattccacaacagtcgaagggcaataataagtcttaacatccaagtttaaaccgaacagaaaatagagttttaaatgactgacatagtgcacaaagcgagcagatattaacggtcaatgcaacaactgaaatgaccgtcgacaaaacttaacgagtactaaaagagctagatatctcaaatgcagatatggaaagcaccacttgaacgaggctcatttcttcttggcggcagccttggtcaccttggcaccgggtttgggtccttcttctccacgttcttgatgacgccaacagccaccgtttgcctcatgtcccgcacggctacgccccagtgcctggactgccaccacctcccacattgccgtcaagtttgctgagctggtgaccaagatcgacagacgatctggtaaggagctggagaaggagcccaagttcctcaagaacggtgatgctggtatggttaagatgattcccaccaagcccatggttgtggagaccttctctgagtaccctcctcttggtcgttttgccgtgcgggacatgaggcaaacggtggctgttggcgtcatcaagaacgtggagaagaaggacccaaccggtgccaaggtgaccaaggctgccgccaagaagaaatgagcctcgttcaagtggtgctttccatatctgcatttgagatatctagctcttttagtactcgttaagttttgtcgacggtcatttcagttgttgcattgaccgttaatatctgctcgctttgtgcactatgtcagtcgtttaaaactctattttctgttcggtttaaatttggatgttaagacttattattgcccttcgactgttgtggaatgcgagtatacattgctaattcctttgtctttattttcgcttgtgctattcgctgtttctgctgctattggatactggatcgtcttcctgttaatgaaaagtgaactttttgaaaggtattgaaaactgcnaaaccgagtgggtgtcggtttagccaaaaaaaaaaaaaaa

SEQ ID NO: 10459 - DNA, 251 bp, Oryza sativa
  Clone ID: PAT_MRT4530_16779C.1
gaaaaaccaaaaatttttaaactgggtaaccaaaacaaagggttaaagcccacagggaaacattggtaaaagaaacaacaaaatttttcttttaagggaccacaaaaaaggggcccagcaaggtcaaaaggtcacaagaaaaaaaaaaaggggggggaataaaaccccccccccgcccctggtccgggggaagtgaaaacaccggagcttgaacacggtgggggccttgggggaggcaaacacccggagcc

SEQ ID NO: 10460 - DNA, 401 bp, Oryza sativa
  Clone ID: PAT_MRT4530_1677C.1
gtgacaattcactagttgtattttcatgcatctgttcaactcaatcaaatgttagtactgttattctatatattggaatcttaggtaaatggttactgactttgtatgacaagtaggcacttggacgcctgttcttttattgtgttgaattcttaacttgcatctactgttatcactgactgaatgtttgcgacagtctattttacagcaatggaaaatagaaaattaattatgtcagatatatttatgtgtaaactttatgccatttatgtatactgctgagaaaaatgatatgggagaatggattctttggtacatcaacacatctttacaatgctaagaattcataaccttatgattgacttcgttcatagctgacggtttcaaaaaaaaaaaaaaaa

SEQ ID NO: 10461 - DNA, 243 bp, Oryza sativa
  Clone ID: PAT_MRT4530_16780C.1
atggagctgcacatgaggcggacggcagtgaggatctccgcctccaacactggccgcccggtcgtgttccgcctcagccgaccgtcgcctaggggatctccgcctcaatcgcctgctggctgctgccggccgcccggtccagctccttcgccgccggtcgcccgggagagctccatctcagccacctgtggcgtgggcaatctccgcatccgtagtcggatgctcggtaagtactcctggtag

SEQ ID NO: 10462 - DNA, 435 bp, Oryza sativa
  Clone ID: PAT_MRT4530_16781C.1
ctacatccccaccctgcgctgctgactacccatcccagtgcgccaccgctcagccttgtcggcaccggaagccgccaatggctctggcatgccccctccaaaacccctaccctgctccaccatggcaccaacttctaaccctaaaactataaaacctaggtcctctgctggagttttatcgtccgaggtcacctccaccgcgccgtcctccagccccgcgaatccggtgccgccgccggtgcctcgccgcccaccgccgggcccaccccaggaccctaattcttcgccggagtttgggttgtcgccggcaccggaaaagaagaggagttcgtcggagttggagaagaagcagctctctatgactgttgggttctggctacttgcattatgggctataacatctttaacatatgctttggattgactatgacccat

SEQ ID NO: 10463 - DNA, 715 bp, Oryza sativa
  unsure (1)..(715): unsure at all n locations
  Clone ID: PAT_MRT4530_16782C.1
aacgcccgtttcgccccctcggtctgacccgtttcctgcccaggtcctcccctctttgatcattggtgttcctttatctcggttattcctgttgctgtctggggtctctgtgatttgtcctccgtacgtcctctctctttctcccctgctcgttgtagtgtatccctttgtcctctgtcgtctgctgcgtcctccttcgtaccatgtcattatccttgtcgtcttagttgtcctgttctgttggttgtcctccttctggtccagcatccgcttcgcgctcgtagtattgccatgtattaataattgcgttgttgtttctgtcgtagctgtcgctgctgtagtgttaacattcgtcttctgttggtatngttactagagatcatgtagttanagtgtaacccttgttctttgtctacctatttcactcnatgctcctacgtattctcctctcgccncctccttcgctccatggtatcctctcacaccccctatgtcgctttctgtccttatccctttattcgtttccgcctctcactcttgggtctcctatcactgctcctgtcgctgctcttatgcgcctgcgtaacatcccacttgctactttccctccctttaacctgtgtcttccacctcactctactagtaaacttccttcccactactttagctcttccattctttccacacacaaacctccttgcatttgttatatctn

SEQ ID NO: 10464 - DNA, 798 bp, Oryza sativa
  Clone ID: PAT_MRT4530_16783C.1
atgcggtggctggcggctgcccgagcagcgtcgtcgccgctgccgtcttgctccatgtcccgacgccgccgccgctgccactggagccggccgagctcgtcgacccgctggctcatgaaataccaagatctggcagtcctctgctggggcctgttcctgttggaccagcggatccaacaaccacgcaaaaaaaaaaagcagcagcggtggtggcatggatggagcgatgaaattgcagcgaacacgccgctgctaccggagccggccgagctcatcgacccgccgccgccgcccaccacctgcacccgcgcggcgccgtgcgctgacctgcgcccgacggcccgagagcccgagagagagggaaagagagagagagacagcggcgccgctccccctccacccaccggcggcgccgcttcatctccctctcttcctcccaaccgtcattcccctcgccctctctcacgcctctcgcgtgatgggtccggcgacggcgaccgcaggtggatccggccgcaatggtggcggctgaggacggatcaggcggtggcggctccatccgacccctttcgcctccctcctgtggcggatctgacggcagtggcggtgtcggccccattcctagtgtggcgacgcggccaggagcggcggtgggctcgggagctggtcgcggtggaaggcggtgatgcggacaacggcaatggcaacgacgacggcgatgacgaccacagcggcagacgacgacggcggcggcggcggcgaccacggggaggactgctgtgggaggtggctagggtt

SEQ ID NO: 10465 - DNA, 342 bp, Oryza sativa
  Clone ID: PAT_MRT4530_16784C.1
atgcatggttttgttagaagcacctcggccactataaggactggtcttcgggcctctgttgtgaagtataacagtgcaaccacaagtctaatggtttgttgtggtgtacccccggcttttcctggaacggggattaatacactagcattcgggaaagctagttctacactagatgcaacttcagcactcttgcaggaactaagtaaggattttgcattgaaagatcttggtgacctacattacttcttggatattgaggttcacaaaatgtatattgggcagggtctccagatgatagaagatccatatgaggttttgttgtattcttgggacctaatctag

SEQ ID NO: 10466 - DNA, 489 bp, Oryza sativa
  Clone ID: PAT_MRT4530_16785C.1
atgggagtcaccctgggtagcggcggcggcaaccgccagatccgtgccgcctcggccggatctggtggggtggtggccggtggcgggaaaggcgtctacaacgacggcggggatggcgacggcgacatcagagtctcggcgaaggaggcggtagggatggtgacagcgatgggatggcggcgggcgaagaccgcggatccagcagcggggcgcctgaatctggcacccccacgctggatctggatggtgcaggcgagcctgcgcggcctggtgcggctggcgggctggcaggaggatggcgtggccgtgggtgacggtggggatgggccggcgctacgaggcgacagcggcgatagtgcacagaggagtggtgccacctggctggcacggccggcgtcggcggagacaatgcgcgggaggagcggcggcgcggcccgggagactcgcggcgacgacgggcagtcagcggaaggagcagcagctggctag

SEQ ID NO: 10467 - DNA, 148 bp, Oryza sativa
  Clone ID: PAT_MRT4530_16786C.1
ggataacaatgggcattattcgataggacagggggaataccggatcagatgtcccacgcgagttaactattttacagggccgaagatcaaaagttgaatattgaggggtagggcaacacccagtccatccaaggattgcagctaacat

SEQ ID NO: 10468 - DNA, 1494 bp, Oryza sativa
  Clone ID: PAT_MRT4530_16787C.1
gacatgaactagtagaacttcgtacaaaagatgcgcatatacgcatggatccacaccaaatagcagggagggggtcatctgatctctgctgacagcgagaccctgatttattctgcagtgacataaacacaggacacgcaacagtaacacgacatgcatgcatggtcgaactcgaacagtgccaaatgcaagcacaggtgacggatcgatcgatgcttttgttgacggtctctcgatttaccaggggaggatcttccagcgctggttgtcgcccttacaccactcccagagcacgacggtggtgccgtcgtggacgccgccgtggtccttgtcgccatggaaggcgtcaaagttgaggtagatgttgttcaccatgcggacgcagcggaagccatggccgacgtccttgctctccgtccacagcaccgactcgtccaggtactccgggttgtatggcaccagcctaacagggtggctctgtccgagggagtgcttgatggcttccccggtggccttgttcaccagcgcgaacgccgggtagccttcctcgtccttgatgctcgtgctgtgcctcatgtccttcacccagtgctggaagtcatccctgggattggttggtgcaaggcagacggcgccgttcctgacggtgaggctgtacgcctcgtcggccctgcacaggatgcgcacggtgggctccgacgccagcgcgcggggcagccggttgccgtaccctgcaccgggtggtccgaccggcggtggacggtagccgtagcccggctcatcgtggctcggtggcggctgcggcgggtagaacgcaggtgcggggtggtagccgtggccaggttcacggttgggcggcggcggcgggtatgcctggtgcccgtatgctggcggcggcggcggcgcgtacgcctcggggccccaggggaggatcttccagcactggttgtcgcccttgcaccactcccagagcacgacggtggtgccgtcgtgcacgccgccgtgggacttgtcgccgtggaaggcgtccaagttgaggtagatgttgttgaccatgcggatgcagcggaagccatggccgacgtccttgctctcggtccacagcaccgactcgtcctggtactctgggttgtacggcaccagcttcacggggtgggattggccgagcgagtgcttgacggcgaggccggtggcgcgattgacgagcgcgaacgccgggtggccctcctcgtccttcaccctcgtgctgtgccgcatgtccttgtaccagtgctggcagtcgtcgcgggggttggttggcgcgaggacgacggcgtcgtggcggacggtaaggcagtacccctcgtcggcgcggcagaagatcttgaacgtcggctcgtgctggggaccagtcgccggaggctggtattggccgtggccgtgcccatggtggctgaacatgctagctagcttccaagggccggcgtctggttgtctcgctggtatcccggccgg

SEQ ID NO: 10469 - DNA, 245 bp, Oryza sativa
  Clone ID: PAT_MRT4530_16788C.1
actggattcgaagagaggtaaaaatagcaggatagctaacctgaccagactggtaagatacaattatacaaacgcaaaggatgagaataatgcaccttcaatctgacaaaacatacccagtttgacccctactatcactatactacctctaccatagcaactaaactagagcatagcagaaattgtaaaaaaaaaaaaaaaggattacttagtcaactacactcgttgattcatcaatgaataaa

SEQ ID NO: 10470 - DNA, 199 bp, Oryza sativa
  unsure (1)..(199): unsure at all n locations
  Clone ID: PAT_MRT4530_16789C.1
cccacgantccgccggcgaccaccgcccgcngcgcgatgggcggcgccgccgtntccagcctgcttgccaccccaacaccgacctctngacctcgacccatntccaccaccaccgcccccttntccgtcaacntntccaccgcagatgcccgcgcacctnnactcctcctcctntancgncgccctcancatcncccag

SEQ ID NO: 10471 - DNA, 1353 bp, Oryza sativa
  Clone ID: PAT_MRT4530_1678C.1
atgccgaggacgacgtcgcggctgcgatgccgaagatggtggaggtgtggccgaccggtgcacgggcgaggagggacgggcggccgaacaactccggcgaggcggatggagaggttcgcggcgatgtgcggcggcttccgggcgaaaccgaggggtggacgaggtggagggctacgtcaccgtgccgagggagggacggcagcgccggctgatgcacgggcgcggcggaagggggctgccggaggagacgtcgacgaggaggaaggagaggccggcgcgggcgacggcgttccggagaaattcgggcgacgccgtggcctggccgggaaagaggacggcactccggtgccgggagaggtggtggcgacgtcggccggcgcacagggacgcggcagaggcgggcggaggcggaatcgtggcggcaacaccacggttgccagcggggaggcacttccggaggtctccgcggaaaacagaggtggcggtctgaacctttctgctgacaacaaagagagtttgattagacccttcaagattgaggagttagataaggcgcttcaggaggcaaaattgaacactgctcctagtccagatggttttagcatccttttttgcagagcttttggcctcaagagattcattcttgagggctgtgtgacaatccatgaggtgttacatgaaatgaggactaaaaatagagaagggattattttaaaaattgattttgaaaaagcatatgatagggtcaaatgggagttcttgatagagattactgccacaaagtttatcctttattgctttgaagagatggctggtctaaaaattaattaccacaagagtgaggttttcactatagggttagaggaatctgatactattggagcttctcaaatgcttaattgtcctataggtcactttcctatgaaatacttgggcttgccaattagccctgagaaggttttaaatcctgattttgatttcttaggtcagaaactagagaagagattgggaaattggggacctggtagtctttctcatgctgggagagctgtgcagattaatgcttgtatgtcctctattccttcttatgctatggggttctatcttcttcctgaaggggtgcatcagaggtttgacaagataagagggaggtattactgggctggtaacaaattgaaaggtaaatatcacatggtcaaatgggaagacatggcttttcctaaggactttggggggcttggttttactgaaacaaggaggatgaatgcagctctgctggccaagtggattattaagttggaatccaatgatcagagtttatgccttcaggtgctgaggggaaagtatatgtag

SEQ ID NO: 10472 - DNA, 223 bp, Oryza sativa
  Clone ID: PAT_MRT4530_16790C.1
tttgacgcaatgtgtggagagacctaccttttgagtttagggttgttgcaaaatgcctgctgcaatgctgtgatgaattgtgccggagtgattggggacaatgctggatgccccttgtgtgccttgaattgatggaaatgttgctgggtgatggaactgattgggtgactgagtgcgaatgtgcacctacatgttagccatccaaaaaaaaaaaaaaaaaaaa

SEQ ID NO: 10473 - DNA, 1315 bp, Oryza sativa
  unsure (1)..(1315): unsure at all n locations
  Clone ID: PAT_MRT4530_16791C.1
gctgtgttttttttttttttaatcagacgcttngaaacaatctgtatttcacctctatttgataaaggtcccatcaaattaacattactatgaattgtcatacacctaacagaagactagtaaaacaacaattgctaggataagtaactgaataggacgtccatattgaacttgatactgagacctctgaagtagccgacggaatgcaccaaggcaaccataaagtttcttattgcagttatcctcatcatcagaggtgctcaagcaacttttgcttctttgaaacaacccatcaaacccctggcacgagcgagaatttgtcagaggaagagtttccacaacatcctgttggtcagctccagccaacttcttggctccattctttgtcttcattcttgtctttgattggaaggcattcattaatacagaagagctagggctcttaaccaaaggtaccttgggcagatcatcaaatgattgttcatcgatgccattggcctcatcaggaattgtaatagtccatgatccaatatcagcataggcacttgccgttctcctatgacctggagctgtctcctccttagttgacactaaacctgactctgctgagcccgaagaatcattcgaactatcaattgaaacaccctttttcacccttcttgcattgctaccaacctcaatgtcaccagcagatgtaattgtaaccacctcatcacgtttttgataagttcctgctgaaaggaaatgagctaactcttcacgttcaccctcatccaagcgaacccagctaagagggccacgcccttcagtagtattggattctttcaagaacttctccacctctaggatacgatgcccaatggctgaaacaaagtcatcatgccgagctctagtatctttgccagctaacacaacactataatttgatttaatagcccgctgcaactcatcaagcgaattggtgtcaagcccatatctgaagtctaaacaaatcaacgcatagtccatctgccacttggcggtgccgagcgccgtgtgcagctcgcggcggagatccccagcggctcgcccccatccaccaccaccacgttccgccgccgtctccaccgcgccgccacctacttctttcctctcctgcaaccacctcctgtacaccgactccatccggtcggcggactcctgcacctcctcggcggccgggaagaaggggtccttctcccagcggtcgaacgacgtggccatctcgctggggactcggggggagatagattcgtgggaaggcgaaatcgaatcggagatgcgtcggccggtgcaa

SEQ ID NO: 10474 - DNA, 594 bp, Oryza sativa
  unsure (1)..(594): unsure at all n locations
  Clone ID: PAT_MRT4530_16792C.1
tccgaaaaaaaacgagagagagaganaaaaaagggcgaataattccgctgttgcttcgctgccttttgccttcttcctcctcctctccaccaccaccgccaccggccgacgcatctccgattcgatttcgccttcccacgaatctatctccccccgagtccccagcgagatggccacgtggggggaccgctgggagaaggaccccttcttcccggccgccgaggaggtgcaggagtccgccgaccggatggagtcggtgtacaggaggtggttgcaggagaggaaagaagtaggtggcggcgcggtggagacggcggcggaacgtggtggtggtggatgggggcgagccgctggggatctccgccgcgagctgcacacggcgctcggcaccgccaagtggcagcttgatgagttgcagcgggctattaaatcaaattatagtgttgtgttagctggcaaagatactagagctcggcatgatgactttgtttcagccattgggcatcgtatcctagaggtggagatagtctttgacgaatccaatactactgaagggcgtggccctcttagctgggttcgcttggatgagggtga

SEQ ID NO: 10475 - DNA, 3306 bp, Oryza sativa
  Clone ID: PAT_MRT4530_16793C.1
cccccttccttttagtttcatcagctatgaattgtcatacaccttacagactgctgatgaagaagtgcaagtcaatcgtgagacactagttgatcaaaaaacagtcacaaaattgccttcatggcataaattaagactagtaaaacaacaattgctaggataagtagctgaataggacgtccatattgaacttgatactgagacctctgaagtagccgacggaatgcaccaaggcaaccataaagtttcttattgcagttatcctcatcatcagaggtgctcaagcaacttttgcttctttgaaacaacccatcaaaccctccggctccaaccactcggcccaattcaaagcaaagccgccattactgctcctcttccattccactggggacgtacgagctccgcgcatcccttccattccattactgaccttggctgctgcggctgcagtgcagagggggtttggtggtgcggttgatttgagcaataaattctctaggggggagggaggtatcggtcatggctgccgctgctgcaaggaggggctcatcgctgctctctcgctgcctgctgtccaggcccgccgccgccgcctcgcctgctgtcccctctgcgctccgcagggcagatgggacacaaggattgttgccgggaatccttcagaggttcagcactgcagcagtagcagaggagcccatatcacccccagtccaagtgaactacactcagctcctcattgatggaaaattcgttgattcagcatctggcaaaactttcccaactctggaccctcgtaccggggagctgattgcccatgtggctgaaggcgatgcggaggatattaaccgtgcggttcatgcggcccgcaaggctttcgatgaagggccatggccaaagatgactgcctatgagagatcccggattctgttgcggtttgctgacttgattgagaagcacaacgatgaaattgctgcattggagacatgggacaacggcaagccgtatgcgcaagctgccaacattgaagtgccaatggtggcacggctgatgcggtactatgctggttgggctgacaagatccatgggcttgtcgtgccggctgacggcccacaccatgtacaggtgctgcacgagcccattggtgtcgcaggtcagatcatcccatggaactttccgcttctgatgtttgcgtggaaagttggccctgctttggcttgtggaaacactgttgtgctcaagacggctgagcaaactcctctgtctgctctatttgcttctaagctgttgcatgaggctggactcccagacggtgttgttaacgtggtatctggttttggacctactgctggtgctgctcttgctagtcacatggatgtcgataagattgcattcactggattcgaccgatactggaaaagtcgtccttgagttggctgcaaggagcaaccttaagtcagtgacactggagctaggaggcaagtctcctttcatcatcatggatgatgctgatgttgaccatgctgttgagcttgcgcattttgcactgttctttaaccagggacaatgttgctgtgctgggtctcgtacatttgtgcatgagcgtatctatgatgagttcgtggagaaggccaaggctcgtgctctcaagcgtgtggttggtgatccattcaagaatggtgttgaacagggccctcagattgatgacgagcaattcaacaagatcttgcgctacatcaagtatggtgttgacagtggagccaaccttgtgactggtggcgacagattaggtgacaaaggttactacatccagccaacaattttctcggatgtacaggataacatgaggattgctcaagaagagatatttggccctgtgcagtccattctgaagttcaatgatctgaacgaggtcatcaagagggcaaatgcaagccagtacgggctggctgctggggtcttcaccaacaacctgaacacggccaacaccctgacccgcgcgctcagggtcgggaccgtgtgggtgaactgcttcgacgtcttcgacgccgcgatcccgttcggcggatacaagcagagcggcatcgggagggagaagggcatcgacagcctgaagaactacctgcagatctgcgctggcgacggcgaggatggaaggcagtggggctcaacggcaccgtgggtggtgccgaggtgcggggtccgccgtgcgaaggccccggggctggtgctgctcctttgccggcgtcccgcagagccccggcctccgtcctatcccttcttccacctcgtcggccatggcgtcttccctggcactgggaggagtgggtggggtgcggccgggaggaagctgccgcccaattccccctcgatctcgtcgtttcacagctcgccgacctcgtcgaagctggccgggcttggcggcctcatcgacccccgctgcatcctctcccccgcccgcatctcgcccatcaatctcgacgactttgtgtccccgctcccgccgccgccggtgatgcccgcagcggagacagtggtggtcccggcggagacggcggcagtggtggcgccgttggtggtggtctcgaaggaggcggattcggcgggcgacgaggcgctggatctgaggcttttcctgcaggggagggatgggaggtgcgtggtgatggagctcgacttcggggtgctctgcgacaacatcaccttcttcgtcgccatggcgccgcacccgtcctccccgccgccgcctctgttgtgcgtcggcggccttcttccctcggacagatctgggagaggagagaggaggggatgggagggcaggggtggcgccgccacttccttcctctggcgtcgcccagtcgccgaacccggtcgtcgccgccggtcaccgccgccgtcaccggtgggggtgtcgagagggaggagaggaatgaggaagggatgtggagagaagaggagttgaaaacacatagatgtttggacatttcagaactggggaaagaaataggtataatcttatggacgtatgcgaaaatggcgataaattatggcgataagaggaggacgatgatgaagaagatgaagaggaagaacagctgaaataagcttgtcctagcatggggctggcattgtctctaataaaccttgtggttggtgctcatgttactgatggagtatattgtagaagcagatttatgttcattatgaaatatatatcgcttgtttgggataatgctacagtttgtgctgctctcacaattttctcacaagctacttatgaagctacctcccagcgattggacaacaaaa

SEQ ID NO: 10476 - DNA, 416 bp, Oryza sativa
  unsure (1)..(416): unsure at all n locations
  Clone ID: PAT_MRT4530_16794C.1
tggcgggcccccggngccccgggccccggcaatgggcggcgacccttctgcctaggaagtaaggattgcgatttttggaggggcttttttacaaaatggccncgattaagcgggtgaaatacaaatactgctactactactacgaaaatacgatcgtcgtgtaggaaatttccggattccnctancctctgccacttgcaaattcaaaacttgggatattttaaatttgaggtaaacattctgaacagagatagatgctagagagtgatttgagtcncncgagatcactaaagttggtgtgaacaacaacacggtgtgtatcncttttcagtttgtaataatagaaacaatgaggtgattttgtttttttttttaaaaaanaaaaaaaaaaaaaaaaaaaaaaaaaaaaaaaaaaa

SEQ ID NO: 10477 - DNA, 450 bp, Oryza sativa
  Clone ID: PAT_MRT4530_16795C.1
acaaaatctgattttgtaaagcacacctcccctttttcctccctttttctccaaaaattcggggcaaaagaaaacggattcccattcctccccttcaccagtcttaaaccaaaaaccccaccccaaaacctcccaagtgacggcatataatatgaggaaaaaaaagcagggtactccagagccgccctggcgaacttaaagttgaaactccccatgccacacccgctaggggggctgggcaggctagaaccgaaagggcgcgggcttgcagggaccctcaactggaacgctgaggtaatcatcctgccacccgaagagcttgggcaggctggcaccaaacttgcccaaggggagggcgggcacctcctcctctaggtgctggggaagaacgcaccctctctctcgtactggccagggctcttctccttccacagctcaaggtgggggggg

SEQ ID NO: 10478 - DNA, 238 bp, Oryza sativa
  unsure (1)..(238): unsure at all n locations
  Clone ID: PAT_MRT4530_16796C.1
tcgcatcactatgacttggtagtgatatagtgtattgaggattgagccatactctcgctcctagtgacatagttgatcgatgagttagatgtacctgttacctgctcctgtgtgatctgaagatggatgcgtggtatcggctgatgtgggatgaaaggcttgctcgctcttgcctgagattggattaaagtattgaacaaaaaaaaaaaggaaaaananaataaaaaatataaaatag

SEQ ID NO: 10479 - DNA, 417 bp, Oryza sativa
  Clone ID: PAT_MRT4530_16797C.1
cccccgggctgcaggaacttcggacagggatttgggtaaccttatggaactcaagtacttgaatttatcaggttgtcatatgagaggacaattaccggcatcttttggaaggctaaaatcattggtgtatctggatttatcatgttgtagttacttttaggtatacctcaagctttgcgtggcctaaccaacctggaatatttgaatttgtcaatgccaaatgaacaagaatggtgtggagacaggttgcatctcgcagggttgccagaagtcattggtagtctaataaaactgagagaactgaatttagtacggtgcatggattatatcttgggcaagtaatcaatagatcaaaccgacagtttcattgaccgtatcagcacattttccaatctggagcatctggacttgtcagag

SEQ ID NO: 10480 - DNA, 573 bp, Oryza sativa
  Clone ID: PAT_MRT4530_16798C.1
atgaggtgtactacgtacgtactacactcttggttcattgtctctgatatgtgtgctaataatctaatcgatcgaccacttgttcttgtgtcgtacaacaaaattaaactagcaatttctttgctgatggagccttcatcaaggtttggattcacgataaacgacggcgcgaaattgaagcttgatgagagactctcgctgcctcctaccaagttggatcgaaaaaaaaggaaaagaaaagggttagcaaaaccgcccatggaaatcgaatcggctctctcgagcgcccacagatgttggtggctgtgcgcgaggaggaagacgacgacgtacgacgaccacctccaccaatcaccagccagtgcgtggggcccacttaagcctagctatagctcgtacgactataccgtgggggccccacgcccaggtcgctgggggccgccctcctctcgccgcgtgcacttcctcccggaaacgagcgttgcgattcgcccgccgatggatggcgatgacgacgctgacaaccaccgccacgcgctgtcatgtgtcccccacacgcaccggatttataat

SEQ ID NO: 10481 - DNA, 403 bp, Oryza sativa
  unsure (1)..(403): unsure at all n locations
  Clone ID: PAT_MRT4530_16799C.1
cttctccttcgcaacaagagtccgcgcgacgcaagtnaagncaccgccaccgagaatggcggatctcacgggcggcggcggcggaggcggcgggagcgcggggagccgtcggccgctgggtttcctgaagaacgcggcgaagcacaagcacgggttcgtgcagctgctcctgatggggagcgtcctcatgatgagcctgcggaccctgggccagaagcaccgccgccgcgacctcatctacgacaacgccgacctccgccgcgagcacgacgacctatccctccggatgcgcgacgtccaggacgccctgcgccgcgaggccgacgccgacgagtccggcgcgctcgcctcccatctccgccgcatcttcgccgcccaccccgcctccaccgatgacaagtag

SEQ ID NO: 10482 - DNA, 270 bp, Oryza sativa
  Clone ID: PAT_MRT4530_1679C.1
atgccttgccaaattgttggccaagtgcatcctcgtggttgtgcgccatcgttatctgcggccttctcgagtcgccaccttcgcatcctcctaccatggtcagctaaagaagctgaggtgaccggcaaggagcggcacgaaatatttgtgcgggtgaaggaaagaatatcggcctatacagaaggattcttgaggttcataagagatagccttatcggcgaggtcaaccatgtttcgattcaggtgataaccaacggaggggtggtgtaa

SEQ ID NO: 10483 - DNA, 958 bp, Oryza sativa
  Clone ID: PAT_MRT4530_167C.1
ttttttttttttttttttttagggcaatgaaaatgtcagtcggtgttatccccctcgacaattcaagtagatatattttgcgattggaaccggccttcatcaaacgataaaacctggttgggaacatgtcacgattttagcgccactttgtcctatgaagtccctgagttaacgacatgccgaagggtcagccagtagctgtttaaaccaccactgcaataaacaaagcacaaaaggcagctggctagcagtccagcacattggagcttctggtttttggacttaatttatctacatggggtacaagcaaagatcacattgaataccctgaagcttccgcgtaaaacgattgacttttgaagaatcgcttgcgaagtgcagtactcaaatccgtatttgaccatcagtgcccactcacgctcattactgttctccagcaatcaccggtgctccaggctttagctggcttctcaatccatgggccattcatgatatttaggatgctgcatgcatcactatattccaaatcaggcagcaacttgggcgtcaggaggaagcactgtggagtgtttggctgactggctgctctcacaagctgctggaacatcttcctctcgtttatgggatccattccttgatttatctcatcaacgacccgaaaggggcagttggtaagatcttgaagtgatacaaggtacaggatggttgaaactgatcgctcccctccagattggtgatgagcgctcaacacctgcaactgacctgtttgcctaaacttgacctttataaggatgccatattgctcaaaatcaagaccatgttcatcaagtgaaacttctccagcaacagccatttcttgaaagttacgactaaacgtgctgtttatttttgaaacaagagtgcgcagagttggaagccatttgccctttgtagcctctatatcagagtagcatctttc

SEQ ID NO: 10484 - DNA, 591 bp, Oryza sativa
  Clone ID: PAT_MRT4530_16800C.1
tcaactagaaggaggatcaaagaccgtataactctacgtcttactactatatcatcgacatcgatcaacaagcctcgcttctaacaccctaatactgtcaccacctatattcgtcgtctaacagtcgatactatacgaacaagtcaaccaacaactttacctacacaaccacaatgccgccagtcagccaattcccacctgcgcgtgttttccttaagaacgctgcatctacgccatcgcccatcaccatttcgacatcgaggagagccagtctaacgtcaccgttgagcccgcgatacacgacctcctcctcgaatgcttcacagtccatggcgcagatgttatcgcaaagacccagtgctagagaggctcaaggcagtgcacggagagtgacaaactgatgcgcatcaatgtattgtcctttccgggtaaacaaaggctgtgctagtgcaccatatctacgaatcaccaagtcaagctcagcgcattcgctgagatgccagcttcgcatgcatcatgcagatgaagtttgctgaaacctgagcggaggggtgtgtgccgcgcattatgacaccggttgtcagttgcgcg

SEQ ID NO: 10485 - DNA, 1722 bp, Oryza sativa
  unsure (1)..(1722): unsure at all n locations
  Clone ID: PAT_MRT4530_16801C.1
gcacgagggtacgcgccgctaccctgcctcttcttccttcccactaccaaacccgaccaaatattgtattgctggctcgctgcttgggaagataaaagtgcggctctgaaggggaatttcgtcgaacaggatgaatgcgttggcagcgacgagcaggaacttcaagcaggcggccaagctgctgggcctggactccaagctggagaagagcttgctcatcccgttcagggagatcaaggttgaatgcacaattccgaaagatgatgggactttagcatcttatgttgggtttagggtccaacacgacaatgctaggggacctatgaagggtggaatcagataccaccatgaggttgatcctgatgaggtcaatgcgttggcacaactaatgacatggaagacggccgtggctaatattccatatggaggagctaaaggtggaataggatgcagccctggagatctcagcatctccgagctagagcgacttacccgtgttttcacccagaaaatccacgacttgattggcattcatacagatgttccagctccagatatgggaaccaactctcagacaatggcgtggatacttgacgaatactcaaagtttcatggttattcacctgctgtggtgactggaaaacctgttgaccttggaggatcacttggaagagatgcagctactggaaggggagttctgtttgctactgaagccttgcttgcagagcatggcaagggcattgctggccagcgttttgtaatacagggatttggtaatgttggatcctgggctgctcagctgatcagtgaagctggtggcaaggtgattgccatcagtgatgtcactggagctgtcaagaacagcaatgggcttgacattgcaaagctaatgaagcactcatcagagaaccgcgggatcaagggtttcgacggaggcgatgcaatcgacccacgctcactgcttactgaagaatgtgatgtcctcatcccggcagcacttggtggagttataaacaaggacaacgcaaatgagatcaaagcaaagtacatcattgaggctgcaaaccaccccacagaccctgaggcagatgagatcctgtccaagaaaggcgttctcattcttccagacatcctcgcgaactccggtggtgtcacagtgagctacttcgagtgggttcagaacattcagggtttcatgtgggacgaggagaaggtgaacaatgagctgaagacctacatgacccgtgggttcagggatgtgaaggagatgtgcaggagccaccactgcgacctccgcatgggcgccttcaccctcggtgtcaaccgtgtcgctcgcgccaccgttctcagaggatgggaagcatgatctcgtcagtcatctgatcatctccctgttgtacttcatgcactgaatttctttcggtttttcgctttggttaatccgtcaaccgggattggagaagatagattcaataaccaaccccacgatgagtcgatgagtgtgctgcctttctcagagattagttgggggaagaaacagtagtaatctgctgggtagtgatgaattgcctgaatttatcatcttgcagaatggcactgcaggatttcttgtactctgtggctgaaattcttgctggtttgcaagcagtaatctgaatttggtttcttggccaaaaaaaaaaaaaaaaaaaaaaanccccccccccaccccaagcgcgcgta

SEQ ID NO: 10486 - DNA, 885 bp, Oryza sativa
  Clone ID: PAT_MRT4530_16802C.1
atgctggtctctacctttgaacatgccctaaggcatcttaaaagtttatggttccttgacctctccgacaaccaccttataggacatgtgcctctggaaatcagtacactcactaagttggcttggttggatctaagctacaatgacttggatggtctgatcacagaagaactttttgatggattgaaaagcttgaagaatattggcttatctgacaatcgattgaagattgttgtaggttcagactggattcctccctttcgactgaaagtagctaatttagcatcttgccacataggtcctttgtttccttcatggtttaagtggccgatgggcatttcacacattaatatttcacgcgccaacagcctatccggtgttataccttggcagctatcaaatcttgaagctatgacaaaaaggaagtctatgctacgtaagctcccaaacaattattcacggggagttgaccgttatctttcgaggttcaaacatatggttggtgaactatcagtcactaccaagaggcaagatcttaaatatcaaggctttgcacttttgggaatagtgactattgacttatcatccaactacttgactggaagaataccatcaggaggtcaacttgacacactctacaacaataatccgtctatgtacgatggcaacgccggtctctgtggggatattcttaagaagaaatgccctgggaacgacgcatcaaatgactacgggagttacaaagaccactatgagttattgtatctctgctttggacttgtcataggatttgtacttggcctctgggtggtgttttcgacccttctattcaagaaatcttggaggattgcttattttcgtcttttcgacaagataatgtactga

SEQ ID NO: 10487 - DNA, 1005 bp, Oryza sativa
  Clone ID: PAT_MRT4530_16803C.1
ctaaaatcatttcccgttgacggccctgcagttcttccggatctcgccctggtcgccggtgagcacgccgacgcggcccatcttgcggacggcgttcttgaactcccggaggaagtagtcctggtcggtgaggccgtggacgagcgcggcggcgcggcggtcggcgagcagcgcggcgtcggaggcgaagaggccccggccgagcttgaggttgacgaagtagtgggcgtcgaaccgggcggggctcccggggtccatgggcaccgcggtggcgttgttcgacggcgacccgcacgccgcccgcagctgcgcggcgtaggcggcgttcagcgacgggtcggccgacggcgcggcggcgccggtgaagttgaagaggcgggcgccgaagaggttgcagtggcccacgccgatggtgtgcgcccctgcgtgcaggtcgaggtcatttacgtcgaggcccttgccggcgaagttggactccagcgtcgtgaagttgtccgacggcgccggcaggttcgccagcgcctccgacgccagcgacaccacgccgtcgcgccgccccagctgcacgtcccacaggtccctcccaaactggtaggagacggcgtccctggcggcgagcgcgacgatgtcggcgcaggagacgacgccggggcatacggcctccaggacggccttggcggtgtcgatcacgtcgtacccgcccagcgacccgttcggcgccgcgtccttctccgccgccgccgccgcgccgctcccggccaccgtgtcgatcagcaccgacgcgtcgcaccccctgacgaagcagtcgtggaagaagaggcggagcagcttggcggggagcgcggcggggtcggcggcgacgcgcgccgtcacgatgtcgcgcaccaccgcctccgccgccgggcacacgtgccggtagtagtgtgccttgagcggccccgccgaagcgctcgctccccccaccacaacgccgacaaacacaaccaccaccaggaccaccggcat

SEQ ID NO: 10488 - DNA, 882 bp, Oryza sativa
  Clone ID: PAT_MRT4530_16804C.1
atgccgagcgtcgtcgtcacggtcgaccagtccggcaagggcgaccaccggaggatccaggacgcgatcgatgccgccccggcaaacgactcctcccgcaccgtcatccggatcaagcccggggtttacaggcgagtaggcaaccaggagaaggtcgtggtggacaagccgtacgtgacgctgaccggcacgagcgcgacctcgacggtgatcgcctggaacgagtcgtgggtctccgacgagtcccccaccgtgtccgtgctggcctccgacttcgtcgccaagcgcctgacgtttcagaacacgttcggggacagcgcgccggcggtggcggtgagggtcgccggagacagggcggcgttctacgggtgcaggttcgtgtcgttccaggacacgctcctcgacgagacggggcggcactactaccgcggctgctacgtgcagggcgccaccgacttcatattcggaaacggccgggctctgtttgacaaatgccacctgcactccacgtcgcccgacggcgccggcggggcgttcacggcgcagcagcggtcgtcggaatcggaggagacggggtacagcttcgtggggtgcaagctgaccggcctcggcgccggcacctccatcctgggccggccgtgggggccatactcccgcgtcgtcttcgcgctcacctacatgtcctccaccgtcaggccccaaggctgggacgactggggcgacccctccaatcagcggacggcgttctatgggcagtaccagtgctacggcgacggatcgaagaccgacggcagggttgcctggtctcacgacctgacgcaggccgaggcggcgccgttcatcaccaaggcttgggttgatgggcagcaatggcttcggtag

SEQ ID NO: 10489 - DNA, 426 bp, Oryza sativa
  Clone ID: PAT_MRT4530_16805C.1
atggcgcggcgggtcggaggcggcgccccacgcgggccaccgccgcgccgagagcacgcgacgtcgcgccgcgcgaggccgttcggtttgggcctttgcggtgggctgcggccggggagcttaggtgccaaattgatgcgtacatatccacttaccatgctcacgtccctttcctactgcgctgaaggcgttgtgcctgccgctttgacatcgccgtgcgaaaacaaccttgatcttatagctgttgtgatcagtgccgagaatgacgacctcctaaatttccacaggcatgatgcaaaatacggacgcagtcatttgcaggacaaatcatggccttgttacgtcgaaggaggaaggacggggatggggattaagcaatcagactgtgagaaagccgtggtaaagaacatcgtcaaggtgacatga

SEQ ID NO: 10490 - DNA, 423 bp, Oryza sativa
  Clone ID: PAT_MRT4530_16806C.1
ggaaggaaaaacagaagaaattttgtttgatggaccaaaaggcccggtggatgtccgtacttaatacccgtttaaaaaaaccaaaagtagtatcacattatcatttgcctaccagggaaaactggatagttttatcccccctaaaggggaaagaaacaatttgtcgcccccgccaaagcctagcaaatatgtatgcacggggctgattgctggttactgctgagcccattgtacgctcggggggccacccccggacaggtccctgccctagctaaatgcctcctgttgacggtgtgaaagccacccccttattgcctagggaaagctcactgtttacggtatgggcttcttcacctactcgagctacatgtgggtgtgcggccacaccgtccttggtgggaggacggactccaggcccttgaa

SEQ ID NO: 10491 - DNA, 272 bp, Oryza sativa
  Clone ID: PAT_MRT4530_16807C.1
gggaaggctggcacgcttgcgggtgctggtccgcaatacaggggtcgacctatgcgttcgtctacgctttcggggaaacggagagcttttacgaggacaggtgcttattactgcacagcactatgcagctgtacagaaggttcaaagagatggatgtgcttacattgcattcaagagcaatcctaactgtatggtgagccacattgcacgaaagagttgcatcttgcgtgctatcgcagaggatgcactagcctaagcatatctaatatgat

SEQ ID NO: 10492 - DNA, 450 bp, Oryza sativa
  Clone ID: PAT_MRT4530_16808C.1
atggtggcgagcagcgctagaagaacaaaaaccaccaacaagatggcagcggggttcgtggagcagttttcggcgaggagttcaggacttcgggccctcgggctcgtcgcggctggctctggcaaggagaggcagccaactcgctatgtggtgctctgcgttggtggtggcagcggcgatggctcgtcatcagagaaggaggcggcgaggataggggcgacacctagcaggagaggagcaaggcagcggcaaactcgcctccgtgggggtgggcaaggcatcatcgagggtgctggctcaatcattgtaaggggaggccggtgcggtgctctgctccgttggcttgtccatggcggtgctctgctcctaggtccaagcagtgcctcatgttcaacaccgtggttgccgctgaccatcatctacaacttcaagatgctcctcctgcactga

SEQ ID NO: 10493 - DNA, 498 bp, Oryza sativa
  Clone ID: PAT_MRT4530_16809C.1
atgggggaagatgttttgggtgatgacaaggcggcgattgactcgtcggtgcaacgcggctgtgggggtgtcggggaggcgcggtcgacaaccaggcgcggctgcgcggtggccaggcgtggacagggagagggggagggcagccttggctcgagggaaaaggcgatggaggtttgtggcggtcgtgtcgacatcgccacaggacaagcggcggcggccacgggcgaggcggcgacggcggccgtgggtgcgggcggcagcggcggccgcgggcaaggcggcagtggcggctgcgcgcgcacgcaaggcgacggcggccgcgtcgagggctgggtggcgacggcggcggcgacagccacgggtgcacgcggagacagcggcgaccgccgcgagcgcgtgcggaggcggcggcggcggccatgggctcgtgtggaggcggcggcggcggccgcgggcgcacacaaggcaacgatggccgtgtcgagggctgggtggtga

SEQ ID NO: 10494 - DNA, 342 bp, Oryza sativa
  Clone ID: PAT_MRT4530_1680C.1
atgtccgtcgttgaagctacagtaacgttccggccccggccaccgccaaggctagcgaagcgagccggagaagccagtcggccgacgcggcatcagcggcgccatggctccgcgtacatgactccgccatgtgatatcaacgtcggaaaaattcatcacaaaagaccgaggttggagaagggtgcgatgggaggaccaccgccaaagggaaggcacactgccaccaccgtgtgcgtcgtgaggaggaggccgccccgagctcgtggcgaccggatatggactcctaaagctcgcaatggccaccttgaggttggagaaggagcccgttgtattagcgcgtga

SEQ ID NO: 10495 - DNA, 1326 bp, Oryza sativa
  Clone ID: PAT_MRT4530_16810C.1
cggggcaattattcacctcatcaattgtgcacagctgaacatccattttacattattactgtacgaaagagtcgtgtgaaacagtccacaaactagtcacatgatgttattagccatttacaaaatatcaatatgaataccctgcaattcatcaaattctacaatgaaaaccacctaccattggagtacaggtaaattggccctaaaatgcatcctgtccagaagcgaaaatgcctagtttatccttgagcagttaatctaagggagtttccatgccgtcctgtttttcttctctgacgccatctttccttaatatcattgcactcttctgttagatgatctctactagtatcacactttccctcaacatattgcttgtcaatagcattatttgccaaacctcgcagccgagcagtttccgctatcagatcattgaccagcatcgcagttgtcctcgtggtaatccctctcagataccatgaaaacggaggcgggggtaacctgccagagttgataacctcgtcgacggcgactgcccttacgatggccgcggttgctgccgagaggatgacgccacattgctcatgaactgacaagacaccagaccaccagagaaatctccatattgctgcctgctccacttcaactatttgcctttgtccttcatcaagcacgactttccgtgatattacttccttgatgtttttgaaaactcttttgttctctggatcaattataatgttgtaaactgcgtctggaggtaatcctgccttaaatttcagattcaggttgcaaagagagccttgtggcacagtcaccttgatttctggaggttcatcagaccaaataggattgttcttccaagcttggagctgcttgtccaacctaacctcaggagcaacagtagtacaagttccctgcatttgcatcggcagcatttcggcctctgaaccaccaccaaagccattcttcttcaagaaacgcccaaaatgcaccttgagagagttctgaatcttatccggtatctgcacgaggctaccgaatccccgcgcaggcacgggttcacgattactgcttcccatcaagaaaccgaatctggtagatgattccctcggtcacagagagaaatggaagaatcagagctcggctcaggtggcgactggctctgaaatggaagggcctaaggaaaaagagaggcttttcttgctcggaccaatcatggagttgaacggaggaacacgaaaccacgggaagggacgaggattggtcgattggaggaagcacctccccgccacccaataaaatgaatcaaagtgaccctcgtgc

SEQ ID NO: 10496 - DNA, 1104 bp, Oryza sativa
  Clone ID: PAT_MRT4530_16811C.1
ttatccttgagcagttaatctaagggagtttccatgccgtcctgtttttcttctctgacgccatctttccttaatatcattgcactcttctgttagatgatctctactagtatcacactttccctcaacatattgcttgtcaatagcattatttgccaaacctcgcagccgagcagtttccgctatcagatcattgaccagcatctcagttgtcctcgtggtaatccctctcagataccatgaaaacggaggcgggggtaccatatcaggttcaataagctgatccaaggtaattgaagatccaactcttcctgtgccattggtgcaggaatcatacttttctaatgtgcatgggtctaaaggatggcatgcttccttgtcaacaaatagaggctctattttccagcaaccttcaaatttcttcataaaacctgttcttccttgcttgaactttaccttgatgtttttgaaaactcttttgttctctggatcaattataatgttgtaaactgcgtctggaggtaatcctgccttaaatttcagattcaggttgcaaagagagccttgtggcacagtcaccttgatttctggaggttcatcagaccaaataggattgttcttccaagcttggagctgcttgtccaacctaacctcaggagcaacagtagtacaagttccctgcatttgcatcggcagcatttcggcctctgaaccaccaccaaagccattcttcttcaagaaacgcccaaaatgcacctgtagcaagatccaaccaaacgaactcaaaccttcccagctaattcgaactcctctaaaaaaaaaaaaatcctcacttctgaagaaaaaaaaacaaccttgagagagttctgaatcttatccggtatctgcacgaggctaccgaatccccgcgcaggcacgggttcacgattactgcttcccatcaagaaaccgaatctggtagatgattccctcggtcacagagagaaatggaagaatcagagctcggctcaggtggcgactggctctgaaatggaagggcctaaggaaaaagagaggcttttcttgctcggaccaatcatggagttgaacggaggaacacgaaac

SEQ ID NO: 10497 - DNA, 874 bp, Oryza sativa
  Clone ID: PAT_MRT4530_16812C.1
gctgcaggtagccggtcatcgtcatcgtctctctccatgcaaaaacatacaggtacgtctcgccagatggccggccttctccccggcgtgctcgtggccgttctcctcgccgccgccgcggcgccggcgtctgcgaaagactacaccgtcggcgactcgtcggggtggactaccggtgtggactacaccgcctgggccagaggcaagacgttcaacatcggcgatacgctattgttccagtacaccagcgcggggcactcggtggtggaggtgagcgaggcggaccacacctcgtgctcggcggcgaacccgctgcggtcgtacaaggacgggacgaccatcgtcacgctaaccaggtcgggcacccgctacttcatctgcggcagcacgggccactgcggcgccggcatgaagctcaccgtgacggtcgccaccctctccggcagcgccgccggcggcacgaggctggcgaagccgtcgtcgtccgacgcggacccgacgacgacgacgacgaccaggacctcgtcggccacgggcggcgccactggcagctgggccccgcgcactgccacgtggctgctgttcttcgccgccgtgggggccttgctgtgataggctgatcgtatggccgcttggaaagaggcagtgctgttccttgtgtgtgtctgacctgcatatcatttttagttttgtattatgagacaactacgtagtgtagtgtgtttctcaaataatctttgtggagtgttcgcttaattatatggtaccgaattcttgtatcttgttgtttcttggaggcaataaaatcttttaaagaaaaaaaaatcattaacaagtaaaaaaaaaaaaaaaaactcgaggggggcccgtaccc

SEQ ID NO: 10498 - DNA, 242 bp, Oryza sativa
  unsure (1)..(242): unsure at all n locations
  Clone ID: PAT_MRT4530_16813C.1
tgcacctacgtaatgatttaacgcgctntttttttttttttgtaaaacttcaaattgaaattctgggacagaattatctatgtgtggatattataaatgggggttaagtacgaccactcatttgcttgtcttgcagatatgatcgaaggcggggggaaagaattacccgattgagatgcggggtcggaaggaggctgggatgccgggtgcgtcagggcagggagatgcctgctttgcagggc

SEQ ID NO: 10499 - DNA, 2222 bp, Oryza sativa
  Clone ID: PAT_MRT4530_16814C.1
gcagcaacagatcgagagctttgcacacgccgtccagcgtcccatggaggagcgagccggagcgcgcaggaggcctcccatggccgtgcctccgcttctcctcttcctcctgctgctctcctcgttctcctcctgtgccgccgccgcttccggggctcccgtgggcgaggactacgtccggccgcccgcggcggcgcggcgctgcggcctccaccaccggaaggccctcctcagcctcttcccgtggagcaagaagaaggactcctcttccgcctccgatccgcagcaggtgcacatttcactagctggagaaaagcacatgagagttacatttgtcactgatgataactccgtcccttcagttgtagactatggaactgaagcaggcacatacacatcaacgtctcaaggagaaagcacatcatacagctacttaatgtatagttcaggaaagatccatcatgttgttattgggccccttaatgacaacacagtttactactaccgttgtggaggacatggtccggaattccagtttaagacaccaccctcccaatttcccttgtcattggctgttgtaggtgatctggggcagaccagttggacaacttcgacacttaatcacattaagcagtgtgcacatgatatgcttttactccctggtgatctctcttatgcggattatatgcaacatttgtgggattcttttggtacattggtggagccacttgctagcaccaggccctggatggtgacagaaggaaatcatgagaaggaaaggataccgttttttaagtctggatttcaatcatacaatgcacgatggaagatgccttatgaagagagcgaatccacatcaaatctctactactccttcaaagttgcaggggtgcatgctataatgttaggttcttatacagattatgatgaaagttcagatcagtacgcttggcttaaggctgatctagctaaggttgacaggaaaaggacgccatggctcatcgtattgttgcatgcaccatggtataatagcaattgggctcatcaaggcgaaggtgacagtatgatggctgcaatggagcctttgctctatgctgctcatgtggatatggtaatcgcaggtcatgtgcatgcttatgaacgtgcggagcgagtctacaaggggggacttgatccttgtggggctgttcacataacaattggggatggtggaaacagggaaggcttggcccacaggtaccgcaatccgaaaccagcttggtcagtcttccgggaagcaagctttgggcatggtgaactaaaaatagtaaatgccacgcatgctcactggacttggcacagaaatgatgacgaagaaccagtgagaacggatgatgtgtggataacgtcgctggctggttccgggtgcatccaggacggtagtcatgagtacaggaaaattctgatgtccccttaagaacatctgaacagacatacagactacagttagtagcatagtctaagtgcctgccatgtatattgtatatatgtttacgacttgctaaaatacaatctcagaagctctttttttctgtattttgaatcttggctaatctggagataccactgtagcttgtcgacatatctcttgatgtatgcaacaatgtttgtagccagccaagtgaatggcattctgaggaatgcttaccttgtgtaactggacgacagtcatgatatgaaacatatgttatgttacaactgttaacgaccaaatttggtaaatttacatcggatttggagttaaggccgaagcggatttgggaggaaatcgataacggaaacaggtatgaatcggcttcgaaaccgcatcggctacagtgtgcatcggcagttaccgaatcggacaaggcaagccgatgtagccgattctggcaaggtgatattggaatcattgtcggattgaattgacgtgcttcatgatgattgccacgtatggatcaagtccgaagaaggcagttgtatctattaactaggaataatttgttagtttcctttttatctttaggaaagtgtatttagtgtcctataaggactttatgttttccttttatctttaggaaagtttctttcttgtcctacaaggactagtatctattcatgggtataaatatgtacacccagggtcattgtaatctatcttcacaatcaatacaattcggcgtattgccaccttttaccttttc

SEQ ID NO: 10500 - DNA, 404 bp, Oryza sativa
  Clone ID: PAT_MRT4530_16815C.1
acgatagaatgtctatagagaggacgccctttttcttgatcttgtacagctgagcgccggttaagtgaattgagagcagagggcacttctttgaccgctctggaacatcaacgctcacagatttaggaattgtacgtaaggacgagcacaggataaagttggcctcatcaatggaaagacggagtttagcggagagctgttattaggacagcttcttattgaaccacagcactatgtagtggaaagatggcacaactagaaggatgtactaacataggattgaagacagaccctatcactatggtaagccacattgcaggaaaagaggttattttctgtgcctgtccaactaatgttgatacaaatgcatatcgcatgaaatgagatgaggcttgtagggctta

SEQ ID NO: 10501 - DNA, 272 bp, Oryza sativa
  Clone ID: PAT_MRT4530_16816C.1
ctctctctcggggtattgcaagatagtagctaattaaccagcctttggccttcagtttccccacagcggcatatcagagcacgcgttcaatttcctaatcaatctcccataaaatcccctttagctggtgtgcctaacataagcactttgtgtggtggggggttcttgtcctcttttagctacaacatatctatggttgtgaccacctgtacctgcctgtggtaattaaatagagggcttaaatctttgagagagcgaggagatttgggggg

SEQ ID NO: 10502 - DNA, 126 bp, Oryza sativa
  Clone ID: PAT_MRT4530_16817C.1
atggaggaatcgaaggagagctcgaagctggagaggctgcgcagcacggcgaagcagcagaaggggaagctgtacatcatcaagatctgcatctccatgctcatctgcggcagcccaaaccattaa

SEQ ID NO: 10503 - DNA, 419 bp, Oryza sativa
  Clone ID: PAT_MRT4530_16818C.1
cattcagaactcgaataatactattcggtactagattttcgtaaaatccagtattttacagcatgcaaccttgaaagcaacgtatatattggaacaaattatggcagcaatatggatgactggcatatagaacatgatgtgcagtaatctgaaaaacaatcgaacgcctcatgggacaaacgtgcaaacctacatctttaatatccatgtggtgaaggaatccaccgagctccgcatgccaaggcatacatttaacttgctctggtacatgcgacagaaatgctgggtgtggacgccgaacacgggatcaacaaaccaccaatgggagagctatccaagctcggcgtacatgagatcattctgtcagacaatgtgtgaccacactgcctacttcccttgcatgcaatctggaagcttga

SEQ ID NO: 10504 - DNA, 705 bp, Oryza sativa
  Clone ID: PAT_MRT4530_16819C.1
ggatccccgggctgcaggtgatgatgcctaacatgctgcttctctcggatcatgcgccgagcgttccagccatcgaggcatcatgctgcatgcagagctaacaactgttcatcactactatgcacgcatggcatggagtgcatctttcgacagcaacacagcacttggatgtgccattttgtcatagtatcccccaagcattagcatggtgaaattgcctcatgttctttacactttctgagaagaagacaaagcaatatcttgtgctgagcacgcgcaggcgcgtttgcattcaatggaagttttgtcctgtgtttgctcgaactggagcactgaagcaacggtgaagctaaaaacagcatcaaaaagaggcagagaaaagaaagggggtaacatcaaagtgatcagatctaaaggatagtaacatcaagagatcgcacagtcatccggatacatgcgtctttgccatgaattccttcctgcttactgaagttgtttttgtctgggctacaggcatggcccatgcatgcatgaaagatcggaagaatatgtgccaaagcaaaggctttcttgagcatcacccctggacctagtagttgccactatcagtctattacctgtaggctgttgccatggccttggaaggaagagggggggactacagtactacatctgcatatgttctatggtccataattctggcgt

SEQ ID NO: 10505 - DNA, 1747 bp, Oryza sativa
  Clone ID: PAT_MRT4530_1681C.1
cccacgcgtccggccacgcgtccgcccacgcgtacggtttggcgcttacagaatgacaaaagaggacgaagaaagtgaacactctccaaactatctccatcgggtctacaggattgtatcaccaagcttgcacttaactacaaccaagctaaaatgttgtggagctacgacatgctacctaagaaataagatgggcgcccaccaagaggatccttatcaaaattacactggacccaaggagccaattggcgtgcctaaagccctgttggagaagcttgcgttagactccaagcctgcttacatgataaagctcatcgaagagatccgaaagcttaactggataggagagtcaccagttgttagaagccttacgagctacgtgaaagcattcgaccccaatgtccccggacctcatgagggaaatccttcctgataagatgaagcgacgccctcaccaaggcatcaactcgacggcgcggccggacgtcgtggcggcgtccatgggcgctcccctcccgtggcgaaggatcgatcaagcggccctgggctcgatcggagcgggggagccgcgctttgtccccgcaaagtggggtgccgcggcgcggccatgggtggccgcgtgcgtcgccgcgtgccctggcctcgaggagctccggctgaagcggatggttgtcactgatgggtgcctcaagctgctcgcttgctcattccccaatttgaagtcgctcgtccttgttggctgtcaggggttcagcactgatgggcttggctactgtcgctaccaattgcaggtgttagatcacattggtgatgaaggattgaaaattgtagcctcatcctgtatacagctccaagagttgagagtatttcctgcgaatgcaaatgccagagcaagcactgtgacagaggaagggctagttgccatatctgcaggctacacagtgttcctctacattggcatgtatgctgagaggctggagatgctttctgtagcatttgcaggagataccgacgatggcatgacctacgtgctcaatggctgcaaaaatctcaagaagctggaaatcagggacagtccttttggtgacagcgcgcttcttgcaggcatgcatcagtacgaggcaatgcgctcactctggttgtcgtcgtgtaatgtcaccctggggggttgcaagtctcttgcagcaagcatggcaaacctcaacatcgaggtcatgaatagagcagcaagtatcaatgaggcagacaatgctaatgatgcaaagaaggtgaagaagttgtatatttacaggacagttgctggaccgaggggtgatgcgcctgaattcatctcaacgttctaaatccatatatttttgaagttgaaggtttgttcttcgacaaccaccttttgtttatatcatactctgctacgtcgagttgatctacatgttctaaagatctatctatcttcacggtcgaagggatcttctaggattattttgtgtaaattcctttgctatcacctctgctatgtcattatcttccagcagtgctacacttatgattaatctccaaaattgaaactctatagttatggttaacttggcagattgattacacatcatggtaacatctaagccttgtaataccataattctagcaagtcatatgcgtggttcatcttcatgtatatacgatttcatatcgatgctctcatgtaatgtctgggaaatttgaagtgccaaattgttacttttctgagtcg

SEQ ID NO: 10506 - DNA, 825 bp, Oryza sativa
  Clone ID: PAT_MRT4530_16820C.1
ggccgcgggttttttttttttttttttcttttttttttttttttttttttttaagttaagacggccatttgaaaaaacaaataaaatggtactaacttaaaacaagagattactttgtaagctgcttgaggcaaatgtagtaactctttaacattgaatcataatacatcgatttgaaaaaaaaacaaataaaatgacaacttaaaacgagagattactttgtttgccctcatgtatggtccaactatctttaaggtcaccaataggcaattgggtgccaacaccataactgatggctgccgctcccgtcggatggcatctgatctagagccttttcttccgagcagttggggcatgagatgcaacagcagtagcctgtgctgagcatgagcagaaaccacgcagaactgcagttacagcagccagagcgaatggaacgtacagctgaatcagcttcggtgttgttcttcctgagcccagcatctctccgaagattgcagacatgtaggtgagcacgtagacgcccgccatgatggaggtggcggcggaccaggggcggcgcgcgaggatgccgtagaggttggcgacgcagaccggccagaggaaggcgaggtcgagccaaacgaggccgcggaagaagggcggcgggtcggcgacgaggtagtggccgaactcggcggcgaaccaccggtggatgccgacgagcggcgccgggtagaggccgcgagggaggacgacctgggcgtcgaacagcggcgccgccaccgccatggtcaaggagagcagcgccaccaccgcgtcggccgccgccgtgacgaagcccat

SEQ ID NO: 10507 - DNA, 669 bp, Oryza sativa
  Clone ID: PAT_MRT4530_16821C.1
atggcggctcgccgtttttccgccgccacgccctcctctcccctcctcctccgccgccgcctcctttcctttcagccacagcccacggcggcggcggcggaggccgacgcgggcgcgggggagtgggtccgtcgcgcgggggcgctctcgcttctggggctcaccggcgccgtcgccgccagcgccgtcagcgacctctccgtcttcctctctgctccaggtcaaaaccctagaatcccttgcccaatctccattggagtattccaggcgatagagaaggcctcccagaaccagcaaatagtgaatgcgatcggcgcgcccatcgtgcggggtccctggtacagcgcttccatcgccgtgaatcacgcgaggcattccgtctcctgcactttccccgtgtcggcgcctcaaggaaatgggcttctcaagttcaaggctgttcgctcgggagatgagtcgtggttttcatttctgcagcccaatgactgggaaatactcctaatggatgctatccttgatgttcctactgacgatgggaaacaccaaacaattagggtaacaattccagacaacacagcacctcctccagcaattgattgcaaggcatgcaagtcccagccaacgctgacgccaccaccacctccatatccgtcacctccacagaagtga

SEQ ID NO: 10508 - DNA, 965 bp, Oryza sativa
  Clone ID: PAT_MRT4530_16822C.1
ttttttttttagcttgcacatttatcaccattactattaactaattgattgattaataataatacatttatattgcctcctcctcaccctcaccattctatgtcaaagtccctggattaacatagtgatcaatagtccttccctcaaacagtactaattgcccacgtgctactagggttttttctttctacagccacctgccctttgagcacgggggcatgcatgcaagcaagcaagcaccaactgctagctagactgccctaatggagaaggctcaaggtctccagcggcttgacggcgtcgagcttgcggtgcggcagggccggcggcggtggcgccaacggctgcacgaacttgcagttgggacaggatggggaggacttgcagagcatgacgaggaggtggcaattgacacaaggcacggccaccatgttgcctccaggtccagagctgacgatggtgccacccttctttgtctcctctgcaacaacagcaacagcaactggagtagcagcagctccggtgcttcctccatcgataatggtggggacgacgacgacggttggctgggtagtcgagatgttgagctccaggttcacgctctgctccttgggcctgatccagcttttcttcaaggtcttcctgttcaggtaatacatccttccagattgcaggtcaaggcactgctcccagtcgaggggcagggggtcattgagctggagctccaggttggcgtgcgacacgggctcctcccaggtgaagtgcttcctcttcttcctggagctgccgtctgactccgacgatgagctcttggtgctcttggtggtggaggagacgaagcctggcgccggccacgtcggccctagtgagagctccggctgcagctccatcctcttcacactcaggtacttctccactctaaggaattcagtggtcatcccggggatccactatttagacgcccc

SEQ ID NO: 10509 - DNA, 639 bp, Oryza sativa
  Clone ID: PAT_MRT4530_16823C.1
atgggcttcgtcacggcggcggccgacgcggtggtggcgctgctctccttgaccatggcggtggcggcgccgctgttcgacgcccaggtcgtcctccctcgcggcctctacccggcgccgctcgtcggcatccaccggtggttcgccgccgagttcggccactacctcgtcgccgacccgccgcccttcttccgcggcctcgtttggctcgacctcgccttcctctggccggtctgcgtcgccaacctctacggcatcctcgcgcgccgcccctggtccgccgccacctccatcatggcgggcgtctacgtgctcacctacatgttctgcgtggtttctgctcatgctcagcacaggctactgctgttgcatctcatgccccaactgctcggaagaaaaggctctagatcagatgaatacagagaaataccaaaggaggtccctatcatggtgacttcatggattcgctatgaagatggctgtcatgctcaatgccaaggctggtggtgtaacatgggtgctggccatccgacgggagcggcagccatcagttatggtgttggcacccaattgcctattggtgaccttaaagatagttggaccatacatgagggcaaacaaagtaatctctcgttttaa

SEQ ID NO: 10510 - DNA, 2508 bp, Oryza sativa
  Clone ID: PAT_MRT4530_16824C.1
atggctatgcaagaggagttgaataatttcactcgcaaccaagtatggacattggtggagagacccgaccaaaatgtcatcggcaccaagtggatcttccgcaacaagcaagacgaacatggagtggttgtaaggaacaaagcccggttataccaaatggatgtcaagagcgcctttctcaatggacccatctcggagttggtctatgtggagcaaccaccggggttcgaggatccaaagttgccaaaccatgtgtacaagctccacaaggcgctctacaggctcaaacaagcccctagagcttggtatgaatgtctccgagattttcttttgaaaaatggttttgaaattgggaaggcggacactactctcttcactaaaaagtttgaaaatgatttattcatttgccaaatttatgtcgatgacataatatttggttctactaatgcctctttttgtgaagaatttagtagtatcatgactaaaaggttcgagatgtctatgatgggtgagctaaccttcttcctcgggctacaagtcaagcaagcacaagatggcactttcatctctcaaaccaagtacatgaaggacattctcaagaagtttgggatgaaagatgccaaacccatcaagactcctatgcctaccaatggtcaccttgatcttggtgaaaatggtaaatgtgtggatcaaaaagtataccgctccatgataggatccttgctttacttatgtgcatctcgtcccgatatcatgcttagtgtttgcatgtgtgctcgctttcaagcggagcctaaagagtgccatttgattgctgtcaagagaattctaagatattcagttcatactcttaatcttggcttgtggtatcctaagggttgtgactttgagcttttgggctattccgattcggattatgccgggtgtaaggttgatagaaaaagcataaccgggacttgtcaattccttgggcggtcccttatttcttggtcctccaagaagcaaaattctgttgccttatccaccgccgaagccgaatatgtcgccgccgtaagcactatgactcgtgagaaaagacagaaagcctctcaggatgtgtccggtgatgagagtcctcctattcggtttcctcatggtcgtttgggtaaagagaaagtggttgagggtggcagtggcagtggcactcgtacttctcccaggtttacaaggcaatccagcaaccgtcctgttcagatccggcatgttgacagtggtcaaggaagtgatgctcctaatacaagaggtcgtgggagaggtggtggtcgcagttctttagctggaagggcatctcatgatttccctgtaggatctcgtgagaatccagttcagctctataagtctcttggatttgacaccactcctatgcaccacattggaagacccaagtccaactaccttcatcagcttgccaagttgattatggctagagaaaatccagtggttgagatgaagtggattgattgggcttacatgaggaagaagaacaatgaagtattcaaccaagtgatgcaagtgtgccacaacaagaatcttggagatattcttgccttggagtatgattggaatgaggaggtcattgcacagttctatgcgacagcattctttggtactacaagaaagggaaccccatatgtgaagtggttgactgagggtgttaggcacaagatttccatggcacagtttgctgagatgttgggtttagatgatgaggatctcaataggcccaacattcatagtaaagcacccctccctatgatcaagaccaagtttatgtatgtaaaggatgctcctaggacttgcataggatctactcatggtttgcatcctaactataaggtgttgtactccatctttcgttggtctttgcttccaaaggttggagatgctactgctttgccatccaagcatgctcatcttctcagtcgcatgcgctaccatcagcctcccttcagtgtgatgaagttgatttggtatgagatagctaacaccattcttgagcctaagcggggttgcatctatgctcctttcattatgaagatgattgagtcaatcaccggggtgttctacatcaaagatgggcgccacaatccttttcgccctcgtgctccaccttcctcttctccagtgactgccaagaaagtgaagaagatcgaaaggcgtcagaaggaagatagaagagaggctgggaaagaagtgtcagatgattctgaagatgaggtctatgttgatccatttgaggcttatgaggcagcccgcaacattgtcggtgaaggtccatccacctacttcaatgaagaatcttcccattccgatgatgatgttgatgatgatgatgagggtgacacagaggcagctgctgaggatgctcccactgatgttgatgagggcgacaccgctgcacagtccgatgagtctcatctctccagcgatactgagatcgttccctctgatggagatggagatgagtga

SEQ ID NO: 10511 - DNA, 3969 bp, Oryza sativa
  Clone ID: PAT_MRT4530_16825C.1
atggctcatgagggatcacccgccgttcgtgaggccaagattgaattattggaaggaaggcttggaagatttgtgatggatgacaaggagacaccacaagagatgtatgataggatgatgatccttgttaacaagattaaaggacttgggagtgaggacatgacaaatcactttgtggtcaagagacttctccgtgcttttggtccaagaaatcccactcttgtatcaatgatacgggaaaggaaagatttcaagaggctcaccccaagtgacattcttggaagaattgtgtctcatgagatgcaagaagaggaagctcgtgaagtgaggcaaatggtgaagaatgccgccatgatcaaaaatcaagaagtagctttgaaggcaaaacaagaagaagagtcaagttgtgaagaaagtgaagatgaagaaatgacttttattgtcaagagattcaagcactttcttcgcaagagtgactatggcaaagggaggaaggatgatgacaagggaaagaggcaatcaaagagagctttagcaaacccgctatgcaacatttggctaactagccttagggatgtcaatgaaactcttcaagagaagtttgctagtttagacaaaagtcataaagatcttgatgttcaatttgacactctttggaatagcacttctcaaccaaatgtggtttctaattcttccaacccatctactagcaatggttgtgctaggtgttacaatattgatttgaactctcatgctactaatgttgatgctatgcaagctcataagaaagagaatgaaagaaggaaaagctccacaagcaagttccggacttgccccctcactggtcagacacccggaagttccgggcaaaatgaccggaagttcctgccttgtaagacaggaagttctggacattttgtcaggaagttctgggcttctaatagggggaaggggctggccggaagttccggttataatgctaggaagttccggccagagggtcttttctatgattcatatgtaatttccaaaaattcagagggcaaagtggttgcttattttattgggaattacaatgatgagtaccgcacttgtgtgtgggtgccaaaggctttggcatacttctccggtggctcaagttgggttgtggacagtggctgcaccaatcatatgacgggagagaggagtatgtttataagtcttgatgaggagggtggaagtcgtgaaaatattgtctttggagatgatggtaaaggaaagcttcttcatatggatttatttgggcccgtggcctacataagcattggaggtaacaagtatggtttcgtcattgttgatgatttttcatgcttcacttgggtgtactttctccatgacaaaagcgaagctcaagatgtcttcaagcgcttcgaaaagcaagcccaaaacctctatgatctcactatcaagagggtgcgaagtgacaatggaggagagtttaagaacactcaagtggaggaatttcttgatgaagaaggaatcaagcacgagttctccgccccctatgatcctccccaaaacggcattgttgagaggaagaaccgaccactcattgaagccgcaagggcaatgcttgatgagtacaagacttcggatgtcttttgggcggaagctgtgagtaccgcatgtcatgctattaaccgcttgtacctccacaagatcctaaagaaaacctcatatgagctctttagtggtaagaagcctgatgtttcgtattttcgtgtctttgggagcaaatgttttattttaagtaagaggcctcgctcatctaagttctcacctaaggtggatgagggattcttacttggctatgaatcaaatgcacatgcctatcgtgtcttcaacaaaacctccggtattgttgaagtcactagggatgtgacgtttgatgaatctaatggctcccaaggagagcaagttgttgtacatgttgtaggggttgtggatccaaatcaagctataggtactaaggctattggagacatacgaccagtcgagacgcaggatgaccaagaagatagggatcaacctccgtcatcgacatccaatagccctacaagtgttgtgtcagctgagccggaagttccgggtcctattgaccggaacctccggacatctccaggcccggtggaagatgcgcttggtgatccggattgggtgatggctatgcaagacgagttgaataacttcactcgcaatcaagtgtggactttggtggagagacccaagcaagatgtcatcggcaccaagtggatctttcgcaacatgcaagatgaacatggggtggttgtaaggaaaaaagcccggttattccaaatggatgtcaagagtgcctttctcaatggacctatctcggagttagtctatgtggagcatccaccggggttcgaggatccaaagttgccaaaccatgtgtacaagctccacaaggcactctacgggctcaaacaagcccctagagcttggtatgaatgtctccgagattttcttttgaaaaatggctttgaaattggaaaggcggatactactctcttcactaaaaaatttaagagtgatttatacatatgccaaatttatgtcgatgacataatatttggttctactaatgcctctttttgtgaagaatttagtagtatcatgactaaaaggttcgagatgtctatgatgggcaagttgaccttcttcctcgggcttcaagtgaagcaagcacaagagggcaccttcatctctcaaaccaagtacgtgaaagacatactcaagaagtttgggatggaggatgccaaacctatcaagacacccatgcctactaatggccacctagacctcgatgataatggtaaatgtgtggaccaaaaggccggaagttccggtgttcttggcccagaacttccggtctctgtcccgccaaccatggtcattatgcctcgtgagaagagacagaagctttctcaagatgttcctgctgactcgagaaccccggttcgtggtcctagggggagattgggcaaagaaaaagttggagatttttatagtgggagtcagattccgatccattccaggagggctggtagcattgtcattcgtgacgcaccccgctctccctctccagctgcatctgagtcagataatggtggcaatgaggatgagcctggttctaaaagcaatccttttaggctgtacaagacaagggctgttgatcctgatcctaaacgcccaagagtgaactatctgaagaatctactcaagtgtggaaacgacagaatggttagtcctgatactctgccagcagactctcaggatgacagattcaggaccttggtgcaggttaattggtataactctgtgatcatgggaagatctcatccagtggtagagatgaagtggctagactggcagtacatgtcctcaaagaacaacatagtcttcaatgaggtacgcaaggtgtgtgagcgcaagcacgtggcagatttgttggccttgcagtattcctggaatgaggaagtgattggacagctctactccactgcattctttggcaccaccaagaaggggcttgattttgtgaagtggaccattcaggggcagcagtatagggtttctatggcacaatttgctgcagctttggggattgcagcaggcaaggatgtctatgatatttctgatgatgaggagtttgttgatccttttgctgcatatgagactgctcgagacattgctagtggtgagggtccctctggcacttctcgtttcttcaatgaggagtcctctcactccgaggagagcagtgatggtgaggagtcagatgcccctaccgtgaatgttcctacagatcccgatgaggcagtggacgccgccgggcaagacatcaactctcctcactccggcgacaccgagatcattccttctgatggcgataatgatgaggcttga

SEQ ID NO: 10512 - DNA, 3637 bp, Oryza sativa
  Clone ID: PAT_MRT4530_16826C.1
gtgccttctgggcatgctcctcaatttgatgggacacataatgccgcttggaagcacaagatgaagttgcatctaatctctttgcatccaagtatttggaaagttgtttgtacagatgttgatgtaccccatgataacatggagctcacttcggagcaagaacaactcatccaccgcaatgctcaagcttccaatgcaattctctccgccttgagtctggaggagttcaacaaggttgatgggcttgaggaggccaaggagatatgggatactttgcaattggctcatgagggatcacccgccgttcgtgaggccaagattgaattattggaaggaaggcttggaagatttgtgatggatgacatggagacaccacaagagatgtatgataggatgatgatccttgtcaacaagattaaaggacttgggagtgaggacatgacaaatcactttgtggtcaagagacttctccgtgcatttggtccaagaaatcctactcttgtatcaatgatacgggaaaggaaagaattgaagagtctcaccccaagtgacattcttggaagaattgtgtctcatgagatgcaagaagaggaagctcgtgaagtgaggcaaatggtgaagaatgccgccatgatcaaaaatcaagaagttgctttgaaggcaaaacaagaagaagagtcatgttgtgaagaaaatgaagaagatctcgaggtcaagcccaagcccaagcctcaagacaaggttgaaggagaaggtggtgttgctactgtcgccttcaagtcatcctcttcaatcaaggagcgtctcttcaacaactggagtgatgacgacgacgactcctaccactactcttgtttcatggcccaaggccgcaaggtgatgactcaaaagtcctctcacatctctcttgatgttgattctagtgatgcggaaagtgataatgaattagatgatgtgcttaagagctttagcaaacccgctatgcaacatttggctatgttaatgagagctttggatagtaaagaacaatctctcgaaaggcaagaagaattacttattcttgagaagaaaagaaaccttgccttagaggagagcctagctaaagaatgtgctaaaaatgaacaactagctaatgagcttaatttggctaatggttctctagctagccgtagggatgtcaatgaaactcttcaagagaaatttgctagtttagacaaaagtcataaagatcttgaagttcaatttgacactctttggaatagcacttctcaaccaaatgtggtttctaattcttccaacccatctactagcaatggttgtgctaggtgttacaatattgatttgaactcttatgctactaatgttgatgctatgcaagctcttaagaaagagaatgaaagattgggcacattggtgaaatatggatgcgtgaagacatatcattcaaaagatgccctttacaagaccatcaccgctcatcctaacaaggatggacatgggctcgggttttctggtggaagtcatgtgtctaagcgtgtgatggtaaatgggaaagaatgcttgatgtttgtgagagaaggaaaagctccacaagcaagtgaggcatactcctccagtggctcaagttgggttgtggacagtggctgcaccaatcatatgatgggagagaggagtatgtttacaagtcttaatgaggagggtggaagtcgtgaaaatattgtctttggacatgatggtaaaggaaaggtaatgggtctcgatcgtgtgtgtagtgcttgccaagccgggaagcaagttggcagtccacatcctataaaaaacatcatgactacaacaagaccactcgagcttcttcatgtggatttatttgggcccgtggcctacataagcattggaggagaattcaagaacactcaagtggaggaatttcttgatgaagaaggaatcaagcacgagttctccgccccctatgatcctccccaaaacggcattgttgagaggaagaaccgaacccttattgaagccgcaagggcaatgcttgatgagtacaagacttcggatgtcttttgggcggaggccgtaagtaccacatgtcatgccatcaaccgcttgtacctccacaagatcctaaaaaaaacttcatatgagctcttgagtggtaagaagcctaatgtttcatattttcgtgtcattgggagcaaatgttttattttaagtaagaggcctcgctcatctaagttctcacctaaggtggatgagggattcttacttggctatgaatcaaatgcacatgcctatcgtgtcttcaacaaaacctccggtattgttgaagtcactagggatgtgacatttgatgaatctaatggctcccaaggagcgtaagttgttgtacatgttgtaggtgatgtggatccaagtaaagctataggcactaaggctattggagacatacgaccagtcgagacgcaggatgaccaacaagatagggatcaacctccgtcatcgacatccaatagccctacaagtgctgtctttgctgagctgaaagttccgggtcctattgatcagaacctccggaagttccgggttctacagtctggaacctccggaccagtggcagtgaaaacgtgccaacggcacaagtggatgggatcgatgctgcgggcactttagagcatactgatcaggctcaggtcccccagtgcaccatccaaggatacatcacactgtccaaagagatcatcccgtcgacaacatacttggtgacataagaaaaggggtaactactcgctctcgtgtcccaagtttttgtcaacacttctcgtttgtctcttctttggaaccaaccagggtggaagatgcgcttggtgatccggattgggtgatggccatgcaaggggagttaaataacttcactcgcaaccaagtatggactttggtggagagacccaagcaaaatgtcatcggcaccaagtggatcattcgcaacaagaaagatgaacatgaggtggttgtaaggaacaaagcccggttagttgcgcaagggttcacccaagtcgagggccacgatgttggtgaaaccttcgcacctgtcgctcgccttgagccaattagaattcttttagcctatgccgctcaccatgatttcaggttattccaaatggatgtcaagagtgcctttctcaatggacctatctctgagttggtctatgtggagcaaccaccggggttcgaggatccaaagttgccaaaccatttgtacaagctccacaaggcgctctacgggcttaatcaagcccctagagcttggtatgaatgtctccgagattttcttttgaagaatggttttaaaattggaaaggcggacactactctcttcactaaaaaatataagagtgatttattcatatgccaaatttaagtcgatgacataatatttggttctactaatgcctctttttgtgaagaatttagtagtatcatgactaaaaggttcgagatgtctatgatgggcgagttgaccttcttcctcgggctacaagtgaagcaagcacaagagggcaccttcatctctcaaaccaagtatgtgaaagacatactcaagaagtttgggatggaggatgccaaacctatcaag

SEQ ID NO: 10513 - DNA, 757 bp, Oryza sativa
  Clone ID: PAT_MRT4530_16827C.1
ttcctgcagcccgtccataggttttcatttctaaatcatttaattctcatctattcctttgaacttgggcctgactgtcctctgttctgtcaggccggatgttctggtcatcccagtccggaacttccgggggtcggggttttgcaggccggaagttccggtgttcttggcctggaacttccgggggagattgggcaaagaaaaagttggagttttttacagtgggagtcagattccgatccattccaggagggctggtagcattgtcattcgtgatgcaccccgctctccctctccagctgcatctgagtcagatgatggtggcaatgaggatgagcctggttctaaaagcaatcctttgaggctgtacaagacaagggctgttgatccagatcctaaacgcacaagagtgaactatctgaagaatctactccagtgtggaaaggacagaatggttgattggtataactctatgatcatgggaagatctcatctagtggtagagatgaagtggctagactggcagtacatgtcctcaaagaacaatatagtcttcaatgagtattcctggaatgaggaagtgattggacagttctactttactgctttctttggcatcaccaagaaggggcttgattttgtgaagtggaccattcaggggcagcagtatagggtttctatggcacagtttgctgcagctttggggttagatgatgatgacctgagtcgtccacatatctttgtagaggatgctctg

SEQ ID NO: 10514 - DNA, 723 bp, Oryza sativa
  Clone ID: PAT_MRT4530_16828C.1
ggcacgagggtttacccttcggtttctcctcattaaacacatgataaatacagacagggatgtttcggttgagaccttcgttttcatctctgcgttttgttccttctgagaaagctctcatatgagaacaaaaagcccaaaatcttttctcctcttggtggttcttttcttcttctagatttatccccatttttggctgggccttctatttaagagagcctgttcttcttctagtcctgatagtattaaggctccttctgtgtcaaagaatcagccatcaaaccattttctcattgcagacatctctgcctgctgcctcctcttcttggtgttctgggtcagacagagaaagctgagttgttctttaggaattgggtattattttttttgaaagcgcggaattgggtattatgggtaactgctggtttaaagggaatccatactttaacagggtttcttccaatgcaacaaaatcagaatcacctaaaatgcagagcccatctgagagaaaagaaaaggatgacagcatgctgccgtcgaacgcgaaagaggtggaggaactgagaagggagtcggctcggaaccctctgatagcattcacatttgaggagctcaagaggataacaaaaaatttcaggcaggattcattactaggggggaggtggatttggtagagtctacaaaggatacatcaccagtgatcttcgcgaaggattaacaata

SEQ ID NO: 10515 - DNA, 6336 bp, Oryza sativa
  Clone ID: PAT_MRT4530_16829C.1
atgtcggacttagggggaaagaacggggaaaatagaaatgaagatggagcaagaagcaagggaactccatcacccaagggagttactatacattttgattacagcaaacttaccattccccctcacaactttgtctccgtaccttccgggcgtgctcctcaatttgatgggacacattacgccgcttggaagcacaagatgaagttgcatctaatatctttgcatccaagtatttggaaagttgtttgtacaggtgttgatgtaccccatgatgacatggagctcacttcggagcaagagcaactcatccaccgcaatgctcaagcttccaatgcaattctctccgccttgagtccggaggagttcaacaaggttgatgggcttgaggaggccaaggagatatgggatactttgcaattggctcatgagggatcacccgccgttcgtgaggccaagattgaattattggaaggaaggcttggaagatttatgatggatgacaaggagacaccacaagagatgtatgataggatgatgatccttgtcaacaagattaaaggacttgggagtgaggacatgacaaatcattttgtggtcaagagacttctccgtgcatttggtccaagatatcccactcttgtatcaatgatacgggaaaggaaagacttcaagagactcaccccaagtgacattcttggaagaattgtgtctcatgagatgcaagaagaggaagctcgtgaagtgaggcaaatggtgaagaatgccgccatgatcaaaaatcaagaagttgctttgaaggcaaaacaagaagaagagtcaagttgtgaagaaagtgaagatgaagagatggcttttattgtcaagagattcaagcactttcttcgcaagagtggctatggcaaaaggaggaaggatgatgacaagggaaagaggcaatcaaagagggcttgcttcaattgtggcgaatatggccacttcatagccgattgtcccaagtcaaatgaagctaaggctaagggaggcaagaagaagccggagcgtgctcatgtggcagaggcacacatggcggaggtgtggtactccagagatgaagaagatccagaggtcaagcccaagcccaagccgaaagacaaggttgaaggagaaggtggtgttgctaccgtcgccttcaagtcatcttcttcaagcaataagcgtctcttcaacaacttgagtgatgacgacgatgacttctaccactactcttgtttcatggcccaaggccgcaaggtgatgactcaaaagccctctcacacctctcttgatattgattctagtgatgaggaaagtgataatgaattagatgatgtgcttaagagctttagcaaacccgctatgcaacatttggctaagttaatgagagctttggatagtaaagaacaatctctcgaaaggcaagaagaattacttattcttgagaagaaaagaaaccttgccttagaggagatcctagctaaagaatctagccttaggaatgtcaatgaaactcttcaagagaagtttgctagtttagacaaaagtcataaagatcttgaagttcaatttgacactctttggaatagcacttctcaaccaaatgtggtttctaattcttccaacccatctactagcaatggttgtgctaggtgttacaatattgatttgaactctcatgctactaatgttgatgctatgcaagctcttaagaaagagaatgaaaggttgggcacattggtgaaatatggatgcatgaaaacataccattcaaaagatgccctttacaagaccatcaccgctcatcctaacaaggatggacacgggctcgggttttctggtggaagtcctgtgtctaagcgtgtgatggcatacttctccggtggctcaagttgggttgtggacaatgggtgcaccaatcatatgacgggagagaggagtatgtttacaagtcttgaggaggagggtggaagtcgtgaaaatattgtctttggagatgatggtaaaggaaagctacaatttattatccgtgtctcaattgtgcgagatgactcttccatagaatttaagggtgtgttaaagggtgatctctatctcgttgatttcgacgtagatagagtgaatccggaggcatgcttgattgctaaatcctctatgggttggctatggcaccgtaggctagcccatgttgtaatgaggaatttggcatctcttctaaaaggggaacacattcttggtctatctaatgtttcttttgagaaagatcgtgtgtgtagtgcttgccaagccgggaagcaagttgggagtccacatcctataaaaaacatcatgactacaacaagaccactcgagcttcttcatatggatttatttgggctcgtggcctacataagcattggaggtaacaagtatggtttcatcattgttgatgatttttcacgcttcacttgggtgtactttctccatgacaaaagcgaagctcaagatgtcttcaagcgcttcgcaaagcaagcccaaaacctctatgatctcactatcaagagggtgcgaagcgacaatggaggagaattcaagaacactcaagtggagaaatttcttgatgaagaaggaattaagcacgagttctccgccccctataatcctccccaaaacggcattgttgagaggaagaaccgaaccctcattgaagccgcaagggcaatgcttgatgagtacaagacttcggatgtcttttgggcggaagccatgagtactgcatgtcatgccatcaaccgcttgtacctccacaagatcctaaagaaaacctcatatgagctcttgagtggtaagaagcctaatgtttcatattttcatgtctttgggagcaaatgttttattttaagtaagaggcctcgctcatctaagttctcacctaaggtggatgagggattcttacttggctatgaatcaaatgcatatgcctatcgtgtcttcaacaaaacctccggtattgttgaagtcactagggatgtgacatttgatgaatctaatggctcccaaggagagcaagttgttgtacatattgtaggagatgtggatccaaatcaagctataggtactaaggctattggagacatacgaccagtcgagacgcaggatgaccaagaagatagggatcaacctccgcgtcatcgacatccaatagccctacaagtgctgtgtctgctgagccggaagttccgggtcctattgactggaacctccggacatctccaggcccggaagttccgggttctacagtccggaacctccggatcagtggcagtgaagacgtgccaatggcacaaggtggaagatgcgcttggtgatccggattgggtgatggctatgcaagaggagttgaataacttcactcgcaatcaagtatggactttggtggagagacccaagcaaaatgtcatcggcaccaagtggatctttcgcaacaagcaagatgaacatggggtggttgtaaggaacaaagcccggttattccaaatggatgtcaagagtgcctttctcaatggacctatctcggagttagtctatgtggagcaaccaccggggttcgaggatccaaagttgccaaaccatgtgtacaagctccacaaggcgctctacgggctcaaacaagcccctagagcttgttttgaaattggaaaggtggatactactctcttcactaaaaaatttaagagtgatttattcatatgccaaatttatgtcgatgacataatatttggttctactaatgcctctttttgtgaagaatttagtagtatcatgactaaaaggttcgagatgtctatgatgggcgagttgaccttcttcctcgggctacaagtgaagcaagcactagtgggcatcttcatctctcaaaccaagtacgtgaaagacatactcaagaagtttgggatggaggatgccaaacctatcaagacgcccatgcctactaatggatacctagacctcgacgataatggtaaatgtgtggaccaaaaggtatatcgctccatgataggatctttgctttacttatgtgcatctcgtcccgacatcatgcttagtgtttgcatgtgtgcccgttttcaagcggagcctaaagagtgccatttgattgccgtcaagagaattctaagatatttagttcacactcctaatcttggcttgtggtatcctaagggttgtggctttgagcttttaggctattccgattcggattatgccgggtgtaaggttgatagaaaaagtacaactgggacttgtcaattccttgggcggtcccttgtttcttggtcctctaagaaacaaaattccattgccttatccacggccgaagccgaatatgttgccgctggttcttgttgtgctcaactcctttggatgagacaaaccctaaaagactttggctacaacttcaccaagatcccactcctatgtgataatgagagtgccatcaaaatagccaacaatcccatccaacactcaagaaccaagcacatagacattcgccaccacttcttgagagatcatgagactaaaggagacatatgccttacccatgtgagaaccgaaagccaattagccgacattttcaccaagcctttagatgagaaaagattttgcgagcttaggagttttcatttccaaatctttgaattctcatctattccattgaacttgggcctgactgccctctgttctgtcaggccggaagttccggtcaccccagtccggaacttccgggggtcgggggccggaaattccggtgttcttggcccggaacttccggtctctgtccagccagccagtaaccttgattttgctactgtttcatttaaccattgcactccaaccttgttgattcttgttgcagtggtcattatgcctcgtgagaagagacagaagctttctcaagatgttcctgctgactcaagccccccggttcgtggtcctagggggagattgggcaaagaaaaagttggagatttttacagtgggagtcagattccgatccattccaggagggctagtagcattgtcattcgtgatgcaccccgctctccctctccagctgcatctgactcagatgatggtggcaatgaggatgagcctggttctgaaagcaatcctttgaggctatacaagacaagggctgttgatcctgatcctaaacgcccaagagtgaactatctgaagaatctactcaagtgtggaagggacagaatggttgattggtataactctgtgatcatgggaagatctcatccagtggtagagatgaagtggctagactggcagtacatgtcctcaaagaacaacatagtcttcaatgaggtacgcaaggtgtgtgagcgcaagcacgtggcagatttgttggccttgcagtattcctggaatgaggaagtgattggacagttctactccactgctttctttggcaccactaagaaggggcttgattttgtgaagtggaccattcaagggcagcagtatagggtttctatggcacagtttgctgcagctttggggttagatgatgatgacctgagtcgtccacatatctttgtagaggatgctctgtcaccgaccagcactacctttatgtatgagaaggatgctcccaaggattgtttggggactactcgagggttgcgtccatattatagagtgctgtactctatcttcaggtggtctttgctccccaaagtgggagatgctacagctcttccaggtaggcatgcactcctccttagtcgcatgcgctataacaagcccgatttcagcatcatgaagcttatctggagtgagatctatgagacagtgtgtgagccaaagagaggcttcatctatgctccttatatcatgaagatgattgaggccaagactgggatttgttatttcaaagacaatcaacacaagcctttccgtcctcatgctcccactacttcagctactcctaccaccagagtgactcgtgcttccacctcagctgctccttctttctctgctgcacctcagcgttctgagtcttcttctcccataaagaaggctctcagggctatcttttgcatgtgtgccaagacagctaagagtgatgagggtccctctggcacttctcgtttctttaatgaggagtcctctcactccgaggagagcagtgatgatgaggagtcagatgcccctactgagaatgctcctacagatcccaatgaggcagtggatgccgccgggcaagacatcgactctcctcactctggcgacactgagatcattccttctgatggcgataatgatgaggcttga

SEQ ID NO: 10516 - DNA, 1975 bp, Oryza sativa
  Clone ID: PAT_MRT4530_1682C.1
ccttcgcttctcgccaacagaagaaaaaccctcacctccactcccccctcgccggagccacggcgaccctctccaccccctgccttgccgccggcgagtgtccttgcgtgcgccgccggtgagcgggtgtggatcccagcggcggcgcgatcggccttcgaatcgaactgaaagctgaaccctcgttgccactgctgtgaacatgttccaaattgagaagatcgtatgagctatggggaattattaggattcttggaggcggcggcggcatatggtgttcttcccggaggaggtggtggagcacatccttgggtttctagcgtcgcaccgcgaccgcaacgcggtgtcgctggtgtgccgggagtggtaccgcgtcgagcgcctcagccgccgctcggtgctcgtgcgcaactgctacgcggcgcgcccggagcgcgtgcacgcgcgcttccccggcctgcgctcgctgagcgtgaaggggaggccgcgctttgtccccgcggggtggggtgccgcggcgcggccatgggtggccgcgtgcgtcgccgcgtgccctggcctcgaggagctccggctgaagcggatggttgtcactgatgggtgcctcaagctgctcgcttgctcattccccaatttgaagtcgctcgtccttgttggctgtcaggggttcagcactgatgggcttgctactgtcgctaccaattgcagatttatgaaggaactggacttacaagagagtctggtggaggatcgagactctcgttggcttggatgttttcccaagccttctacattactagaatccttgaatttttcttgcttgaccggggaggtgaatagccctgcattggaaatactggttgcaaggagtccaaatcttagaagcttgagattgaaccgttcagttccacttgatgttttggccagaattctttgtcgcagacctaggctggtggatttatgtacaggatcttttgtacgaggcaatattgttggtgcatatgctgggctattcaatagttttcaacattgcagtttgctgaagagtttatctgggttttgggatgctacaagcttgtttattccagtgattgctcctgtttgcaagaatctaacgtgcttgaaccttagctctgctccaatggtcaggagtgcttatcttattgaatttatttgtcaatgcaagaaactccaacaattgtgggtgttagatcacattggtgatgaaggattgaaaattgtagcctcatcctgtatacagctccaagagttgagagtatttcctgcgaatgcaaatgccagagcaagcactgtgacagaggaagggctagttgccatatctgcaggctgtaacaagttacagtctgtgctctatttttgccaacggatgacaaactctgcactgattactgtcgcaaagaactgcccacgattcacgtccttcagactgtgtgttcttgatccaggatcagcagacgctgtgacagggcagccattggatgagggttatggggcaatcgtacagtcatgcaaaggccttagacggctatgtttgtctggacttctcacagacacagtgttcctctacattggcatgtatgctgagaggctggagatgctttctgtagcatttgcaggagataccgacgatggcatgacctacgtgctcaatggctgcaaaaatctcaagaagctggaaatcagggacagtccttttggtgacagcgcgcttcttgcaggcatgcatcagtacgaggcaatgcgctcactctggttgtcgtcgtgtaatgtcaccctggggggttgcaagtctcttgcagcaagcatggcaaacctcaacatcgaggtcatgaatagagcagcaagtatcaatgaggcagacaatgctaatgatgcaaagaaggtgaagaagttgtatatttacaggacagttgctggaccgaggggtgatgcgcctgaattcatctcaacgttc

SEQ ID NO: 10517 - DNA, 309 bp, Oryza sativa
  Clone ID: PAT_MRT4530_16830C.1
atgcggccgccgttccggatccgcggggtgcgccgcatgtccgcggcgctggcggccgtgaacgtggcggtcgcggcggccggggcggcggccgagtgggtgggtgtgactgagcgctgcgggcggagggaggaggccgcggtcggcgcggcggtcgcgctggcggcggtgaggatcgtggccatggtcggcacggcgcgcgctcaggaggtgaccgcgctcgccgtcgtctccgcggggggcagcggcggcggcggcgaggggccgacggtggagttcgccaagcgcgagacaaggcttcgtgtgtga

SEQ ID NO: 10518 - DNA, 849 bp, Oryza sativa
  Clone ID: PAT_MRT4530_16831C.1
atggcagttaaggaccggttcacaggaaaccctgggagacttaccatgcttaccacaagcgggagcgtgataggaaccccttatgtgaagtggttgactgagggtgttaggcacaagatttccatggcacagtttgctgagatgttggggttagatgatgaggatctcaataggcccaacattcatagtgaagcacccctccccatgatcaagaccaaattcatgtatgcaaaggatgctcctaggacttgcatgggatcaactcatggattgcatcccaactacaaggtgttgtactccatctttcattggtctttgcttccaaaggttggagatgctactgctctgccatccaagcatgctcatcttctcagtcgcatgcgctacaatcagcctcccttcagtgtgatgaaattgatttggtatgagatcgccaacaccattcttgagcctaagcggggttgcatctatgctcctttcattatgaagatgattgagacaatcaccgggactgccaagaaagtgaagaagatcgaaaggcgtcagaaggaagatagaagagaggctgggaaagaagtgtcagatgattctgaggatgaggtctatgttgatccatttgaggcttatgaggcagcccgcaacgttgccggtgaaggtccatccaccttcttcaatgaaaattcttcccattctaatgatgatgatgatgatgatggtgatgagggtgacaccgaggcagctgctgaggatgctcccactgatgttgatgagggtgacaccgctgctcagtccgatgagtctcatctctccggcgataccgagattgttccctctgatggagatgagtga

SEQ ID NO: 10519 - DNA, 2022 bp, Oryza sativa
  Clone ID: PAT_MRT4530_16832C.1
atgtctatgatgggcgagttgaccttcttcctcgggctacaagtgaagcaagcacaagagggcactttcatctctcaaaccaagtacgtgaaggacattctcaagaagtttgggatggaagatgccaaacccatcaagactcctatgcctactaatggccacctagacctcgacgataatggtaaatgtgtggaccaaaaggtatatcgctccatgataggatccttactttacttatgtgcatctcgtcccgataacatgcttagtgtttgcatgtgcgctcgctttcaagcggagcctaaagagtgccatttgattgccgtcaagagaattctaacatatttagtccatactcctaatcttggcttgtggtatcctaagggttgtgattttgagcttttaggctattccgattcggattacgccgggtgtaaggttgatagaaaaagcacaaccgggacttgccaatttcttggtcggtcccttgtttcttggtcctccaagaagcaaaattctattgcattatccaccgccgaagccaaatatgtcgcggcagtaagcactatgcctcgtgagaaaagacagaaagcctctcaggatgtgtccggtgatgagagtcctcctattcgttttcctcgtggccgtttgggtaaacagaaagtggttgaaggtggcagtggcagcggcactcgtacctctcccaggtttaccaggcaaaccagcaatcgcccagttcagattcgagatgttgaaagtggtcagggtagtgatgcttcttcttcaagaggtcgtgggagaggtggtggtcgctcttctggggctggaagggcctctcatgatttccctgttggatcttgtgagaatcccgttcggctctacaagactattggttttgacaccactcctatgcaccatattggaagacccaaaagggaccgattgattgatccagagacacagcccgaggagtcacaggatcctcgtttcagaactttaactcagttggattggtacaactcagtgattatggctagagacaatccagtggttgagatgaagtggattgattggacttacatgaggaagaaaaacaatgaagtgttcaatcaagcaatgcaagtttgccacaacaagaatcttggggatattcttgccttggagtatgattggaatgaggaggtcattgcacagttctatgcgacagcattctttggtactactaggaagggaactccttatgtaaagtggatgactgagggtgttaggcacaagatttctaagaatgctcctaggacttgtatgggaactactcatggtttgcatccaaactacaaggtgttgtactcaatatttcgttggtccttgcttccgaaggttggagatgccactgctttgccttccaaacatgctcatcttctcagtcgcatgcgctacaatcagcctcctttcagtgtattgaagttgatttggtatgagattgccaacaccattcttgagcctaagcgaggttgcatctatgctccattcattatgaagatgattgagtcagtcaccggggtgttctacatcaaagatgggcgccacaatcctttttgtcctcgtgttccaccattctcttctccagtagcacccagatccatcccttctacctcaggtggtccttcttctagtgctccaccgccatcctcgagttcttctcccatcaagaaggctcttcaggcaatcttttgtatgtgtgctaagactgcaaagaaagtgaagaagatagaaaggcgacagaaggaagatagaagagaggctgggaaagaagtgtcagatgattctgaagatgaggtctatgtggatccttttgaggcttatgaggcagcccgcaatgttgccggtggagatgatgatgaggatgacgttgaggcagctgctgaggatgttcatactgatgttgacaccgctgcacagtccgatgagtctcatctctccggcgataccgagattgttccctccgatggagatggagatgagtga

SEQ ID NO: 10520 - DNA, 1539 bp, Oryza sativa
  Clone ID: PAT_MRT4530_16833C.1
atgtcaggtacaagttccgacgaaccaacactggagaatctagcgcataaactgaagggtatggaaaattggtatgaagagttgatgcgtaatagtaaatcatacaaggaaagcacagataaacatttaaaaaccttaagtgaaagcctggtgaaagtagtggatcaaattgagaaaatgaatcaatcacataaacaattaactgaaaacattcagaatatgattattgaacatgaaaatattgtgcgacgcattggtttacttgaggctgcaggtgaagaaggtgcaggtgccactgctcatcgacaccaaagatatgacgatgaagacgaagagcaatctgttgctgatgatgtggaggaagacgagagtgttggaaatagaagacaacgtcgagttagggacaaagatgatcctttatctaaggtaaaatttactatgccttcttttgatgaaacatactatcaagagatgatgattgctttgtcacgatgtgatttgcaagaaactgaggatgctagaatttctaggttctatggaagtcttaatagagagattcgggatattcttgaatataaagaatacaataccatgaatagattattccattttgcatgcaaagctgaaagagaagtgcagggacgcaacaagcatagaagttcttttgcaggtgctacttccacacgacagtcaacaccacgtcaagctactactgccgttcgttcacctacttctacgccatccaatgctcaagaaaaaagcaaaaacgcttcagttcagactccagccaagagtgcaacttcagtagcttccactggacgtacccgtgatattacatgtcataagtgccatggcattggacacattgcacgtgactgtccaaatcggcgagctctatttgtgaatgatgatggtgagtatacttctactagtgattgtgatgatgaatatgctttagctgccactgaccacgcaggaggacaagataatgatgacatcgaggaagtccatttgcatccagagtcgctagatcagtatcctagcctaattgtcaagctagcacttagtgctaaagagaagtgtgaagagcaaaaccaatgtcacaatttgttccaaagcaaagttcttgtgaaagaccataccgtcaaaatgattattgatagcgggagttgcaacaatttagcaagtgaagagatggtcaagaagcttggcttgactacccatccacctccacatccgtatcatattcagtggtttaatacatgtggtaagatgaaggaatatgaggatgtttttcacgatgagatacctccaaggatggccaatggacgagagagtgcacacaatcaagaagatgggattgagtcgaggacgactccaattctagaagaggaggatgatgaggacatcacttcgttggatacgctcataacttcacacactccaatgataattccaagtccaagtccagttcggcctccagagacagcactgacttcaaacggacctagcgccttcatgccaactcgatttgggtga

SEQ ID NO: 10521 - DNA, 1811 bp, Oryza sativa
  Clone ID: PAT_MRT4530_16834C.1
atggcctacataagcattggagaaggtgcgaagcgacaatggtggagaattcaagaacactcaagtgaagaatttcttgatgaagaaggaatcaagcacgagttctccgccccctatgatcctccccaaaatggcattgttgaaaggaagaatcaaaccctcattgaagccgcaagggcaatgcttgatgagtacaagacttcggatgtcttttgggcgaaggccgtgagtaccgcatgtcatgccatcaaccgcttttacctccacaagatcctaaagaaaacttcatatgagctcttgagtggtaagaagcctaatgtttcatattttcgtgtctttgggagcaaatgctttattttgagtaagaggtctcgctcatctaagttctcacctaaggtggatgagggattcttacttggctatgaatcaaatgcatatgcctatcgtgtcttcaacaaaacctctggtattgttgaagtcactagggatgtgacatttgatgaatctaatggctcccaaggagagcaagttgttgtacatgttgtaggtgatgtggatccaagtcaagctataggcccggaagttccgggttatccagtccggaacctccggaccagtgacagtgaagacgtgccaacggcggtggaagatgcgcttggtgatccggattgggagatgggtatgcaagaggagttgaataacttcactcgcaaccaagtatggacgtcatgggcaccaagtagatttttcgcaacaagaaagaagaacatggggtggttattgttccaaatggatgtcaagagtgcctttctcaatggacctatctcggagttggtctatgtggagcaaccaccagggttcgaggatccaaagttgccaaaccatgtgtacaagctccacaaggcgctctacgggctcaaacaagcccctagagcttggttcgagatgtctatgatgggcgagttgaccttcttcctcgggctacaagtgaagcaagcacaagagggcatcttcatctctcaaactaagtacgtgaaagacatactcaagaagtttgggatggaggatgccaaacctatcaagacgcccatacctactaatggccacctagacctcgacgataatggtaaaagtgtggaccaaaaggattgtgactttgagctttttggctattctgattcggattatgcaggtggtcagtatgctcgagagaagcgccagaagctttcacaggatgttcccgctgacatgagaccccccgttgcctttgaatcagatattgatgaaaatgagaatgagcctgggactgagagccatcctttgagctttttccagaagaggttgtttgatcctacccttaggcgtcagagggtgaactatctgaagaatctgctaaagtgtgcaaaggataggatggtcagtcctgacacattgcctgttgactctcaggatgacagattcaggaccttggtgcaggttgattggtataattcagtgatcatgggaagatctcatccagtggtagagatgaagtggcttgactggcagtacatgtcctcaaagaacaacttggtattcaatgaggtgcgcaagtattcctggaatgaggaagtaattggtcaattctactccatcgctttcttcggcactaccaggaagggacttcattttgtgaagtggaccattcaggggcagcagtacaagacctctatggcacagtttgctgcagctttggagctagatgatgatgacctaagtcgtccacatatctttgaggaggatgctttatcagtgaccagcaccactttcat

SEQ ID NO: 10522 - DNA, 4359 bp, Oryza sativa
  Clone ID: PAT_MRT4530_16835C.1
atgtcggacttagggggaaagaacggggaaaatggaaatgaatatggagcgagcagcaagggaactccatcacccaagggagctactataccttttgattacagcaaacttaccattccccctcacaactttgtctccgtgcctttcgggcgtgctcctcaatttgatgggacacattacgccgcttggaagcacaagatgaagttgcatctaatctctttgcatccaagtatttggaaagttgtttgtacaggtgttgatgtaccccatgatgacatggagctcacttcggagcaagagcaactcatccaccgcaatgctcaagcttccaatgcaattctctctgccttgagtccggaggagttcaacaaggttgatgggcttgaggaggccaaggagatatgggatactttgcaattggctcatgagggatcacccgccgttcctgaggccaagattgagttgttggaaggaagacttggaagatttgtgatggatgacaaacttctccgtgcttttggtccaagaaatcccactcttgtatcaatgatacaagaaaggaaagacttcaagaggctcaccccaagtgatattcttagaagaattgtgtctcatgagatgcaagaagaggaagctcgtgaagtgaggcaaatggtgaagaatgccgccatgatcaaaaatcaagaagtagttttgaaggcaaaacaagaagaagagtcaagttgtgaagaaagtgaagatgaagagatggcttttattgtcaagatattcaagcactttcttcgcaagagtggctatggcaaagggaggaaagatgatgacaagggaaagaggcaatcaaagagagcttgcttcaattgtggcgaatatggccacttcattgccgattttcccaagtcaaatgaagctaaggctaagggaggcaataagaagccggagcatgctcatgtggcggaggtgtggtactccggagatgaagaagatcccgaggtcaagcccaagcccaagccaaaagacaaggttgaaggagaagatggtgttgctatcgtcgccttcaagtcatcctcttcaagcaaggagcgtctcttcaataacttgagtgatgacgacgatgactcctaccactactcttgcttcatggcccaaggccgcaaggtgatgactcaaaagccctctcacacctctcttaatgttgattctagtgatgaggaaactagccttagggttgtcaatgaaactcttcaagagaaatttgctaatttagacaaaagtcataaagatcttgaagttcaatttgacactctttggaatagcacttctcaaccaaatgtggtttctaattcttccaacccttctactagcaatggttgtgctaggtgttacaatattgatttgaactcttatgctactaatgttgatgctatgcaagctcttaagaaagagaatgagaagttgggcacattggtgaaatatggatgcatgaagacataccattcaaaagatgccctttacaagaccatcaccgctcatcctaacaaggatggacacgggctcaagttttctggcggaagtcctgtgtctaagcgtgtgatgataaatgggaaagaatgcttgatgtttgtgagagaaggcaaagctccacaagcaagtgaggtgacttgccccttcactggtcagacacccagaagttccgggcaaaatgaccagaagttcctgtcctgtaagacaggaagttccggacattttgtcaggaagttccgggcttctgatagaccgaagggggtgaccggaagttccgggtataatgccaggaaattccggccagagggtctttactatgattcatatgcatactcctccggtggctcaagttgggttgtggacagtagctgcaccaatcatatgacgagagagaggcgtatgtttacaagtcttgatgaggagggtggaagtcgtaagaatattgtctttggagatgatggtaaaggaaaggtaatgggtctcggtaagattgccatttccaagaatcaatctctatctaatgtcctccttgtcaattcattaagctacaatttattatccgtgtctcaattgtgtaagttaggatttaattgcttgtttaccgatgtggatgtgaccgtttttaggcgagatgactcttccatagcattcaagggtgtgttaaagggtgatctatatcttgttaatttcgacatggatagagtgaatccggaggcatgcttgattgctaaatcttctatgggttggctatggcaccgtaggctagcccatgttggaatgaggaatttggcatctcttctaaaaggggaacacattcttggtctatctaatgtttcttttgagaaagatcgtgtgtgtagtgcttgccaagccgggaagcaagttgggagtccacatgccataaaaaacatcatgactacaacaagaccactcgagcttcttcatatggatttatttgggcccatggcctacataagcattggaggtaacaagtatggtttcgttattgttgatgatttttcacgcttcacttgggtgtactttctccatgacaaaagcgaagctcaagatgtcttcaagcgcttcgcaaagcaagctcaaaacctctatgatctcactatcaagaagaacactcaagtggaggaatttcttgatgaagaaggaatcaagcacgagttctccgccccctatgatcctccccaaaacggcattgttgagaggaagaaccaaaccctcattgaagccgcaagggcaatgcttgatgagtacaagacttcggatgtcttttgggcggaggccgtgagtaccgcatgtcataccatcaaccgcttgtacctccacaagatcctaaagaaaacttcatatgagctcttgagtggtaagaagcctaatgtttcatattttcgtgtctttgggagcaaatgttttattttaagtaagaaacctcgctcatctaagttctctcctaaggtggatgagggattcttacttggctatgaatcaaatgcacatgcctatcgtgtcttcaacaaaacctccggtattgttgaagtcactagggatgtgacatttgatgaatctaatggctcccaaggagagcaagttgttgtacatgttgtaggtgatgtggatccaagtcaagctataggcactaaggctattggagacatacgaccaatcgagacgcaggatgaccaagaagatagggatcaacctccgtcatcgacatccaatagccctacaagtgttgtgtctgctgagccggaagttccgagtcctattgaccggaacctccggacatctccaggcccggaagttccggattttacagtccggaacctccggacctgtggcagtgaagacgtgccaacggcacaggtcccctcagtgcaccatccaaggatacatcacactgtccaaagagatcattccgtcgacaacatacttggtgacataagaaaaggggtaactactcgctcttgtgtcgcaggtttttgtcaacacttctcgtttgtctcttctttggaaccaatcagggtggaagatacgcttggtgatccagattgggtgatggccatgcaagaggagttaaataacttcactcgcaaccaaatatggactttggtggagagacccaagcaaaatgtcatcggtaccaagttattccaaatggatatcaagagtgcctttctcaatggacctatctcggagttggtctatgtggagcaaccaccggggttcgaggatccaaagttgccaaaccatgtgtacaagctccacaaggcgctctacgggctcaagcaagcccctagagcttggtatgaatgtctccgaaattttcttttgaagaatggtttcgaaattggaaaggcggatactactctcttcactaaaaaatttaagagtgatttattcatatgccaaatttatgtcgatgacataatatttggttctactaatgcctctttttgtgaagaatttagtagtatcatgactaaaaggttcgagatgtctatgataggcgagttgaccttcttcctcgggctacaagtgaagcaagcacaagaggacaccttcatctctcaaaccaagtacgtgaaagacatactcaagaagtttgggatggaggatgccaaacttatcaagacgcccatgcctactaatggccacctagacctcgacgataatggtaaatatgtggaccaaaagggttgtgactttgaggttttgggctattccgattcggattatgccgggtgtaaggttgatagaaaaagcacaaccgggacttgtcaatttcttgggccgtcccttgttaattggtcctccaagaagtaa

SEQ ID NO: 10523 - DNA, 1524 bp, Oryza sativa
  Clone ID: PAT_MRT4530_16836C.1
atggcgctcttctcccgcctccgcgcctcttctccgccgctcgcgcccgcggaccctttcgtcctcagcctcgtcttcaagtcctgcgccgcggcggccgacgcgaggttcctcccgcacgcggcgtcgctgcacgcgttcgcggtccgctcctcggccgtctcctccgtcttcgtcgccacggccctggccgacgtctacgccaaggctggatgcctcggcctcgcgcttaaggtgttcgacgaaatgccgcacaagaacgtggtctcttggaccacgctggttgcctcgctgacgagggccggccggcgccacgaagcgctccgccgcttctccgagatgcgcgcctctggcgtgcactgcgattcgtacgcctacgcggccgcgctcacagcgtgcgccgacgccggattgctgtctcgcgggcgcgaggtgcacgccttctgcgccaagctcggccttgactcgacgccctacgtcgccaacacgctcgccactctgtacgcgcgctgcagcgacgtcgaccgtgcgctggctgctgtcagccgcatgggcacgcgcgacgtcgccgcttggacgacggtgatctctgcctatgtgcagaccggccgtgcaaaggaggccatcgaggcgtttgtccgaatgcttcgtgaggaatcatcagtggctgcatgccgaatgaatacacatatgctgcagttattgctgcgtgtgcagatattgcttgggagtgcgctcattgacatgtatggaaagagtggtagcatgttagatgctgatatagtattctcccatcgtgtgaaagatgatgttgtttcgtggactgcaatgatcgttggatatgctgagcatgggcacagcaagaaggcacttgaattgttccaggaaatgtgtcatgttggactaaagccagaccatgtcacattcataggtgtgctcaatgcttgctgtcatgctggggaagtcgagcttggattgagatacctcaatgaaatgaaccaaatttatggcctgtatcctgccaaggagcactatggctgtgtggtggatttgttgggcagagctggtagaataaacgaagctgaggaactgattggaaagatagctgccaacgaaagagatggtgttgtttggacatctttgcttagggcgtgtgcagcccgaggagaagaggaaactggaaagaaagctgcagagagggcaatggaggcagaaccatggggcgcaggagcacatgtggcaatggcgaatctttatgccagcaagggacaatggcacgaggctgcacaagaacggcatatgatgaagcagaaaggggttgtgaaaggggcaggctggtcatcaatcacggttggaggggagggcaggagagtaggggtgtttgtggccagtgatcgcacacatccccaggacagtgcaatctacaggatgcttgagttgatatatttcggaactggaatggctcgctatgtacctgatcagttggatttaggatctgaagtggatatgatgattagcagttaa

SEQ ID NO: 10524 - DNA, 560 bp, Oryza sativa
  Clone ID: PAT_MRT4530_16837C.1
cattttaacactccctccaaattcttttgctctcaagtttgtttagcctatctcaactttcatttgctgcaattagctaaggcattttgcatatacaagttttgctttagttcggtgcaagtttaatcagctggtatttgcttacccccgctcgagtagtcttgtacccttgctctttgttgtagccatgaagaaatgattctcgggcatcttcaagagaggatcgagctcgaggacgaaccgacacgatgaaccaagtacaccttcctccgcggatgcatccatgattgatttcgtgtatgttgcgagtaggcaacggctcggtttatttatatggagatatcaggatgcttgcaagatgtatggattgatttcgtgtatgttacgagtaggcggcggcttggtttatttatatgaagatatcaggacgcttgcacgatgtagggagatatcaggcgtaagggtgcaaggggtgaagatgtatggatatattaggtgcaaggtgcgcatgtcgtgagcgcaagtggggtccttctggtgtctccaccacacatgactta

SEQ ID NO: 10525 - DNA, 218 bp, Oryza sativa
  unsure (1)..(218): unsure at all n locations
  Clone ID: PAT_MRT4530_16838C.1
ggcgttgcggcccaatacctgcccggaagtnaagtggatctggagcagtnagtnaggttggccgcgccaccntnaactgcnacggcaacnttgtnttcctcctctaccgcgaaggtcnaggcccaccaccnaccggaggccggaggtnatcgatggcgccgcacgaaacggagacggggacggagtctgacggcgncaaggnaggcnaaggagtcgat

SEQ ID NO: 10526 - DNA, 1940 bp, Oryza sativa
  Clone ID: PAT_MRT4530_16839C.1
acatcccctgtcaatcttgctcatcttcatctatcttactcacaccgccaacgcaagacacaaaacgaaaaaacaaaagggagagcccaatcaatgcagttgatcatcaacttaatttacaggtgaaaaattaaggcgagctatgtagttaaatgcccctatgtgatgtggtggcaaatcttgaccaacaaaaagaagaattcaaagaagaagaagacgtattactgcttgatccatcattagcacagcctaggcaagcctctaccgccggtttgatggcaggcggcggcgccgaacgacgacgacggcctgccgcccttggccatcttggacatctgccctcgcatctccttgcacgctctctccagctccaccacccgattctgcatcttctgcaggttcagcttgagcagctccttctcgtccatggcgtccaggtccacgctccgggcgcggctgccgctgacgatgatcttcctcggcgtctgcgacgggtcaggcctgccgccgccggtgcccttcgccgcggcggcggcgggtctgatctggagcttggactgctgcgaggctagcgcctgcacggcgatccccggcgggatcctccggttcttggccaggtccttgcacgcctccagcgtcagcttctcgtagttgaggcaccggcatagcgtcgtccgctcctcgatggtcagcgtcgggtgagactcaaggtagatatccaatgccctgtacacgccgtcgtagcattcccgagccgagtccggcaggctctcggcgacggcgaggaacttggacaccctcaggccatggtccggcgagatctcaccgaggtacttgtcgaccagccttccaaccttcctcatcctctgcgacggcaagtcggcctcctcctcggagccgacgaacaccctgaccagccgcatgaccaggttcacgtcgtacacgccaccgtcgtcgccggagacgaggaggtcgtcgagcgtggcctggtccagcatcagccccatgagcctctccagtttgtgcctgcactccttgctcagccccacggccgacacgatccggagcacccagaagaggccccggcacgagaacgcggtgccgccgacgagcgccacgccgtgcacggccgtgtcggcgagtccggcgagtccgccgccgccctccctgcacagcgccggcctgcgcgtggcggcgcggaggtagtgcagcaggaaccgcgtcaggatcaggttcttgttctcgatgccgtagcagccgagcaccctcatcgccttctcgatggtctgcgggcacagcgacgtcatgtcgtcgaaccaccactccctggcgaagcacggcttcatcgactcgggcgtcttggtggacgacgaccggccgaacccgagcgtgtccggcgacgacgagcacgacgacgacgagcggttcggcgtcccgactgcccccgcggcgacgggcgtctccggattggcggtgatcttggagaacagcgcggagatgagcctctcgaggaggccggaggcgtcggccgccgcggcgaatggctcgcagctcttgacggcggcgaggacgtcggcccatgtccagtagtagaggccgtccacgaatgcctctgcttgggtcaggaggttgcaggtgcacacctcctcggtcatctccaagaacacggcggcgcagtgcaggagcgggaggttggacgggcagagcgggacgcggccattgttgtagcagaacctggccacgagctcgaacccctcgccgccgccggggaagtcggcgagcttgacggacaggctctccgcccggctcgtcttcctcttcttcttctcctgcgtcaccattgtcctcaacctccccgagaacgcacacatgacgctctgatgaagaagaagcgtgtgatggccattgatgtgcaccttgaggtcgcagagctcattcat

SEQ ID NO: 10527 - DNA, 1019 bp, Oryza sativa
  unsure (1)..(1019): unsure at all n locations
  Clone ID: PAT_MRT4530_1683C.1
cccacgcgtccggcctcctcccccgtctgtactgactactgagatggaagcgagcaagtgaaagagagagattcctggcttcctgcctcacgcgcacgcacaccaacctcaagccatcgggctctctcaccccgcacttctcccaccgccaccgaggcacggctctcgaaccttcccactgcttcctccctccctcccctcccctccccgcgacgagacgagacgagaccggcggcggcggccggagtcaagagccttccctatgcagcggcggcggggcctcgccgcgctcgccgtcctcctcgccctcgcggcgcgcggcgcggacgcgtccgtccacgagtactcgggcggggggttcgcgccgcgggccaactccttcttcttccacggcggcagcgaggggctgtacgcctccgaccccacctccaactcctccgcctccttcatcaggtttgactctgtcacatttcgacggacccaggagtcagcaggtaggcatgaggctatgcagcaaaagacagggttagttgaggctattattgttgagatccaggacagaagcaagattggtggttcttacttgcattctgatgcaatatgctgcactcctgagctcgataaagagaagtcctgcaaagttggtgaagtaattatacagccaaatcctgataatcctgactggccaaaaagggttcagacattttttagtggtagagatgaagaagctagcatggtcacacaagttgtatctataaacaaaacagggatgtactacctctattttatgttctgtgatccacagctcaagggattgaagattacaggcaggactgtttggcgaaacccacaaggttatctccctggtaaaatggccccaatgatgacattttatggtttcatgtcgcttgcatatcttgtacttggacttctgngggttcttcagattgggcgaagctggaaggatattttgagctgcctaccatataacagctgctaatggtctttgcatgcgccac

SEQ ID NO: 10528 - DNA, 154 bp, Oryza sativa
  Clone ID: PAT_MRT4530_16840C.1
gggtggctacacaaggatcatccctacatttccaagacggggagacaaatgcacctaatggcttgacatgtgaggcttcgtctaaggagcccgttcatttgagccgcgctgcctaggtggagggggtcaaggggaatgcctttttgaataatct

SEQ ID NO: 10529 - DNA, 1617 bp, Oryza sativa
  Clone ID: PAT_MRT4530_16841C.1
atgaatgagctctgcgacctcaaggtgcacatcaatggccatcacacgcttcttcttcatcagagcgtcatgtgtgcgttctcggggaggttgaggacaatggtgacgcaggagaagaagaagaggaagacgagccgggcggagagcctgtccgtcaagctcgccgacttccccggcggcggcgaggggttcgagctcgtggccaggttctgctacaacaatggccgcgtcccgctctgcccgtccaacctcccgctcctgcactgcgccgccgtgttcttggagatgaccgaggaggtgtgcacctgcaacctcctgacccaagcagaggcattcgtggacggcctctactactggacatgggccgacgtcctcgccgccgtcaagagctgcgagccattcgccgcggcggccgacgcctccggcctcctcgagaggctcatctccgcgctgttctccaagatcaccgccaatccggagacgcccgtcgccgcgggggcagtcgggacgccgaaccgctcgtcgtcgtcgtgctcgtcgtcgccggacacgctcgggttcggccggtcgtcgtccaccaagacgcccgagtcgatgaagccgtgcttcgccagggagtggtggttcgacgacatgacgtcgctgtgcccccagaccatccaaaaggcgatgagggtgctcggctgctacggcatcgagaacaagaccctgatcctgacgcggttcttgttgcactacctccgcgccgccacgcgcaggccggctctgtgcagggaggccgccggcggactcgccggactcgccgacacggccgtgcacggcgtggcgctcgtcggcggcaccgcgttctcgtgccggggcctcttctgggtgctccggatcgtgtcgcccgtggggctgagcaaggagtgcaggcacaaactggagaggctcatggggctgatgctggaccaggccacgctcgacgacctcctcgtctccggcgacgacggtggcgtgtacgacgtgaacctggtcatgcggctggtcagggtgttcgtcggctccgaggaggaggccgacttgccgtcgcagaggatgaggaaggttggaaggctggtcgacaagtacctcggtgagatctcgccggaccatggcctgagggtgtccaagttcctcgccgtcgccgagagcctgccggactcggctcgggaatgctacgacggcgtgtacagggcattggatatctaccttgaggggcagtaccagtctagtcttttctcctatcttaatgaaattggccggccatcctttggccgtcccggcaaaaaaaaaatctcaccgacgctgaccatcgaggagcggacgacgctatgccggtgcctcaactacgagaagctgacgctggaggcgtgcaaggacctggccaagaaccggaggatcccgccggggatcgccgtgcaggcgctagcctcgcagcagtccaagctccagatcagacccgccgccgccgtggcgaagggcaccggcggctgcaggcctgacccgtcgcagacgccgaggaagatcatcgtcagcggcagccgcgcccggagcgtggacctggacgccatggacgagaagagctgctcaagctga

SEQ ID NO: 10530 - DNA, 322 bp, Oryza sativa
  unsure (1)..(322): unsure at all n locations
  Clone ID: PAT_MRT4530_16842C.1
ttctgtctgtatactataccatatcttaccagactagatcttgcttagctagctagcgaattagtgtcgtcttctagctagttattacgnattcttgtgtngattacgttgactaattaatggcgaattcgatcgcgatggcactgttgttcgtcaagtcgttcgttgtactctcgctcgccgccgtgctgctcgctctcgacggcggcggcggcgccttcgncatgggcctgccctngnngtngccgacggtgaacttcagcatcggcgtgcagggcatggtgtgntgcaagacctgcagggaccncggctaccttnaccg

SEQ ID NO: 10531 - DNA, 285 bp, Oryza sativa
  Clone ID: PAT_MRT4530_16843C.1
atggccatagcggccatagcggcctcccagcagctgcgcgcacggcccatccgtctccgcgtcaagccagagcagttccacccgaggggaacacttctctacggatactggttctccagacgcctatgcaagatgcaggctaaaaacgagaacatccgagaggctagaggaactactactaagaaagatggaatggagggtgagagcgcgcttggaagctttgctctgaatggtgtcttcgtggttgtgtgtctccggagtgaaggccaacgtctccttttatag

SEQ ID NO: 10532 - DNA, 445 bp, Oryza sativa
  Clone ID: PAT_MRT4530_16844C.1
attatatgttactagttatgcttaaaattttgatatgaattagcatacatcttactaattacagatgttattgcaagtaacaccagttaattgtaaaacactattactcaatacacacactgttgctaataatgaatgctggtattataacatctttaataaacaaaattcccaaaagtaagcacattaagtttgatactagcatgctcaactttcacattggttgctgctttctccattgaaaaatgtctggactactgatcattgctgatggaaatttgctgtacttccctccacatttactgtaggcttattaataagagtttaaaattttaagttagcatgcatttggtggttccagtgttgtgattttttgcttggaatcaaatggccacccaatcacagcctaatgcatttgtgtaccaattccacctttaactgatct

SEQ ID NO: 10533 - DNA, 580 bp, Oryza sativa
  Clone ID: PAT_MRT4530_16845C.1
aattcggcacgaggaagaggtcgttcacaacagatacatagattgattgcttctggtacagggaatggcatatggtgatggaaatatcaaagtgaacagatatgcacaacaaactgacgcagggcaagaaaccaagtgtcttctcctgtcatcgaaggcacttgttaatgtgaagccaaaccttcagatcattgctgatgatgtcaaatgtacacatggagctgccatcagtggtgaacatgatccaaatgcgatctacttcttgcaagcaagaggcatcgatgctaaaacagcggcggatgccctaaatttcgcctttggagcccatgtgataaaccaaataccattcaagcccatagagaaaaagacattagctcatttcaaagcgttgttggcttcctcaagacaaaacgacgaatgaggccctcattattgttatggagccagttcaacatttttcttttatcaaaatgagaaatatagaaagaacattagaagatttttggtgaaacacgacgagaaacagataactgttttgcaatgtcaagagtgatgttattctaaaaaaaaaaaaaaaaaa

SEQ ID NO: 10534 - DNA, 1494 bp, Oryza sativa
  Clone ID: PAT_MRT4530_16846C.1
atgccgagctcgccgaaggtcttctcctcggcgaccacctcccgccgcgccacgctccgccgcatcctctccaccccggccttctccgccgcctgcctcctcttcggcctcgcgggcttcctcgccgccgcgctctccttctcctggtcgccggggagcgcgccgcgcgcccgctgcccggactcctcccgcccgctctccgtctccgtcgcgtgggaccgccggcccggggatgcgtccgccggggccgtggcggcggcgggcgccgccgtggatctcccggcgtcgcacgccaccgggtcgcgcgggaggcacaaggtgatggccttcgtcgggatcttcaccgggttcggctccgtcgggcggcgacgcgcgctgcggcggacgtggctccccgcggatcggcagggtctccttcgattggaggaagcaactggtctggcattcagatttgtgattggaaaaagtaatgacaagtctaagatggcagctttagaaagagaggttcaagaatacgatgatttcgtgcttttagatctggaggaggagtatagcaagcttccgtacaaaacgttagcttactttaaggctgcgtatgcattgtatgactctgacttctatgttaaagctgatgatgatatctacttgagaccagatagactttcattgcttttggctaaggagcgttcacatacacaaacatacattggatgcatgaagaaggggcctgtttttactgacccaaagctgaaatggtatgagccacaatcctttttgctcggatcagaatacttccttcatgcatatgggcctatttacgctttatcagccgatgtggtggcaagcttggttgccttgaggaacaacagtttccgtatgttcagcaatgaggatgttactattggatcctggatgcttgctatgaacgtcaaccatgagaacacacatgcactttgttcacctgagtgcacagagtcttcaattgctgtttgggatattccaaaatgttcagggctatgccacccggaggtaaagatgctggagcttcatcgaaggaaggaatgtacaggtggtccatctgcggtgtctgaatctgacgaccgataaattatcgtccctacacggactacagtccaggcaacatgatgacagaatggttgaccactgacgcctcgaatggattgcccgagcattcactgacttcaccaggcacaatcattgcctggggcgcgccgtccaggcagccaacaccgccgatttcaggcgtcagatacacgggatcacagagctcttgttccacattcttgtcacattctcatttgcttatgacttcagaacttggtagtatattcttgccaggaatgctcatcatgtgcccttgtgaagcagttttgttgtatagtagtagaatgcatcacaaattaacacacagtttctatgcttcgtacttttgaatatatttttttaaccttcgctataaaaaaaaaaaaaaaa

SEQ ID NO: 10535 - DNA, 376 bp, Oryza sativa
  Clone ID: PAT_MRT4530_16847C.1
atgtacctgatggtgccgtctaccttcggtgctgccccctgctcctggccttgggaacggaggttgtattgcaggtcgggcgtcggcggggctcgtgcaggcggcggcagtgaagtcgcgctggattccggcggcggggatcagtcgagggcgcgccgacgtgatggagagttggagaccgggagtcggggaggagacgacgacgatgggggcgccggtggtggagacatgtcgcggcgaggagggtgtgacgggaaggagacaacggcgatggaagcgccggcggtgaaggcgtgtcatgacgataaggatggggcgcggcgcgaggtgatgccggcgatgggggcaccggtggtggaggcgtggaacaacgcgg

SEQ ID NO: 10536 - DNA, 2176 bp, Oryza sativa
  Clone ID: PAT_MRT4530_16848C.1
gtgccgttccctctcctctctgtcgcctcgccaccaccatagctaatcctcctcctccgtttattttacttttctcccctcttcgcctctcctcgctgctgttatatccgctttcctctccccctcctatcccccctctcctcctgctcctcggcctcctcccctggatgccagccgcggcctgaccctcaccgctggggagcccccctcccattcttcgcttcccccgcggttgcgttcccggagcggcgttccagcggccacagctttccctcattgtacacatgatgggttgcttcactgtcctgagatccaagaagaagaagcctcttgctctcaccaagaaatcggttgatgcaagggaaagcacgtcctcaagactcccagagccagaagcgcatgtgccatcgttacaatctgctcctcctagttttaggaacaaggctaaaatccaccaatcggaaaagaaagcttcttacagcagagcgcgcgtgctgtctgctccttccagcctaattgtggttgatcaggatggtcttccatatgccgaattcgatgatcaagatgactccaggggcaagggaggttctataaagggccaccgtttctctaatccactgccccttcctctcccatcaccagaaggaaaatcattgaggaactttggcagcttcaaagccatcaatgcaagtggaccactcgatgcttcaggccctctgccacttcctccaaagaagtgtgatgggcttaagaatttctcctatgaggaactttcatcagcttgccaatggttttctggtgaccagtgtgtttccgaaagtttgacatcaacatcatacaaggcgtcctttagggatgattttaccgacccaaagaccattgaagcaatagtatctcggttgctctcctccactcagagtttgaaagagtttaaaacacaagtgaataccttggcatcacttcagcatcccaacttatgtaaactaatcggctttcacgcaagagaagaatctaatgaaaggatgttggtctatgagcgactccatcatggcagcttagataaactactctttggaagatcggatggtcgtttcatggactggtcagcacgtttgaaggttgctcttggtgctgctagaggcctggctttcctacatgatgaagggccttttcaggccatgtacaatgacttctcaacctcaaacatccaaattgacaaagatttcactgcaaagctatcaggatatggatgtgttggattcaataccgaggaggaaatatcaaatgcatctgtggctgctgcaaacctctcagtggaaaccttggagaaaggtgtactgactcccaagagcaacgtatggtgctttggagttgtcctgctggagctaataacaggaaggaagaaccttgatgtccgttcctcaaaagaagaacgcaatattgtcaagtggagtaggcctttcctcaccgatgatagtcgcctatcgttaatcatggactcccgtataaaaggacgcttccctaccaaggctgctcggattgtagcagatatcatattgagatgccttaataaagatccatcagagaggcctaccatgagggccgttgtggagtccctagcaagcgtccaggacataaaggttccatgtcgatatcctttgcaagagccatctgctgccccaagaaaggtgatgttaaaatctacaagtctcaatggcatcattcatcaccatcctgtcgtaaccttctcaccgtcacctccttcgcgaaaccaacatttgctctcgccaaggtcatccacgtctgcactgcttcctccaaggaccagctgtgctctggatgaccctagagtaagctctatcaagaaatcgccttcccctattttacggagatctggtgttgagggtttttgattgtccatatttttttttctcttctcttcacttcgatttgtttgttgtttttgctagcctagtggttttagtgtaatctcatatattgcaagacaaatggccttatgaactcccttcagtagtactaaaaagggaagggtgaactgtagatagaaccagggttgtagatacttttcgttttctaattggatggaagcagcgtgttgagtgcgccttgtaaactccattatgcaataataaacgtgtgtcactcagtttttttt

SEQ ID NO: 10537 - DNA, 387 bp, Oryza sativa
  Clone ID: PAT_MRT4530_16849C.1
atgggaatggggaagattaacttgccacctgatcaatattttcagaaatacctctcatctctggttaattgcattctggttcaggcaatcgagagtgggtgtcctaatccactccactcgcctcccagtcatgagggcgatgcggtcagcgtcaatccacccggaggcggtgcaagccgtcgaggccgccacgtctggtgccggaggaggtggagcggcgccgatggcagggcagatcccgtggcagatctagatgtgaccatggatagcagtgaccaaggatgggcaaagccacgacaaaatccaatggctgcagtagcgtcggtgacttcccgtggtggatcctcgggcgtcagcggcttcctggaacggtggcaacgatggtga

SEQ ID NO: 10538 - DNA, 2064 bp, Oryza sativa
  Clone ID: PAT_MRT4530_1684C.1
atggccgaacaagcaaaggcgcacaacctctctccgagtgttagcggtgacgacggggagccgaacccacgccgtcgagctcgtactccaccgccccctccacgccaaagtcctaggcgggaggaggcgctcgagagggtcgaaggatccgcgacttcgacatccacgggtgatggggaagggcggcgagatggggagcgtcacctcctcgtctacggcgacggcagcacgccccagggcgcgctccaagctgcgggcgcgctcctacgtcacccgcccattgtccctgacccggagtctccagcccaacgttggctggacgacgtggccaacttagtcatgacggcacggcagcgcctaggtgctggtgggcggtcctccgccaccaagacctctggcgctgctaccaccggctccgtgtcgtcaaggcggagggcgcggcgagcggcggctgttgctcgccattcggccgccactccttcgtcagcgcctccgacccaggaagatctgcgtggggggccggatgcccgcatcggtatcgagcgccggcgtaatggccgacgtgctgcccacgcaaaggagggcgcctcctcgtccggagtgtcacatcaacacggacgcggggatcagccctccgtgcccccggttggtggtgtcggctgtagagcctttgtggcgagccttcggaacgtccgttggcccccaaggttccggcccaccatcgccgaaaaatatgacgggagcgtcaaccccgccgagtttctccaggtctacacgaccgggatcgaggccgccgggggtgacgacagggtcatggcgaatttctttcccatggccctgaagggacaggcacggggttggctaacgaacttgccacccgcgtcggtccactcctgggaggatttgtgccaacagttcaccatgaactttcaaggcacatatccgcgcccagggggggtgtgcggcacaaccgcatgctcgaaaagatcgcctccaaagagccccagactaccgcggagctttttcagctcgcggaccgagtggctcgcaaggaggaggcctggacttggaacccctccggttccggtgtggcaacttcggccgcccccgggtccgccgctcggtcagggcggcgggacaggaggaggaagaagaggtcggcccattccgacgacgagggtcatgtcctcgccgtcgatggcatttcgctggccacccgaaaggggaggcctgcgagcgacaaaaagaaggaagccgacgctccctgacctcggctacttggaagagcgaaggcggcgcgcggccctccgagccgcgcgctaccagcagagcctgcggcgctaccatcagcgccatgtccgggcccgatcactctgcgtcgacgacctcgtcctacgccgcgtccaaacgcgtgctggattgagcaagctctcaccaatgtgggagggcgcccccgacccccaggatggccccgaggccactgcgggaaggccgcacctatcgccctctgaccccgaggctaaccctgtgccgactcgacccgggagagtgcagggagaagaggcccccgagccgaacggtggcctaaggcccctgacgaccggagttggccctttgcccgcttgtcagacgacgccaggagcccccgacccccaggacggccccgaggccactgtgggaaggccgcccctgtcgtcctccgaccccgaggtcgtcggcacagaagacgagtgcaccccgcgaggccgcttggacaaagagtgccccagggatgtggcccctagcgaagaggatcggccccaccgaaaggcgcatcaggtcacggtggttacgtcttatcccctcggccaaatcttgtataaccgagagggtactggacgggtggtgaaatgggcaatcgaactctctgaattcgatttgcgctttgaaccaagccacgcgatcaagagccaggccctcgccgactttgtggcggagtggaccccagctcccgagctcgtctccgcccccgaggccagctcgggcccatcgcagctgcctcacaccaccctctgggtgatgtag

SEQ ID NO: 10539 - DNA, 341 bp, Oryza sativa
  Clone ID: PAT_MRT4530_16850C.1
ccttccaaaagtaaacatatattatccaatctcattggtggacaggggaacaaaggggggtgggtggcacaattaactttcttctgccaacgcgcaggtgacaggaaacttatagcgctattctgatgaacaatcaactccaaaatttacaggatcactcactgggcattcctagagaaattcaggcgaacctacaaatcaaagaaaccaaggatcaagccatgaaactaacatagggcatttaggaattcataattcactactaagaattgtgactggccttatgatcaactaaaaattgcccttccaagcaagcatgtcatgggtaatcagagaaacat

SEQ ID NO: 10540 - DNA, 160 bp, Oryza sativa
  Clone ID: PAT_MRT4530_16851C.1
aaccatgaggttgcgggttcaatccctggccttgctcagtgggttaaggatccagtggtgccgtgagctgtggtgtaggtcgccgatgtggcttggatcctgtgttgctgtggctctggcataggccggtggctacagctctgattagaagcagccctag

SEQ ID NO: 10541 - DNA, 282 bp, Oryza sativa
  Clone ID: PAT_MRT4530_16852C.1
tgcaacatgaacatcaccacacaaaccaggaagatgaccaggtggttcatctgcactctctctagtgtgagtctctatagagggtaacgcgctttaccgtctaaagcatggatgccgttgccgaggccgctccaaagacgatgagagctgagcagtacgataagtacgagggaggaccagaaggccttaagcatgaggaagtgcccatcccagcgcagaaagaaggggagttgctgatcaagatggacgcggcgagcgtgaaccccatctactggaagaatc

SEQ ID NO: 10542 - DNA, 159 bp, Oryza sativa
  Clone ID: PAT_MRT4530_16853C.1
atggccaatggaggagctccattagctcgagcaatgtggatccagaagggagctgtcaaagttctatttgagtttacgtctgatggatattatcctcactgccgctgttccgtcgagagagcaatggagatatacatgaacaacctcaaggaactcaag

SEQ ID NO: 10543 - DNA, 415 bp, Oryza sativa
  Clone ID: PAT_MRT4530_16854C.1
gggccctcccaatcgggaaaaaaaaaaaaagggggggggttttaaaacccccagcaaaggggaaaaaaggttccaaaaacaaagggggggggggctccggttttcccccagcccccaaacggttaatttaaactgggttggaaatgggggggaaaaaagggcaggccccccaccccccctttggtttttccaggcggaaaaatttggggggaaaaaaaattcgaaatctttacaaacagggggggaatttttccggtcccaaaaccgactggggggaacctccacaacccagtttatcccaggccgttttaaaagggggagcattcggccaagaaaagttggctttgcccccagggaaaaaaatcccccagggaaaaaatttgtaccagttaagggtttcttgggcgggcctttt

SEQ ID NO: 10544 - DNA, 1376 bp, Oryza sativa
  Clone ID: PAT_MRT4530_16855C.1
tcaggcgtcttgcagcagcaggagcgtgctcccgagcgcggcgcggaggctgtcgacctcgtccctggggatcaccaccgtgacgacgcggccgcggccgccggcgtccggctgcaccagcacggcgccctcctcgccgacgccgtcgaggccgtactccacgtggacgggccgctgccccttcagctccagctcgtagggcgccacctgctccatgtcgacgaacgtcaggttggcgccgccgtagacgacgacgtcgcccgggaacgcggcgaccgcgccggtctcgtcgacgaccttgtccccggccagcatcgccgccagctcggcgacgtcggtcttcgccggcgacgaggccgcctccacgtacccgaccctctgctcgttcgccagcgacttgccgctcctggcggccatgtccgtcctcaccacggtcaccgtggtcacctccttggacgccgccgccctgatcttcgccacggcctgccataggagcgccgagacgagctcgaacgtgcccgccgcatggcgtcccgccgcggattgcagcttcttgagcgccggctcggtgacgcggaaggagtaccacgccatggcgcggccggcggggacgagccagtggtcctcgatggggccgaccggcttgacggagcgcggcggcgcggcggcggctgcggcgggcgcgcggtccagcggcttgttcgccggctcgaggacggtgcccgcgggcttcttgccgctcagtatctgcgcccacgtgttgaagcaggcggtcgccgacgccacgtcgccgatgaggtgcgcccagctgaagccgagcgccatgccaccgcatttgaagctcgtgacctggatgtagaggagcggcgagaagaagagctcggggccgagcaccttgtcgtagcagagatggcggaggcggtcgggggattcgtcgcggagccagtcgtcgagggcgcggtcgcacctggcctccacgatgcggacgccgcagtcgttgcacttgatgtaggggcggcgcgccgcggcggcgtcggcgtcgttccgtcggttgcgggtgcgcggcgacggggccgtaggtttcgggccggcgacggggaagtaggcgtcgagccaggggaacatggggtccttgagcgacttgatggtgatcccgcgcacggcgtcgcccgcggggtagtagtacgcgccgcggaggtagtgcagcttgtaggccaggtcggcgtcggcgaggtcgtagttggcctcccccgtcaccgagctcggcaccaccgtagacagccggtgcccgtgcaccgccgccgccgccggtgtctcctgcccctcgagcaccatggcaagggaatcgcgcttgcaagaatggcgcttggttgtgt

SEQ ID NO: 10545 - DNA, 2166 bp, Oryza sativa
  Clone ID: PAT_MRT4530_16856C.1
atgtggcagggcctcagcgccaatgcacttggcgctgacaccttgcacaccctaaatagaccgatgtgcggcaatgaattaacggtgtcgctcgtggtgcaacgctcactatcacgggcccaacaattcatcaacaagtgggagctgcagtgcatgctgctggcgagcttctccttgcaaatcttcctcttgttctcctctggcttccgcaagcgccacagctcccgtgtgctcagtgtgctgttgtggcttgcctacctctcagctgaccctgtcgcggtttatgtcctcggccgcctctcgctacgcgccagtggctcctctgacccacggaaccagcagcagctagtcctcttctgggcacccttcctgctgctccacctcggtgggcaagagaccatgacggccttctccatggaggacaacacgctctggaagcgccacctgctgagcctcgccacccagatggcgacggctatctacgttgtcagcaagcaactgcgaggagacagccggctcgtggctcccatggtgcttgtgtttgtctttgggacagctaagtacgccgagagaatttgggcgctcaggagagctggctctgtggcacctggaacgagtagctccactgcaaatcttgtttctcgtgcctccagcaacgccgtctgggacacacaggggtattatagtcagctgtgctatgttattgaaaggaagctggagagaaatttcgagttcatcctggctgtagcaaatgagggcttcagactaagcctgggctttttcatggatatgacaccttcaatttctctgcttccggaggatatcagtgagatcaaaaatagtgtggaggtttttaaatcttcagaggatattgtccacatggcatacaagctggccgagatcaatctctccctgatttatgactacttgtacaccaagtttgggacgcgccatttccacatcgtcccagtttgtaatgtcttccacttgatcatcaaaattgctctaatctcggtggcgctcgcgttgttcatgagggccagagctggacaaaaggcacatgatgtagttgatgttatcatatcttacatactgcttgttggtgccattgttctggagatatgctctgtcctcatgtcattcatctcatcatgctgggcatacaagacgatcatcactcttcccctagcatgcccactgtgccaaaaattccctggtgtaattgcagcattgctcagcttggtcaggcatctccaccctgacagccgaggggagtggtcaggaaagctggctcagtacaacatgattgagggatgcatccaggagaaacaggcaggcgctggcctgctacgacgggcgaggcgctacatcggcatcgatgacagcaaggccatcaagcatatcggtgtctctcctgaggtcaagaagctggtccttgacaaactgttggagatagcatccacttcgcgcgtgctggaatgggaccttggtgtcggcaagtttcgtggccaatgggctcagtgggttgttgaagcgaaggaagaccatctccgtagcgcagctcagcaagtgcttcaggttagtaacatccaaggcctggaatttgtgtcgagcgtccttctttggcacatcatcacagacatatgtttgcttgtcgatgaggatgaagatggcggtgctgagctgagaggccctatcagagacctgtcggagtacaccatgtacctaattgcagattgcggcgtcatggctggcagcgaaggacatttcgtgctcaggaagggccgccatgaggtgttaagctggctgcgggagaagggtgaatctggatgtgaccggaggaaggtgattgaggagattcgcaatgaggacagctccttcttcgctgataactattaccctgtgctcgatcgagctcgccgggtatcgtcggacttgcttgtgcttgaagaacccggcgatcgatgggagctcattgctgcggtgtggatggagatgctttgccacatttcatacaactgcggggctgggttccacgccaagcagctgacgacaggtggggagttcgtcacgcatgtcaagatgctcctgtttatgctcggggtgccttttctgagggatgtgaaggaaccgttgttctacagggctgggaacctctattcataa

SEQ ID NO: 10546 - DNA, 1200 bp, Oryza sativa
  Clone ID: PAT_MRT4530_16857C.1
atgcggatcccgcggaggaagggcggggcggggccgctggtgggggcgccgagcaggagggcgcaggtggcggcggtgttcgcgctcgcgctgctgctcggtgtctccgtgctctacgacagcgcccacatcgccgcctcgctccgccgccacggcgtcggcggcggcgggagtagcggcggcggaggaggaggaggaggagacggcgcccgcgcctacacaaacaccaagctctccgccacgacggaggaggcggaggcggaggcggccgaggtgcgctccccaccggcgcagggggtcgaatcggcggtggaggcgacggatcggggcgaggctccaccggagcagccggtggccgcggactccggagcgtcgtcagccgagaccccgccgtctctgctggagcaggtgacggagacgccgccgccgtcgccgtcgtcgtcgtcggcggcggcggcggcggcggaggcgcaggtgggaggggatcacggtggcgagagctgcgacgtgtacaaggggaggtgggtgtacgacgaggcgaacgcgccgctgtacaaggagtccgcctgcgagttcctcaccgagcaggtcacctgcatgcgcaacggccgccgcgacgacgactaccagaaatggcggtggcagcccgacggctgcgacctccccaggagcgagggctggggaaaaccagatgccataaaatgcttctctgagacgcagccagctatcaattacacaaagaaattggaggtgggcacggactgggatctgttctcgacagctcatcacgtaacgaaggctatgaagagggtgccagtgcacttcatcaacataacggcgttgtcagagatccgcaaggacgcgcacacatcggtgaacaccctgcggcaggggaagctcctgacgaaggagcagaaggcgaacccccgcaagttcgcggactgcatccactgggacaccgggccgccgctggctcccctcccgctggatccgacggaggggagggcgccgtccctgcccgccaccatgggtgggggaggtggagcggcgtcgccgccggtgggggagggggagggcaaggaggaggcccagaccaaacctggcagccagatgggccagcctaggttcggggttcggccgaaccctggtttcctccgttggatctggggtttggcagggacgctccagatgctctcctga

SEQ ID NO: 10547 - DNA, 1137 bp, Oryza sativa
  Clone ID: PAT_MRT4530_16858C.1
ggcgatgtctccaccggagcagccggtggccgcggactccggagcgtcgtcagccgagaccccgccgtctctgctggagcaggtgacggagacgccgccgccgtcgccgtcgtcgtcgtcggcggcggcggcggcggcggaggcgcaggtgggaggggatcacggtggcgagagctgcgacgtgtggggggggaggtgggtgtattatgaggcgaacgcgccgctgtacaaggagtccgcctgcgagttcctcaccgagcaggtcacctgcgtgcgcatcggccgccgcgacgacgactaccagaaatggcggtggcagcccgacggctgcgacctccccagatttgacgctaagttgctcctggagaaactgaggaacaaacgactgatgtttgtcgcgtctgcgctgaatcggaaccaatgggagtccatggtgtgccttgtccaatctgaggctccctgggagaagaaatcacttgtcaagaatgactctctaaatgtcttccgccttgaggagtacaatgctactatcgagttctattggtcaccttttctagttgagtcaaactcagatgatccaaacatgcatagcatcgttgaccgcataatcaagccaacatcaattgcaaaacatgcagcgaattgggaaggggtggactacttgattttcaacacttatatttggtggatgaatacaccagagatgaaaattttacatggtgggtccttttcaaagaaaccagtgaaatacgatgaaatggaacgtgtagctgcataccggaaggtcctcaagacatggtctagatgggtagaaaagcatgtagatccgaaaagaagtacagtcttcttcatgagtgtctcacctgtgcatatgcagagcgagggctggggaaaaccagatgccataaaatgcttctctgagacgcagccagctatcaattacacaaagaaattggaggtgggcacggactgggatctgttctcgacagctcatcacgtaacgaaggctatgaagagggtgccagtgcacttcatcaacataacggcgttgtcagagatccgtaaggacgcgcacacatcggtgaacaccctgcggcaggggaagctcctgacgaaggagcagaaggcgaacccccg

SEQ ID NO: 10548 - DNA, 160 bp, Oryza sativa
  Clone ID: PAT_MRT4530_16859C.1
catatgtggtatctaccctgaactactatagtgctcccaggagcattcccactgttggtgtttctggtactgaatggtaacaatataatagttcgtatgttaaaaataaagtcatacatcatcatgggtggactgtggaaacttagggtcatataaatct

SEQ ID NO: 10549 - DNA, 345 bp, Oryza sativa
  Clone ID: PAT_MRT4530_1685C.1
tcaaccacgaagccaccgcacgcccccttcgtcaaggagtgggcaaggcgggagccggcccacggagaggactacccaagcctcgatcactcggggtagttcttcctttactccgaaggcggtgaactccaaaccactcacaaaaccggcaccgggcctcctccacaatcttctcggagaggtcaccgggcaactcctccacaagccgtctagaaggcggcaacctccaagagtaacaagcaatgacctggtgtggagatgatcaatcaagtgccacactagctcatctttagtcacctctgtgaggcttttctccgcattcttccccatttcaatttcttccat

SEQ ID NO: 10550 - DNA, 617 bp, Oryza sativa
  Clone ID: PAT_MRT4530_16860C.1
cgcctcgcaccgtcgctgtcgccgtcgcgagcgcagccgtctccgcctctggcaccgccatgaccatcgccgctgcattcctttgtcgccatcgccaacgatcactgttctgccctccgttgctgctgccatcgaagaaacggcactggtgacagaaccgatgtcaaggaaggtggtggctactccttccttttttttctttctttttttggctgaaattgattggttggttttctcttttgcaggtttttttcccgaaggttcgccaaggaaaccaacatggagggaagaagagagggtggagttgcaaacataaaccatataccttttgttgttcttgcacttaccaagggtttggggtggttagggttggttattttattcttgcatttcttctaggacaaatgctctgctacatttttgtgatttgtacaaattagaagcagatgttagaaaagcttgtgattcttttcccccaattcacagttagagtctatttatttattttttcccctaatcgaggggccttgtctgtttgcttgcccctgaataatgaaagctatgtgttcctaaacaaagttatgttttattctaccaaagtgtctacataactatgt

SEQ ID NO: 10551 - DNA, 235 bp, Oryza sativa
  unsure (1)..(235): unsure at all n locations
  Clone ID: PAT_MRT4530_16861C.1
tacggcttccntctggggtggtgtaagaactgtaganggatncaaagcttccagcttcncccatttttatgtactntgaatancagttatgttctagtgnccgaccttntgtgtcncttaccaagaccgagaccggngcnttttttttncttgatattttgaggtataactattaatgncaagtgcactagagtcttcttaaaaaaaaaaaaaaaaaaaaaaaaaaaaaaaaaaa

SEQ ID NO: 10552 - DNA, 219 bp, Oryza sativa
  unsure (1)..(219): unsure at all n locations
  Clone ID: PAT_MRT4530_16862C.1
gggcgggtgttttttttttttttttttttttttggggggcatccaagtttttacccgaatagaaataaacgagttttaaacgactaacatagggcccattgcgagcagattttaacggcccatgcatttttttccatggccgcccccaaaagtggtttggcnggggaatttttttttttcnnccnnnttaaccaccacttcaacnatcctcatttcttt

SEQ ID NO: 10553 - DNA, 657 bp, Oryza sativa
  unsure (1)..(657): unsure at all n locations
  Clone ID: PAT_MRT4530_16863C.1
atggttttctctcggcggacagaatgtctcgtgtacnnnnnnnnnnnnnnnnnnnnnnnnnnnnnnnnnnnnnnnnnnnnnatgtctcgtgtacaaggcgaagaaaagcattcttgtccgcacgaaataggcaaaagatcccccggcattaatcagcacgaaatcggcaagcaaaccgcgcgatggtcaacccccaccctcgtgctgatccggggtcgtcgtagcagctacgctacgtgcataccttggctcttctacgttttaccgctgaggcgcaaaaacgtgtcgcgaaattttcacgctgcgccgaaccgtgtttcgactcggagtcggcggctagtcagccgcgctcgtgcacggccaggccacggggcgagttggatttcgtctaggtacgtgcgtggcccgtgtgccggtctgcgtggctatgcgcctatgcggtacgcatcgctgcacgggccgcgtgcagcaggtttcgagtcagaagcctgcacgcgcgtcgcggacgagcaggcggcaagggacctaaatattgaattgccacgtaagtaccacgtcaatgctacgtcagatgaagaccgagttaaattagccatccggtgcagcggccacctcggtgtgacggcccagggcgtttcgggctttcggccccgttag

SEQ ID NO: 10554 - DNA, 384 bp, Oryza sativa
  Clone ID: PAT_MRT4530_16864C.1
gggggaaaaagggccccgggaaaagggtttaacccccgggtgaatttccaaaaacccaattttttatttaaagatcctttgaaccaaaaaggtaaaaattaaaattttaaaattgggggggggggaaaatcttccaaaacccaaaaaaaaaattggggggccccaaaaaaattcttttttaaaaaaaaacgggaaaaggggggggaaaaccctggggggaaaaaaacttggaaaaaaaccctggaggggggaattttgggactttttttttttaaccctcaaaaaaaaagggggcttaaaacaaaaccgcccaaatttaaaagcgtggggggctccgggcccaatcccattgggatcattaaggggttgcttttgaacaaaagc

SEQ ID NO: 10555 - DNA, 790 bp, Oryza sativa
  unsure (1)..(790): unsure at all n locations
  Clone ID: PAT_MRT4530_16865C.1
tcccgggtcgacccacgcgtccggtccggatgttccagtagtcacttggctaccaaaacccttctcctcctccgccgccgggaggttcatggcctcctccgccgccgcccggtcccgcgccgccgcctccgccgcgtgggcgcgcctcctctccctgcgccccagccctcccgtatcctccacccaccatctaaccctgcggatcgcctcccctcgccgccactttttcttctccgccaacgcctcctccggcagctctaggctcaagcagatccagagcgagcgggtcatccacgacctcttcgccgagctccagcgagagcgccagcgggaccgccaggaggaggatgaggatgagggtgaggatgaggactacctgggcgtcaagccgctcatcgagaagctcgagcgccgcagggccaaggaggaggccgcgccggacgattccttctgggagcccaccgactccgacagtgacgaggaggacgagcgctacacccctgacgccatcaagcgccgcgtcgacgagttcgagcgcaagtgcaaccgccactccgaactcctacgctccttcgccgaagccgaaacccttgacgatgcccacaaatggatgaccaagatcgacagattcgaggagcgccatttgaagcttncactggagtacagagtcatcggcgacatgatgaaccgcctcaaagatgccaccggcaaggaccgctttcttctcctccagagcttaccgagctggtagaatcatggaatgcaggggagcatacgatcccagcaaccc

SEQ ID NO: 10556 - DNA, 158 bp, Oryza sativa
  Clone ID: PAT_MRT4530_16866C.1
aagaggaggacgaggaagaggggcaaacagagataagaggaatggcactggaagacaagagttcaattgagaaactctataagcacatcatgtcaatccttcccacctcggaaatagcatccaaagaggagcaatgcgattatgacaatgcatggaac

SEQ ID NO: 10557 - DNA, 493 bp, Oryza sativa
  Clone ID: PAT_MRT4530_16867C.1
tcaacaccactctttgatcttctttggcttccctcgccgggccggcagcatgaaccatcaccagcagattcgatccacgacggcggcggagcagcaggaggcgtctgccggaggcggcggcggcgaggagtacgaggacctgatgccggtgatggccgggcggctgggcgcggagggcctgctgtcggagctccgcgccgggttccgcctcctcgccgacccggcgaggggcgccatcaccgcggagagcctgcggcggagcgcggcgagcgtgctgggcctgggcggcggcggcggcgagatgacggtggaggaggcggcggccatggtgcgggagggcgaccaggacggcgacggcgcgctgagcgaggcggagttctgcgtgctgatggtgcggctcagccccggcatcatgggcgacgccgagggatggctcgaggaggccatcgccgacgagctcctccgctcgctgccgccgccgccgccggcctag

SEQ ID NO: 10558 - DNA, 719 bp, Oryza sativa
  Clone ID: PAT_MRT4530_16868C.1
gggggttttgtctggaaatttgttatttcattcatatgaatagtagcacactcatatcataggaataccctgtgtttacaaagtaacactaaaaaattgcaatggggctcctcacaacatgcttctcagatacccacttgaagcttccctcggcatggttagttttgctaatatcccaacttaagcttaatgaaaatgttttcttctccttcatcttggtgaattctagctttgttggtgacacacttgtcatcacctccctgggcatatcaatttccacggtgtagcttgaatttgcttctcccacattagtaacagtccggttcaccacaagcttgccagcacttgcccttactgctactgatggatagttaagttcagcttcagttattttgcttcctttgcaggcatctttctgatttgcaattatctcaacttgaacatatgtgtaacccaggccacagagatatgaaatgtattgtgcatcatcaatgtcatagatcagaccggggtcaatggcttcagaaggattaacatgtccagcaccaactgcgaaatgccctgcaatattgtatctttcatccaggattgccttcttctggttatcaacaacataagctgttgtcatgattgcggacttgatcgctgcggatgaccaatctgggtgtgttcccttgatgagagcagcaatgccactaaggtgaggagttgacataaaa

SEQ ID NO: 10559 - DNA, 2130 bp, Oryza sativa
  Clone ID: PAT_MRT4530_16869C.1
atggcctcctccgccgccgcccggtcccgcgccgccgcctccgccgcgtgggcgcgcctcctctccctgcgccccagccctcccgtatcctccacccaccatctaaccctgcggatcgcctcccctcgccgccacttcgccttctccgccaacgcctcctccggcagctctaggctcaagcagatccagagcgagcgggtcatccacgacctcttcgccgagctccagcgagagcgccagcgggaccgccaggaggaggatgaggatgagggtgaggatgaggactacctgggcgtcaagccgctcatcgagaagctcgagcgccgcagggccaaggaggaggccgcgccggacgattccttctgggagcccaccgactccgacagtgacgaggaggacgagcgctacacccctgacgccatcaagcgccgcgtcgacgagttcgagcgcaagtgcaaccgccactccgaactcctacgctccttcgccgaagccggtaaagcccattcccctcttccttccttccttccttccttcgccaatgcccacttcaaacacctcccgctgttgccagaaacccttgacgatgcccacaaatggatgaccaagatcgacagattcgaggagcgccatttgaagcttccactggagtacagagtcatcggcgacatgatgaaccgcctcaaagatgccaccggcaaggaccgctttcttctcctccagaagcttaaccgagctgttagaatcatggaatgcagggaagcatacgatcccagcaacccctccaatttcggggtcatccaacaccagcaggtcggctctccggaggatcttgtgctcaatgctggctttgacagggagaagcagatgatccaaggggctggtgacgacgacgacgacgaggaattcaatgaagacaaggagaaggatgatctgctcatagagaagttgaattctatcgaaaagaagatcgaggagaaattagctgagttagatcatacgtttggtaagaagggcagagttctagaggaggaaattaaggatcttgttgaagagcgcaactccctcacggagcataagaggagacctatgtacaggaaaggttttgacgtcaaggtcattgatgttaatcggacgtgtaaagtcacaaagggaggccaaatagcaaaattcacagcattgttagcgactggaaactaccatggtgttgtaggatttgcaaaagctagaggtccgacagccaagattgcaattcaaagggcttatgagaaatgcttccaggacctccattacatggagcgatatgaggaccacacaattgctcatgcaattcaggccaaatatgagaagacaaagatatacctctggcctggaccaatgagaagtggaatgtctgctgctggtaggacggttgaaacagtactgtatttagctggtttcagcaacgtcaagtcaaagattattggttcaaggaaccccctgaatgttatcaaagctctcttcatagcattaaacgccattgaaacgccaaaggatgttgagcagaagtttgggcggaccgtggttgagtcatacttattgtagtcatcaatttgtttgtcctgtggagctcgtcatctggctgtggcgatggacgtccaaagaaagagctaattgcacatctaaccgtgtgatgtgtggtcttcatttgtttggatgttggtttctctacactttgccctgcaaccggcagtctgagatgtgagactgtaatttttgaggtgatcgatcaatcaatgctttagtgccaacggcgcagcacatagcagatggcaagagaagcaaacgtttgattgatgattcttgcataaggtggcctgcccctttggtatgagtcgttcgtttggatttgtaaccagaggctctgcctcacgcctactgttatggtggattggcaaaccggcacaatatgctgatttagagataataaagtccttgaacatgtgtagctacttggttgattgatgtcatcccggagatttgcagacgcatcgtgcattgcatgcatgatgatcaattttaaaaaaaaaaaaaaaaaaaaaaaaaaaccgagtgcaaaaaaaaaaaaacacaaaaaacaaagaaaacaaa

SEQ ID NO: 10560 - DNA, 2346 bp, Oryza sativa
  Clone ID: PAT_MRT4530_1686C.1
atgacggcacggcagcgcctaggtgctggtgggcggtcctccgccaccaagacctctggcgctgctaccaccggctccgtgtcatcaaggcggagggcgcggcgagcggcggcggttgctcgccattcggccgccactccttcgtcagcgcctccgacccaggaagatctgcgtggggggccggatgcccgcatcagtatcgagcgccggcgtaatggccgacgtgctgcccacgcaacggagggcgcctcctcgtccggagtgtcacatcaacacggacgcggggatcagccctccgtgcccccggttggtggtgtcggctgtagagcctttgtggcgagccttcggaacgtccgttggcccccaaggttccggcccaccatcgccgaaaaatatgacgggagcgtcaaccccgccgagtttctccaggtctacacgatcgggatcgaggccgccgggggtgacgacagggtcatggcgaatttctttcccatggccctgaagggacaggcacggggttggctaatgaacttgccacccgcgtccgtccactcttgggaggatctgtgccaacagttcaccatgaactttcaaggcacatatccgcgcccagggggggtgtgcggcacaaccgcatgctcgaaaagattgcctctaaagagccccagactaccgcggagcttttttagcttgcggaccgagtggctcgtaaggaggaggcatggacctggaacccctccggttccggagtggcagcttcggccgcccccggatccgctgctcagacagggcggcgggacaggaggaggaagaagaggtcggcccattccgacgacgagggtcatgtcctcgccgtcgagggcgtttcgctggccacccgaaaggggaggcctgcgagcgacagaaagaaggccggcgctccttgacctcgactacttggaagagcgaaggcggcgcgcggccctccgagccgcgcgctaccagcagagcctgcggcgctaccatcagcgccacgtccgggcccgatcactctgcgtcgacgacctcgtcctacgccgcgtccaaacgcgtgctggattgagcaagctctcaccaatgtgggagggtccgtatcgagtgattggcgtcccccggccgggctccgttcggctggccacgggcgacggcacagagctgcctaacccgtggaacatcgaacaccttcgtcgcttctacccctatctatacaagaagggggcccgaaggcctcggaagaagaaagaaaaagctattcaagattggcgggggcctgggggctcactccgacgcgcccgggtcaccagccttgtcgtcgctgtcgtccgcaccaccgtcaccgccctcctcgtcggagtcgagggcgaacgcgagccgaggggccgtaccctcgaagctgtggacgatgtggtcggcggcgtcccggacctgcgcgcgtgcgccgtcctcggttccggaagggaactcttccagcgctgcccacggggagaagtcagggtccgagaggcccccaagccgaacggcggcccaaggcccccgacggccggagttggccctccgcctgcttgtccgacggtgttaggcgcccccgaccctcaggatagcctcggggccactacgggaaggccgcgcctgtcgccctctgaccccgaggttatcggcacagaagccgagggcgccccgcgctgcctctcggatgaagagcgccctggagatgcggcccctagcgaagaggatcggccccgccgaaaggtgcagcggcccgtctactttgttagcgaggccctccgggacgccaaaacccgataccctcaggcccagaagatgctatacgctattctgatggctccgagaaaagcgccatcaccatatctccaggcaaaacgaaccggctcgtcccgattcgcgtgctactcgagtaatgtggcagtcttgaagagaccgctcattattggcagccgagtaaccattgccgatgtgcgtgatttgcgatcgttgggtttctgcccaactgtggagaccggtcccacctgtcaccaggccttaagaagtggcgtcacgcccgaccgcttccctcgaggagggcgatcgccctggcataacaccgggggctactgtcggtgacatgggaccgggagtatcatgacttagagacttgaggcagacgcgatcacccacgtggcctaaccccctcgggggggtcgggcccgagggtgatacggccgcccttctctttgtctccccgaggggtcgggctgcacccgcctcggccccgagggccgaggcgccccgacccctcgtgggttttttgctccgcgtgtatgggttagg

SEQ ID NO: 10561 - DNA, 387 bp, Oryza sativa
  Clone ID: PAT_MRT4530_16870C.1
atggtgtatatttccgggcgtgacagtcacgaaacatgcgtgccgctgctcaccggctcgctgcctccatcccgcgccccaagtgagtccgagcaggcgagcaccgtcgaggatggggtcctgaagacagagagcacggccgtcgtgaaagccaaggcggcagaggtagaggagcgccgagcggagctggtcgcggacgctgcaggcgagggtctgggggcatttgacgacgacgcggcgttaggtggtgtccgggacggcgaggtcgtcggtgaggaaggcgaagaccgggcggaggtcggcgcggacgctggcggtaaagaaccgccaggagctccgtcgggatgtctctgtcgctgtggtgacgaagcagcagcaactgggtga

SEQ ID NO: 10562 - DNA, 471 bp, Oryza sativa
  Clone ID: PAT_MRT4530_16871C.1
ggcaccagctccttctccattatccttggcctaattaaccatggccacatggatatggagggggggaggttccagtaagaagtagggttactaggaagaagatgaaggagaaggcaacaaaaagcccatgtgtatgtgtttcttggcctgttgcaaaacatgcttccaaatgcaaaatgataatggaggtgtttgtgtacaagaggatggagacatgaagatggggcatgcatgtccttgcatgatagtattgacatgagaaggagaaggatatgcctctcatctggcattgtcaggagtgacatatatgaatgcatggctccttatgttcttttgttactttgtatagataacaagtataagaaagaatcatgtattctagtagtaaaaaaaaaaaaaaaaaaaaaaccctatgcagaaggaaaatggagaataagatggaaagtttttcttgttaaaaaaaaaaaaaaa

SEQ ID NO: 10563 - DNA, 429 bp, Oryza sativa
  Clone ID: PAT_MRT4530_16872C.1
atggaggcagacacgatgatggtagcagcagtggaggaagcgacagtggtggtggcggaagctgaggcggcgcggaggtggctcctctccaatggcggcaacggcgcggcttcctccctttcttcaagatacagcggtggtggcattggtggacagcagctcctcgtggatgaaccggtcaaggttggtgacccagacactggtaaagggtaccaagcccacagtgggcgtgaccccaggcgcgttaccccacatttatttctctcaactaccctcgcctactactcgcaccaccctttcccctcccctcctcggcgcgactgcctcctcggctcctcctctctcccgcaccgccgcgcctcctcctctcctgccacgctgccgcgcctcctcgcctcccacgtcgacggcgccgcctcatcgcaataa

SEQ ID NO: 10564 - DNA, 441 bp, Oryza sativa
  Clone ID: PAT_MRT4530_16873C.1
gcttcagcaggtggagccggcaatcgtcgccgcggcggggacagggaccataccggcgtcggcgttggcatccgtcgcgccctccctcccttccccaaactgcgccctctccaggtcgcaccaccaccaccaccacatgtgggctgccgcgtccgccgggttctccggtgccgactccggggtaatcggcgggatcatgcagcggatggggatccctgccgggatcgagctccagggtgggggagcggggggctgggtggtggcagcggcggtggccgcatcgggtttgtgcccatgtttgccggccacgcggcggcggccatgccggggctagagctagggctctcacaggacagccatatttgtatatggatctagggattactctgctactgtccagttaattagcctcatttgtttgggtgattaatgcaggtcccc

SEQ ID NO: 10565 - DNA, 6427 bp, Oryza sativa
  Clone ID: PAT_MRT4530_16874C.1
ctccgaggagcattcccaccgctggtggtgtctggtactgaatagtactagtgtaatggttcatatgctataaataaaggcatgcatcatcatgcgtgacagttgaaacttgatgtcagcaaaaacgtagtaaactttcctattcctacaattctagagcaaaaacgtaggaaagttaacattcactctaatctcttggaaaactttccttaagtctatctctctcatctgattcctgcatttttcctgcggtctaatcaaacggctattcctatattttttatgtgttttgcaatcctctgttttacacttgcattcttaccaaaatcctgtgtttttcctattcctctgttttttcaatcctacgattcaaaggggccaaaattatttttcagcataatctatccttcctgtgaacccaaggcttcattagagttctcaccatctcaattatctaccctatgtatgaatgcgaggttcccgtactcgccggccgaggtggccaaggtgcagctggtgcagttcggcatgcttatcgccgaagagaacaggccaaggtcattgctgcggatcgagcttgcaaaaaacatggaaaaggggaagacctagcctggtggcttgagtgaccttccgttggggcatattgaccagaatatcaattgttagacatgcatggctgctaagccggaccgtcaccagcctattgtccaccttcagggtgtggatacaatccatcatatccgctatacagagcctgtccaggatatagcccgactcctccatcataaaggtccgattaacctagcgactgtcgcacttatcaagcatatacacgctcctcaactaattaacctacaacatatccatcatagtagcctacatgtctataagactaaaaaagatttccaagctgctgatgtacttgaccttcctgtagccctagatattcaagatacagtcagaaaacgcggagttatagttccacttcagcgaaatatagtccttgatggtaagaatatggttgcactttttaaagaaccagtgaagctaatcgatgataaagaccaacaccatgatcctgtggcgcgaaagcaaattctctcagctgagaaggtgcttaatgttcttaaacgtataagtgataaggactgtcttctatttggtctgaaccctatatttgctcgccctgactggaatatcttgtaagtacatccagtcatcccatgccctgtgaggccatccatcatgatggatacctcttccagaagtgaggatgatttgactcatcaattagctatgataattcgacataatgagaacttgaggaggcaagagagaaatggggccccagctcacataataacagagtttgctcaattgttgcaatttcacattgcaacatactttgacaatgaacttcctggccagccaagggccacacagcgttctggaaggcctattaaatcaatttgcagcaggctgaaagcaaaggaaggccgcattagaggaaacttgatgggaaagcgtgttgatttctcagctcgtactgtcatcacaccagatccgaatattaacattgatgaattgggagtgccatggagtattgctttgaacttgacatacccagaaactgtcactccatataacatcgagagattgaaagagcttgttgaatatgggcctcaccctccccctggcaagacaggtgcaaagtatattatcagggaagacggtcagaggcttgatcttcgttatgtgaagaaaagtagtgatcagcatctggagctgggatacaggtgaaggcacccaatgatgggattttttctctcaaccggcagcccagtcttcacaaaatgtctatcatggggcatcgcattaaaatcatgccgtattcaacttttcgcctaaacctgtccgttacttcaccatacaatgcagattttgatggggatgaaatgaatatgcatgttccgcagtcatttgagaccagagctgaagttctagagttgatgatggttccaaaatgtattgtgtctcctcagtcgaataggcctgttatgggtattgtccaggacacgcttcttggctgtcgcaaaattactaaaagagatactcttattgaaaaggatgtgtttatgaacatcttaatgtggtgggaagatttcgatggaaaggtccctgcccctgccattttgaaaccaaggcctatttggactgggaaacaagttttcaacttgattattcccaagccaatcaatttaattagattttcagcctggcattctgaagctgaaacaggatttattactcctggtgatactatggtccggatagagaagggagagcttctatctggtacactttgcaaaaagacacttgggacatcaactggaagtcttattcatgttatttgggaagaggttggtccagatgctgctcgcaagttcttaggtcatacacagtggctagtcaactactggcttctgcaaaatggtttcagtattggaattggggatacaattgcagatgctgccaccatggtgaagattaatgagacaatctcaaaagctaaagatgatgtgaaggagcttattatgcaaaatcaggataaacaattggaagctgagccaggacgcaccatgatggaatcattcgaaaatagagtaaatcaggttcttaacaaggctcgtgatgatgctggaagtagtgcccagaagagtttgtctgaaagcaacaacctgaaggctatggttactgcaggctcaaaaggaagtttcatcaatatttctcaaatgactgcttgtgtcggacagcagaatgttgagggcaagcggatcccatttggcttcatcgatcgaacgttgccccacttcacaaaagatgattatggtcctgaaagtcgtgggtttgtggagaactcttaccttagaggtctgacaccacaagaatttttctttcatgctatgggtggtagagaaggtctgattgatactgctgtgaagacctctgagactggatatatccagcgacgacttgtgaaggctatggaagatatcatggtgaaatatgatggtacggtaagaaattccttgggagacgtcattcagttcttatatggagaagatggcatggatgctgtttggattgagtcacagaagttggattccttgaagatgaagaagggtgagtttgataatgtatttcgttatgaactggacgatgagaactggaggccaaattacatgttaccagaacatgttgatgatttgaagaccattcgtgagtttagaaatgtgtttgaagcagaggttcagaagctagaagctgaccggttccagcttggctctgagattgccacaactggtgataatacatggcctatgcctgtcaacctcaaacggcttatctggaatgcacagaagacattcaagattgatctcagaaggccttctgacatgcacccaatggaaattgtggaggcaatagataagctgcaagaaagactgaaggttgttcctggtgatgatgctatgagtattgaggctcagaagaatgcaactttgttcttcaatatcctgcttcgaagcacattcgctagcaagagggtcttgaaggagtacaggcttacaaaggaagcttttgaatgggttattggtgagattgaatcgagattccttcagtctttggtggctcctggtgaaatgattggatgcgtagctgcacagtccattggagaaccggcaactcagatgaccctgaatacttttcattatgctggtgtcagtgccaagaatgtcactcttggagttcccaggctgagagagatcattaatgttgctaagaagataaaaactccatcattgtcagtttacctaaagcctgaggtgaacaagaagaaagaactggctaagaatgtccaatgtgccttagagtacactactctgcgcagtgtgacacatgctacagagatatggtatgatcctgatccactgggaaccattattgaagaagatgttgaatttgtccggtcctattatgaaatgcctgatgaggatattgacccagataaaatttcaccgtggctgctgcgtatcgagctgaatcgtgagatgatggttgataagaagttgagcatggctgatattgcagagaagatcaatcatgaatttgatgatgacttgtcatgcatatttaatgatgataatgcggataaactgatccttcgtgtccgcatcacaaatgatgaagctccaaagggagaaatacaggatgagtctgctgaggatgatgtcttcctcaagaagattgaaagtaacatgtggacagtgacagagatggcacttcgtggaattccagatattaacaaagtttttatcaaatatgggaaggtcaataaatttgaggacaatgttggcttcaaagcagataatgagtggatgcttgatacggaaggtgttaatctcttggctgtcatgtgccatgaagatgttgatgctactaggacaacaagtaaccatttgatcgaagtaattgaggttcttggaatcgaggctgttcgtcgagctctcttggatgagctgcgggtggtcatatctttcgatggttcttatgtcaattacagacatctggccattctttgtgatacaatgacatacagagggcatctgatggctattacaaggcatggtatcaaccgtaatgacacagggcctcttatgagatgttcctttgaagagacggtggatatcttgcttgatgctgctgtatatgctgaatctgactacctgagaggtgtcactgagaacattatgcttggccggcttgctcctatcggtacaggaggctgtgcattgtatctcaatgatcagatgctgcagcaggccatcgaacttcaactcccaagctatgttgaaggcctggactttggcatgacaccagcacgctcgcccatctctgggacaccatatcatgaaggaatgatgtcaccgagctacctgctaagtccaaacatcagggcttcccccattacagatgctcagttctcgccatatgttggaggaatggctttctcaccagtaccttcaccaggctacactccatcgtcagggggtggttacagtccatcttctccggtatacagtccagggccaggatacagcccaacttctccatcatatagtcctgcttcacccagctacagtcccacttctccatcatatacacctggctctcctacttactctccaacaagtccatcatactcgcctaccagtccatcatactcgccaacatctccaagctacagccctacatcacctagctatagccctacatctccaagttacagcccgacctcgccaagttatagtcccacttctccgagctacagtccgacatcaccagtttatagtccgacttctcctgcatatagtccaacttctcctgcatacagccccacatcaccatcttatagccccacatcaccatcttacagccccacatcaccatcatatagcccaacatctccatcatacagtccaacatctccgtcttacagccccacttccccctcatacagtccgacatcaccctcgtacagtccgacatctcctgcatacagccctacatcacctggttacagcccgacatctccaagctacagcccaacttcaccaaattacagtccaacttcaccaagctacaatccttcttcggccaagtacagtccttcccacgcgtactctccaagcagcccaaggctgagcccttatagtcagacttcaccaaattacagcccaacatcgccgacatactcacctacctcaccatcatattcacaaccaagtccgtcatacagcccaacaagcccatacaccacatctggagggcccagcccagattatagcccaacatctccgaattacagccctagcggaagctactcccccactgcaccgggctactcaccatcctccaccggccagcagttctctccccaagctgccgacaaggacaaggagaaggcaaaatgaagccgctgaagaaggatgggtggtgatttgctggggatgaatccgctgcgcgctgcaccgacttttccagtttttgtttggttgatgaattatctcaatagtaagtttccttgtgctgctaatagcagcgagggtctcatgtactcatgtatgacttgtccaccaaagaaaggaccttaacttttacgcatgctttgaagctgctctttttatcataggactcaatgccaatatccatcgagtgccatggctcgatggaattatgctaaagttgtaagactcttgtctgccattagagctaaatcttctctgaattgctgtcttggacttttggcatgttatacttgtggaatttcgcctgtgctcgcaaatgttgatgaacatgttttgcatac

SEQ ID NO: 10566 - DNA, 5616 bp, Oryza sativa
  Clone ID: PAT_MRT4530_16875C.1
atggatgctgcgaggttcccgtactcgccggccgaggtggccaaggtggaggcggtgcagttcggcgtcctcagccccgacgagatcatgggtttaataatatttcgagtcatccggtttaataggttgagtgcttcattaaatgcaagaactcagaagctgcatgtggaatgtgtaaggaacacgatttttgggatgagacaaatgtcggtggtgcatatagagcatgcagagactatggaaaaggggaagcccaagcctggtggcttgagtgaccctcggatggggacaattgaccggaagatcaagtgtgagacatgcatggctgggatggcagagtgcccaggccactttggccaccttgagcttgctaagccaatgttccacatcggcttcatcaagactgtactctccataatgcgctgcgtctgcttcaattgctccaagatccttgcagatgaggatgatatcaagttcaagcaggctcttaaaatcaggaatccaaaaaataaactaaaaagaatatatgatgcttgcaagaacagaaagatctgtgcaggcggtgacaatcttgatgttcaggagcaacaaggtactgatgatccagtgaagaaaaggggtggctgtggtgctcagcagccgaatatcactgttgacggtatgaagatggttgcagagtataaagcaccaaagaagaaaaacgatgaccaagagcaactccctgaacctgtggaccggaagcaaatcctctctgctgagagggtccttaatgttcttaaacatataagtgacgaggactgtcttctattgggtctgaaccccaaatttgcccgtcctgattggatgattttgcaagtccttccgattcctccaccccctgtgagaccatctgtaatgatggatacttcttccagaagtgaggatgatttgactcatcaattagcaatgataattcgacacaatgagaacttgaggaggcaagagagaaatggagccccagctcacataataacagagtttgctcagttattgcaattccacattgcaacatactttgacaatgaacttcctggccagccaagggccacacagcgatctggaaggcctattaaatcaatttgcagcagactgaaagcaaaggaaggccgcattagaggaaacttgatggggaagcgtgttgatttctcagctcgtactgtcatcacaccagacccgaatattaacattgatgaattgggagtgccatggagtattgctttgaacctgacatacccagaaactgttactccatataacatcgagaggttgaaagaacttgtagaatatgggccccaccctccccctgggaagacaggtgcaaaatacattatcagggaagacggtcagaggcttgatcttcgttatgtgaagaaaagtagtgatcagcatctggagctgggttacaaggtggaaaggcacctcaatgatggggattttgttcttttcaatcggcaacccagtcttcacaaaatgtctatcatggggcatcgcattaaaatcatgccctattcaactttccgcttaaacttgtccgtcacttcgccgtacaatgcagattttgatggggatgaaatgaatatgcatgttcctcagtcatttgagaccagagctgaagttctagagttgatgatggttccaaaatgtattgtgtctcctcaatcgaacaggcctgttatgggtattgtccaggacacgcttcttgggtgtcgcaaaattactaaaagagatactcttattgaaaaggatgtatttatgaacatcttaatgtggtgggaagattttgatggaaaggtccctgcccccgccattttgaaaccaaggcctatttggactgggaaacaagttttcaacttaattattcccaagcaaatcaatttgattagattttctggctggcattctgaagctgaaacaagatttattactcctggtgatactatggtccggatagagaagggagagcttctatctggtacactttgcaaaaagacacttggaacatcaactggaagtcttattcatgttatttgggaagaggttggtccagatgctgctcgcaagttcttaggtcatacacagtggctagtcaactactggcttctgcaaaatggtttcagtattggaattggggatacaattgcagatgcagccaccatggagaatattaatgagacaatctcaaaagctaaaaatgatgtgaagaaacttattaagcaatttcgtgataaccaattggaagctgaggcaggacgcaccacgatggaatcatttgaaaatagagtaaatgaggttcttaacaaggctcgtgatgttgctggaagtagtgccgagaagagtttgtctgaaagtaacaatctgaaggctatggccaccgcaggctcaaaaggaactttcatcaatatttcacagatgactgcttgtgtcggacagcagaatgttgagggcaagcggatcccatttggcttcaccaatcgaacattgccccacttcacgaaaaatgactatggtcctgaaagtcgtgggtttgtggagaactcttaccttcgaggcctgacaccacaagaatttttctttcatgctatgggtggtagagaaggtctgattgatactgctgtgaagacctcggaaactggatatatccagcgacgacttgtgaaggctatggaagatatcatggtgaagtatgatggtactgttagaaattctttgggagatgtcattcagttcttatatggagaagatggcatggatgctatttggattgagtcacagaagttggactccttgaagatgaaaaaggctgagtttgataatgtatttcgttatgaactggatgatgagaactggaagccaaactacttgtcgactcaacatgctgaggatttgaagaccatcagtgagattagaaatgtgtttgaggcagaggttcagaagctagaagctgaccggttccagcttggcactgagattgctacaactggtgataatacatggcctatgcctgtcaatctcaagcggcttatctggaatgctcagaagacattcaagattgatctgagaaggccttctgacatgcacccaatggaaattgtggatgcaatagataagctgcaagaaagacttaaggttgtccctggtgacgatgatatcagtattgaggctcagaagaatgcaactttgttcttcaatatcctgcttcgaagcacatttgctagcaagagggtcttgaaggagtacaggcttacaaaggaagcttttgaatgggttattggtgagattgaatcgagattccttcaatctttagtggctccaggtgaaatgatcggatgtgtagctgcacagtccatcggagaaccagcaactcagatgaccctgaatactttccattatgctggtgtcagtgccaagaacgttacccttggtgttcccaggctgagagaaatcattaatgttgctaagaatataaaaactccatcattgtcagttcacctaaagcctgaggtgaacaagaagaaggaattggcgaagaatgtccaatgtgccttagagtacactactctgcggagtgtgactcatgctactgagatatggtatgatcctgatcctctgggaaccattattgaagaagatgctgaatttgtccagtcctactatgaaatgcctgatgaggacattgaccctgataaaatttctccatggctgctgcgtattgagctgaatcgtgagatgatggttgataagaaattgagcatggctgatattgcagagaagatcaatcatgaattcgatgatgacttgtcatgtatatttaatgatgataatgcagataaactgatccttcgtgtccggatcacaaatgatgaagctcaaaagggagaaatacaggatgaatatggtgaggatgatgtcttcctcaagaagattgagagtaacatgttgacagagatggcccttcgtggaattccaggtattaacaaagtgtttatcaaagaggggaacgtcaataaatttgaggacaatgatggcttcaaaacagagaaggggtggatgcttgatacagaaggtgttaatctcttggctgtcatgtgccatgaagatgttgatgctactaggacaacaagtaaccatttgattgaagtaattgaggttcttggaatcgaggctgtccgccgagctctcttggatgagctgagggttgtcatatcttttgatggatcttatgtcaactacaggcatctggccgttctttgtgatacaatgacatacaggggacatctgatggctattacaaggcatggtatcaaccgtaatgacacagggcctcttatgagatgttcttttgaagagactgtggacatcttgcttgatgctgctgtatatgctgaatctgaccccctgagaggtgtcagcgagaacattatgcttggccagcttgctcctataggtacaggaggctgtgatctgtatctgaacgatcagatgctgaagcaggccatcgagcttcaactcccaagctatgttgaaggcctggactttggcatgatgacatcagcatgctcgcccatctctgggacaccatatcatcaagggatgatgtcgccaagttacctgctgagtccagacatcagggcttcccccactgcagcagatgctcagttctcgccgtatgttggaggaatggctttctcacccgtatcttcaccaggcaactacactccttcgtcagggggtggttacagtccatctcctcccgtatgtactccagggccaggaagcttcacctcttcatcaccatataatcctgtctctcctttttactcgcctgccagtccattatcatgcccacttaccagtccgtcatatgtgcctaccagtctaccacactcaccaacatctccaatatacagcgctacatctcctatctacagcccttcatctcctatctacagccctacatcactaagttacagtcccacatcaccagtttatagtccgacttctcctgtatataacccaacttcttctgcatacagccccacatcaccatcttataaccctacatcgccgtcttacagttacagccccacatcaccatcttatagccccacatcgccgtcttacagttacagccccacatcaccatcttatagccccacatcgccgtcttacaattacagccccacatcaccgtcatatagcccaacatcgccgtcttacagccccacatcaccatcatacagcccaacatcgccgtcttacagtccgacgtcaccctcatatagtccgacatcgtctgcatacagccctacttcgcctgcatacagcccaacatctcctggctacagcccaacatctccaagctacagcccatcttcgccaagctacaatccttcttcggtcaagtacacgccttcacatgcatactctccaagcagcccaaattactacagctcaacatcgccgacatactcacctacctcaccatcatactcgcaaccaagcccgtcatacagcccaacaagtcgagtggaagaagaagcgcatgaggaggctgaagaggaagagccaaaaagatga

SEQ ID NO: 10567 - DNA, 671 bp, Oryza sativa
  Clone ID: PAT_MRT4530_16876C.1
gtcgttgcctgtggcaatggcatgccgctgcctgaattctgcgggtatctaaaagcaaaggaacgcagcagtagaggaaatttgatggggaagcgtgttgatttctcagctcgtactgtcatcacaccggattcaaatattataatgaattggtagtgccatggagtattgctttgaaccttacatacccagaaactgttactccatataacttccaaggttttttaatgatcacttatcccccccccccccccccccctgggaagacaggtgcaaagtacattatctggggagacgctcaaaggcttgatctttgttatgtgaagaaaagaactgatcagtatctggaactgggttacaatgtggaaaggcaccttgatgatggtgattttgttcttttcaatcggcaacccagtcttcacaaaatgtatatcatggggcatcgcattaaaatcatgccctattcaaccttccacttaaacttgtccgccacttcgccgtacaatgcagattttgatggggatgaaatgaatatgcatgttcctcagtcatttgatgaaagatgtatccaaaccaaggtctcattagttcccttgagcgctctctctcccccatcgtcaacaccaattcctgggctcgtcgaggaagaggtcctcggggatgcggaatgc

SEQ ID NO: 10568 - DNA, 175 bp, Oryza sativa
  Clone ID: PAT_MRT4530_16877C.1
gggggaaatgaagataccgcatgtacaacaaaaactttaggggcaattacaagagctaggatatacaaccgaaacttcaaaatggatgcaattcatctattgtattggctgtgaaagtgtacaaatatctataaatgggggtaagagttttaacctgcaattaaacatagataag

SEQ ID NO: 10569 - DNA, 744 bp, Oryza sativa
  Clone ID: PAT_MRT4530_16878C.1
atggcgctacagcttgcagcacactcaaggaagtccaccgtcagtgtcctcatcatgccactgctgatgctcctcctcgccgccatggctgcgtcggcggcgagctcctatcagccagatgatcagatgtcagacttcggaatgtgcttctttgccagcagctgctatgacacgagtgtgttgcttcccaaagggcgcagcagacaaatccccttcccaatttacagttttgtaacacgacgtgagcattcaacttacccgagaacatccagacgcacacgatgcctcaagcctttcaaagttcccgagtactgtagtcacaacacaccaaggaaacacgggaaagcacgcagtatggaccatggagcaaacagttgtgtgtcaattggcaaggctgcgctgtcgatgtgtgtcgacgctactgctcacacaggggtctcgaatggcaaggagcctcttgtaacgattcttctgacaagtgctgctgccaatacaacgacgttcagaaatcaaccaattgatgataaatataagttctccgtttctgaaaccgagaagaaatacgaagactggtttaagatgatggaaaatgatgtgttatgtgatcaatttactccatatcttgaattctttatttctgcaatcgagcctgctgcaattgtcatcaacgtctgggtctccaagtctccaacagccgatcgttcaatctatcggctaatcgttgttatatcgacatcttgttag

SEQ ID NO: 10570 - DNA, 514 bp, Oryza sativa
  unsure (1)..(514): unsure at all n locations
  Clone ID: PAT_MRT4530_16879C.1
tcggccgagcattcaggctctagnntgctggcacncancantgtacatgcgtcgctagtnactatagctaaatctcgatcgacactatggcgggtgctcncaagacgatagcgctggttgcntnggtggccgtggtngcggcagcagtngtggcngaaacggcntctgcngcgntgatctcnggctacctnacgtcgtccatntcnccctgcctgtcgtgcgtgatggggaggganagctcccntcgtcgtcctgctgaancggggtgangacctccacggcaangntcctcctccgccaagcgncgngncgcctgcnncngcatcaacancntgggctccncctncangaacctcnacatgggcnacgccgcctccntccccagcanatgtggcatctccgtcgncttccccatcagcacctccgtcnactgntccaaaatnanctaattacnagctggatctcnccnctgaaatcaattgtttgggaagatctncaaaatgaccgtccctgc

SEQ ID NO: 10571 - DNA, 192 bp, Oryza sativa
  Clone ID: PAT_MRT4530_1687C.1
atggagtccggtcacttgacatttgctgcacatgaggtgaaggaggaggaggaggaggctgcaaagagacaagagttggaggagtttgcttgggtgaagccgatggggttttatctccttcatcactcaattcggctgctgctgatcgacatcttcttcgatttcctcttcatccaaggtagatggatctaa

SEQ ID NO: 10572 - DNA, 522 bp, Oryza sativa
  Clone ID: PAT_MRT4530_16880C.1
agctaaacaaatattcatcgtttttttcacaccatagaatcaaacattcattaaaagttcacatcacagaatttcaaaactagataaaaaaaatacaccaattaattatagtggagaacttcccccgctgctgttgctcactgggaaagtgtcgtcgcttgccgccatcgagcaagccacctctgagccaggagggacgaggttgccgcaagctgccacacgtcgccggaaaaggagggggaagaacaaggcttcaaatgggaaagatctctccacacatgggaaaaggagaggctgctactgccaccgcacaaggagaagggaaggccgtggggaggcgtcgccgaggagaggcaaggtggatgccgcctcctcccgctcgccctgtcacttaggggaggcactgttgaaaggaggtgccgccgaggggagatgaggtgtatgccgccttctcccgtttgctccgctaccaccaaatgtggcggacgcgtgggcggacgcgtgggacagagaggacgagcc

SEQ ID NO: 10573 - DNA, 375 bp, Oryza sativa
  Clone ID: PAT_MRT4530_16881C.1
atggcggcggcgacgacgacaaataagctccagacgatgcggtggagctacctcgacgaggacgacgactacggcgacggcggtgacctcagcaccctgctcccaccgcgcgtggtcatccggccggacgagaacaggatccgtcgagtaccgcttcaacgaggatgggaaagcggtgaagcgccaccgcgcacaacgacgacgccagcgagccagggccccaccggttgctcgtcgagccagacatggccgcgcatctccccatggcaccaccacagctccacgtacccgcgccgcttgtccccggcgcggaggtgcatggagaggagtgtggacgggagcagattgctgggccgcgtcgaggccgacggttga

SEQ ID NO: 10574 - DNA, 864 bp, Oryza sativa
  Clone ID: PAT_MRT4530_16882C.1
agtccatccatggatggtcctttttctggtgcacctgtctcttatgcatttcgcttgtttcgttttcactgtggcatggtgcctctgatctctctcgtttttccctggcctggccgcaggccccacgaggattgtgactaagacctcgtgaatcgataaatcgattggttgatggatggatggatagatagatcggctcggacttgagctctaatggggttgccctttgcatctgcaatgggttgagctgaaaatggctagtgtggcgttggctcctcaatgatctgggcgctgaagcatgcataggggttggagaaacactgacatgtcggtctgcgcgattggcaggaccatggtttctgctgctgcttctgctttggaaaagtagctctctttctttctttttctcttcttcttcttcgtcctcctccgcgccgtgccactgctgtggcagttgtcgtcgtcgtcgtcgtcatcgatcatcatcatccagttctgccgttcccttgagacatgcttcagtgccagcattgagggctgccgcattagccagcctaagatgaaaaacaaagttgtgaaatcagagggccatttggtaatatcgacctttcaatctttttgtttggatcttttagttttgttgcttgctcctcagactctgtgtctccttaatagcctgatgtaactcccagaaatttactatctgacggagttggtccattgccgtgcaaacaagtacacacttaatgtatcatggctgcagatgtagtgattgatgttcagaacaattcaaatatctccaccttgtctattcctcgtagattcaaaatacctcaacttatgccactacattgtttatctctt

SEQ ID NO: 10575 - DNA, 918 bp, Oryza sativa
  Clone ID: PAT_MRT4530_16883C.1
ctagtgatccccgggctgaggaatcggcacgaggctctccttctctctctgtctctaccgcatcccctccctctctcggcgagccgaatccatggagttctacgtggacgacaagtggaagttctcgaagaagagccggaacaatggcagcaggcgcatccccggcggcagcggcgcgggcggcgacccgttcctcaagaggtcggccagctccagggaccaggtgatcggccggggccgcgtgggcagcggcggaggcggcggggcggccgcggcgccgtcgtcgttctcgagccggtgcgcggggctggtgaaggagcagcgggcgcgcttctacatcatgcgccgctgcgtcaccatgctcgtctgctggaaggactgctcgtagccgtggcgtggcctcccccctccctccctccctctcgccccccgccgccggccggtaccgaagatctctcgtcctcgccgccgctcctcctccagaagaatgagacgtggcatcgagaagatggccaattaggtgaagtatgtatagatcagagagtttgattattaggagccctttccttccttttttttctcccctctcccatcaattcgtggggtgtttcttgatcattgctactgcttgattagttagtgattagcagagtgtttagtactacaagctagatgtggtattgtgcacaagttttgggatctcgtcctcctcaaaggagctggggatctggtagttgttgaggctgcaaaggggggagctgggcggttagcagcttagctggagcgaaaatctagtggatctcctactattgtaccactacaaggccgaacagttgtcagtcactacccgatgtatagctaaagaaatgagacgcaacaagatacacacaactagttttttccttcaaacactctgct

SEQ ID NO: 10576 - DNA, 410 bp, Oryza sativa
  Clone ID: PAT_MRT4530_16884C.1
acagacggcatatattgatggtggggatgatacagactattcgtggagagcaaagggtttccatgaacaagcaaaagattgcggtatcccagctattacaactgccggcatctatcctggagtgagcaatggtcttacttcgcatttctatcaaacatatcagtttactttgatatttttcaagttacactgtccagatatcatcatgtgctctttcacaatttccatcagtactcatggatagtatccattgctctttgaggcagtttacatatgtgtaaaatcaccaacttgattagtgtcatgtattaatatgaagattgaagatatcaaatacataatagagagttagagacatgatctagcagtaaactatgaagacaatgttttgatctagccggacgcgtggg

SEQ ID NO: 10577 - DNA, 320 bp, Oryza sativa
  Clone ID: PAT_MRT4530_16885C.1
gggggggaaaagggaattgaaggtgaaaaacccccacaggggggaatttaccccgggggggtggaattcaaccaagacaacattttcattatcacaacatactattttacaaacagattatttgcccctaacatatggtacaaaaacatgctacaagaacctaaaattctaacttaaaccaccctaatccaggacctgaggccgggcttaaaaagggagggacttttctgggaccacaagggggaccccgggccctcataaacaggagccagcttttaggaggggcccaaagcaaaaggcgatgcaatgttgaatgcccc

SEQ ID NO: 10578 - DNA, 222 bp, Oryza sativa
  Clone ID: PAT_MRT4530_16886C.1
ctgtaataagatgatttatcgattcttccttgcgggcgatggcctccatgaagccacaaggagagcggagtagcccttcacgactccaggagatatttctttttggtagttgggatcaactcgggattgtaattctagaaatgacccatctaaacaacgttcttcagcccaacttgaacaatttctggggctgtcatgtatattaattttaggtccaaaaca

SEQ ID NO: 10579 - DNA, 216 bp, Oryza sativa
  Clone ID: PAT_MRT4530_16887C.1
atggcgctgggacgtatctccgtccggggtctccaaagctccgcccactcccaccgctccctcacctcggcccaccttctggcaagttcacctcttggaactcagcctccgacactaaaaccgcgccaccggctgccaccgaggcctcatcggctcatcctccttgctatccccttcctcgccgtcggcttcttcctcccccgctctcagctctag

SEQ ID NO: 10580 - DNA, 654 bp, Oryza sativa
  Clone ID: PAT_MRT4530_16888C.1
atgtcatcacctctctctctttcctctcccttcctctctctctctctcacttttctcctctcggaaggccggccagcgggtggggactggggaggtcgccggggtgaggcgggagaggaggtcccacaatcgctgaccggccacgcggcggcggcgacaagggataaggggagggcggcggcagcggtgcctaccggtccccaccgggctcggacgcggagagcggcgcccacgctcgtggagctgggcccggcgtctccttgccggaggaggcgaagtgaaccacgggcacccgcccacggcgaagaggagcttgctctgccgcgcgtgccccatgcccagcgcctcgaacgtcgtgggcgcgcgcccgccgccgccgccgtcgaccgcgacgagcgccttgacgcgggcaatggactcgggcgtgaaccagaacgacctgtgcaggagcggctcggcgccgtcctgcgtcggcgagccgccgttatcgccgccgtcgatctgcgcgaactcgtggtgcgggaaagcgacctgcggagagcggcacacccctcgcacgagttgacgaactgtatggcgccgacgccgtcgaacatgcagtggttgatggcgagacccagcacgaacccgccgcacttgaacttagtcaagtga

SEQ ID NO: 10581 - DNA, 371 bp, Oryza sativa
  Clone ID: PAT_MRT4530_16889C.1
ttttcttttttttggatacctgaagtactaccagtgttgcattttaaaagcctgaggtaatcagaatgtggagtttgatcgatggccgcactaatcagaatatggttcataattttcaccggtttgtggacagagtggaaccatatataagagcgtagaggatggtcgtcgtccatactcaaatttgttaggatttgcgtcatgtatgttatatgaaagagcaaaataaacacataggttaggtatgtgtaattaataaacagagatacgatgtaagtatccagagctggtggctaccaagaacaacataatcatacatctttggggcatgttgtcacgacactagcacaggacgtaaaaaaaaaaaaaaa

SEQ ID NO: 10582 - DNA, 1806 bp, Oryza sativa
  Clone ID: PAT_MRT4530_1688C.1
atggtgctgctcgggatggccgatacagagccgacggagtcgtattcggatttcaaaattggaaaagttgacaccacccttttcacaaaaatcattggtgatgacttctttgtgtgtcaaatttatgttgatgatatcatattcggttctactaatgaggtattttgcaaggaatttggtgatatgatgtctagggaatttgagatgtccatgattggagagttgagcttcttccttggacttcaaatcaagcaactcaaggatgggatgttcgtgagccaaaccaagtacatcaaggatctactcaagaggtttggcttggaggatgcgaagcccatcaagacacctatggcaaccaacggacatctcgaccttaatgagggagtgatgcctccccgcactcgccatggtcgtcgtccgcccacgcccgatcccgtgagtgaggagtcaagcggagatgagtacactcaaagtgatgaagaggttgaggaaaatgttagggggcaatttttgaggcctcgggataccccggatccccgttttcacaccgctttccaaaagagtgtgtatgagcaagtttatgcagggaaagcttttgcagaacataagtggatttcttggagagacatcaatgagactccagagtttgagggcttgcaggatctcttcaagactgttggcattgaccggattgtgaccttaaagcaagactacaatgaagatttgatccggcagttctatgctacagtgtgggtggcaggagactatagtgagatgaagtggatgtccaacacccttcagtgttctatctccaagaggcaattccggtggctcctcaatattcgcttggactttggagatgacttgcatgaggagcacacccacaatccgctctccatagactatctctctcagttttatgaagatggagtgcggtacacacatgggaaggttgccggcttgaggactatccccagtgtggtcaacaggattggccgtcagttcgacattgtgtctctcatgatgcaagagattgccatctctaaggggaccttcactcagggaatctattataccccttatatcatgaggttgattcaagacaagcttggggctgccgggccaaatttgaaaaagcacaagcaatacaagccctgccttcagcttgaagctccccgtgctcctagggcggtgccctcatctcatcctggagctagctcaagctcaatacctcctcctcctcctgggtatgatccaaatattttcttccattcacagtatgcttattttggaatgcaacccaacgaatacttcaacctggtacttggggctattaataccctaagtgaaaacatccagcgcttgtctaccgggcatgaagctttgcatgaggatgttcgtggcttgcgcaccgatgttggagacttgaatgcttccgtggggagattgcacacttgtcacgcccgaaaattcactagtaatttccgaacttatttgtgcataaaatcatcgtccaggaatcagccgagaaaagaaaacagcagcggatttaacggtctagcgatggcttcagctccactcccacaggcagctcaactggggtataagccaaacgtcttctccttctggatcctttatcttcaactgaggtttgatgattattgcaagaatgagcatatgacatactcaacaagccacacagcaaatatgcaagtgcacaaggataccaaaggatggcataatataggctcatttgcaaaagcagcatttagcaaaacatttaagagaagtaaaacagtggagtaa

SEQ ID NO: 10583 - DNA, 230 bp, Oryza sativa
  Clone ID: PAT_MRT4530_16890C.1
ggtatgcaatcgtgaactacgtatcaacattgaaaaaaaggatttcgaatgttacatgttatttggcagttttcaatgatactagtactgtacaacaatcattgatgcattacaagatgatttcagcccaaggaaaatgacacaataatgatcagttaaaacttaacatttcgtaaagggaatgcgtgggcaatcgtctgctcgcactcgtgcgtggacgctgtgggtcc

SEQ ID NO: 10584 - DNA, 723 bp, Oryza sativa
  Clone ID: PAT_MRT4530_16891C.1
atgcaggccaccttcaaatgccctatgatcactgagatgccagagtcgccacctctacatcaaagcaaacgcaccataataattccgacggcaacagctacccaagtacagggcgacacaagtaaggacgagagaggatttaaggcaaaaccaaaaaaagaaaaaagtacagctatctccgagctcgtagcgtcagttcctaagctcagggctaccctcctcctcctcctcccagctggtgtagctcacacaacagcttgcgaagcttctacggaaagcagccgcgcggccaacctccccaagccaaaggcgtctacaacgacagcgcgagatcaaaacaagccctacggacatcgaattcgcgagcaatcaaaccacgcgcgcgggaattggacggaatcgatcgggcagaccgcgctagctagctccaagcaactaactcatcagcgggaactaggtcttaccgagagccagcaggtgccaaccgccgtggggagcgaggggagagcccccgccgtgttcggattcggaggagcccagctgccggcggccgccgcctcgggcggcttcggcggtggaggcggggtcgagacggcaacgcgaagagagagagagagaaatggggggaggcgccgaggtcgggttggtcagaaggaagagagagaggcgaggcgaggaaagcaaccacgggggaaggagcgtgcgctcgagtcaaagggttga

SEQ ID NO: 10585 - DNA, 801 bp, Oryza sativa
  Clone ID: PAT_MRT4530_16892C.1
atggagctccagttccagaagccaacacaagggcaatcccagcagcagcaatgccattaccaagtgccaaccgtgacagtggccaagaacaaagcgaaaaccaagtgcagcagcagtaagttcgtgggcgtcaggcagaggccctcagggaggtgggtggcagagatcaaggacaccacccagaagatacggatgtggctcggcacgttcgagaccgccgaggaggctgcgcgggcctacgacgaggccgcatgcctcctccggggctcaaacacgcgcaccaacttcgcaacgcaggctgcaccagactcgccgctcgcgtcgaggatccgcaccatcctcacccacaagaagctcaagaagagcatgccccagcctaccatcaccttcagcaccgcagtatatcaccatgctcgtagcactgtccctgctgctgcaaccagcacaagcaccagtggtgtcagccccagcagaagcaacagctcaagccttaattttgctacaaacctctctaattttgctatgagtggaggtgaagaattgcagctggcttcttcacaacaacaatatgatcagtcatgggcactcaacaccagcctactaccgattggggatggatgcgacatgtcaggcagcaatgcttgcccagtggcctcagaccaggataagatgaaggcagagaagcaaggctcccatggtatgaatggcatccaggagcaggaaacctttgatatgggtaatgatctgtgcgactccttgtgggatctgccccctatttgtcaactgtcctgcaagtattaa

SEQ ID NO: 10586 - DNA, 900 bp, Oryza sativa
  Clone ID: PAT_MRT4530_16893C.1
atgggctccctcgccctcgcctaccacgatgcgagggagtttcggatggagacgaagcggaaggcggagcacgaggttaacctgctccggccgccggcgttgctgcactgggacggcggcgacggcgagcagcctccgcccctcgacgagcggcgacggatcgtgcaacgctggatcgaatacgaaaagcgcaaaggccctcgccgtttcgaatatctcccaggagaggatggtgcaaatgatgctcggccaaatgtccgcatcgccctctattattacaactgcaatcatccgggtgctgagttcgattgtgtcaggtccctgagtgctcattttgcttctttcagaggtgaaatttggtcccacgtcaacttcctggctcgcaggaggggttgtattgatgcccccgtacttcgcttcttcgctgagctattctactatggccctctcgttgaaacacccgttgtcgtatcatgcatcgtattacgggaggaaccactgttcgtcgtcaggagaatagaaggtcttcaagagccagtacaccacaccactaaaagggaactgtcgataacagaagagccagggagaacagaaacggttcaagaggcgccgctggtccagtacagaagcagttgtgcgttttgcagcgaccggcattacgaggttttgcaccccagcgaggaggaattcgtgtgtggaaaggagggccaggaagtggagccatccgggtggttctactggatgatggacatcggcggaaggttacccgatcgcatccttgtcagaccaagatgttttttggatgatgtgagcgatttttgctctttcgtattttatgtatttttcatatggctcgccagactagcgagtgcaatcaaaatatggagcgaaaaagaataa

SEQ ID NO: 10587 - DNA, 563 bp, Oryza sativa
  Clone ID: PAT_MRT4530_16894C.1
gattatttcattgaggatgcttcatatcagtaaggagccatggtttggaaggcctttcatcaaatcattccaaagtctgctacggtaactcagaatttcatagtttgttgcgggatccacatacttgttacctccttgttacaatcccttttctggtttttaggaatactgttattgggaagctgttcttcagcgctgttgctacaccagaatctgtgaaaaatattctctgtcaggtgtatatttatttaatcctctcatcttggaaaataatcaaagcataagcagattattgggcatatacaaaaatctatggtaacacaacattcaggcttaacgtcccaaattaagtaaaagccacatgaccttgctccaatggctgcattctgtgaaaagaaaatctttaattcatcatcttaagtatagaacctgttcttttccctttatttagtttgtaacataactgtaacctttgttccacaatgttgtttctcctagttctgatggaattcatttcagtgctaccatgacacatccgcagtgacagatgagcctagtcagtt

SEQ ID NO: 10588 - DNA, 405 bp, Oryza sativa
  Clone ID: PAT_MRT4530_16895C.1
atgcggccgtcaccgtcaccgctcggaacgagggagttccggaccgccaccgctctgcgtcgagatggccccttgctgctccgctcggcgcttgctgaagatgccagaggacgctgtcgctgctccgtgtcgagaaggcccgcccgctgctccgctcgatgctcatcgccgcgtcgccgggggagctcctcgaccgccggccttctaggcttctccgcgcgcgagacggtgttggcgccggtgccactgagggttgaggggagagtaatcgggtgccgccatgaatggagaggaggggcaccgaccgggggagctcgtgcagctggtggagtcgccaccggggcacgccacgaccacgtcaccgccggcgctgacgaccgcgcctacttcccgtcatgcccgtga

SEQ ID NO: 10589 - DNA, 1234 bp, Oryza sativa
  Clone ID: PAT_MRT4530_16896C.1
agtacacagccataattcagagactgttagtttagttctttttttcagaatgtatattagtacataacttgttattgctgtaacaaaaaaacgtgcggctggaacatagctccacacaaagactgggaagaaaaaaaggcctcctatgtgtacaagactatacttatgatacggaccgcgggcacgggtattcgcctgaaaatacaccaggtgcgctgcgagttctattttacatatgtatatggtctatatgcacaccagccctgcatagcgggcatgatgcgtgcctgaaaagccagttgtcgatgcatcgtgcgtggaacgtgtgctggcaatgaggcaggacccgaacaaattgcgatgctccaaaatcctgaaggcaaactgcacaacagttatcagtttcctgatcaggattggttgcagcgctgaatgtggtctttgggattctgttaattagatctcttgacatgcctcctgtatttccggtttcaaaaaggtcattggtgtcaatgaatggtgtactcagtagactcatctgactctgcaccgcgcgctgcagtgctgggctgaccttctcccacacaatccttccactgaagaggctagagatgatgtcaagcacgaagataatgctgtattttcctgattcacttgatctccagatttcgatgcacgattcgacggcctcgatggagaagaccgcgccggagaccaccccgacgcctgcgcctcgtagcatgccgctttccgtggacatccccatgaacgcgccgatgaagactccaactaatgagcccacgacggcgaagacgcaggtgagcagcgcgcagaccgtccacccggcggcggaggcggcggcggcgccgcagcccccgcacgccctccacagcctgtcgaggcagcaccccgacgccgccgccgccgccgcagcggcagaagaagaaggagaaggagaaggcatggcggagtaatccatgggggagagggaggtgaggtcagggcgcagcggcaaccatccaagaaaacaaccactgtgggtgcgcaagtgcaaggacgcagggatgggcgcgtatatataggcggcggtggtggcggggtaagaggacaaagtggtgaggaaatctcggcggctaagcgggaggaggaggagtcgacgcgaggtagaagccgcgggcgatgaggaggaggaggaggggatagcctcgtgccgattcctgcagcccggggatcc

SEQ ID NO: 10590 - DNA, 873 bp, Oryza sativa
  Clone ID: PAT_MRT4530_16897C.1
atggagttggagcgccggtggagggcgcaccggccggccacgcagatggagccgagggtgggcgttaacggcggcgccgtggatggcaggcggtggtgctggagctcccggcgacaatccggcgaccacgtcgccgatggccacgtcgccggtgacggagttggggcgccggcggagggcgcaccggccgaccacgcggatggagcaccaggcggcaaatctggcgaccacgtcgccggcggccgcgtctccggtggccgcgtccttctctcaccgagcgggacttcttccctgcgccggagtcaccgacggccacctcctcctcacagcttaggcgctcagcgtcagcgtcgttcctatttggatgggataggtggacgtagggtatcccgtcgatacccttcccgatggtataccggacctgtcactgtcatcctcgactccacctccggcagtgagctccgttatgctagcatcgctgactatcctctactccacgacaacgggcctccaccaccggcctcaactccgtatctccactccagagccaaggaccacgcttcctctagctcgtcttccactcaagctgacgccgtctccacccagcgtaccgagtgcacactatcaacggcgataagaacaagggcaagctcgactacgccgtgcttggagctcaccactggtgctcatcggtacggaggagataaggggaagagaaaggaggatagggaaatagaggaagaaggtggccgggatagctactggccgccgctacaggacgaggcgacgaaaaggcagccggtgtccggcgccaagtcatcgcgttttgcaggcgatgggaacggtccgcaccgcgtggcgtggagaacttga

SEQ ID NO: 10591 - DNA, 216 bp, Oryza sativa
  Clone ID: PAT_MRT4530_16898C.1
atggctccctacggcgattgcgtgaagctgtcgatgctgtggtcgcagggcgtgcagctccccggtgggtacagcgaagtaagggtgctcagtgacctctccatgactctcaacggcatcaacggatttgtcaaggaaggcacggtcgtgggcatctacaatgcggagccacactctattcatgccatctggaagtttgatccaattaacaagtga

SEQ ID NO: 10592 - DNA, 198 bp, Oryza sativa
  Clone ID: PAT_MRT4530_16899C.1
gatctataaccggtcgcgtggacggacgcgtgggtacgacgccgtgaagaatcgcaccggacctgttggcttcccaattctacatataaagagacatgttagggctgagtacaaacattggctatagctatataactgagtgagaaagacatacgctaacaatatctctccacatacctttcggaggggttatggggc

SEQ ID NO: 10593 - DNA, 2133 bp, Oryza sativa
  Clone ID: PAT_MRT4530_1689C.1
atggccgagccagcaaaggcgcacgacctctccccgagtatgagcggtgacgatggggagccaaacccacgccgtcgagctcgtactccaccgccccctccacgccaaagtcctaggcgggagaaggcgctcgagagggccgaaggatccgcgacttcgacatccacaggaggtggagaagggcggcgagatggggagcatcgcctcctcgtctacggcgacggcagcacgccccagggcgcgctccaagctgcgggcgcgctcctacgtcacccgcccgtcgcccatgacccggagtctccagcccaacgttggctggacgatgtggccaaattggtcatgactgcacggcagcgcctagatgctgatgggcggtcctccgccaccaaggcctctggtgctgctaccaccggctccgcgtcgtcaagacggagggcgcggcgagcggcagccgctgttcgccattcggccgccactccttcgtcaacgcctccgacccaggaagatctgtgtggggaaccggatgctcgcatcagtatcgagcgccggcgtaatggccgacgtgctccccacgcaacggagggcgcctcctcgtccggagtgtcacctcaccacggacgcggggatcagccctccgtacccccggttggtggtgtcggctgtagagcctttgtggcgagccttcggaatgtccgttggcccccaaggttccggcccaccatcgccgaaaaatatgacgggagcgtcaaccccgccgagtttctccaggtctacacgaccgggatcgaggccgccgggggtgacgactgggtcatggcgaatttctttcccatggccctgaaaggacaagcgcagggttggctaatgaacttgccacccgcgtctgtccactcttgggaggatttgtgccaacagttcaccatgaacttccaaggcacatatccgcgcccaggtgaggaagcggacttgcacgcagtacagcgaagggatgatgagtcacttcgctcggggggtgtgcggcacaaccgcatgcttgaaaagatcgcctccaaggagccccagactaccgcggagctttttcagctcgcggaccgagtggctcgtaaggaggaggcatggacctggaacccctccggttccggtgtggcagcttcggccgcccccggatccgctgctcagacagggcggcgtgacaggaggaggaagaagaggtcactcgtgttcaatcctgccctcgggggctcgggtcggctaaaatcgccaaacggggcccagaaccgagccgtgccccggggcgtgattaaatcagcctataacaagaaggaggcccgaaggcctcggaagaagaaggaaaagaagaaactatttaaagattggcgggtgcctgggggctcactccgatgcacccgggtcgccagcctcgtcgccactgtcggttttcccttgctgatgcgcgcgatttgcgaccgccgggattctgcccgaagagagagagagcagggaggagaggcccccgagccgaacggcggcccaaggcccccgacggccggagctggctctccgcctgcttgtccgacggtgccaggcgcccccgacccccaggatggccccgaggccactgcgggaaggccgcgcctgtcgccctctgaccccgaggtcgtcggcacagaagccgagtgcgccccgcgtggcctctcggatggagagcgccctggagatgtggcccctgacgaagaagatcggccccgccgaaaggtgcagcggcccgtctacttcgttagcgaggccctccgggacgccaagacccgataccctcatgcccagaagatgctttatgctatcctgatggcttcgaggaagttgcgccattatttccaggcgcatcgggtcacggtggttacgtcttatcccctcggccgaatcttgtataaccgagagggtactggacgggtggtgaaatgggcaatcgaactctctgaattcgatttgcgctttgaaccaagccacgcgatcaagagccaggccctcgccgactttgtggtggagtggaccccagctcccgagctcgtctccgtccccgaggccagctcgagcccatcgctgctgcctcacaccgccctctgggtgatgtag

SEQ ID NO: 10594 - DNA, 435 bp, Oryza sativa
  Clone ID: PAT_MRT4530_168C.1
gggggaaaaacaaaattttctccggcaccttcaaaggggccacaacaccaacccgatcattatctcggggccccaaccccgttttgcccaacccaaaaacaacaaactcgggggccccaaattctcccaaccccaagtaacccccggtaagttccgggcccccacatacacttgccggggacaaaatggggggcgaccccccacactttggtgctgcccgggtcggcaaggggggccgcgacgttttggggggggcccttgcccgggacaaatgccgggacgaaaaaccccaacaggcccaacatgggggggcgggcgcttttgaacgcgcatcccttggggccccggaacgccttggggtaaacccctaggcccccccgggaaaaggccccccccgggcagaacgggtaaaaaaacctttcccaggggcccccc

SEQ ID NO: 10595 - DNA, 567 bp, Oryza sativa
  Clone ID: PAT_MRT4530_16900C.1
agtggatccccgggctgcaggtttttttttaggttcagccagagttaccatttacattatgactgggtagagaacattaatacaatgtcaagtagcacgtatttttttcgatggcggattatactttcaacaggttattaattaccattgcactccctactggcatacgagtatagtacattataaacttttgaccagaaaaaacacagacaaaatgcaaacgaaaatatctctccatactaggccaaactgacgaagaatcggctcccggaaacgaaccatcacagccaatcatcagatgtattatcattttacactagaagtctatgttgtggtactggtaccactgaatttaacatctcaaatttgtttgtatttatttacctagatcgtgttatttgtccaagtatatatttaactctgccatgatattgccggtgctcagctctcatttcttatcttcgcctccgaactctgtagaattcccgttccagtaaacattcctatcatcagatgggccttggtcatcacttctcaaactgtgaacgttgccaccgaattgtctcg

SEQ ID NO: 10596 - DNA, 189 bp, Oryza sativa
  Clone ID: PAT_MRT4530_16901C.1
ggaggaccttacaaccaagagcacagagccaaggccagaactatccccatcttgaactaagtcacacttccaaccctgcgggtgcggcattatcactcacttgccctactcaattccatctctaacatcagccctaaaccattggtatactcatcacgaacaattccaatatacactaaaacctgtcca

SEQ ID NO: 10597 - DNA, 3285 bp, Oryza sativa
  Clone ID: PAT_MRT4530_16902C.1
atggcaggctccctagatgggagcacgaaagcgccagatgcaaccatcaccatcaccaaggatgatggaaagaccaccaagaaggtggcaaatcctgctctcccgctgtggagggctcaggagcagcaagttctgagctacttgctatcgtctctgtcccgtgaggtgctgactcaagttgctaccttcacaaaggcgacggaggtgtgggaggcaattgaaaacctctttgcgtcgcagtcccgcgctaggatcatcaacatccgaatggcgctctcgtccaccaagaagggaacacgcactattgcggaatatgttggtaagatgaaatcgttagcagatgacatgtcctctgcaaggaagcctcttgatgatgaggagcttgtgtcttacatcttcgccggccttgacttcgactacaactcggtggtgtcttccatcgctggccgagccgactccatcaccatgagcgaggcctatgcactgctagttggctttgaaagtcggctagaacttcttcaaggctcttcatctgccttggccaattctgtgtcgcgaggagggcgcggcggtggccggggtcaaggcggaaaccctggacgtggcggctttggacgtggacgcggcgacggcaagccaaggccgacatgccagctgtgcggcaagatcggccacaccgtcatcaagtgctggaaatgcttcgatcactccttcactggagaagagaagaacgccaacgttgctgcatcaagctcctacagcgttgacaccaactggtacgtcgacagcagcgccaccgaccacatcaccggcgagatggaaaagctggcggtgaaggacaagtacaccagcaatgagcaagtccacacggctagtggaacaggtatggacatcaattatgttggtcattctactattcgcaccccaaaacgtgacctatttctcaaaaatatccttcatgtgccaagtgcatataaaagtctcatatccgctcattgctttactagagataatagagctttcatagagcttcacccatatttcttcttggttaaggatcaggtcacgaggacgccgcttcttcgaggcaagtgtgagtgcggcctctaccctctgccaactgacaagttgtccagcgcatcacataagcaggcctatggtgttgtcaaaccatcgttgtcccggtggcatagtcgtttagggcatccatctcttcctattgttgatcgagtcattagcaagaataatctaccggtaactagggattctagtcaggagtctgtgtgtgatgcttgccagagaggcaagaatcatcaattaccctattccaagtcttttagtgtgtcctccaaacctttgcaacttattttttccgatgtatggggccctgcaccaagttcagttggcaataaagtttattatgttagcttcctcgatgactttacccatgcgtccatgcctctcaagttttgggatgaagctttcaccactgctgtttatctcattaatagaaccccgttaaaagtaatcaatctccctccggattactctcttgttcgtacttttggctgcgcctgctggcctaacctccggccgtacaatgctcgcaagctagctttctgctcccaacagtgtgtcttcctaggctatagtactctccacaaaggttttaaatgcctagacatatctgccgggcgagtttatatctcaagggatgttgtgtttgatgagtcatcttttccctttgctaaactccactccaatgcgggcgcctgtctccgttcagaagttctcttgctgccaccacatttgcttccaccatcatcattgcttgatccagggggcaatatagtacatgatcaacctatgattgatgatcctaaccacactaatcacactaatcaggatactgagcatgctgcaggacaaaatactgaaaacaacggagaaaacagcgatgaaaatgatgcaggaacggcggcagatgatcatgttttcgtgcaatcggacgaccacggctccatgcaaggttccggcggacaccacaccggtgctgatcccgacgcaagcatgcaggcgccgtcaggtggtgctgagtccgaagacgagcaagacacaggctcagtgggtgcgtcgcccatcgtgcagcctgctgtgcacagtcccgtgcatgcacaagattcctctgcacaccagtccggatcatctgtgctgagcaacgaggaaatcagctccacaacgcaagctcctgctcctggtcgagtcacaagatcaagacacgggacccgcaagccgaagaaatacgccgatgggactataagccaccagggtatgaagaggcaggactaccacatcatctctgctccaagagcttggtactctctcttaagtaagaaattgcaagaacttggttttacaccttccaaggcagatacctctcttttcttctttaataagaaaggagtcacaatattcttacttgtgtatgttgatgacattattgttgcaagctctagcacctcagcagtcacaacattgttaaaaggtcttgaaaaagagtttgctctcaaagatcttggtgatctacactattttcttggaattgaagttaagaaactaggaggtggtctgttgttgagtcaggaaagaccagatatatctttctctgttaacaaagtctatcagtttcttcagaatcccactgatatacactgggctgcagtgaagagaatactaaggtatgttcaaggaacattaggacttggacttaggattgacaggtctttctctagcattgtaagtgctttctctgatgctgattgggctgggtgtctagatgacagaagatctattggaggctttgctgtgtttctaggtactaatcttgtgtcatggagtgctagaaagcaggctacagtgtctagatctagtactgaggcggaatataaggctttggcaaatgcaatagctgaaataatgtgggtgcgcaagttgttggaagaacttggaattccacatcccagatcatctcaattatggtgtgacaatattggcacaacctatttgtctgttaaccctgtgttttatgctagaacaatgcatatagaagtggattatcattttgttcgagagcaagtagcacagaagcaactggagattcgatttgtgtcgtcaaaggatcaagtggcagatggtttcactaagcctcttcctgttcggcaactacagttgttttgtaacaatctcaatttgggaaacttgagattgagggggagtgttagataa

SEQ ID NO: 10598 - DNA, 708 bp, Oryza sativa
  Clone ID: PAT_MRT4530_16903C.1
atgtcaggtacaagttccgacgaaccaacactggagaatctagcgcataaactgaagggcatggaaaattggtatgaagagttgatgcgtaatagtaaatcatacaaggaaagcacagataaacatttaaaaaccttaagtgaaagcctggctgcaggtgaagaaggtgcaggtgccactgctcatcgacaccaaagatatgacgatgaagacgaagagcaatctgttgctgatgatgaggaggaagacgagagtgttggaaataaaagacaatgtcgagttagggacaaagatgatcctttatctaagtttgagccttctgtttatctagattggaagttagctgttgagcaaaaattctcttgctatgattttcctgataataagaaagttaaagctgccagtagtgaatttacctcctttgcatctctatggtggaatgatatatgtggtagaggacttagacctagaacatgggatgatatgaaacgtacaatgaggtctagatttgttccttcttactatgctcgtgacatgttaaataaactacaacttttaagacaaggtcccaattctgtagaaacatactatcaagagatgatgtttgctttgtcacgctgtgatttgcaagaaactgaggatgctagaatttctaggttctatggaggtcttaatagagagattcgggatattcttgaatataaataa

SEQ ID NO: 10599 - DNA, 1593 bp, Oryza sativa
  Clone ID: PAT_MRT4530_16904C.1
atgcccccggcgccaccgttctcctcccacggcgacttcgtcgccgccctccaccgctgcgccaccctcgcgcacctcaagcagctccatgctcacgccgtcgtcaccggccgcgccgccgcgcagaccaccaccttccacctcctccggttcgcctccctccgcctctcctgcctcccctacgcccgccgcctcttcgacgccacgcccagccccaacgtcttcctctactccgccatgctctccgcctacgccgccgcctcctcccactcgcaggaacacgcccgggactccctcgcgctcttcctccgcatgctccgccgcggccgacccgcgcccaaccagttcgtctacccgctcgtcctccgcgccgcctgcgccattggggtccagctggtcaggtcgatccattgccacgcctgcaaggacgggttctacgggcacgattttataaggacctcgctcctcgatgggtactcgaggtacgggatgatgggcgacgcgcggaagctgttcgatggtttgactgataggaacgtggtctcctggaccgcgctggtgtccgggtatgcaagggcagggaaggttggggatgcgatagtgttgttcgaacggatgcctcagagggatgtgcctgcctggaatgcgatcattgccggatgcacacagaatgggttgtttgtggaggcagtggggattttcaggaggatggttgatgaggggttccggccaaatggcaccacagtatcttgtttgctgtctgcgtgcggacatttagggatgctgaagattggaaaggtgatccatggttatgcgtggaggagctgtgttggttttggctcatccgttgtgaatgggttgattgatatgtatggtaaatgtgggaatttgatggaggcaaaatggatctttgatgcgttttctgataggggtctgaccacatggaattctctgatcaattgccttgcactacatgggtgcagcgagagtgccattgcggtgtttaattcgatgaggaatgaaggggttcaacctgatgaggttacttttgttgggctgttgaatgcatgcacccatggagggtttgttgatgaaggtcttagatactttgaactgatgtgtgatgagcatggaattgagccagagattgagcattatggttgtgttgtagatcttctttgtcgagcaggacggtttcaggatgcgatgaattttatcaatgatatgaaagttcaaccagacgaagtcatttgggggtcattactcaatgcctgtagaatacacagacacctagaactggccgagcatgctataagaaacttgttggatttgaatccaagtaatgctaattatgtagtgatgcttgcaaacttatacagtgaaggtggcttctgggaagaggttaggaaagtaaggaagctcatgaaggaggatgttacaggcaagaagctgcctggttgtagctggattgaggttgatcgcaaaactcgccggttttattctggtgatgatggtcaccctgagtcagaggatatctatgacactcttgataagttagctaccacaatggaaatgcaggctacatttgcatag

SEQ ID NO: 10600 - DNA, 340 bp, Oryza sativa
  Clone ID: PAT_MRT4530_16905C.1
gatagggcttcttctgtggacataatacttgcattgcagcgatagataacaacaccatgatcagtttgatacaaagagcaaatcaagaactgatagtttgaatgatagttggatcaccctaacccttaataacaacacctgtaatgagacaattgaatagatctattacagtatacccggagcatccccacttggaaaaatgaataaattgtgtccctcttgtctttagtttgagcaacatccaacttttcttatctgccggacattatttttcacggttatcgcctctcattttcctgggctaagtgacctatccttagggtgctttcatccggttttt

SEQ ID NO: 10601 - DNA, 1914 bp, Oryza sativa
  Clone ID: PAT_MRT4530_16906C.1
atggaaaattggtatgaagagttgatgcgtaatagtaaattatacaaggaaagcacggataaacatttaaaaaccttaagtgaaagcctggtgaaagtagtggatcaaattgagcaaatgactcgatcacataaacaattaactgaaaacattcagaatatgaatattggacatgaaaatattgtgcgacgcattggtttacttgaggctgcaggtgaagaaggtgtaggtgccactgctcatcgacaccaaagatatgacgatgaagacgaagagaaatctgttgctgatgttgaggaggaagacgagagtgttggaaatagaagacgacgtcgagttagggacaaagatgatcctttatctaaggtaaaatttactatgccttcttttgatgactgggagctagctgttgagcgaaaattctcttgctatgattttcctgataataagaaagttaaagctgccagtagtgaatttacctcctttgcatctctatggtggaatgatatatgtggtagaggacttagacctagaacttgggatgatatgaaacgtacaatgaggtctagatttgttccttcttactatactcgtgacatgttaaataaactgcaacttttaagacaaggtcccaattctgtagaaacatactatcaagagatgatgattgctttgtcacgctgtgatttgcaagaaactgaggatgctagaatttctaggttctatggaggtgccatggcattggacattgcacgtgactgtccaaatcggcgagctctatttgtgaatgctgatggtgagtatacttctgctagtgattgtgatgatgaatatgctttagctgccactgaccatgcaggaggacaagataatgatgacatcgaggaagtccatttgcatccagagtcgctagatcaatatcctagcctaattgtcaagctagcacttagtgctaaagagaagtgtgaagagcaaaagcaacgtcacaatttgttccaaagcaaagttcttgtgaaaggccataccgtcaaaatgattattgattgcgggagttgcaacaatttagcaagtgaagagatggtcaagaaggcttggcttgactacccatccacatccacatccatatcatattcagtggaatatgaggatgtttttcacgatgagatacctccaaggatggccactagacgagagagtgcacacaatgaagataacgggattcagtcgaggacgactccaattcaagaaggggagtatgatgaggacatcaatttgtcggatacgctcataacttcacacgttccaatgataattccaagtccaagtccagttcggcctccggagacagcactgacttcaaacggacctagcgccttcatgccaactccgatttggggatcatcaaccgcgcgtcacggttggtacgacatcgtttgtggtgtagtgattgcatggcgtcctggacttgttctgggctatagtaaggccagtcacaatgggggtttcactggtgtgtcatgcacatttaatagggccaatacctcaaagagagacatagtgcatagagaatcagaggttgcagcaggagcgcaaccagggactggtggcgatagcgtggaggtccaggccctgacccagagagttggtgacaaaaacatggatcttcgcctgaagcggcgcctacgcgctcgaccatggatgccagcggttgcgggatcgaccagtggggaggggacaacgttcctggccacaatgccgagcaggggcccaggcaacattcgagctcatcgatgggagaccaaagcggcaaagaagatgaggtcggagcattggtgtcgagacccgcgacacggtggtggtaggagctctagtgaggctggtgacccgagtggcacggtggtgagggaaggctga

SEQ ID NO: 10602 - DNA, 924 bp, Oryza sativa
  Clone ID: PAT_MRT4530_16907C.1
gcgcggcttctctcgtgcaccccaccgccactcccgaagcttctctcatggcggccatggccgcggcggcgaagctcacggcggccgcctcctctctcctcctccggcgctcacccttgctgcggcctcacggtctccgactctcccgccgcttcgctccccaaagatttgtgcgccacattgcttcatcgacaaatgaagaagctgctgctaaagcagcagcagcaacagctgatactggaggaccgaccatttttgacaagatcattgcaaaggaaattccttctaatgttgtctatgaggatgagaaagtgctggcatttagagatattaatccacaagcccctgtgcatgttctagtcatcccaaagataagagatgggttgactggactagacaaggctgaaccaaggcatgtcgaaattctgggctatcttctatacgccgcgaaaatagtggctgagaaggaaggtatagctgaagggtaccgtgtcgtcataaacaatggacctaaaggatgtcaatcagtctatcacctgcacttgcatgtactaggtggaaggcagatgaaatggcctgctggctaattaaccaagtgggatgctttctgtactattgcctaagttctcttgtagtaagacaatatgatcggttgaagtaatacccgcattggtgaatggtgttttctatccatctgtaacgtctttgttgtcaatgataccttcacaacagagcccgtgagaatgctcaaagaatctgttagtgagattgtctggtcgttctgtaattacttgattcgagcctctaaagtttacataatcgatcggccacaatatttatttgcaaaaaaaaaaaaaaaaacagagcgggcggtggtagatcacaatggatgttggagggggcgctctaacagcagggtgccgg

SEQ ID NO: 10603 - DNA, 237 bp, Oryza sativa
  Clone ID: PAT_MRT4530_16908C.1
atgaaggcgctaggtccgtttgaagtcagtgctgtctccggaggccgaactggacttggacttggaattatcattggaacgatcatctttgtccctaactcgacgtcgtcttctatttccaacactctcgtcttcctcctcaacatcagcaacagatttctcttcgtcttcatcgtcatatctttggtgtcgatgagcagtggcacctacaccttcttcacctgcagcctcaagtaa

SEQ ID NO: 10604 - DNA, 462 bp, Oryza sativa
  unsure (1)..(462): unsure at all n locations
  Clone ID: PAT_MRT4530_16909C.1
caaaccatagtggttgagatgaccaaggggccccatgagagtcgctagtgtaccctgctcttggacccacctatgtttggatatntaattgacgtggaaaatggaaagatatgctgcggcaatatgggtgactgacccccntttggagtggggatgctgtgtggtgtgctgcggatgaccacaatactatgtgtgggatgtgtgacccancaaagggcatgcagctggtggtgtgctgtgtgctggaccaatgttgagaacggagcatgtgcctgtggatgtgcatgtgctggtgtgtggtgaactgtgtggtgactggggtgccgatgagatgtgctgtgctggatgcataatgagcggctggtgatgagtgatgtgggacactgagacgcaatcaacaaactgaatgtccaatgactcatacatgggccagattccatccaaaaaaaaaaaaaaaaaaaa

SEQ ID NO: 10605 - DNA, 10369 bp, Oryza sativa
  Clone ID: PAT_MRT4530_1690C.1
ttgtggaggagaaggaggacgtgccaaagatgaaggatgaggagcatcacggcggcgatgatatacaaaagcttgggtgctctccaacatttggactcaagaatccaatacacccaccctagtgtgcaatcttcccacggaagcattcaaatctccaacatcggtgcgtaagccatgaacatcctcatgcaatgcttaatgcccggtggataagcgttgaatgctttcacttagggtattaatagccccaagcaccggattgaagtattcgttgggttgcattccaaagtatgcatattgtggatggaagaaggcacttggatcatacccatgaggaggaggggggctgcacttgagcttgcaccttgatcaaatgttggttggcgcacacgaggagctctaggagtggagagttggagatgaggcttgtagtctttgtgttcttttaagttgttaccaatttgtctcaacttgctttgaatcaatctcattatgtagggggcatagtaaactccttgtccaatagtccccttggaaatggctatctccttcatcataaggttgatgacaccaaaccgacgaccatccatgatggcttcaatgacatgccatgcaacgccgcaaatgtcatcattgttgccacatcttgggagaatggtggccctcactatgcggttgatcagacttgggatagccctcaaactcaccacctttccataggtgtgcctcctcccttcttcataaaactgagaaaagtgatcaatggggaaggggttgtggttttgctcatcatggaggtcatccctgttgttgaagtgaatgtgcaagagctccttgaatgcacggcagttgatagagcatcgaagggtccccgacatccacttcatggcatcacaatcgccggacaccacggacttttgataccgtgtatggaatctcagatcattgcaatcattaggcctccggaattgatcgtgatgacggaggatagtgtattgctaggcattcctcaaattgagcacaaattggatggtgggatcgagaggactcccatcatcacttgcctcatcatcctcaccatcgccactgccattatcaccacttacttccacctcatccccctcaatattttccataacttcatcatcactttgaacatactcatctccgtttgattcctcattctcactgacgggatcaagcgtgggctcacgacgaccacggcgagtgcggggaggcatagccgagggccaacaaccggtcagaccgccgtccatatgtcggtcagaccgacggccgagcgcggtcaaaccggcggctggtacccggtcagaccacctcaactttgttttgaaacttttctcaaattccttctcaatcttattttggggataaatctcattttggccaaaactaagaatctagtttccgctgaaacatattccgcttcggcagtagagagggctacggagttttgtttcttggatgaccatgatacaagggatctaccaagcatttggcaactaccggatgtgctctttctatccactttgcaaccggcataatccgaatcggaatagccaactagcttaaacttagcaccttttgggtaccacaagccaataattgaggaatgctttaaatatcttagaatccttttcacggccactaagtgacactccttaggagcgacttgaaaccgtgcacacatgcaaacactaaacatgatatccggcctagatgcggtaaggtaaagcaagctaccaatcatagaatgataaagctttaaatctaccggtttacctccctcatcaaggtcgagatgcccattggttaccataggtgtcttgatgggctttgcatcctccaagccaaacctcttgagtagatccttgatgtactttgtttggctcaagaacgtcccatccttgagttgcttgatttgaagtctaaggaagaagctcaactctccaatcatggacatctcaaattccctagacatcatatcaccaaattccttgcaaaatacctcattagtagaaccgaatatgatatcatcaacataaatttgacacacaaagaaatcatcaccaatgatctttgtaaaaagggtggtgtcaacttttccaattttgaaatcctttgacaaaagaaaatctctcaatctttcataccaagccctaggagcttgttttaaaccataaagaccttttgagagtttacaaacatggttagaatttttaggatcttcaaaaccgggaggttgttcaacaaagacaagttcggcaatttcaccatttagaaaagcacttttcacatccatttgaaatagttttatatcaaagcatgatgcaaatccaagaaggatgcgaatagcctctagtcttgccacgggggcaaaagtttcaccaaagtccaaaccttcaacttgtgtgaaaccttgcgtcaccaatcttgccttgtttctcaccaccaatctgttctcatcttgattgttcctaaagacccactttgtccctatggcattgtggtctctaggtctttcaatcaaagtccacaccttgtttcttgcaaagttgttgagctattcatgcatagcattcatccaatccggatcacaaagagcttcatctacatgttttggctcaagacaagaaacaaacgagtagtgttcacaaatcgaagcgacacgagatcgagtttgaacacccttactaatatcacccaacacttggtcaattgggtgatccttggaaagagcggtgtgtatccttggtggcataggtggatcttgtgccttctcctcctccacttcaatttaagcttgacttggcgaagcggaagtagatggctcatcttgagtagaggtggatggcttgtcttccacttcaataggcttgacatccccaatagacatgttcttcatatctctcatcaagccttcatcatctacatcatccaaattctcgtgcccctcttgggagccattagtctcatcaaattgaacatcggcggtttcttccacaatacctttgttcttgttgtagacctggtatgccttgctatttgaggcataacctagaagaaacccttcatcacaacaccgactttcaaatttggttagtctaacaccctttcggtaaatataacacttgcaaccaaaaactcgaaaataggcaacatttggcttcctcccaacaattagcacataggaagtctttttcaagagacgatgcaaataaagcctattagttgcatagcaagcggtgtttatggcttccgcccaaaaggaatcggaaacaccatattcatcaagcatagtcattgccatctcaatcaatgtacgatttttcctctccacaccaatgctcttataggttgttgggccaaacaaatccatatatgcaagagctccaatggtctagatgtggacatgatactcttagtaggatgagaacatgcaacttgcttgccggcttgacaagcactacaaagcttatctttctcaaacttcacatctttcaagcccacaactagatcacgttttgaaagtttgctcaattgattcatgccaacatgggctagcctcatatgccaaagccaacccaatgaagtttttgcaactaacccaattacctttcctttgctattgcctccaaatgtcactttctcttgttctttccctcctacttcaaatgtggtgaacatagccctattaccggtcatgtgttgagtgcatccactatcaagcacccaatggctcccatcggtgtggtagttcaccactaagtatagtggaacccacatatctagcaacaatactacaatcatgagccttcccttgaaacacctctccaaactcttgttgagcttggccacttgctccttaagctcattgttctcaacaacaagtgagacatcacaaatagaaacacaagagctagagctagagctaggcatatccacaagatcatcacaagaggtagaaatgctagatgatgcaacatgagcaatatggcaagtagcactatcattaagcaaatcacaagatatgccaatatcaatgtgagctccatgttgagtagtggaaaggaggttgtcatgagtttccttaagcttctcatgagaaatggtgagtctctcatgagaggtctttagctcctcatacaagaccttcaaagaagcatgattcttctttagggccttgaacttgacaatctccttctcactataagcatggagctcctcaaacatactcacaaactcatcataggaaacatcatcacaatcatcatcactctcactatcactaagagatgtaaccttagaggagccttttgccatgagacaaagtggagcgaagagtgatggagcctccttgatggcaacaacggccatcttcttcttcttggagcttgcatcatcaccaccttcttcctcggacccagatgaggcggagctctccttatttgagtcccattccccgatgaaggcctcaatcttcttcccttccttcttgagcttcttcatgagcttgtagcctccactcttcttcttggatgacttgtctccatcatcatccttggaagggcacttggaagcaaagtgtcccttctcaccacactcaaagcacctcaagttggagagagtcttgttgggtcttctatttcttctcctattggagttggagccccttcctctctccttgcccttacccttgtcttcaacttcggtttggagagcaatgcacttcttggaaggtgaggcttcctccatctccttcttcttcaacttgtacatgtcattggtgttgatcttccccaagaggcttgcgggtgtcatccttgacatgtcggagttgatgagcatggtgacaagggtctcatacttctccggtagagccctaagcatcttttgggcaatctcaagatcggtgtagtttgccccaagccccttgagatcattcacaatgacattgagcctcccatacatgtcattcacactctcatgaggcaacatggagaatgtctcatattggatcttgaggaaatgaagcttggcatccttgtactcgcttgtgccctcatggatctccgccaacttgttccaaatctcatatgcggtctcaaggttactcactctatcgaactcctcttggctcaaagagttgaacaaagcattcatggcttgggcattgagttggaggttgcggtgatcaatctccgtcaagggcttgccagtgatagcaaagccggcaccgggcctcctccacaatcttctcggagaggtcaccgggcaactcctccacaagccgtctaggaggcggcaacctcattatgtagagagcataatagattccttgtccaatagtcccctttgagatggcaatctccttcatcataaggttgataacatcaaaccgacgaccatccataatggcatcaataacatgccaagcaactctgcgtatgtcatcattgttgccgcatcttgggaggatggtggcccttactatgtggttgatcacacttgggagagcccttaaacccgccacctttccatatgtgtgccttcccccttcttcataaaactgagaaaagtgatcaatggggaagggattgtgggtgtgctcatcatgaaggtcatccccgttgttgaagcgaatgtgcaagagctccttgaattcacggcggttgatagagcatcggagggtccccaacatccacttcattgcatcacaatcgccggacacccatacggtggcatagaattgccggatgagatcttcatcaaaaggttgcttcatggtgacaattctatcaatcccaacggtccggaacatctcttgcaaattctcaaactccggtgtctcaccaatgtgcctccaagagatccatttgtgtttggcgaaggctttgttggcatacacttgtacatacacggacttttggaaccgtgtatgaaatcttggatcattacaatcgttaggcctccggaattgatcatgatgacggaagatagtgtattgttgagcattcctcaaattaagcacaaattggatggaggaatcgagaggactcccatcatcacttgcctcatcatcttcaccatttccactctcattgtcatcaccatcatcacttacttccatctcatcaccctcaacattttccatattgtcctcatcactttgaacatactcatctccgcttgattcctcattttcactaacgggatcgggcgtgggagcacgacgaccatgccgagtgcggggaggcatagcaagcatttggcaactaccggatgtgctctttctatccactttgcaaccggtataatccgaatcggaatagccaacaagctgaaatttagcaccttttgggtaaatccttttcacggccactaagtgacactccttaggagcggcttgaaaccgtgcacacatgcaaatactaaacatgatatccggcctagatgcggtaaggtaaagcaagctaccaatcatgaaacgataaagctttaaatctaccagtttacctccctcatcaaggtcgagatgcccgttggttgccataggtgtcttgataggcttcgcatcctccaagccaaacctcttgagtagatctttgatgtacttggtttggctcacgaacgtcccatccttgagttgcttgatttgaagtccaaggaagaagctcaactctccaatcatggacatctcaaattccctagacatcatatcaccaaattccttgcaaaatacctcattagtagaactgaatatgatgtcatcaacataaatttgacacacaaagaaatcatcaccaatgatttttgtaaaaagagtggtgtcaacttttccaattttgaaatcctttgacaaaagaaaatctttcaatctttcataccaagccctaggagcttgttttaaaccataaagagcttttgagagtttgtaaacatggtttggatttttaggatcttcaaaaccgggaggttgttcaacaaagacaagttcggcaatttcaccatttagaaaagcacttttcacatccatttgaaatagttttatatcaaagcatgatgcaaatgcaaaaaggatgcgaatagcctcaagtcttgccatgggggcaaaaatttcaccaaagtctaaaccttcaacttgtgtgaaaccttgcgccaccaaccttgtcttgtttctcaccaccaatccgttctcatcttgtttgtttctaaagatccactttgtccctatgacattgtggtctctaggtctttcaatcaaagtccacaccttgtttcttgcaaagttgttgagctcttcatgcatagcattcatccaatccggatcacaaagagtttcatctacatgttttggctcaagacaagaaacaaacgagtaatgttcacaaatcgaagcgacacgagatcgagtttgaacacccttactaatgtcacccaacacttggtcaattgggtgatccttggaaagagcagtgtgtattcttggaggcataggtggatcttgtgccttctcatcctccacttcaacttgagcttgacttgacgaggcggaagtagatggctcatcttgagtggaggtggatggcttgtcttctacttcaataggcttgacatctccaatatacatgttcttcatagctctcatcaagccttcatcacctttgttcttgttgtagacccggtatgccttgctatttgaggcataacctagaagaaaccctttatcacaccgactttcaaatttggttagtctaacacccttatggtaaatataacacttgcaaccaaaaactcgaaaataggcgacatttggcttcctcccaacaattagctcataggaagtctttttcaagagacgatgcaaataaagcctattgattgcatggcaagcggtgtttatggcttccgcccaaaaggaatcggaaacaccatattcatctagcatagtccttgccatctcaatcaatgtacgatttttcctttccactacaccattttgttgaggtgagtaggtagcggaaagttcgtgtttgataccaagatcatcacaatagtcctcgatattggtattcttaaattcggaaccattatcacttctaattttcacaagagtgcaactaaattcattttgggccctttttgcaaactttttgaaaagctcggcaacaatagacttatcatgcaaaaagaacaccccaagtatagcgagaataatcttcactttgctattgtctccaaatgtcactttctcttgttcattccctcctacttcaaatgtggtgaacatagccctatcaccggtcatgtgttgagtgcatccactatcaagcacccaatggctcccaccggtgcggtagttcacccaaacaagtttgggtccttggaggttagagaccaaagctttgggcacccaaatggcattctttttaccaccgagtataggggaacccacatatctagcaacaatgctaccatcatgagccttcttaagcatataatgagaatcaaacatacatgtcttaggaggcttacttccggggcaatcactcaccaaatgcccaacctcacgacacttggagcaatacttaccatttctcttgacaaaacgagtggcatggtgagaaggtttcttacccttctttggaatgaatccaagtccctccttattaaggatgcaccgttgctcactcaaaatcttgtcaagagtgttcttacccttgaagcatctctccaaactcttgttgagcttagacacttgctccttaagctcattgttctcaacaacaagtgaggcatcacaaatagaaacacacgagctagaactagagcaagggctaggcatatccataagattatcacaagaggtagaaatgctagatgatgcaacatgagcaatatggcaagtagcactatcatcaagcaaatcacaagatatgtcaacatcaatgtgagctccatgttgagtagtggaaaggaggttgtcatgagcttccttaagcttctcatgagaaatggtgagtctctcatgagtggtctttagctcctcatacaagacctctaaagaagcatgatccttctttagggccttgaacttgacaatctccttctcactataagtatggagctcctcaaacatactcacaagctcatcataggaaacatcatcacaatcatcatcactctcactatcactaagagatgttaccttagaggaaccctttgccatgagacaaagtggagcgaagagtgatggagcctccttgatggcaacaacggccatcttcttcttcttggagcttgcatcatcaccaccttcttcctcggacccggatgaggcggagctctcctcatttgagtcccattccccgatgaaagcctcaatcttcttcccttccttcttaagcttcttcatgagcttgtagcctccactcttcttcttggatgacttgtctccatcatcatccttggaagggcacttggaagcaaagtgtcccttctcaccacactcaaaacacctcaagttggagagagtcttattgggtcttctattttttctcctattggagttggagccccttcctctctcctttctccttcccaagagatcattgaaccttctagcaagaaggaccatctcttcctccaagtcctcattgacttcattcaccttgctcttgctctggtcttcaacttcggcttggagagcaatgcacttcttggagggtgaggcttcctcaatctccttcttcttcaacttgtacatgtcattggtgttgatcttccccaagaggcttgcgggtgtcattcttgacatgtcggagttgatgagcatggtgacaaaggtctcatacttctccggtagggctctaagcatcttttgggcaacctcaagatcggtgtagtttgccccaagccccttgagatcatttacaatgacattgagcctcccatacatgtcattcacactctcatgaggcaacatggagaatgtctcatattggatcttgaggaaatgaagcttggcatccttgtactcacttgtaccctcatggatctccgccaacttgttccaaatctcatatgcggtctcaaggttgctcactctatcgaactcctcttggctcaaagagttgaacaaggcattcatggcttgggcattgagttggaggttgcggtgatcaatctccgtcaagggtgtgccggtgatggcaaagcctacatccacaatactccaaatatggaagctcatagctttgaggtgagtagacattttaattttccaagtggagtagtttgtgccattaaacatgggagccttccctacatggttcacctcgttcgacat

SEQ ID NO: 10606 - DNA, 616 bp, Oryza sativa
  Clone ID: PAT_MRT4530_16910C.1
gggccatggcattggacacattgcatgtgactgtccaaatcggcgagctttatttgtgaacgctgatgctgccactgaccatgcaggaggacaagataatgatgacatcgaggaagtccatttgcatccagagtcgctagatcagtatcctagcctaattgtcaagctagcacttagtgctaaagagaagtgtaaagagcaaaaccaacgtcacaatttgttccaaagcaaagttcttgtgaaaggccataccgtgaaaatgattattgatagcgagagttgcaacaatttagcaagtgaagagatggtcaagaagcttggcttgactacccatccacatccacatccgtatcatattcagtggtttaatacatgtgggcgaccatggcaatatgatagagaagttgtttttgatggtaggactaatacatataaatttatgttcgatggtaaaagagttgttttgcattttatgactccagccgctgctttgaaagatgatcttgcaagacttgaatgtgaaaagaaagcgaaaagtgaaaatcagattattgctaaacatcctgcttcaactagtaaaatagaaccaagtaccacaaagaatttagttttgtaa

SEQ ID NO: 10607 - DNA, 363 bp, Oryza sativa
  Clone ID: PAT_MRT4530_16911C.1
tcataggtcaacaattgtatttttcttcctctttttccctcccactctcttgtggtcagggcgacgattggcgccttggcgggaccaagggcagtgcaccaatgcccggcagaagaggccggaagtggtggtgacctcgtaaacgagaaggaatgcagcggggccggttagccccttggagcaccaggaaggatgggtaggtagcggggaggctggagaggatgacgacaggggagggagtggtggcgccatgcgcgatgcctgacgaaagaggaaccggaggcagcaagcgaccttgtcgaggagtgatcctccctagcaggtggtcgtgagaccccccccccttgtgagttcggccggggg

SEQ ID NO: 10608 - DNA, 2448 bp, Oryza sativa
  Clone ID: PAT_MRT4530_16912C.1
atgtcaggtacaagttccgatgaaccaacactggagaatctagcgcataaactgaagggcatggaaaattggtatgaagagttgatgcgtaatagtaaatcatacaaggaaagcacagataaacatttaaaaaccttaagtgaaaacctagtgaaagtagtggatcaaattgagcaaatgaatcaatcgcataaacaattaactgaaaacatccagaatatgaatattggacatgaaaatattgtgcgatgcattggtttacttgagactgcaggtgaagaaggtgcaggtgccactgctcatcgacaccaaagatatgacgatgaagacgaagagcaatctgttgctgacgatgaggaggaagacgagagtgttggaaatagaagacgacatcgagttagggacaaagatgatcctttatctaaggtaaaatttactatgctttcttttgatggtaagttcgagccttctgtttatctagactgggagctagctgttgagcaaaaattctcttgctatgattttactgataataagaaagttaaagctgccattagtgaacttacatcctttgcatctctatggtggaatgatatatgtggtagaggacttagacctagaacatgggattatatgaaacgtataatgaggtctagatttgtttcttcttactatgcttgtgacatgttaaataaactgcaacttttaagacaaggttccagttctgtagaaacatactatcaagagatgatgattgctttgtcacgatgtgatatgcaagaaactgaggatgctagaatttctaggttctatggaggtcttaatagagagatttgggatattcttgaatataaagaatacaataccatgaatagattattccattttgcttgcaaagctgaaagagaagtgcagggactcaacaagcataggagttcttttgcaggtgctacttccacacgacaattaacaccacgtcaatctactactgcctttcgtccacctacctccacgccatcccatgctcaagaaacaagcaaaaacgcttcagttcagactccagccaagagtgcaacttcagtagcttccactagacgtacccgtgaaattacatgtcataggtgccatgacattggacacattgctcgcgactgtccaaatcggcgagctctatttatgaatgatgatggtgagtatacttctgctagtgattgtgatgatgaatatgctttagctgccactgaccatgcaggaggacaagataacgatgtcatcaaggaagtccatttgcatccagagtcgctagatcagtatcctagcctaattgtcaagctagcacttagtgctaaagagaagtgtgaagagcaaaaccaacatcacaatttgttccaaagcaaagttcttgtgaaaggccataccatcaaaatgattattgataacgggagttgcaacaatttagcaagtgaagagatggtcaagaagcttggcttgactaccatccacatccacatccgtatcatattcagtggctcctaccatgatcaaattgaatgtgatgttgtgcatatgcaagcttgttctgttattttggggcgaccatggcaatatgatagagaagttgtttttgatggtaggactaaaacatataaatttatgttcaatggtaaaagagttgttttgcattctatgactccagccgctgctttgaaagatgatcttgcaagacttgaatgtgaaaagaaagcgaaaagtgaaaatcagattattactaagaatcttgtttcacctagtacaacagaaccaagtgccacaaagaatgaaattaagttgacgggtgctttgttagcttctaaatataatatttgtgcactatatgagccagattcttgttgctatgctctattttgcaaagatcctatactcactttggctactgcttctagttccttatattctttgccacctgctattactaaccttttgcatggatatgagggtgtttttcatgatgagatacatccaaggatgacccctgaacgagagagtgaacatgatcacgaagatgagattgagtcgaggacaactccaattcaagaaggggaggatgatgaggacatcaattcatcggatacgctcataacttcacacgttcaaatgataatttcaagtccaagtccagttcggcctccggagacaacactgacttcaaacggatctagcgccttcatgccaactccgatttgggtgatcttggactttatggaaaacttatctgctaactttcaaacgcatccggtctcatgtccaaattcatctcgagtcaacggaaatcgccaaaacaagacagcgctgttgctgaaactgaatttgggccttgggccttgtaatagattaggcccatctcggaagtgtctcccttcacctccacgaattagcacttatccttag

SEQ ID NO: 10609 - DNA, 597 bp, Oryza sativa
  Clone ID: PAT_MRT4530_16913C.1
ctattcacttgctaaattgttgcagctcccgctatcaataatcactttgacagtatggcctttcacaagaactttgctttggaacaaattgtgatgttggttttgctcttcacacttctctttagcactaagtgctagcttgacaattaggctaggatactgatctagcgactctggatgcaaatggacttcctcgatgttatcgttatcttgtcctcctgcatggtcaatggcagcatcaaaagaaggcatagtaaattttaccttagataaaagatcatctttggccctaactcgacatcgtcttctatttccaacactcttgtcttcctcctcatcgtcagcaacaaattgctcttcgttttcatggcccgatcttctggtaaggggataactctcgctttgatcgagtgcgacatttgcggcgtggctaccaaccagaacaagtccaggacgccgtgcaatcgctacaccacaaacgatgtcgcgcgcggttgatggtccctccattgaccctatagaggaatatatatataggattaagtgctaattcgtggaggtggagggagactgaagcatctagggggctgcaggaat

SEQ ID NO: 10610 - DNA, 2719 bp, Oryza sativa
  Clone ID: PAT_MRT4530_16914C.1
tacctccgacaactccattttgcccctttcccccttctcttcccctttgaatcaagtcaccaccgtctccacccatgccggccggaggtgagcccttaccgtcgccgttccggccttatctctcactccttctaccagccaacggcctccccaggtgcgtggagctagggaacaccacccgccgccggcgtcgccgccatccagccaccggagcaccggcgccccacctccctccctcttctctgttgccggctagaaagagaagaagaaaggaacgggaggaagaaggagagaaggaaaaagaagaagaaaaagaaaagcctgacagagtctattatcttttggatggcaacttgtgatgttttgaggatcggataattaggttgcctatcttggatttgtttgcggtggagcatcaaatcggagttggcatgaaggcgctaggtccgtttgaagtcagtgctgtctccggaggccgagctggacttggacttggaattatcattggagcgtgtgaagttatgagcatatccgacgaagtgatgtcctcatcatcctccccttcttgaattggagtcgtcctcgactcaatcccatcttcttgattatgtgcactctctcgtccattggccatccttggaggtatctcatcgtgaaaaacatcctcatattcctgcaaaaggttagtaatagcgggtggcaaagaatataaagtactaggagcagtagccaatgtgagtataggatctttgcaaaatagagcatagcaacaagaatctggctcatctagtgcacaaatattatatttagaagccaacaaagcacccttcaacttaatttcattctttgtggtacttggttctattttactagttgaagcaggatgtttagcaataatctgattttcacttttcgctttcttttcacattcaagtcttgcaagatcatctttcaaagcagcggctggagtcatagaatgcaaaacaactcttttaccatcgaacataaatttatatgtattagtcctaccatcaaaaacaacttctctatcatattgccatggtcgccccaaaataacagaacaagcttgcatatgtacaacatcacattcaatttgatcatggtaggagcctatagaaaaaggtattttaaccaagcgggttaccttcatcttaccacatgtatgaaaccactgaatatgatacggatgtggatgtggatgggtagtcaagccaagcttcttgaccatctcttcacttgctaaattgttgcaactcccactatcaataatcattttgacggtatggcctttcacaagaactttgctttggaacaaattgtgacgttggttttgctcttcacacttctctttagcactaagtgctagcttgacaattaggctaggatactgatctagggactctggatgcaaatggacttcctcgatgtcctcatcatcttgtcctcctgcgtggtcagtggcagctaaagcatattcatcatcacaatcactagcagaagtatactcaccatcagcattcacaaatagagctcgccgatttggacagtcgcgggcaatatgtccaatgccatggcacctatgacatgtaatatcacgtgtacgtccagtggaatctactgaagttgcactcttggctggagtctgaactgaagcgtttttgcttgtttcttgagcatgggatggcgtggaggtaggtggacgaacaacagtagtagattgacgtggtgttgactgtcgtgtggaagtagcacctgcaagagaactcctatgcttgttgcgtccctgcacttctctttcagctttgcaagcaaaatggaataatctattcatggtattgtattctttatattcaagaatatcccgaatctctctattaagacctccatagaacctagaaattctagcatcctcagtttcttgcaaattacatcgtgacaaagcaatcatcatctcttgatagtatgtttctacagaattggaaccttgtcttaaaagttgcagtttatttaacatgtcacgagcatagtaagaaggaacaaatctagacctcattgtacgtttcatatcatcccaggttctaggtctaagtcctctaccacatatatcattccaccatagagatgcaaaggaggtaaattcactactggcagctttaactttcttattatcaggaaaatcatagcaagagaatttttgctcaacagctagctcccagtctagataaacagaaggttcaaacttaccatcaaaagaaggcatagtaaattttaccttagataaaggatcatctttgtccctaattcgacatcgtcttctatttccaacactctcgtcttcctcctcatcatcagcaacagattgctcttcatcttcatcatcatatctttggtgtcgatgagcagtggcacctacaccttcttcacctacagcctcaagtaaaccaatgcgtcgcacaatattttcatgtccaatatttatattctgaatgttttcagttaattgtttatgtgatcgattcatttgctcaatttgatccactactttcaccaggctttcacttaaggtttttaaatgtttatctgtgctttccttgtatgatttactattacgcatcaactcttcataccaattttccatgcccttcagtttatgcgctagattctccagtgttggttcgtcggaacttgtacctgacat

SEQ ID NO: 10611 - DNA, 1193 bp, Oryza sativa
  Clone ID: PAT_MRT4530_16915C.1
gccgaccgcggggcgcccccgcctgtcctcctctttctcttctgcgcgcccaccccgatctccccgaatcccgacccgatcaaaatcgaagcttccgccgagttccccgtcgccgactcgcctggatcggcccgccgtcgagctcgcccccgaccatccgctcgattggaggccggggagctgcgtctggtggtgaatcgcatccgccgcggagcggttcgatttcggcggcggatttcgcgggggtagaggagatcgaaggggggcagagcagccatgagcgaggtgttcgagggctacgagcggcagtactgcgaggtgtccgcctccctcttccgcaagtgcaccaccgcctccgccctcgatggagagaaaaagaagcagaagctgtccgagattcagtccggcgtggaggaggctgagtcgctgattcggaagatggacctggaggcgaggagcctacaaccgagcgtgaaggccggtttgcttgcgaagctgagggagtacaaatctgacctcaacaatctcaagagtgagcttaagaggatctcggcgcccaatgcaaggcaggctacacgggaggagctccttgagtcaggcttggctgacactctcgcggcgtctactgatcagaggggaagattgatgatgacaacagaaagactgaatcagtccaatgataagattaaagagagccgaagaaccatattggagacagaagaacttggtgtgtcaattcttcaggatcttcatcaacaacggcagtcactgctgcacgctcatactactttgcatggggttgatgataatgttggcaagagtaaaaagatcctggcggcaatgtcaaagaggatggacaggaacaagtggatcattggggggataattgcagctcttgttctagccatccttctcatactgtactttaagctcgcttattgagcttgctttctggtagggtcttcaaagcaatttccgctcagtaaatgtgtgataaaatagttgcctgaatgttgtacattgggcaacacatatctctgcaagcacacacttgtttccccaaacttatggtatttgtgtggctcatcgcccatgtcatgtaatgtacagttaacgtgcactccaatatgtgaaatgtctaaaaagggcttaaaatgaaaggtgactcatttaaaaaaaaaaaaaaaaaaaaa

SEQ ID NO: 10612 - DNA, 1018 bp, Oryza sativa
  Clone ID: PAT_MRT4530_16916C.1
actgcaggtgaataaggtgcaggtgccactgctcatcgacaccaaagatatgacgatgaaaacgaagagcaatttgttgctgacgatgaggaggaagacaagagtgttggaaatagaagacgatgtcgagttagggccaaagatgatcttttatctaaggtaaaatttactatgccttcttttgatggtaagttcgatcaagagatgatgattgctttgtcacgatgtgatttgcaagaaactgaggatgctagaatttctaggttctatggaggtcttaatagagagattcgggatattattgaatataaagaatacaataccatgaatagattattccattttgcttgcaaagctaaaagagaagtgcagggatgcaacaagcataggagttcttttacaggtgctacttccacacgacagtcaacaccacgtcaatctactactgccattcatccacctacctccacgccatcccatgttcaagaaacaagcaaaaatgcttcagttcggactctagccaagagtgcaacttcagtagcttccactggatgtacccgtgatattacatgtcataggtgacatggcattggatacattgcccgcgactgtccaaatcggcgagctctatttgtgaatggtgatggtgagtatacttctgctagtgattgtgatgatgaatatgctttagctgccattgaccatgcaggaggacaagataacgataacatcgaggaagtccatttgcatccagagtcgctagatcagtatcctagcctaattgtcaagctagcacttagtgctaaagagaagtgtgaagagcaaaaccaacatcacaatttgttccaaagcaaagttcttgtgaaaggccatactgtcaaagtgattattgatagcgggagctgcaacaatttagcaagtgaatagatggtcaagaagcttggcttgactacccatccacatccacatccgtatcatattcaatggtttaatacatatggtaagatgaaggtaaccc

SEQ ID NO: 10613 - DNA, 2178 bp, Oryza sativa
  Clone ID: PAT_MRT4530_16917C.1
atgtcaggtacaagttccgatgaaccaacactggagaatctagcgcataaactgaagggcatggaaaattggtatgaagagttgatgcgtaatagtaaatcatacaaggaaagcacagataaacatttaaaaaccttaagtgaaagcctggtgaaagtagtggatcaaattgagaaaatgaatcaatcacataaacaattaactgaaaacattcagaatatgaatattggacatgaaaatattgtgcgacgcattggtttacttgaggctgcaggtgaagaaggtgcaggtgccactgctcatcgacaccaaagatatgacgatgaagacgaagagcaatctgttgctgatgatgaggaggaagacgagagtgttggaaataaaagacaatgtcgagttagggacaaagatgatcctttatctaagtttgagccttctgtttatctagattggaagttagctgttgagcaaaaattctcttgctatgattttcctgataataagaaagttaaagctgccagtagtgaatttacctcctttgcatctctatggtggaatgatatatgtggtagaggacttagacctagaacatgggatgatatgaaacgtacaatgaggtctagatttgttccttcttactatgctcgtgacatgttaaataaactacaacttttaagacaaggtcccaattctgtagaaacatactatcaagagatgatgtttgctttgtcacgctgtgatttgcaagaaactgaggatgctagaatttctaggttctatggaggtcttaatagagagattcgggatattcttgaatataaagaatacaataccatgaatagattattccattttgcttgcaaagctgaaagagaagtgcagggacgcaacaagcataggagttcttttgcaggtgctacttctacacgacagtcaacaccacgtcaatctactactgccgttcgtccagcttcttccacaccacctacctccacgccatcccatgctcaagaaacaagcaaaaatgcttcagttcagactccagccaagagtgaaacttcagtagtttccactggacgtacccgtgatactacatgtcataggagccatggcattggacacattgcacgtgactgtccaaatcggcgagctctatttgtgaatgctgatggtgagtatacttctgctagtgattgtgatgatgaatatgctttagctaccactaaccacgcaggaggacaagataatgatgacatcgagaaagtccatttgcatccagagtcgctagatcagtatcctagcctaattgtcaagctagcacttagtgctaaagagaagtgtgaagagcaaaaccaacgtcacaatttgttccaaagcaaagttcttgtgaaaggccataccgtcaaaatgattattgatagcgggagttgcaacaatttagcaagtgaagagatggtcaagaagcttggcttgactacccatccacatccacatccgtatcatattcagtggtttaatacatgtggtaagatgaaggaatatgaggatgtttttcacgatgagatacctccaaggatggccaatggacgagagagtgcacacaatcaagaagatgggattgagtcgaggacaactccaattcaagaaggggaggatgatgaggacatcacttcatcggatacgctcataacttcacacgctccaatgataattccaagtccaagtccagttcagcctccggagatagcactgacttcaaacggacctagcaccttcatgccaactccgatttggtgttctctcgtttgcattgcagggatgatcaaccgcgcgtcacggttgtgggagaggccatgcgcccatgcctaccggatcaacgcacgacgagggagcggagtcggttggatctacacgggatggggagagcccaccggatccgctaccgccggattccgcacccaacggcctctcacaatctcgccgccagaccccatggtcgctgacaggtctcgagctcactgctcccgctaccacttgccgttggaggaagtggagcggagaggtggagagaacaggaagtggaagataggtgtagcagagaggataaggagagggatgggggaaagaatacaaagatattttacggaagagagagtggatgctggtctggttggctag

SEQ ID NO: 10614 - DNA, 2097 bp, Oryza sativa
  Clone ID: PAT_MRT4530_16918C.1
atgcccctgtttgaccggctataccgactggagtcgggtcagcaggagcagcacacattttatcccctttctcgttctcttagacctaaccctagcaggagcagcgacgacggcggcgacgtcgtctacggcggccgcggcgatgacaacgtctacggtggcggcggtggtggcgacggtgcgggctacgacggctgcggcggtgtcttcggctgcggcagcgacggcgtctacggcggcagtggcggcatattcggcggcggcagcgacggcgtctatggcggcagtggcggcatatttggcggcagcggcgacggcgtctacggcgtcagcggcgacgactctttctttccatggaggggtaggaaacgtactgcaagggatggagcccaaatcaaggtaagtacactgttgttctcgatagagttaaaggtttatggttttaccaccatagattcggatggtagacggaggtatactaagggttgtgtgctgaaatgggatgttgagtatggtagcttatctttggatttgttgatgctaagcttaagctcagagggcagtaatgaggacgttagaattgtccatgaatctcaactggttgacatgtttgaaatgtacaagtcagaaatgcatgctgaattaatggtcttagttgttgagagtgtactctgcgatgctagtgctaataacatagagccaacatcaatgccattgtgtgttcttccacttactcagacagggcagggagcatctgcatctaaagtggcagtttcaggtgaacctgcaactcaagaagcggatgaaacattgcctaatgtgtttgacatggaggaggagtatgtgggtgttgatgatgagggaatttatattcaacctattcacaccattccacctacagatcatgctgaaacctctggtcaacctagtgctgaaaatgctgaaccatgtgctgaaaatgctgaacctggtggaccttctaggactactcaacctcatggtaaggttgaggtcactgatgatgacctagcagagtttaatgttcttcataaccctgagatgccagtgattaaggaggaagctgtttttcctgacatgataacattcagaaaagctattaggcactttgcggttgttacaggatttgaactctctaatttgcaaacagatccaacaagattcattgcccactgcaagcatgaggggtgtaaatggcgcattcatgcatcaaggttgtctgatggcaaaactattcagataaagaagctaccatttgcacatgagtgtcccacaaccaagctcatggaagggaagatggccactcaagactggattgcagatagactgaaggattggttaaagaaaaaccctgacaagggagctaaggcagcaaaagagaaacttgaactcaatgcagcaacaatcaacctgaaagttgtaaagattgctaggagtgatgatgacatggctgagatcacattggttgagagtgacaacaataccagaaggcacactgtgcatttgatcaaccaaacatgttcatgcagaaagtggcaggtttcaggaaaaccttgcaaccatgccttggcatggatatgttccaacagaggagttgagattaaagattttgtttcagagtacttttctgttggcatgttcagagcagcttatgcagggagagtgccaactatgccagacagatcacaatggcctgtggtgaatttaggcttcaaagtctgtccacctagactcaagaggggtgcagggaggcctagagtcactaggatcaggggtgcacttgaaccaggggcaagaagggtgcgatgcaggagatgccatggttttgggcactttgccaagacttgcaaagaggctgaagcaccagaagacactgatgaagtgcctactgcttcccccaagaagaggaagaaaactcaagatgaaagttcatcaaggcctgctaagaagaagaagacacccaagaaaaagaaaacgcccaagaaaaagaagacaccccagaagaagaaggatgctcgagctgcctcagaaggcccagctaaagttgttagaagcctgtcacaatatctacaatcctga

SEQ ID NO: 10615 - DNA, 2880 bp, Oryza sativa
  Clone ID: PAT_MRT4530_16919C.1
atggccgctgtgtttcaaaattttctctggctgtctgtccatgcgcgctggtgccactccaccggcgagagtgatcatcgccacaaggcgtgtggcgtcaggctcaaattgtgtaatgagcagcacacattttatcccctttctcgttctcttagacctaaccctagcaggagcagcgacgacggcggcgacgtcatctacggcggccgcggcgacgacaacgtctacggcggcggcggtggtggcgacggcgcgggctacgacggctgcggtggcgtcttcgacggcggtggcgacggcgtctacggcggcagcggcggcgtattcggcggcggcggcgacggcgtctacggcgtcagcggcgacgactctttctttccatggaggggttggaaacgtactgcaagggatggagcccaaatcaaggtaagtacactattgttctcgatagagttaaaggttcatggttttaccaccatagattcggatggtagacggaggtatactaagggttgtgtgctgaaatgggatgttgagtatggtagcttctctttggatttgttgatgctaagcttaagctcagaggttagatggggtgagcagcagactgcaacagtgtggtttttgacaagggcagtaatgaggacgttagaattgtccatgaatctcaactggttgacatgtttgaaatgtaccaagtcagaaatgcatgctgaattaatggtcttagttgttgagagtgtactctgcgatgctagtgctaataacatggagccaacatcaatgccattgtgtgttcttcgacttactcagacagggcagggagcatctgcatctaaagtggcagtttcaggtgaacctgcaactcaagaagcggatgaaacattgcctaatgtgtttgacatggagaagtatgtgggtgttgatgatgagggaatttatattcaacctattcacaccattccacctacagatcatgctgaaacctctggtcaacctagtgctgaaaatgctaaaccatgtgttgaaaatgctgaacctggtggaccttctgggactgctcaacctcatggtgaggttgaggtcactgatgatgacccagcagagtttaatgttcttcataaccttgagatgccagtgattaaggaggaagctgtttttcctgacatgataacattcagaaaagctattaggcactttgcggttgttacaggatttgaactctctaatttgcaaacagatccaacaagattcattgcccactgcaagcatgaggggtgtaaatggcgcattcatgcatcaaggttgtctaatggcaaaactattcagataaagaagctaccatttgcacatgagtgtcccacaaccaagctcatggaagggaagatggccactcaagactggattgcagatagactgaaggattggttaaagaaaaaccctaacaagggagctaaggcagcaaaagagaaacttgaagagcgatatgagatcaagctgaagtattcaaaggcttgggcaggaaggaggcttgctgagaaccagattcatggcacttatgaagatagttttcagctgttgttcgactggaaggcagagattgagaagaggtctccaggtacaattgttacaattgatttgcagaagttagggaaaaatatgtgtttcaaaaggatgtttattgctttcaaagcatgtgtagatggatttgttaatggttgtaggccatatataggtgtagattcaactagactaactggtaaatacactggtcagctagcctcagccacatctgttgatggacacaattggttgttttatgttgcatttgcaatttttgactcagagacagatgacaactggttgtggtttatgaaacagttgcatggagctataggtgctcctgaagggttagtcatatcaacagatgcatgcaaagggctagagaaagctgtaggtgctgtatttgagaaagctgaacatagggagtgcatgagacacctttatggtaattttatgaagaagtttaggggtcctattttcacactgcacttgtatcctgctgcaagatgcttcacagaggatggttttagagatcatatgcagcagatttataatttatttcctgaagccattgattacctagacaaacatcattcaaggatatggtataggtctggtttcaaggaaacttgcaagtgtgattacttgaccaacaatgcatctgaaagtttcaataatcagattaaatctctgaagggtctacatctccatgagctagttgattctcctagagagttattcatggagaagatgtatttgaggagacaagttggtgagaagttgactgatggaatcctgcccagtgtgattaaacagctcaatgcagcaacaaccaacctgaaagttgtaaaggttgctaggagtgatgatgacatggctgagatcacattggttgagagtgacaacaataccagaaggcacactgtgcatttgatcaaccaaacatgcttcaaagtctgtccacctagactcaagaggggtgcagggaggcctagagtcactaggatcaggggtgcacttgaaccaggggcaagaagggtgcgatgcaggagatgccatggttttgggcactttgccaagacttgcaaagaggctgaagcaccagaagacactgatgaagtgcctactgctttccccaagaagaggaagaaaactcaagatgaaagttcatcaaggcctgctaagaagaagaagacacccaagaaaaagaagacgcccaagaaaaagaagacaccccagaagaagaaggatgctcgagctgcctcagaaggcccagctaaagttgttagaagcctgtcacaatatttacaatcctga

SEQ ID NO: 10616 - DNA, 167 bp, Oryza sativa
  Clone ID: PAT_MRT4530_1691C.1
atggcgaagggtgtggcgtgtggcgaaacctgttcgcccgcagcccttgacgccgtgctatattggcactatggcgaagggcgtgggttggcgaaacctgttcgccagcagcccttgacgccgtgccttattggtactatggcgaagggcgtggcatgtggcgaaag

SEQ ID NO: 10617 - DNA, 435 bp, Oryza sativa
  Clone ID: PAT_MRT4530_16920C.1
gacttagtctatggtattacaacatcagggcagcatttcagacaccacccgtcaacttctcagctcaatgagtttgtagatggaggccagagcaatgctgtgcacgaacagcatacggtactgcgcacagcggccgtacactctgcacatgctgtcacgcatgacggtatatcctggggcggcgactgaggcagcccccctcttggcaagactagcccccagcctattgttcctcatccactcctttgcccaaacatgcaatagtggcggctctaacaatatttgccagataatatcggccgcgggtcaaacaagcacaccacttctgcccaactccagtgaaccatggttgagttgctcggcaatgacaggcaacacaaccacccactgcgggcacagtaacagccccaggacacagttgagtggcggaagact

SEQ ID NO: 10618 - DNA, 2655 bp, Oryza sativa
  Clone ID: PAT_MRT4530_16921C.1
atgccatgttctacgcctgatcagcgattgttgaccacacctaaccctagcaggagtagcgacgacggcggcgacgtcatctacggcggccgcggcaacgacaacgtctacggcggcggcggcggtggtggcgacggcgcgggctacgacggctgcggcggcatcttcggcggcggtgacgacggcgtctacggtggcagcagcggcgtattcggcggcggcggcgacggcgtctacggcgtcagcggcgacgactctttctttccatggaggggtaggaaacgtactgcaagggatggagcccaaatcaagttaaaggttcatggttttaccaccatagattcggatggtagacggaggtatactaagggttgtgtgctgaaatgggatgttgagtatggtagcttctctttggatttgttgatgctaagcttaagctcagaggttagatggggtgagcagcagactgcaaccgtgtggtttttggacaagggcagtaatgaggacgttagaattgtccatgaatctcaactggttgacatgtttgaaatgtacaagtcagaaatgcatgctgaattaatggtcttagttgttgagagtgtactctgcgatgctagtgctaataacatagagccaacatcaatgccattgtgtgttcttccacttactcagacagggcagggagcatctgcatctaaagtggcagtttcaagtgaacctgcaactcaagaagcggatgaaacattgcctaatgtgtttgacatggaggaggagtatgtgggtgttgatgatgagggaatttatattcaacctattcacaccattccacctacagatcatgctgaaacctctggtcaacctagtgctgaaaatgctgaaccatgtgctgaaaatgctgaacctggtggaccttctgggactgctcaacctcatggtgaggttgaggtcactgatgatgacccagcagagtttaatgttcttcataaccctgagatgccaatgattaaggaggaagctgtttttcctgacatgataacattcagaaaagctattaggcactttgcggttgttacaggatttgaactctctaatttgcaaacagatccaacaagactcattgcccactgcaagcatgaggggtgtaaatggcgcattcatgcatcaaggttgtctgatggcaaaactattcagataaagaagctaccatttgcacatgagtgtcccacaaccaagctcatggaagggaagatggccactcaagactggattgcagatagactgaaggattggttaaagaaaaaccctgacaagccatatataggtgtagattcaactagactaactggtaaatacactggtcagctagcctcagccacatctgttgatggacacaattggttgttttatgttgcatttgcaatttttgactcagagacagatgacaactggttgtggtttatgaaacagttgcatggagctataggtgctcctgaaaggttagtcatatcaacagatgcatgcaaagggctagagaaagctgtaggtgctgcatttgagaaagctgaacatagggagtgcatgagacacctttatggtaattttatgaagaagtttaggggtcctattttcacactacacttgtatcctgctgcaagatgcttcacagaggatggttttagagatcatatgcagcagatttataatttctgtcctgaagccattgattacctagacaaacatcattcaaggatatggtataggtctggtttcaaggaaacttgcaactgtgattacttgaccaacaatgcatctgaaagtttcaataatcagattaaatctctgaagggtctacatctccatgagctagttgattctcttagagagttattcatggagaagatgtatttgaggagacaagttggtgagaagttgactgatggaatcctgcccagtgtgattaaacagctcaatgcagcaacaaccaacctgaaagttgtaaaggttgctaggagtgatgatgacatggctgagatcacattggttgagagtgacaacaataccagaaggcacactgtgcatttgatcaaccaaacatgttcatgcagaaagtggcaggtttcaggaaaaccttgcaaccatgccttggcatggatatgttccaacagaggagttgagattaaagattttgttttagagtacttttctgttggcatgttcagagcagcttatgcagggagagtgccaactatgccagacagatcacaatggcctgtggtgaatttaggcttcaaagtctgtccacctagactcaagaggggtgcagggaggcctagagtcactaggatcaggggtgcacttgaaccaggggcaagaagagtgcgatgcaggagatgccatggttttgggcactttgccaagacttgcaaagaggctgaagcaccagaagacactgatgaagtgcctactgcttcccccaagaagaggaagaaaactcaagatgaaagttcatcaaggcctgctaagaagaagaagacacccaagaaaaagaagacgcctaagaaaaagaagacaccccagaagaagaaggatgctcgagctgcctcagaaggcccagctaaagttgttagaagcctgtcacaatatctacaatcctga

SEQ ID NO: 10619 - DNA, 215 bp, Oryza sativa
  unsure (1)..(215): unsure at all n locations
  Clone ID: PAT_MRT4530_16922C.1
cgcaagaaggcacgtcccccttctagaagcttccgctagcttcccatcggcgcggggggaatggacgacgacgacctcggctacccgcccggnatggccggcctggacgcnatggccggcctcggtggcctcggngggatgggcggnctcggtgggctcggcgggatggncggccttggtgggctcggcgggatnngcggcctnggcggactngg

SEQ ID NO: 10620 - DNA, 282 bp, Oryza sativa
  Clone ID: PAT_MRT4530_16923C.1
gagagtgcggccagcacactgccagtaattctacgatcactcagcctacgagccctgcaccactgtgatctaagtctgaccgacgatacagagatctcacgaactgggtcgtgatgaccttgcgatctttgtggacgcaatattgaggccctcagagaggatattcctaggacatcgccttgtgttagccatgctgtctttgttgaaggagggatagctcttgcaatactcactgcaatatctgatggtgaagatcccagaacgtctttcctgattggagaa

SEQ ID NO: 10621 - DNA, 316 bp, Oryza sativa
  Clone ID: PAT_MRT4530_16924C.1
ccgccatcgcatccacatagaagtggcggaaagaatgataccgcgacgccggcgaggaggacgcggacgaggagcaggaggaagcatttgagcgtcgtcacggttgcggtggtgtgcggggtggtgtccgtggccatgctgctctgtctcgtcgggtgcgtggcgtgcggggtgctgcgttgccgcaagaacagggggaaggaggcggaggaggagaagaggaaggcgcattggggcgggaaggacgaggaggaggtggtggccgtggcggcggcggcggcgaaggggggttctgtgcgccggtggtgctgttcga

SEQ ID NO: 10622 - DNA, 354 bp, Oryza sativa
  Clone ID: PAT_MRT4530_16925C.1
atgcagcgttgtgaagtcggcggcgggggcggtgggagggggaaccagtcggcggcgggagcggtggggagggggcgcggctgggagtgtgctctaggcagcgacgggagcgattgggaggaagcttcggtcggcagcaagcgggccgcctcaccgaagccggaagaggagacgtgcgccgtcgggccaacatggggacgaatgatggcgacggttgaagcggcacataacaaggcaagactgaggcggcggggaggcacatgggtggcgcattcattggaggcgcggcgcaacagtggtggccaagagagttggaagtggaagcggtcgctggtcggccagacgatccggtga

SEQ ID NO: 10623 - DNA, 229 bp, Oryza sativa
  Clone ID: PAT_MRT4530_16926C.1
aaattgtgtttttttcttttcccccacccctccccggacccctggatctacccataaattcccgacccgcacctacaagcttaccaactttccctaaaataagtcttattaaaactttaccaaaacaacaacaaaatctctcccttaataaaattattttactctttaaattccacacaaatttccaacccaatacttaatattttaaaacccttcttccccaaataat

SEQ ID NO: 10624 - DNA, 366 bp, Oryza sativa
  Clone ID: PAT_MRT4530_16927C.1
ggcggtgtttttttttttttttttttttttttttttggccagaacgcacaaaatcatatatagtactttatcaccagctattttgttttcaaaacatttcattattcattatttgttttgattattttttcgttgcatgcaacacagcaacggtgtgatcctactagctatgaggcaagccagctaagcctagtactggccggggggaaaaatgctgcactgttggggctaaacccggcaaatcaacggaagttgccccgggtactgcctcgccctggtaagcctaacccgggtaatccccggttgttgttgttgttcgccgaagaagccttcttccgacaacccctggccgtagtacccttgttc

SEQ ID NO: 10625 - DNA, 186 bp, Oryza sativa
  unsure (1)..(186): unsure at all n locations
  Clone ID: PAT_MRT4530_16928C.1
gcgcccacacgtncccctgacccctcaaatccctaactctagcgcttcattcttccagcaagatcagcggctgcgggggggggtgaaattgcgaggggggtgtggtctaatagttagaagcgtgttctcgcgctaggtaaatatttcgtgcagggttggtaacatctacaatatggagcttaattc

SEQ ID NO: 10626 - DNA, 1157 bp, Oryza sativa
  Clone ID: PAT_MRT4530_16929C.1
atggcggcggcgaggccaaaccttgacggtgccccgtctcgacgcatcacaggcgggccaacgcgcggtgcggaggcgtcacagacgtggtgtggaggcggcgaatccggcgccgccgcggccggatccggcctccccacgggtggatccggcgcctccacgccggagctggccggagcaagccgctctcaggcgatggtggattcagattgggcgacggaccacggcggtagggatcccgagcgaaagcttagcccaagtctttgtgccaacaatgactatgtcttcgggcgtggtaaccctcctgggggcattgttgagtacagagccaagccaacacaacccctagcaggctaccatggatccttaattatctctcttaatccccaaccgtctccaagctcaaatctcaatcaacaaggaagcaagagcgcgaggaggagaggaggaggaggcggcggcggcggcgatggggatgagcatcgcgcaggcggtggcggcgctgatggggacgtgcgcgaggcggctgtcgcgggcggcgcggcggctgcacctgcggccgcgggagggatcgcggcgtcgttctcgtcgcgcgccatcgtgccgttcctgggcggcggaggcggcgggaagaaggctatctcgtcgtcgaggaggaggaggaaggccggggcggagctgagcttccgcgcggaggacggggtgtggaggaaggagatactgatgggggagcggtgccagccgctggacttctccggcgtgatctactacgacgccgaggggcggcgcctggagcagccgccgccgccgcgctcgccgctgcgcagcccgctgccgtcgtccatcaagctcgcggccaacgccggcggcggcggcggctactagccggagatcgacacgtacacccgctctctcgcaggcttgcagcaaatctcgggaacttttggagccaaagcttagccagccgccttcctctgctttcctgcgacatagtaataggtctctgcttctgatgatctgttcttcttcttttttttttattttacttcctttggtgtgcgtagtgattagtgatcactgatcagtatcagtaccatgtaaaagagtttatggaagcttagcttgatgctcttcagaagttggcacctctttttacg

SEQ ID NO: 10627 - DNA, 2430 bp, Oryza sativa
  unsure (1)..(2430): unsure at all n locations
  Clone ID: PAT_MRT4530_1692C.1
ttacggtgcgctccaccagtcttctgaggccacaacggtgctccaggagttgttgtcagcggcgacaacggcagcattccaggagttatcggcagtgacggcggtgctccagggatcatctgcaactgcggtggcagcgctccgataattgtcttcggcgacgacggcatcactccacgggtcattgctagcgacgacgatggttgatttggttgaacagtttttgagcaagaaagatacatacaggaataaattgagaagcaggaagttccccgcaaaaaaaaagagaagcatgaagttgatttgcctaaatggctggaggtaccaacttctggaccagaacaaagctcgttccgttgatatttctgacagggcttgtgtattcagtgggttttcagatgatgatctctttcttttcagtcctcggattggctgatgtccgtggatcatcgtgttcagcttctcccaatcaacgtcagagatcacgcagccggaggaaccgaaatctcgcgcgggtttcagccattggcgcaggcagtcgaggttctcgccggagagggagacgaggaatgacccgatcatggcgctctgggggtgatcggaagcctcgccggcggcggcgtaggggtttctcttcttctctctgctgctgttctgaagaatttcggtgaggtcgcattgcctggaccagaggtgttcgatcgcctcatgctccgagatcggcttgccggcggcggcggcggcggcgcggacggcggcgacaaggccgtccagtgaacggcattccacacggagcatggcgtcggtgtcaaagatgtctcccggtaggtcagcctcgtcgtcgggcggaggaggagcggcggcgtcgtaccagacggtgttgaggatgatgttggaggcggggtcgagagggccgtagcagtgcccggcggcgaggagggagcggatgaagcggccgcgccgccgcgtcgtcgtccaaccgtcgccggcggggagcacggcgagcgcccggatgtagaagccatggatggcgtcgaggaggcacatcttcagcgacagaatgtgctcgcatggggagaggtcgtagttcagcgctgcgccggcagcctcgtcgccgtcgtccgccgcgcgcgtcacacccgccaagcgtctggacagcttcgcctccatggtttcgcaatcgaacgtcaggtcggagatgtacccgagttgaggagagtcgatgcggcttgcgtctgcagcgatcgtgattagggcaacacggccatcttccccgatggtggttcgaagcgtcaccgtgccatcttggccgccgccgaggccgtacggacggcgcaagaagtctatgttgacctgcggccattgatgacctagcaagttcttgatgtccatgacgtcgccggcggtgagcagctcgctcccggcggggaactgcgccgtcatgaggcgcgccagctcgtcgagcgcggggtgcgccgccttcagcgccgcgaccctgagcgcggccttgatcttgccgccgtcggggagcaagcgtgggcgctggcaccgacgacggcggtcgtggaggacgagcctgacggcgagggggaggtcgatcgtgggcggcgaggtggaggtagcgcctagcatgaaggcgacgaggccggcgtaggagcgggcggcgaggataccccacagcgacttgccttcctcgcgagggagggcgaggtgcggcgccgcggccgccctgccggaggcgtggtgggcgatggcgttgaggatgatgttgccgacggggtcggcgaggccgaggcagtggccgccctcgaagatgcagccgacgagctccgtgatctcgtcgatcggcagccgccgcgccgcctcgtcgtacaacctcttgatcgacgtgatgatctttgcgctctcgtcggggtgaggccgcttcccctcctcgccatggtagcaggcgaagctgcccgtgcccgaccatggcggcgccaccaggtgatgatgggacgaggaggaagacgacgacatggagcccccacgagttggggattttctttcctccaagatttgctggtccaattagtttttttattattatttttgccctcgatccgacggttgctataaatcggtttaatgtggagaaaaaaaaagaccacttccttatatacttatctgtaccataatatcggatattatgaaccctcgactattaaaactagtcaacactgtcgtgtaaacgtcacgtaagcgaaaccgtcctccaaaaccaccgagaaagtcaaattacactcattttgatagttgagaggtcaatatatctggntcggtttaagaatacgaatcagattcgatgagtagttaagggagttaaagtgaacttattaaaaaaaaatctcggatgntttggttcagggggagggctgcctcctgcctgca

SEQ ID NO: 10628 - DNA, 2110 bp, Oryza sativa
  Clone ID: PAT_MRT4530_16930C.1
ctagtagacttctagtagtagtaaacttggcgtcgcgatctccgcgcgctccgggtgcttcgcttcggaggtttgggaggatggcggaggcgtgaggtgaggtgagggagtgtgagatcgcgggggggcaatgtcggtgctgggcgcggagggggcggcgatgggcttcctcccggccgcggagcacggcttcgcgcgctcggcggcgccgtcgccgctgcgggaggaggaggaggtgctcgacgacgacccgaagctgccgccgttgcggatgcccacctccttcgccgcgttccctgggtccagctccggctccgactccgactccttcctcagcatgagctccacgccatcagggctgttgtgccccttcggcgtgtggtcgccgcgcgcgccgccgtcggaggcgtcgtcgtcggagatggagttcggcaccgcgcgcgagtacgacaccaccgatctcttcttcggcgagaattggctctacgacgaccacctcttccacaccaattcggacggcgacgagggcaatggagaggacaagttcatcgttggcgctgactctaccgcccagtggagcgaaacgcgtgagctcgacgattgcggcggccgccaccaagtgcacacgaaatccaaggccgacgctgaagcctgcgcggaagtgtatacctgctcttcagcgccctgcagctgctgctacggagggaggaagaatgatgatgggttgacgagggattcttgctctgctgtctatgggaggtacctgatcatggatgaccagacagaggtgctggatgagtgtggtgcagatgcattcctgttcacacgggatggagatgccatgctcaaaagtgaacagccaattgattccaaaggcggagatatcgagttgctggacatgagtacggtggagaaggagcttcagatgctcagtccgtatttggctgaggcagatgctcttgagaaggctgagcttgaacacgatttcagcggcaatggggaactagatattaacgttgttacaaacgagaaaactgccgatgacaaagaacttctaaaaaatagttacagcatacattctttacctgagataggtgatcctctagatgtttatgagatggaggactttggacgaacagatacaagtgttcaaaattctacagccaataaaatcgctgaagatgcgagaacagatattgatcttgcactttctagatttcatgaggaatatgaggtatttgagctgagaattttccaccggaagaacaggactggttttgaggaaaacaaagagttccctattgtcatgaattcagttgtaggtggaagatatcgcatcactgagtatcttggctcagctgcattcagcaaggttgtacgggcacaggatctttggacgggaatggatgtctgcctgaaaataataaaaaatgacaaggatttctttgaccagagcttggacgagataaagctccttaaatttgtaaacaaatacgatcctgatgatgaacatcatatattgcgcctttacgattttttctactatcaggaacatcttttcattgtcactgaattgctacgggcgaatctgtatgaatttcaaaaatataaccaagagtctggtgatgaagtgtacttctcattgcgcagaatacaggctatagctcgacaatgcttagaagctctggtgtatttgcatcatttaaatatcgttcactgtgaccttaaaccagagaatatcctcatgaagagttacagcagatgtgaaattaaggttattgatcttggaagtagttgcttcttgacagacaacttaagcttatatgtccagtcacgttcttacagagctcctgaagtcattctaggtcttccatatgatcagaagattgacatttggtctctcggatgcatcttggctgaactgtacactggtgaagtgctctttccaaatgaatcagtacaaataattcttgctcggatgatagggacaattggtccaattgacatggaaatgcttgcactgggacaagatacccagaagtactttacagaagactacgacctgttccacaagaatgagaatcttatatcaagtgaagctttactctaa

SEQ ID NO: 10629 - DNA, 575 bp, Oryza sativa
  unsure (1)..(575): unsure at all n locations
  Clone ID: PAT_MRT4530_16931C.1
gaaattttaaaacaattgcctccccattttttatttgaatcaggtacatggcttttaggggacttcaaaaaaaatcacccccagaattgaattcaaattcncggggggatttcaaaggtgaccaaaaaataaacattttcataaaacttctgggaccccatttcccggttttgttacctaaaaacaatacagggctccccaataattttcattttggataatctctactgcctntcattccaactcaaacaatttgacaacaactgacaactcctgaaatttgggatttccaaaaattgatttcggatgggcctttgtaataatttaaatacttttgacttctccccccaccccattaactgcncccccccccnttttaaggttatttttttccccccaaccgaaggnaaacccntggttcctccccccnttnccaanatnnccccccctnccccccgnttttttttcnccntaatttccccntncnccccccccaaacccnctgnntaaantaccaaaacccctcccccccncccannggnttttacccccnatttcnantnaaaaaacccanc

SEQ ID NO: 10630 - DNA, 345 bp, Oryza sativa
  Clone ID: PAT_MRT4530_16932C.1
atgaagctaagcatgaaacgacccacgtccaaccatacttctcgaatggtttttcccttcccgggagcgccagaactcctctcactgctagaaacatatgacgcctagagggcatgagggctaaagttcatggagcgggtactgccaatgcgaggttatcgaaaagctttgccgtgatgcgtctcatgtgttgggacgaggctcatgtgttgggcagtcgcggagtacgggtaaagtgtacatccactgcagtgagagtgttaaagagaagcccttgtcgaatcttatccatcaattacacaaataaaccgctgacacgtaggtacgtacagatagtctcctcac

SEQ ID NO: 10631 - DNA, 1878 bp, Oryza sativa
  Clone ID: PAT_MRT4530_16933C.1
atgggggagagagcgaggcagtggctcctcgtcgccggcgccggcgccgcggttggggcgctctccaccgccgccgtcatgaggatcctctcgagatccaagcggagggaggggtacgtgcgcagcctgctggagtcgaacggcgtcgccagtggtggtgctggatcgagcgttggtactcgggttgtcgctacttcggatcttcttgatgatgaagtggtctccgaacagctcacaaggaatatacaattttttggcatggaatctcagaagaaagtgacagggtcgtttgttgtagtaattggtcttggaggggttggcagtcatgctgcttcaatgcttcttagatctggtgttggccggttgctccttgtggattttgatcaggtttcgctgtcttcgctgaatcggcatgctgtggcaacaagagatgacgttggaacacctaaagcattatgcctcaagaagcatttttcgatgatatatccagagtgtcaaatcgaagcaaaagtgcagttgtatgatccatcatgcgaggatgaaattctttctggacaaccagactttgttcttgattgtatagataacattgatacgaaggttgcactccttgcggcttgcgtacgcagaggtttaagggtgctttcagcaatgggggctggggctcgagcggacccaaccagaattcgtgttgcagatttgagggaatcaagcaatgatcctctttctcgggctgtgcggtatcggctgaagaaggaccatggaattgaaggtggaataccggtagttttttccttggagaagcccaaggcaaagctacttccttttcaagcttcaaaagaagaagaaactccatcagattaccagatcgtgccaggattcagggtgcgcattatcccagtgctgggaactatccctgcaatatttggtcaagttatggcctcatatgtgattactcagcttgccaagttggattttcaaactgaaccaattgttaacatggatttggatcattaccgtattcttcaccatcgtcttcttgagcatgaggagctaatatatggttctgctgaacaagttttggtcgatgctgaagaagtaatgtacattgtcaaagaattgtggcgtggtcgaagtgctagagatcaaaatctgaaggacactggccgtaaaatgtggagatctgtcaatgaattaatgcttgttcggtgggataaatcaaagcctgctggcgtgtcaaacttaatacttctcaagttcaatgaggcagatgcacatgaatccaccactcttgaccaaataaaggaagaagaacctgaattttacaacatggtttcacgtgttctgaaacaagctgaagcagaatttgctttatgaatgagccattaatcactagatgctccagcttacggtgataccaacgatatcatggacgaagcagttagacttggttttttgaaggacccaattttttatattgctgatcaggaagccagtggaagcttgtgcaagttcatttttcagctgccaaatcattaccatatgctgccatagattgaacttggtaatatttgtggtttctgaaaagaatattcctggaattagcaaaaccaaatatgttgtgttgtacaatctgttgggttgtttttatatgtcggggtttagcccaatttagcagacaaatattgtttcagctgtattcaaggacatagtcaagcagagacagatatcatcatcttcttttcttgtttcaaaaaggggggaaaaaaaaagatctccccatctcttcatttggtttctcttatgatttgtgggccctttataggttccaaatcctcgttcaaggaggttagttattcagggtccagttccactccc

SEQ ID NO: 10632 - DNA, 441 bp, Oryza sativa
  Clone ID: PAT_MRT4530_16934C.1
atggaccaggatgatttgtcaatggaggccttccaggacccctttgatgaccttcaccgtcaaggatttgctgcacatgacttggaatgtttctgtgaagaattgaatccaccttcaaataaagcccttgagcctccatgagcaaaaggaggaactgttgaatcatgcagcccaggcattggtgcccccatcggtggccgaactatagcaccatcagggaacgttgcagtggagcaccttgttgcatctgatgtgctggctgaggctgtgaaaatgattgatgacctgttactgcatgaactgaaggattctgaggttgtgcatgagacattggaagaggctgatgatatgcctgcatttgtggataagattgctgctgtgcatttggatgttgctgctgaggtaaatgctgcagttggggctgttgttgctgagccataa

SEQ ID NO: 10633 - DNA, 3243 bp, Oryza sativa
  Clone ID: PAT_MRT4530_16935C.1
atggatctatccccactgtttgtgactggattcatcatcggttgggccgttcgtttgtcacatgggcttcgtagttggatctgttgtgttgcccatatcattgttgatacatctcgtgccgagtccatttcaagttcacttctttggcaacaacacaagcctgcccttatgatggctatttggttacagaagctgattccaagttcatcaagtatatttggtggtagtgatccctttatttacaacctgatttgcaatatgcagcctctgatggaatcaaataaaccccttgctgagacaattggtaaagttacagtccactgtcagtatcacaagagtggttgtcaatggcatggtaatctgtctgactgcatcacacatggtactacttgtgcctatgggaactctcctgtagtttgtaaccgttgcagtactcagattgtacaccgtcaagtgcaagaacatgctcaactctgtccaggtttgcaacctcaggcgcaagcacaacacactgacagtagtatgatgcagtcatcagcaacaggaacccaggcagccgtgcaaggtccttctgcagtggcctcagcagtccctatgacgcctgttacagcagctcctacaacagtaccatccacaactacagccagagctggaacagattctgctatcgcagttgcttcagctggttcaaccactgtaagcaccgtggctgtggctccttcacttccggtggcacctactgctgctagtcaaggtcaagcacttgctcctcaaactccaacagctgagcaataccagcagcagctccagtaccagcagtactaccagcaacattaccctggatataacccctacatgcagcagtatcaacagtatgcctcaagttctacagcccaatcagccccaacacatggtgccattccaacctcagaatcagccccaccttacacaactccaagcaccagcagctcagtcacagtctcagcagcatccaccattgcagttgaagctcaaactcaaattgtacaagcacaaccacaaagccaagtatttttccaacagcttcaaccccatgcacaacctacaacccatacaccagtccttacacaacttggtagccaaccatttgcaatgcttcttactcaagccccaccatttgaagttcagccccatgttcaacctcatattccacagcaccatcaggttatggctcagcaacaacagccccaactgcagcatttacctcagcagcaacatccaaatgcacagcagcaatcttatccacaaatgcaggcatatcatcagcctcttccaatgtctcatgcacaacctcagaatccttcagttcatgcagtaacaggtcatcaatcattttcacagcctcagccagcacatcagatgcaacaaggtgctccactgcaacgttccctacatgtatctcagcagcaaatgcctagtgctcagcatcatgcacttgcacatactccacagggccaacaaccaactatgatggctcaagggattcagcagacaccacaacatcagcatgttgggcatcatgccctgcggccagaaatatatgctagcattcctccacaggcagcaccacaaggattccctctaaacgcacctgctccctcacaaacaggccaacaatttatgcaacagcaccctactcatacttctgctggtcggtctatgaattatgttgcaccacaagagcagttccaaaatcaatctggtggtccagttaaaggtttacaggcaggtgtgatgaatcaacaaccaccaatgcgtatggcctctgataatgtaggagcaacatctgaattgcatggtgctggacaatcttttgggcagggctcttcgtctttaaaaaaacctacttcggaatctgagaaatcagaaaatgcaactaatggtactggtaatacagaagtaagtgggaaaaatggaagtgctgaatcagctcttgtaaatcctatttcattggatgggtcagatggttcagacaaggggaaggggaaaggaaaagttgacttttcagcttgggaaagtaattcacatgatccagatgctcggggaggcaaagggactaggtctggtatatcaaatgatcttgtgaaaggtggatcattacagcaggcaccacaacatccttatggacctgattcaatgcttcctcaacatatgcgtcagcctgggcatatgccgtatatgcaggggctgccaaatcaaatgaggccacctaaacattcctttcctgaaaatagtcggcctccaatgcaacaaccatttgaaatggcacctagggtgcctggtccaaaccaaaatcagatgcaaatttcacagtccatcagacctgatggtgctatagttcggccaccgatgggggcaccaatgcctgggctgcatgattcaacagttcctccttttgctcctgaatatgttggaactaaaaagaacaatagtgttggcaatggaccacatggaggctcaagggctttatttgaaggtggattcaattcttcacagaaacattccaagtcatgtgcagcaaatcctggcagaaacaacgttagccacaaagattttgaagataatatgaagcagtttccagtgcctactcaccttgacggtgaagaatttggtcatcgtggtattgatggaatacctactcttagaaatgcaggtccatttcttcaagggatgacaggcgggcctggaggtttgcataaagatcagctaggctctagtaactttcctgggagtggacaccatgattttgacaactcagagttccctcgtactcgattccatcctggtgatgcttttgtgccaagaaatctgcacggtggtggttggggtggtggccaattgcatggcattgagccttctgactatggctacagaggtcacatgcatgcagatgatccaaatattccaattgattattctcggcatggttttccaaaagaatctgcccactttggttcgggtggacacttgagagatggagatgtcagttggtgccgtatatgcaatattagctgtggtacagtagagaacctgaatatacatgtagagaccagggaacaccatcaacatgcaatggacattgttctgaaaatgaagcaagatgttgcaaaggggagaaagaattccttcaggaattctggtggtcccaagtcattcaagaaaaaagtacctgggaagggtagctttcgtggaaataggcgttag

SEQ ID NO: 10634 - DNA, 1527 bp, Oryza sativa
  Clone ID: PAT_MRT4530_16936C.1
cccccccgtccgccacgtccggtttctccacctgcacatctgcgcgcgcgcgcgggagagcagaggcggcgagagagatccgggtcgggaggggtgatggacttctccggcgacgtcaagccggcgatccaccggccctctgtcgcggcggcacgcgggggagggaacggtggggcgatcccgctcctgcgtgggtggcaggcgttccggaggagcggcgcgccggcgaggctcctctgcttcgagggcggcgcgtgggcggacgtcgcgggcgaggtggtggggctgctgcggcgggcgttcatggaggggaaggccgtttgcgaggccgcctgcggtgggagggtgttcctgttcgacttcatgcggatggttcggatcgatgaggccaccgccgaggaggccgcgctggggtggatcgacgaccgcggcgcgtgcttcttcccggctcccgagggcgggaggaagaggaagagggagagggacgaggcggggtcggaggtgaagggggaggatcggcggcggcggcagccggcggcggaggaggaggacggggacgaggcgtcgtccggcgtggaggagcggtccggggagagccgccccgaggcggatgagcccgacaggaagaaggcgcgcgggacgttgtgggggaaggcggtgaggctggacgaggcggacaagttctacaaggtggtggagaagctcttcgtcagccggatggctcccgtggcggcggcccgcggcgtggcgatcacggcggtgcacaaggtcgcgcaggggccccgggcaagagccttccatctgcagggacagctccttgccgctgctcgcggcgtcggcgatggcagcaacgccaagttcgcgtggtacggcgcgccggcggcggatgtggccgcggcggtggagcacggcttcgggaggacgaacgggcagtttctcggcgggcgcgcacacggcgacggcgttcacctttcgccgccgcagtaccctcacgctagtgcgatgctgaccaagccagacgagaatggcgaggcacacatcgtgctgtgccgcgtcctgatgggccgtccagaggccgtccctgccagctcaccccaattccaccccagcagcgacgaatacgacagcgccgtcgacaaccttgagaatccgcggtggtacgttgtatggagcacagacatgaacaccaggatcctcccagagtacgtggtcagcttcaggtggcccaacctgccgcagatggaaggatcatcggggttgggatcgaagctgaagaagccatcaccagcagctactcgcgacatgttccctatgcttctgacggagatccagcggttcgttccatccccgaagctgcagactttgcagaggacgtacaactgcttcaagcttacacaaaacaaccccttcgcgcttatgatcatgcctagaggacagatgaagaaggaccagttcatccggttcttgcgctcccacatcggcgacaatgtgttgaccaccgtggccaagaaactccgagggtactag

SEQ ID NO: 10635 - DNA, 221 bp, Oryza sativa
  unsure (1)..(221): unsure at all n locations
  Clone ID: PAT_MRT4530_16937C.1
cggaactnnagaanacnctctctttaacggcaacnntggcacaatggtgacagtntggtggaatgtccaggnacccannttactgtttctncttcatctttcatattntaaggatctttccctaagaggnttctggctacagtagtggttgngttcagataaggcagaagantctacgancaaagnttngactaccttttnggnccnggtgcangnaggaa

SEQ ID NO: 10636 - DNA, 651 bp, Oryza sativa
  Clone ID: PAT_MRT4530_16938C.1
atgccggcccggcagccatgcttggggtcgtactcgagcgaggatcttgtccctggcggcgtcgcaggcttcccgccacgccttgtgctccgcctccttccgctccttctcccgcggaataagtccactttccctccctcaacttatggccgtctgctggcaatgccaccgtcgtccccgtgccggagcctctccgtcctcatgctgcagcacaacccggcgctcggcgacatccccagtggcttccttctcggacggccggcaagcttctcccgcgcgcggacggccggcgagctatttccccgtgcgcggacggccggcgagctactcccccgcgcgaggacggttggcaagatcctccccgcgcgcggacggccggcgagctcctccctcgcgcgcggccggctgacgagatcctcccagcgcgagcactgccggcgagatcctccacacgcgcggacggccggcgacttggaggggttgcctcgtcctccacgaccccctcttagacgatgccccggcgccctcccgcctcctctgcgtgctcgagctgggccactccccgcgcgcggcgtggccaaccgacgagctcgtcccccttgcgccgtcgtcgccgccctgctgatagaaggtgagaggaggaagatatga

SEQ ID NO: 10637 - DNA, 264 bp, Oryza sativa
  Clone ID: PAT_MRT4530_16939C.1
gctcactaagagccacttattcattttattcgatcaaagcacacacgagacgagctttctgctcgcgattaaaaacacagcatgggcaaccacacagttacacaaactagatggtagttccacacaaaactaacgatgatatcgatcggacgatgatgatggtagctcgattagatagatagataacttggccatgagggccccaccgttcagctcctccatctccccgtcggagttgccgccgccgcggctgccgtagcccac

SEQ ID NO: 10638 - DNA, 2224 bp, Oryza sativa
  Clone ID: PAT_MRT4530_1693C.1
atggcggacggctatcgacggcgggtgctcacggcggcttcgaccctcgtcccggccgcgtgcggtagcgtgggaggcaagccgtgcgtactggcggcgaggggaggcgggcgtgctccttggcgtcactacgggcggcgaccgtcaattgcgttgtggatggcctcgaaaggccgtcgagtcggcatttcagatggcggatcgacgagggaaagtctctggattgattcggcaaccgttgacaaaggggaagacgtcatgcggtggcgtccgggtgtcgctacgtgcaggcagcggcggtggcgcctgcagagtatcccaagcgcgctgatccataagatcagcgatgacgacaaaatagctataaagaagcttgcatgcctgcaggtcgactctagaggatcccccaccggttgctcgcttaaccacgatttgagtactactcgctctggcagcctctcacggtcttctcgtccatcagatggatgttaagacagctttcctcaatggagagttggaggagaagatctatatggatcaaccagatgggtatgtactagaaggtcaagagggaatggtgtgtaggctgctgaagtccttgtatggccttaaacaagcacctaagcagtggcatgagaagtttgacaaaacacttacatctgttggctttgttgtgaacgaaactgacaaatgtgtgtactatcgctatggtgggggagagggagtgatcttgtgtttatatgtcgatgacatattaatctttgggactagcctcaatgtgattgaggaggtcaaggactttctgtccaaaagctttgaaatgaaggatttgggagtggctgatgttattattaacattaagctattgagaggagatgatggtgggattacacttgtgcagtctcactatgtagacaaggtcttgagtcgctttgattatagtgactgcaagccagctcctactccttatgatcccagtgtgctattaaggaaaaaccgaagaatagcaagggatctattaatatactcccaaacattggttcattgatgtacttaactagtgcaacgagacttgacatctcatttgctatgagtaagttgagctgatttgtttcaaatccgggcgacgatcattggcatgctctggaaagagtaatgcgctatctaaaagggacagtgagctatggaattcactatggggatcctctagagtcgacctgcaggcatgcaagcttctcatgagaaatggtgagtctctcataagaggtctttagctcctcatacaagacctccaaagaagcatgatccttctttagagccttgaacttgacaatctccttctcactataagcatggagctcctcaaacatactcacaagctcatcataggaaacatcatcacaatcatcatcactctcactatcactaagagatgttaccttagaggaaccctttgccatgagacaaagtggagcgaagagtgatggagcctccttgatggcaacaacggtcatcttcttcttcttggagcttgcatcatcaccaccttcttcctcggacccggatgaggcggagctctcctcatttgagtcccattccccgatgaatgcctcaatcttcttgcattccttcttgagcttcttcatgagcttgtagcctccactcttcttcttggatgacttgtctccatcatcatccttgaaagggcacttggaaacaaagtgtcccttctcaccacactcaaaacacctcaagttggagagagtcttgttgggtcttctatttctactcctatttgagttggagccccttcctctctcctttctccttcccaagagatcattgaaccttctagcaagaagggcaatctcttcctccaagtcctcattgacttcattcaccttgcccttgctcttatcttcaacttcggcttggagagcaatgcacttcttggctcggtcagaccgccatcgcctcggtctgaccgaatacggctccgtcggctctgtatcggccaccccgagtagcaccatcccggcctccagggggtcggtctaaccgcacatgtgctgccggtcagaccggccttatgcgcctgtcagaccaccttcttgtggggccggccagaccggccaaggcacgccggtcagatcgccactatgtggccagtctgaccgcccctggtcaggccgagcctagtgaaagcaaagtacagcgaaactaa

SEQ ID NO: 10639 - DNA, 429 bp, Oryza sativa
  Clone ID: PAT_MRT4530_16940C.1
atgccaccgtcgtccccgtgccggagcctctccgtcctcatgctgcagcacaacccggcgctcggcgacatccccagtggcttccttctcggacggccggcaagcttctcccgcgcgcggacggccggcgagctatttccctgtgcgcggacggccggcgagctgctcctacgcgcggacggccggcgagctcctcccccgcgcgaggacggctggcaagatcctccccgcgcgcggacggccggcgagctcctccctcgcgcgcggccggccgacgagatcctcctagcacgatgccccggcgccctcccgcctcctctgcgtgctcgagccgggccactccccgcgcgcggcgtggccaaccgacgagctcgtcccccttgcgccgttgtcgccgccctgctgatagaaggtgagaggaggaagata

SEQ ID NO: 10640 - DNA, 235 bp, Oryza sativa
  Clone ID: PAT_MRT4530_16941C.1
acgcaatgccgagccaacaaggtactaaccggggtggaatccgccacgcgtttggacgaaaacgatgctcgtcgccagcgccatggccagctcgccgccgccgacaaacccgccgtcgccttcaagtcgcctcctggtcgcagctcagctagagttcgagcaaaggagagagaatggagcgcgacatgtcagcaaaaccgggcaaaaactgagtcaatactgccgagggaccttc

SEQ ID NO: 10641 - DNA, 1426 bp, Oryza sativa
  unsure (1)..(1426): unsure at all n locations
  Clone ID: PAT_MRT4530_16942C.1
acctccaggaggcccctcgtctccgagggaggaggaggaanaggacgaccagaaaacacaacccgcgtgcgtccacgaatcccggctcgggatctccgtccccccccccccagtgacgtcatcgtaatccgcgggtcaaaagcagcaaggcggcgagcaccggagcaagaagcggagcgagcaaggtagccggcggcatccgcgtctccttccagggattcttggggggctccgctgctggtggtggtgggggagggatcgagaggatggccgtggagtcgccattcagggcggatgtgttgaggggcaaggcggcgctggtcaccggcggcggctccggcatcgggttcgagatcgccgcccagctcgcccgccacggcgcgcacgtcgccatcatgggccgccgccgcgaggtcctcgacaaggccgtcgccgccctccgctcccacggcctccgggctgttggttttgagggagatgtgcgcaagcaggaagatgccgcgagagtggttgccgcaacagttcaacattttggtaagctagacattcttgtcaatggggcagctggcaatttccttgcttccccggaggatttgacgcccaaagggttcaggacagtcgttgacattgacacagtgggtacatacactatgtgctatgaagctctaaagtatctgaaaaagggtggccctgggaaaggtccctctactggtggcgtcatcatcaacataagtgctactttgcattacactgcggcctggtaccaaattcatgtctctgctgctaaggcgggcgttgatagtataacaagatcattggctctggaatggggaacagattatgacatcagggtcaatggaattgcaccagggccaattgaaggcactccaggaatgaggaagcttgcacctgaggaaatggccaaggggagtcgggaaataatgcctttatttaagttgggtgaaaaatgggacatagctatggctgcactttaccttgcttctgatgcaggaaaatatgtaaatgggactacagtggttgttgatggaggtctttggctaagtcgccctcgccatattccgaaggaggaagtgaaggagctctcaaaggttgtcgagaagaaggttagggcctctggtgttggtgtgccatcaagcaaattgtgatgtcctctatggtttatatcgccctcctacgtgtactgtagaatcctttaccgaggagtcccgtagaatacttggatgttgctatcacttgtcatcgaagttttctatgattctatctatcaactcctgtaacatgctcagcacattcaccttgttcacgctcgagttaaacatttgccaaagtggttctcattcatattgtatctggtaatattgcaatcaactttgaatcgcaaccaaaaaaaaaaaaaaaaaaaaaa

SEQ ID NO: 10642 - DNA, 980 bp, Oryza sativa
  Clone ID: PAT_MRT4530_16943C.1
cacgccactggttccgggggtgggggctccggctccccgctgcaggcacgccgcacgccgccaccgccagccgttcgcctgttccagacgcgccgcgcgcgcgccgccgcctactctcgcgtgcgcggtgcgccgccgtgtactcctggtggcgtcaacgcgggcgcgggggcagcatccagcgtggcgcgggcgggagctgattaaagacccgcccccagatagcagtcgaagccaccacggccgctatcctgtccgaaggcgtatagcgccctagcggtgctggtattccgtattgggtgttaaaaaaatacggcgcgccttagcacgccggacgcgggggcgatcaggaggtgtgaatatattccacccggcgcagaagccgctgggcacgtttagctcgggtcggcatgggcaagcctgcagggagcgagggcataggtggcaagaacaaggatgcggagcgtgggttcggcggagaggtggacgtgtaaagataaagacagaacgctcataagaggcgagaagacgagcaaggcggagctgagagagaggaggtaggaaagtgagtgaaaaggagagggcgaagacggggagcagggcgggaagcacaacgagtaacgcagggaggagggcaccgcgggccttgattagtcatgcaagcgtacaggcgcacagatggcgatgcgcgcgagacgtagctgcgggcaggggggcgggccaggcatgggagaggaagagacacggagtagcggggagaacagaagagaataagtaatgacccactttgatgtgccgagagaggagagcagcggagtggatccgcgcgatacaaagcgaaattgtagagagcagcaacaaacagccgacgcacccaacgcacacccgccaccgctaggatcagcgggggcacgctcacgatggggaaggacgacggcggcggcatgagagagtgtagcacggaaagaatggagcaccct

SEQ ID NO: 10643 - DNA, 516 bp, Oryza sativa
  Clone ID: PAT_MRT4530_16944C.1
atgcgtttaatggtgaataacagggatctcccccgtgtcaggcgggggacggcgttggaccccacccaaggacgcatgaccaccttgcttctggttgaaggcacgtacggccgtctgacccaggcaaggtgggtccccctttcacggacggccgcgtcgtccatctccactcctcactccagagccgaccaaactgagggctccgtcgccctcatctccatcgccggccaccgagaagacaaaggtcgccaacgccatggagccgcggaacgcgaccgcgcactccgacgctctggagcgcgcaccgagtgccaccgctgcatcaccatcgtcgcgccggcctccgtggaccaaatccggccgagccgtcgcgccatcatcatcaccacgacctcctcttcgaaatccctcaagaatcccagccaatgccgcaacgtcgtcttctccactgtcaccgatgttcagaccaatccaagctgcgggtctagcttcaatgagtacccaagaacccagtag

SEQ ID NO: 10644 - DNA, 397 bp, Oryza sativa
  Clone ID: PAT_MRT4530_16945C.1
agtaaacaaattgcaaatagcatatatattttttattaccacatgttctcttaccgggtgcttcaaacacggtaacgcaccacatgttaccgggtgtgaatgaaacacggtaacacaccaaatgttaccgtgtgtgaaggacactcggtaagccaccggtccgttaggagctccgttacacgagtccagctacgcacggcagccttaccgtgtgctcacacacggtatgtgttttggccttcccgtgcgcataatcgtaaaacacccgggaagtgcgcacggtaaactgacgaagccgccgagtagctgttcccgtgcactagcacccggtaacgacgttaccgtgtgttttgagcacacgggagcgtgggacccacatgtcatttccatcttcctt

SEQ ID NO: 10645 - DNA, 930 bp, Oryza sativa
  unsure (1)..(930): unsure at all n locations
  Clone ID: PAT_MRT4530_16946C.1
gtactacaccatctggaatcttgctattaacactacgtatatagtacgaatcacgcaatagngcacgcatacaccacgcanacgactcatatatagcccatagatatatagcctataaatatagcatcatatatacatagcaaacgatagcccaacataacatagcacactacaaaccaacatactagcacgtaataatcacncacacaaacaattacacacactaagagcacacactagagactcncngtagatacgagcacaataacaaatagactaagcacacaacngatatagagagccaaatagagagatacagcatcaccaccacngcaccactagatatacacatagattcagcacagcaccacactagagcaagcatcacatagcacagcacagcacactagtatagcaatagcacagcataacacacgagcacnagactagcacatcacaatagcacaacatagatagagcacaccacaatatagcaccacagacatagactaagcacagacagcacattagccacaaccacacagatatacatatatagataagccatagagagcaatccagagaagcacagcacagcacagactagacttgacannactagagaagactagcaagactagcccaatatcacatagtagcacaacantagagcacccccataanttcacaacaatatcccacaccaatcatccataatccccatagggtagggatntaggtataggtatagacatcaacacaccccgntaatggggttaccactttgtaccatcnnacagtacantaccgaagtagtnagcactaccatactcagatagtagcacaaccaccnnacaacnnntaaccgacacccactatgaaactacaaantctcacacttcactatatcccnacacttgcacacanaaa

SEQ ID NO: 10646 - DNA, 645 bp, Oryza sativa
  Clone ID: PAT_MRT4530_16947C.1
atgaacctccgccttcatccgaagcctgaaccgccttggctcatgctaccggccgccggtgattccccccaacatctagccgtcgcggacttctactctttctcggatggacggcgtcgctcaatcaccctgccttcccctgccatccaaagccgtatgtggattggctcggcgaagggttggcttgtgacaacagatgacaagtgcgggctgcacctccttaaccccatctccggcactcaacactcgctgccatccatcaccactaccggttactttgatgcccttccaagaactgacggtgatgaagctaggttcttgtttaaagtagcctcattcgtggaaacctactggccggagggccacaccaggtttgtcggatggtgctccgacattgagatttctgcggaggaaatccggtcatctcgtctccttaaagccgtcccgttgtgggaccctagttctggtgaatactttatcatgatgatgcattgtccaaggaacagggttgtgcttgctcgtgggcgtgatgcaaaatggatgcccttgcaaacgcgacacatgtatgaagatgtgatcgtttaccgaggacaattctacatggtcaccttaggcctctcacagtgcgagctatggggcccgtag

SEQ ID NO: 10647 - DNA, 648 bp, Oryza sativa
  unsure (1)..(648): unsure at all n locations
  Clone ID: PAT_MRT4530_16948C.1
cggaggaggagcagcgtcgtcggagttggaggtggtggacgtgcggtggctgggtgcggcggagcggcgagcggtggtgcaacggctggtcgccgacgtcaaacacgaccatgtccggatgctcaggaagcagcgggagaggatggagaggtacgtaacacgatcgaacacctctttctcttaagaaaaaaaagatgtaaattatataaaaattttcattaataaatagtagtcaaattttgcatattttgtttaaaaaatagtagtcaaaatttcatttttcaacacgtaatttatattacacattaaatttcatatctatcattgtaaattatataagtttaatttaatttgcactatgaattctaaatcttatcctatataatcctaacttttactagtgggtattcaacatttgcacgtaggatgccctgcagctatactagtggcagacataggatggttgcgtcatcaataaaaatatagaaaattntnaattacaaaaagtgataaactgtagaaaaatatagcagcaaaatatttatctttttagtttggtatcatttttgaacatataatataatataatataatatatgtgttttttaaagaaatataatttgcttacgaaagaaaaaaaaaaaaaaa

SEQ ID NO: 10648 - DNA, 800 bp, Oryza sativa
  Clone ID: PAT_MRT4530_16949C.1
atggctgatgttgtccaagaagaccagataaacaagatgaatgctcgtaacattgctatggtttttgcaccaaatatgactcagatgtcagatccattgaccgcactgatgtatgcggtgcaagtgatgaattttctcaagatgctaatacagaagaccctcaagggtagacaagagtccaatctggaggacacatctctgccccataaggacccatctgatgaaagtggacaccataaaccctgtctcacacttgagtctctcctcgaggaagaatccaggcgtccctctttcgtcgaagaggagcccattctgaacagtcccgcacatggcaccggctacaatcctattgaggttaatcctgtccaaggaaaaactgctgcttccattgcacagacaagtgaagttcagacgatcatagagggctccagtagttgctcccgaccttctctgactgatccgcctgctactgctgatcctgtctgtgctgaagctgcgaactcgcttcaacgaaagggaagccgaagcctgaatagtaggaggacaagaaagggcaaagggcagtctggaacgagtgccacttcctcagctgagaaatcaaaaggcacgagcattgtaagccggataaactccaagattgaacgaattgaagcatggaggtgaaatcaattgttattgccccccttattgtcatgtaatcgattacccaatgtttccttaagaccgagttcggtgttcttgcacatttttcaattttgttatgcttattgtttcttgttggatcaaaaaaaaaaaaaaaa

SEQ ID NO: 10649 - DNA, 3120 bp, Oryza sativa
  Clone ID: PAT_MRT4530_1694C.1
ctactccccgttgaggcgagcccaactccaccgctcaaccacgaagccaccgcacgcccccttcgtcaaggggtgggcaaggcgagagccggcccacagagaggacgggttgaagtactcgttgggttgcattccaaaataggcatactgagggtgaaagaaggcatttggatcatacccatgaggaggaggaggtgctgagcttgagctagctccaggatgagaggagggcgccaccctaggagcacagggagctccaagctgaaggcggggcttgtactgcttgtgcttcttcaaattctgcctagcagccccaagcttgtcttgaatcaacctcatgatgtaaggggcataatagattccctgagtgaaggtccccttggagatggcaatctcttgcagcatgagagtcacaatgtcgaactgtcggccctgaatgattgcatcgatgacgtgccaagccacccccctaatgtcatcattgttacccaggcgagggaggatggtagctctcacaatcttgttaaccacactcgggatggtcctcaagccggcaaccttcccatatgtgtaccgcgctccatcttcataaaactgagagaggtagtctatggagagcggattatgggtgtgctcctcatgcaagtcatctccaaagtccaagcgaatattgaggagccgccggaattgcctcactgtagcataaaactgccggatcaaatcttcattgtaatcttgcttaagagtcataatccggtcaatgccaacagtcctgaagagatcctgcaagccctcaaactctagagtctcattgatgtctctccaagagatccacttatgctctgcaaaagctttccctgcatagacttgctcatacacactcttctggaaagcggtgtgaaaacggggatccggggtgtcccgaggcctcaaaaactgatcatggtgcctcaagatggtatactgtgatggattcctcatgttcacaacaaactggatggatggatcaatgtgcatatcatcactttcttcatcctcatactctccacttccactgtcatcatctccactttcctcctcactagccccctcaacattggcctcaacctcttcatctctttgagcgtaatcctctccactcgattcctcaggctcactcacaggatccggagttggcgcacgacgaccatgacgagtgcggggaggcatcactccctcatcaaggtcgagatgcccgttggttgccatatgtgtcttgatgggtttcgcatcctccaagccaaacctcttgagtagatccttaatgtacttggtttggctcacgaacgtcccatcctggagttgcttgatttgaagtccaaggaagaagctcaactctccaatcatggacatatcaaattccccgttctcatcttgtttgttcctaaagacccactttgtccctatgacattgtggtctctaggtctttcaaccaaagtccaaaccttgtttcttgcaaagttgttgagctcttcatgcatagcattcatccaatcaagatcacaaagagcttcatccttactaatgtcacccaacacttggtcaattgggtgatccttggaaagagcggtgtgtattcttggtggaataggtggatcttgtgccttctcctcctccacttcaacttgagcttgacttggcgtagcggaagtagatgacttatcttgagtggaggtggatggcttgtcttccacttcaataggcttgacatctccaattgacatgttcttcatagctctcatcaagccttcatcacctacatcatccaaattctcgtgcccctcttgggagccattagtctcgtcaaattgaacatcggcggtttcttccacaatacctttattcttgttgtagacctttcctttgctattgtctccaaatgtcactttctcttgtttattccctcctacttcaaatgtggtgaacatagccctatcaccggtcatgtgttgagtgcatccactatcaaacacccaatggctcccaccggtgcggtagttcaccaccgagtataggggaacccacatatctagcaacaatgctaccatcatgagccttccattgctcttgacaaaacgagtggcacagtgagaaggtttcttacccttctttggaatgaatccaagtccctccttgttaaggatgcaccgttgctcactcaaaatcttgtcaagagtgttcttatccttgaagcacctctccaagctcttgttgagcttagccacttgctctttaagctcattgttctcaacaacaagtgaggcatcacaaatagaaacacaagaggtagagctagagctagacatatccacaagatcatcacaagaggtagaaatgctagatgatgcaacatgagcaatatggcaagtagcactatcaccaagcaaatcacaagatatgccaacatcaatgagagctccatgttgagtagtggaaatgaggttgtcttgagcttccttaagcttctcatgagaaatggtgagtctctcatgagaagtctttagctcctcatacaagacctccaaagaagcatgatccttctttagggccttgaacttgacaatctccttctcactataagcatagagctcctcaaacatactcacaagctcatcataggaaacatcatcacaatcatcatcactctcactatcactaagagatgttaccttagaagagccctttgccatgagacaaagtggagcgaagagtgatggagcctccttgatggcaacaacggccatcttcaaatgtaaattgcacaaatgtaaatgcgacaatcaaatgagacaaggagacaagagatttttcactgaggttcagaaactcgccggtttcctactccccgtcgaggcgagcccaactccacctctcaaccacgaagccactgcacgcccccttcgtcaaggggtgggcaaggcgggagccggcccacggagaggactacccaagcctcgatcactaggatagttcttccttcactccgaaggtggtgaactccaaaccactcacaaccggcgccgggcctcctccacaatctcctcgtagaggtcaccgggtaacacctctacaagccgtct

SEQ ID NO: 10650 - DNA, 483 bp, Oryza sativa
  Clone ID: PAT_MRT4530_16950C.1
atggcggagatggaggcgaggctatgcagcctgtacggcgcggccgccgccaaggccaccctggcgcgcaacatcctcgcccccgtcgccggccggctgagcggccacccgtcggagctccaccgccgctgcatcctgctccgccgcctcagcagcagccggaacaccggcactacgggcgacctgtgcgagcgcttctcggcgtacgcgcccgtcgaggcgatcgccgtctccggcgccctccgcacggccgtcgtcgtcttcgagaccgtcgccgggtggcgggcggcggcggcggcgacgctgagcgcgagctgcgacaccgtccctcccctctacttcggccctcctctcgtcctcgtcgacggccgagacatcaaggtggcgctccatccgaagaagcctgctgctgcttcgccgggaggagggaaggacgtggtgtcgtcgttcggagacgagatgcggtgtggccgccagtgttag

SEQ ID NO: 10651 - DNA, 2208 bp, Oryza sativa
  Clone ID: PAT_MRT4530_16951C.1
atggcgccaccgccactcaagtaccggcactgcagcaatgtggacgggctggtctcggtggaggcgctgcgaatcatcgtggagaccaaggcttgcttcgtggcggtggcgctggcgctggcctacttcctgacggcgtcgcggcaccggctgtggagctccagccacctcatcaaggggttcctcttcgccgtgacgcagccggtgacccggttcctcgtcagcatgttcgccatgctgctctccatgccgttccgcaacgacctctacctgctctggggcatcctcctcctcgccggctacgagggcgtctacaccatctccggctacggcgtctccgcccgcctctccgacctcgccgtccacgagttcacgcgctgcagcaacattgtggtgctcggcctctacgtccggtactactcccatgcctcgcagttccggtacccgctctgggcgctctgggcactcatggtcgccaagttcttggagcggatcgtcctgttcaagaacggcaaccgaaagtacggtgacgggaacaccagccgcgtcgcggactacatgaagcacgagcacgagttgagcaacacagacgctgaagctggcggcttctccatggaggactacaagtaccttatcgttggcgactccaagttggaaaccacgatcgtcgatggtatgacctacgagccaaagttgacgccgccgattagacaaactcaagaagcggacgatacggtggtcgtcgtcaccgtcgataaggtgtggacgtgcaagggggagctcctcaagactgataatcgcggcgacaagctgaaggacatctgcctgtccttcgcgctgtgcaagctgcttaggcggaagttcgccggcgttaatgcgtcggagaacgagcggagcaaggcgcagaagctcgttttcgacggcctcatcccggacccggagcggacgtttcgagttgtccgggcagagcttggctttgcgagagacatgagcttcaccaagtaccccatcttgttcagctacggctttccggtcgtcagcgtcgtgctgttcgcagcgacgctcggcgtgtcactgtggatcatctcgtcagcgatccaccactaccggattccccgcaagagcacgcccaacttggtcaacggcaagaacgtggatctgattatcacttttgttattgtgttcatggttacggcgatggacatatgcgagttcttcatgcacctcttctccgactggaccaaggttatggttgtttctgaatacgtccggaaacggtacgtgcgatgctgtctccttgaccgtattctgtggttggtatgccacggcaagttagctgagacgatcggaagctccctaggacagttcgaccttctcaacggggcgaagaaaggctacatccctgaacgcatcgtcaggttgtaccacatggtgagatcgtttatcctgctcaccgacgacaaagactaccgcatcaagaaaggcaagagcctccggccggttccggagtccgtggagaaggcgctatgcgagacgcttctgagcaacaggaaacagttgactcagggtctgcgtctgctcacaagaagcaagctacaggccgagagcgaggagctcttgacgtactgccaactagcggagatcgagaccatcgtcgtgtggcacgtcgcgacgtgcaaacttgagcagcaatcgccgcatgaacccgtcgagagctatcaggtggccaccgcgctgtccaagtactgcgcctacctggtgttctacaatccgaagctgctgccggttggcaacacctctgttaggcatacctgcaagacattggttaggcatgacagcagctgtgacaggagttgtggtggcgatgattgcatgataagaaaaggcgaggcgctcgcggcggcgctgctaaaagggcgggagctcaacaagtcgtctaaagagccggggatgtggacggagctggcggagttctggtcggagctgctgatatcgctcgcgccgtttgggagcgttggcgcccacgagaaggggctcggcgacggcggcgagttcatcacgcacctgtgggctctgctgtaccatgcagggatcgatgccaagtactcttggtccagtgccagtactgccagtggtgaatctggcggcagagctgacgtttacccgtttcagaatggcatggataccgtgtcacacgcggttaattaa

SEQ ID NO: 10652 - DNA, 1926 bp, Oryza sativa
  Clone ID: PAT_MRT4530_16952C.1
cggactcgtgggcggacgcgtgggcgcgcacgaccgccgcggcggcagccaactccggcgagggccatgtccggcggcggatgcagcgtccgggcgatctggatcctcaccccgcacgacgccgtcgccttctccaggcgatttgcggtggtggagaagcggtggcgggtcgcgtgggaggcggagggcggggcgagggcggagatgatgccgctgccggctgactacgaggtcgccgccgccttcgccgaacgccggagaagggaaggcacggcgcgtggttctggaatccgtacgagcatgtcatctgctgggtcggattcgtgggttgatgatccaatcactcgccacattatatcactccatattgataaagaggaaggagaggggtttatgctgtggcctgtggttcttcagaagcggggtagctattatatccttgtgttgcctttggtggatcctcaatcatttaaagcatatgaaagcctcttgaaaaggtcggactgcgggagttctgccaaggagaagggcaatctttcttccattctgctcaaccttccatgcataacaggggcattaatggttgcacatgttattggggacataattactggtgataccgctgagcctgaggtgatcgttagtactggcccctctgttggtgggctgttagattcattgacaggaagtataggtatttctgctcgaccaaaacctattgctgcacctgtcgcagccccgaccgcatcaatttcttcacctgttggtgctcctcagtcggagtctctgaaaggtggtatgaggccttttgacaaggatttactacggaatttcatccttggtgcgatgccttttggaacacctcaggatcttaattatgccaatgttacttcggtaagaacaactgggttttccgctgatcctctacctacagaccagaagcagcctgcctggaaaccttatctgtacaaagggagacaaaggactctcttctcaagcctagagactttaaatgctgcactatatgaccgtgatgatgtgcaagatttcctttcggtttctggacaagtgacatgtagggctgagctagaaggtttacctgatgtttctttgccattgtctgggttaaaagctgctcgtgtggaggtttcatcgttccatcactgtgtgcaagcttcagagcctaccaatgataagcaaactctaatatttcaaccaccactaggaaattttgttttgatgcactatcaagcttcatgcaacatggacccacctgttaaaggtttctaccagttgtctatggtgtctgagaatgaaggtgcttttctatttaagctgagattgatggagggttacaaatctccctttcttatggaattttgcatggttacaatgccgtttcctcgaagacgagttgcatcatatgatggaaatccatctgttgggacagtttcaatgacagaacattcaattgaatggagaatcgtttcaagcggtcggggcctcagtggaaggagcattgaggctaccttctctggtactgttagattccatcctataacaatccagcgagtaaattcatcatttcgatcagttccaagcactgcatttgttgaagatagtgatagtgaacaagacaatactaagaatggtgccaatttggatgactacctcatggaaaaaatgaataaggaccttcaagcagttaacttggaagagccattgtcctggcaagcttataattatgctaaggtttcttttaagattgttgggggcaccctttctggtctaacaattgatccaaaatctgtaaccatttatccttctgtcaaagccccagttgaatactcaatgcaggcttcatctggagattacatactctggaacactttaggaaaatgtccttctgctgctttgcctaaataa

SEQ ID NO: 10653 - DNA, 493 bp, Oryza sativa
  Clone ID: PAT_MRT4530_16953C.1
tgcgtgatgaactcgccgccgtcgccgagccccttctcgtgggcgccaacgctcccaaacggcgcgagccaactggccggcgtaaactagccaaaattttattaagcaagagaaaaaggcgtacagtatatactctcccggactttagtcaaaatcaaactgcttttagtttggagagtgagacattgtattgtgtctatgttgcgattggacaaaaacgctcgactgtggcacaattagttcaaattctttcagaagcgaatgctttggaatattccattcttgtagcagccaccgcttcggatcctgctcctctgcaatttctggccccatattcagggtgtgccatgggggaatatttccgcgataatggaatgcacgcattaattatatatgatgatctaagtaaacaggcgactcttctgcgccttgctccgctcgttctccgacgcattaacgccggcgaacttccgcctaagcagcttgcacagcg

SEQ ID NO: 10654 - DNA, 1191 bp, Oryza sativa
  Clone ID: PAT_MRT4530_16954C.1
atggcgaagcaatccagatcccttgagtataatatccatttcctcagctgggagctaataagctcacactgcaatggcatccactccggcagtaatggcgccaccgccggcactcaagtaccagcgctgaaacaatgggacgggctggtttcggtggaggcgctgggaattctcgtggagaccagggcttgcttcttggcgttggcgctggcgctggccttcttcctgacggcgtcggggcaccggttgtggagctccagccacctcatcaaggggttcttcttcgccgtcacgcagcccgtgacccggttcctcgtcagcatgttcgccatgctgctctccatgccgtccggcaacgacctctacctgctctggggcatcctcctcctcgccggctacgagggcgtctacaccatctccggctacggcgtctccgcccgcctctccgacctcgccgtccacgagttcacgcgctgcagcaacattgtggtgctcgggctctacgtcctgtactactccaatgcctcgcagttccggtaccctctctgggcgctctgggcgctcatggtcgccaagttcttggagcggatcgtccggttcaagatcgccaacaaaaggtacggcgacgggaacatcagccgcgtcgcgcactacatgaagcacgagcacaagctgtcggagagcagtaatgatcagcagtcgtcgtcggagagcagtacagacactgaagctgcaggtgagcacgagttgagcggtagtacatcgacagacattgaagctggcgagcagggcttccacatgaagaattacaactacctcatcgtcggcgactccaagttggatggagagaagaacacaacccgggggatctacgagccagagttgaaaccggtgacccacacggtcaccgtcgccaaggtgtgggaatacccagggaatctgctcgggcctgataagaagggccgctacaagctgaaggacgtctgcttgtccttcgccctctgcaagctgctgaggcggaagttcgccggcgttgaggcaacgaagatcgagctgcggaaggcgcggaagctcgtcttcgacggcctcatcacgagcgacatcgacgaggagcggacgtttcgagttatccgagcagagctcgggtttgcgagagacatcagcttcaccaagtaccccatcttgttgtag

SEQ ID NO: 10655 - DNA, 441 bp, Oryza sativa
  unsure (1)..(441): unsure at all n locations
  Clone ID: PAT_MRT4530_16955C.1
ttcatcatacctcggttaccctctcctcgtcggcaaggagaagggcccaccgatcggccacgatctcaaggtggtccacagttccaacatccgtcgggtggccccctcgggaaagccccggagggcanttncattgacggcncttcttacgngngnggnctcggccnaaggggnnaaccgggcctttccgggcctttgtggcgagtctcccgaatgtccggtggccccgaagtttcgccccaaccttacggagaagtatgatgggggtgatgacccggtcatggcgaattactttcccatgaccctcaagggtcacgcgcgtggttggttgatgacccaagcccccgactccattcactcctgggaggatctgtgccacagttcattacgaacttccagggcacatatccccgtcccggggaagagacggacctacacgct

SEQ ID NO: 10656 - DNA, 1197 bp, Oryza sativa
  Clone ID: PAT_MRT4530_16956C.1
atgcagctccagaaattagcagcaatattgttgctaattagtataggccattcggcactgctcgccgccgttggagcgccgccgccgcctcctggcagcagcaactgctcgacggcgtgcggcggcgtcgatatcccctacccgttcggcatcggccctgcaggctgcgcgttgcccggcttcgagctcacctgccgcgacaccaacaatggcggcaagaagccattcttggggcacggcggacacttcgagctggccggcgtgtccctgtccgatggtcaggcccgcgtgtggaacaacatctcctcctactgcaacgacacctcccaaaccatcatggatgtggtgagcttcgctgatccgtacaggctctctcaggccggcaacacgttcgccgtcgtcgggtgtcaggcggtggccgtcgtcggggtcggagattccgccgataacatcgtgcgtttcctgagcgggtgcgtggcgaccaactgcgggcgacgcggcgatcgcctcgccgacggcgcctgctccggggcaggctgctgccagacaacgataacgaaggggtttaacgcctaccaggtcgagttccagaactactcgacagtgttcaacagctcgaaggatatctacaacgtcagccgctgcagctacgcggcgctgatggagtcgtcgagctttagcttcaggaggagctacgcgacatcgtcggaattcttcgacgccaacggcgggagagtgcccgtggtggtcgaatgggccgtccggaacgcgagcaactgcgtggaggcgcggaaaaaccgagaatcagctgaggatgcagagtcagttatacagtcattgattaccctccctcctgtactgaaagcattttcagatggaaccgttgatgctggaatggctaacacatcacgtgctatgtgtgagagtacaggatattttagtgagtttgccttccaccagcatcaacacatgttgaggtccgtcgttggcggcggcgcggcgagagtgatgctgggtgtggcgctgaaaggtggagcatccgcccatctgatccatccccttcttctatggccggttgggaggtctgctggtggcggctacgcggcaatcttgggggtgcgcatggcgctgcagggaggagaaacggagcatccaagcggcgatcttgagggtgcgcatctcgctcttccatggtag

SEQ ID NO: 10657 - DNA, 803 bp, Oryza sativa
  Clone ID: PAT_MRT4530_16957C.1
atgcccggggtctccagggaggtgatcgagcaccgccttgccgtgcggccggatgcgcgacctgtccggcagaaggtgcggcgtcaagccccggagcggcaggccttcatcaaggaggaagtggcgcggctcctggaggctgatttcattcgcgaggaaatccatccggagtggctggcaaacccggtggtggtcccgaaggccaatggcaagctacggatgtgcatcgactacaccgacctcaacaaggcatgccccaaagatcccttccctctgccacgcatagatcaaatagtcgactccactgcgggagaggatgcgccccccagcaagcttagggatgtgcagtgcgtcactggatgcatggctgccctgagtcggtttatatcgaggctgggtgagagggcgctgcccctattcaagctcctcaagcgctccgggccgtttgaaccattgctactctacttggccgcgaccccccatgtggtgagtgccgccctagtagttgagcatgaggaaggcgaacgagagggccctccggcttgcgatggcccctcgtcccccgaaggtctagcgcccaaagcttctagcccccaggagggccccgaggcccccaagggaggagcggaggctttggcaggtggccctgagcttgatgatcccgaggcagtctgggatccccccaggacctccgaacaggtgcgccccgagttaccagcccttgacagcacgaaccggcccccccgaaaggtgcagcggcctgtctacttcgtcagcgaggcacttcgagatgtgaaaacccg

SEQ ID NO: 10658 - DNA, 546 bp, Oryza sativa
  Clone ID: PAT_MRT4530_16958C.1
atgggggaaggcgcctcctcatctggagtgccacgctcctcctcacgaggcggccctccccccacgctcacccctggggggacaggttgtagggccttcgtggcgagtcttcggaatgtccggtggcccccgaagtttcgccccaacctcatggagaagtatgatggtagcatcaatccctcggagttcctccagatctacaccacgattatcgtggcggcagggggagacgaccgggttatggaggatctgtgccagcagttcgttacgaacttccagggcacatatccccgcctgggagaagaggtagacctacacgctgtacggcggaaggacgacgagtccctccgctcgtacatgcaacgcttctgtcaagtgcgcaatactatttcgtgcattccggcccacgcggttgtgtatgcatttcggaacggcgtgtggcacaatcacatgctggagaagatcgcctccaaggagcccaagaccaccgctgagctctttgagctggcggacaaggtggcccggaaggaggaggcgtgggcctag

SEQ ID NO: 10659 - DNA, 4983 bp, Oryza sativa
  Clone ID: PAT_MRT4530_16959C.1
atggtcgaggtcctggaggtggaggaggaggcggtggcgtttatccccaccccgtccgggagtggggattccggcgaaagccgtggccctcgtcaccaccgccgagattctccaactccttcccgccgcgaaccttcgcggtgggaggatcccacccgttcgggtggttcggccctctccccgccccctggcggagggaggccgcgatgcgtcggggaacgccgccgtctcgtctacggagacggcggttcgccccgaggcgcgcttcaggcggcaggcgcccttctgcggcatcccccggtaaacccggtgccggagactcccgttcagcgctggctggacgacgtggccaacttagtcaccactgcccagcggcagttggccacgggtggccgatccgccgccacttatacgtcgcgtaccccggttactctctcctcgtcggcaaggaggagggcccgtcggtcggccacgatctcaaggcggtccacagctccaacatcgtcgggggcctcaggaagccggaggcgttatgacggtctctacgggaagcaggacgctcggatcaacatcaagcgacgctggaacgagtgccgagctgcccgcatgggggaaggcgcctcatcatctggagtgccacgctcctgttcacgaggcggccctccccccacgctcacccttggggggacaggttgtagggccttcgtggcgagtctccggaatgtccggtggcccccgaagttttgccccaacctcacggagaagtatgatggtagcatcaatccctccgagttcctccagatctataccacgattatcgtggcagcggggggagacgaccgggtcatggcgaattactttcccatggccctcaagggtcaggcgcgtggctggttgatgacccagccccccgactccattcactcctgggaggatctatgccagcagttcattacgaacttccagggcacatatccccgcccgggggaagaggcggacctacacgctgtacggcggaaggacgacgagtccctccgctcgtacatacagcgcttctgttgggtccgtaacactattctgtgcattccggcccatgcggttgtgtatgcattccggaacggcgtgcgacacaatcgcatgctggagaagatcgcctccaaggagcccaagaccaccgccgagctcttcgagctggcggacaaggtggcccggaaggaggaggcatgggcctggaactctcctggcgccggtgcggcggccgcggctacccccgagtctgccccccgctctaagcggcgagatagtagaggcaaaaggaaaccggcccgctccgatgacgagggccatgtccttgcggtagatgggcccgtacgggccccacgcaaagggaaggccaccggcgacaagccgagctccaccgctccctccggcgagggccggtcagcagacaagtggtgctcggtgcacaacacttaccgccacagtctcgccgactgtcgctcggtcaagaatttagccgagcgattccgaaaggccgatgaggagaagcggcagggtcgacgggagggcaaagctcccatgacctcaaccggtgaccggcgatcggaggccaagaacaaggcccccgctgatgatggcgtgacagccccggggatgaagctccagccgtcgctgccgatcattgacgttactacgggacatatgtggctgcttggccacgtcgagctcctggtaaccttcggcgactccaccaacttccgcaccgagcggatcgacttcgatgtggcggatctcaatctgccctacaacgcggtcttgggcagacccgcgttggtgaagttcatggccgccacccactatgcctacctccagatgaagatgccgggtcctgctggccccatcaccgtctttggtgatgtcaaagtcgccctcgcctgcgcagagcagcgcgccgacaacctggcggtggccacggagccgcaggccccaggggctttcgcgtcccgcgtctccaagaagcaccttacctcggctgacgaggaaagcgcgctcgtctccttcttgtgggcgaattctgacgtcttcgcgtggaagccgtcggatatgcctggggtccccagggaggtgatcgagcaccgccttgccgtacgaccggatgcgcgacccgtccggcaaaaagtgcggcgtcaagccccggagcgacatgccttcatcagggaggaagtggcgcggctcctggaggctgatttcatccgcgaggtgatcaatccggagtggctggcgaacccagtggtcgtcccgaaggccaacggaaagctacggatgtgcatcgactacacagacctcaacaaggcatgccctaaagatcccttccctctaccacgcatagataagatagtcgactccactacggggtgtgaccttttgtgttttctagatgcatactctgggtaccatcagattcgcatggctagggaagatgaggaaaaaactgctttcattactcctgtgggcaccttttgttatacaactatgccttttgggttgaaaaatgcaggccctacttttcagcgcatgacttgcattactttgagtaatcagatagggcacaatgtagaggcgtatgtcgatgacctggtggtaaagacacgccaccaggacacgttgcagcaggacttggccgaaactttcgatagtcttaggtccacgcgcgtaaagctgaaccccgataagtgtgtgttcggtgtgccggcgggcaagcttctcggctttctagtctcttcccgaggcatagaaacaaatcccgagaaaatacgcgcgatagagagcttagggatgtgcaccctggggccggagaaaccattgctactctacttggctgcgaccccccatgtggtgtgtgccaccctagtagttgagcgcgaagaaagtgaacgggaggcccctctggctcgcgatggtccctcgtcctccgaaggcctagtgcccaaagcccctagcccccgggagggcctcgaggcccccgagggaggaggggaggctttggcaagtggccccgagcccgaggtgacccgggatccccccggggcccccgagcaggggcgccccgggtcacctgcccctgacaacacgaaccggccccgccgaaaggtgcagcggcccgtctactttgtcagcgaggcacttcgagatgcgaaaacccagtacccgcaggcccagaaaatgctttatgccgttttgatggcctcaaggaagttgtgtcactacttccaagcgcatcgggtttccgtagtgacatcgtaccccctcggccaaattttgcacaaccgagagtgcactggacgggtggtaaaatgggccattgagctggctgagttcgatttgcacttcgaaccgcggcacatgatcaaaagtcaagtcctggctgacttcatcgcggaatggaccccagtggacgaacctgttccatccagtgtcccttttccccccggagaggaagaggatccaaacgccgacattcgtggcgggcactggattatgcatttcgacggctccctcaaccttcaaggtgcaggtgccggagtcacgctgacttcgccaagcggagacgtcctcaaatacgtcgttcgactcgacttccgagccacgaacaatatggcagaatatgaagggctcctcgcgggattgaggacggcagccggaatgggcatccgccgtctcctagtcctaggtgactcccagctggtcgtaaatcaaatatcgaaagaataccagtgcaccgacccacaaatggatgtatatgtccgcgaagtcgtgtggatgaccgatatctgggcgtatcttgacggcaatactcttcctgaggatcgcgcagaagctgaaaagctcgcgcgcatctccaagcggtacgtcctcgtagaagggaccctctaccggcgtgccgccaacgggatactcttgaagtgtgtttctcgagagcagggcatcgagctcatagccgacacccatcaggacatccttggaccattcaaggcggctcgaggcgggtatcagcacttgtacgtcgccatcgacaagttcaccaagtggcccgaagcctacccggtcgtcaaaatcgacaagcattctgccctcaagttcatcaggggcatcacgtctcgattcggagtgcccaaccgcatcattacagacaacggcacccagttcaccagtgagctgtttggcgattactgtgacgacatgggcatcaaattgtgcttcgcctcgtccgcccaccccaagagcaacggccaagtcaagcgagccaacgctgaaattcttaaagggctcaagaccaagacgtacaacgtcctaaagaagcacggggattcatggctcgaggagttgcccaccgtgttatgggcaaatcggaccaccccaagccacgccaccggggaaacgccgtttttcctggtgtacggcgccgaagcggtcttatcctccgagctttccctggggtcgcctcgcatcgcgctgtacaatgaggccacccaggatgaccttcgccacgacaatctcgattatctcgaagaacggagaaggcgtgcggccctacgtgccgcgcgctaccagcaaagcctgcgacgctaccatcagcgccacgtccgggcccgatcactgcaaattggcgacctcgtcctacgccgcgtccaatcgcgcctggagctgagcaagctctcgccaatgtgggaagggccatacaaagtgatcggcgtgccccggccaggctccgttcagttaaccacggaggacagcacagagttgcctaacccctggaatatcgaacacctccgtcgtttctatccgtggcatcgagagtttttgctttccaggagctcgggccaacccccgcacaacccctcagtttgtgcaggcttggctgggggctaccactgtgtatcctttttccttttacaagcaatgaatttttctacttttttgtga

SEQ ID NO: 10660 - DNA, 3463 bp, Oryza sativa
  Clone ID: PAT_MRT4530_1695C.1
accccccccctcgggggaaatcaggaggagggcggacacctcaccctcgggcccgacgtccccgaaggtgccaggccacgtgggcgattgcgtctgcctcaagcctctggtcatgatactcccggtcccatatcaccgacacataccaatccctaggagcttgttttaaaccataaagagcttttgagagtttgtaaacatggttaggatttttaggatcttcaaaatcgggaggttgttcaacaaagacaagttcggcaatttcaccatttaaaaaagtacttttcacatccatttgaaatagttttatgtcaaagcatgatgcaaatgcaagaaggatgagaacagcctcaagtcttgccacgggggcaaaagtttcaccaaagtccaaaccttcaacttgtgtgaaaccttgtgccaccaaccttgccttgtttctcaccaccaacccgttctcatcttgtttgttcctaaagacccactttgtccctatgacattgtggtctctaggtctttcaaccaaagtccacaccttgtttcttgcaaagttgttgagctcttcgtgcatagccttcatccattccggatcacaaagtgcttcatctacatgttttggctcaagacaagaaacaaacgagtaatgttcacaaatcgaaacgacacgagatcgagtttgaacacccttactaatgtcacccaacacttgatcaattgggtgatccttggaaagagcggtgtgtatccttggtggcataggtggatcttgtgccttctcctcctccacttcaacttgagcttgacttggcgtagcggaagtagatggctcatcttgagtggaggtggatggcttgtcttccacttcaataggcttgacatctccaatagacatgttcttcatagctctcatcaagccttcatcacctacatcatccaaattctcgtgcccctcttgggagccattagtttcatcaaattgaacaacggcggtttcttccacaatacctttgttcttgttgtagacccggtatgtcttgctatttgaggcataacctagaagaaacccttcatcacactgacttttaaatttggttagtctaacacccttttggtaaatataacacttgcaaccaaaaactcgaaaataggcaacattaggcttcctcccaacaattagctcataggaagtctttttcaagagaggatgcaaataaagtatattggttgcatggcaagcggtgtttatggcttccgcccaaaaggaatcagaaacaccatattcatcaagcatagtccttgccatctcaatcaatgtacgatttttcctctccactacaccattttgttgagatgagtaggtagcggaaagttcgtgtttaataccaagatcatcacaatagtcctcgatattggtattcttaaactcggaaccattgtcacttctaattttcacaagagtgcaactaaattcatttttggccctttttgcaaactttttgaaaagctcggcaacaatagactttcctttgctattgtctccaaatgtcactttctcttgttcattccctcctacttcaaatgtggtgaacatagccctatcaccggtcatgtgttgagtgcatccactatcaagcacccaatggctcccaccggtgtggtagttcaccaccgagtataagggaacccacatatctagcaacaatgctaccatcatgagccttccattgctcttgacaaaacgagtggcacggtgagaaggtttcttacccttctttggaatgaatccaagtccctccttattaaggatgcaccgttgctcactcaaaatcttgtcaagagtgttcttacccttgaagcacctctccaagctcttgttgagcttagccacttgctccttaagctcattgttctcaacaacaagtgaggcatcacaaatagaaacacaggagctagagctagagctagacatatccacaagatcatcacaagaggtagaaatgctagatgatgcaacatgagcaatatagcaagtagcactatcatcaagcaaatcacaagatatgccaacatcaatgagagctccatgttgagtagtggaaaggaggttgtcatgagcttccttaagcttctcatgagaaatggtgagtctcgcatgataagtctttagctcctcatacaagacctccaaagaagcatgatccttctttagggccttgaacttgacaatctccttctcactataagcatgaagctcctcaaacatactcacaagctcatcataggaaacatcatcacaatcatcatcactctcactatcactaagagatgttaccttagaggagccctttgccatgagacaaagtggagcgaagagtgatggagcctccttgatggcaacaacggtcatcttcttggagcttgcatcatcaccatcttcttcctcggacccggatgaggcggagctctcctcatttgagtcccattccccgatgaaggcctcaatcttcttgccttccttcttaagcttcttcatgagcttgtagcctccactctttttcttggatgacttgtctccatcatcatccttggaagggcacttggaagcaaagtgtcccttctcaccacactcaaagcacctcaagttggagagagtcttgttgggtcttctatttcttctcctattagagttacagccccttcctctctcctttctccttcccaagagatcattgaaccttctagcaagaagggcaatctcttcctccaagttctcattggcttcattcaccttacccttgcccttgtcttcaacttcggcttggagagcaatgcacttcttggaaggtgaggcttcctccatctccttcttcttcaacttgtacatgtcattggtgttgatcttccccaagaggcttgccggtgtcatccttgacatgtcggagttgatgagcatggtgacaagggtctcatacttctccggtagagccctaagcatcttttgggcaacctcaagatcggtgtagtttgccccaagccccttgagatcattcacaatgacattgagcctcccatacatgtcattcacactctcatgaggcaacatggagaatgtctcatattggatctttaggaagtgaagcttggcatccttgtactcacttgtgccctcatggatctccgccaacttgttccaaatctcatatgcggtctcaaggttgctcactctatcaaactcctcttggctcaaagagttgaacaaatcatttatggcttggacattgagttggaggttgcggtgatcaatctctgtcaagggcgtgccggtgatagcaaaacctacatccacaatactccaaatatggaacctcatagctttgaggtgagtagacattttaattttccaagtggaatagtttgtgccattaaacatgggagccttccctacatggttcacctcgttcgacat

SEQ ID NO: 10661 - DNA, 4053 bp, Oryza sativa
  Clone ID: PAT_MRT4530_16960C.1
atggtcgaggtcctggaaatggaggaggaggtggtggcattcacccccaccccatcggggagtgaggattccggcgagagccgaggtcctcgtcaccgtcgccatggatctccaactcctccccgccgcgaaccttcgcggagggagaatgccgctcgttcgggtggttcggcaccctctcctctccaaggcggagtgaggccgcgacgcgccggggtacgccgctgtctcgattatggagacggcgattcgccccaaggcgcgcttcaagcagtaggcgcccttctacgacatcccccggtgaacccggagctggagactcctgttcagcgttggctggacgatgtgaccaacttggtcactgctgctcaacggcagttggccataggtggtcgatccgctgccgccggtacatcacgtacctcagtcaccctctcctcgtcggcgaggagaagggctcatcgatcggccacgatctcgaggcggtctatggtcccaacatcatcaggggcctctggaagccggaggcgtcacaaaggcctctacggtacacaggacgctcgaatcaacatcgagcgacgccgggatgagcgccgagctgcccgtatgggcgaaggcgcctcctcgtctggagcgccacattcttcctcacgaggcggtcctcctcccacactcacccctggggggacaggttgtagggccttcgtggcgagtctctggaatgttcggtggcccctgaagtttcgccctaaccttacggagaagtatgatggtaacatcaatccctccgagttcctccagatctataccacggtcatcgtggctgcagggggtgacgaccgggtcatggcgaattactttcccatggccctcaagggtcaggcgtgtggctggttaatgacccagccccccgactccattcactcctgggaggacttgtcccagcagttcatcacaaacttccaaggcacatatcctcgcccaggggaagaggcggacctgcatgctgtgcggcagaaggatgatgaatccctccgttcgtacatacaacgcttttgtcaggtccgtaacaccattccgtgcattccagcccacgcggttgtatatgcgttccgaaacagcgtgcgacataatcgcatgttggagaagatcacctccaaggagcccaagaccaccactgagctcttcgagctggcagacaaggtggccaggaaggaggaagcgtgggcctggaactctcctggcaccggtgcagcggccgcagccacccccgagtctgccccccgctctaagcgtttgagcatcatctccccggctgcttttgacgcgctcaaagccccggggatgaagctccagccgtcgctcccgatcattggcgttactccggggcacacgtggccgcttggtcacgtagagtttccggtaacttttggcgattccgccaacttccgcaccgagcggatcgacttcaatgtggcagatctcaatccgccctacaacgcggttatgggtaggcctgcgttgctgaagttcatggccgccacccattacgcctatctccagatgaagatgccaggtcccgctggccccatcaccatttttggtgatgtcaaggttgctctcacctacgcagagcagcgtgcggacaacctggcggtggccacgggaccacaggcccctgaggcatctgcgtctcacgcttctaagaagcgcatcacctcggctgacgaggaaggcgcgttcgtctccttcctgcgggcaaattctgtcgtttttgcatggaaaccgtcggatatgcccggggtccccagggaggtgatcgagcaccgccttgccgtgtggccggatgtgcgacctgtccggcagaaggtgcggtgtcaagccccggagcggcaggccttcatcagggaggaagtggcgcggctcttggaggctgacttcattcgtgaggtgatccacccggaatggctggcgaacccggtggtcgtcccgaaggccaacggcaagctacggatgtgcatcgactacaccgacctcagcaaggcatgccctaaagatcccttccctctgccacgcatagatcaaatagtcgactccaccgcggggtgcgaccttttgtgttttctagatgcatactctgggtatcatcagattcgtatggctagggaagatgaggaaaaaactgcttttattactcctgtgggtgctttttgttatacaaccatgccttttgggttgaagaatgcaggccctacttttcagcgcatgactcgtattactttaagtaatcagatagggcgcaatgtagaggcgtatgtcgatgacctagtgataaagacgtgccaccagaacacgttgctgcaggacctggctgaaacttttgatagcctcaggtccacgcacgtaaagctgaaccccgataagtgtgtgttcggcgtgccggcgggcaaacttctcagttttctagtctcttcccaaggcatagaagcaaattctgagaaaatacgtgcaatagagaggatgcgcccccccagcaagcttagggatgtgcagtgcgtcactggatgcatggccgccctgagtcggtttatattgaggctgggtgagagggcgctgcccctgttcaaactcctcaagcgctccgagccgtttgtagccccagggctagaggaacccttgctactctacttggcagcgactccccatgtggtgagtgccgccctagtggttgagcgtagggaaggcgaacaggagggccctccgacttgcgatggccccttgactctcgaggaaatagcaaccgaactctcctgcatccgggagggccccgaggcacccaagggaggagtgcagactttgatagatggccttaggctcgatgaccccgaggcggtccggggtcccctcgggacctccgaacaggtgcgccccgaatcaccagcccctgacagcacgatccggccccaccgaaaggtgcagcggcccatctacttcgtcagtgaggcactacgagatgcgaaaacccggtatccgcaggctcagaaaatgctttatgctgtcttgatggcctcgaggaagctacggcattactttcaagcacatcgggtttccgtagtgacgtcataccctcttggccagattttgcgcaaccgagagggtactggacgggtggtgaaatgggctatcgagctggctgagttcgatctgcacttcgaaccgtggcatgcgatcaagagtcaaatcctggctgacttcattgcggaatggaccccggtggacgaatcgattccatctaataccctcttcttccccggagaagaagaggatccaaacgccgacattcgtggcgggcactgggtgatgcatttcgacggctctctcaaccttcaaggtgtgggtgccggagtcacgctgacctcgccgaacggggatgtcctcaaatacgtcgtacgtctcgacttccgagccacgaacaacatggcaaaatatgaagggctcctcgcaggattgagggcggcggccggaatgggcatccgccgtctcctggttttaggcgactcccagctggtcgtaaatcaagtatccaaagaatatcagtgcaccgacccgcaaatggaagcatacgttcgagaggtacggcgcatggaacgccacttcaacggagtagagctccagcacgtgccccgacgcaacaacacagttgctaacgagttgtcgcgtgttgcgtcggcacgaaccccactccccccaggaactttcgaggaaaggctcgcacagccctcagcacgacccagccctttgaaggaccccaatgatgcgcccttcgacccaacctctggcgacccgcgtcaggtcacgtggatgaccgacatccgggcgtatctcgatggtaatactcttcccgaggaccgcgcagaagctgaaaagctcgcgcgtatctctaagaggtacatccttgtagagggggccctctaccggcgtgccgccaacgggatactcctgaagtgcattcctcgagagcggggcatcgagctcatagctgacgcccattag

SEQ ID NO: 10662 - DNA, 556 bp, Oryza sativa
  Clone ID: PAT_MRT4530_16961C.1
ccgtcaccaggtcgtggttccagccgcaacgtgccgttcggctgacaccgcgcgcccggtccggtggcgccggcgccggcgtcgcgcgtccaccgctgcgctcctggcgatgctgctggcgcgatggtgatcgtcggcgagccggagggagcgccctggccatgccagttcggggccttcctgatctggctcgccgggtgcatctcgctgttcctgtcttcctgacacggcgggtctgaacgccggccgagacagcgttgtcatatcggatcaatggctcgctaaaccgttgagccgttgtgtttgggggccaacggcaagctacgccttctacggactgcggaggcatctcttcaaacacagttatccccaactaggcaactaaaaacatgcacatatataaaacttgtcaaaaaaaaaaaagcatctctaggcatttctaaagggtttttttaacgaactaaacgattcttttatagaagtcatgtaaaattcttctattctaaacgggacctagttaattaaacaggaataatcatgaaaaaaaaaaaaaaaa

SEQ ID NO: 10663 - DNA, 4908 bp, Oryza sativa
  Clone ID: PAT_MRT4530_16962C.1
atggtcgaggtcctgaaagtagaggaggaggcggtggcatttactcccaccctgtccgggagtggggattccggcgagagccgaggtcctcgtcaccgtcgccatggttctccaactcctccccgccgcgaaccttcgcggagggaggatcccactcgttcaggtgattcggctctctctccgccccctggcggagggaggccgcgacgcgccggggcacgctgccgtctcgactatggagacggcggtttgccccaaggcacgcttcaggtagcaggcgcccttctgcggcatcccccggtaaacccggagctggagactcctgttcagcgctggttggacgacgtggccaacttggtcactactacccagtggcagttagccacgagtggccgatccgctgccgctggtacgtcgcgtacctcggtcaccctctcctcgtcggcaaggagaagggctcgtcgatcggccacgatctcgaggcggtccacggttccaacatcgtcaggggcctcggaaagccggaggtgccatgacggcctctacgggacgcaggacgctcgaatcaacatcgagcgacgccgagacgagcgccgagctacccgtatgggggaaggcgcctcctcatctggagcgccacgctcctcttcacgaggcggccctccccccacactcacccctggggggacgggttgtagggcctttgtggcgagtctccggaatgtccggtggcccccgaagtttcgccccaaccttacggagaagtatgatggtagcatcaatccctccgagttcctccagatctacaccacggttatcgtggcggcagggagtgacgaccgggtcatggcgaattactttcccatggccctcaagggtcaggcgcgtggctggttgatgacccagccccccggctccattcactcctgggaggatctgtgccagcagttcattacgaacttccagggcacatatccccgcccgggggaagaggtggacctacatgctgtacggcggaaggatgatgagtccctccgttcgtacatacaacacttctgtcaggtccgcaacaccattccgtgcatcccagcccacgcggttgtgtatgcattccggaacagcgtgcggcataatcgcatgctggagaagatcgcctccaaggagctcaagaccactgccgagctcttcgagctggcggacaaggtggcccagaagaaggaggcatgggcctggaactctcccagcaccgcagacgggcccacgcgggccccgcgcaaagaaaatgccaccgtcgataggccgagccctaccattccctccggcgagggccggtcggcggacaagtggtgctcggtacacaacacttaccgccacagtctcgccgactgccgctcggtcaagaatttagccgagcggttccgaaaggctgatgaggaaaagcggcagggtcgacgggagggcaaagcccccgcgacctcaaccggtgaccagcgaggggaggccaaggacaaggcccccgccgatgatggcggagacggtgaggatctggatttccagatacctcaggggaccgtcgccacgctcgaccggggggggggggcttgcgctcacacctctcgccgaagcttcaaggctatgaagtgggagcttctggccattgttcccacgcatgaggtggtccggaagatgaagatgccgggtcctgctggtcccatcaccgtccttggtgatgtcaaggtcgccctcgcctgcgcggagcagcgcgcagacaacctggcggtggccacggagccgcaggccccagaagcctctgcgtcccacgcttccaagaagcgcctcccctcggctgacgagccgtcagatatgcccggggtcctcagggaggtgatcgagcaccgccttgccgtgcggccggatgcgcgacctgtccggcagaaagtgcggcgtcaagccccggagcggcaggccttcatcagggaggaagtggcgcggctcctggaggctgatttcattcgcgaggtgatccatccggagtggctggcaaacccggtggtcgtcccgaaggccaatggcaagctacggatgtgcatcgactacaccgacctcaacaaggcatgccccaaagatcccttccctctaccacacatagatcaaatagtcgactccactgcggggtgcgaccttttgtgttttctagatgcatactctggataccatcaaattcgtatggctaggaaagatgaggaaaaaaccgcctttattactcctgtgggcaccttttgttatacaactatgccttttggattgaagaatgcaggccctacttttcagcgcatgactcgtattaccttaagtaatcagatagggcacaatgtagaggcgtatgtcgatgatctggtggtaaagacgcaccaccaagacacgttgctacaggacctggccgaaactttcgatagtcttaggtccacgcgcgtaaagctgaaccccgataagtgtgtgttcggcgtgccggcgggcaaacttctcggttttctagtctcttcccgaggcatagaagcaaatcctgagaaaatatgcgcgatagagaggatgcgcccccctagcaagcttagggatgtgcagtgcgtcactggatgcatggccgccctgagtcgatttatatcgaggctgggtgagagggcgctgcccctattcaagctcctcaagcgctccgggccatttgaaccattgctactctacttggccgcgaccccccatgtggtgagtgccgccctagtagttgagcgtgaggaaggcgaacgggaggccccttcggcttgcgatggcccctcgtcccccgaaggcctagcgcccaaagcttccagcccccgggaggaccccgaggcccccaagggaggagcggaggctttggcaggtggccccgagccttatgatcccgaggcagtctgggatccccccgggacctccgaacaggcgcgctccgagtcatcagcccctgacaacacgaactggccccgtcgaaaggtgcagcggcccgtctactttgttagcgaggcacttcgagatgcgaaaacccggtatccgcaggcccagaaaatgctttatgacgtcttaatggcctcaaggaagttgcgtcattacttccaagcgcatcgggtttccgtagtgacgacataccctcttggccaaattttgcacaaccgagaggaagaagaggatccaaacgccgacattcgcgacgggcactgggttatgcattttgacggctccctcaaccttcaaggtgcaagtgccggagtcacgctgacctcgccaaacggggatgtcctcaaatacgtcgttcgtctcgacttccgagccacgaacaacatggcagaatatgaagggctcctcgcgggattgagggcggcagccggaatgggcatccaccgtctcctggtcttgggtgactcccagctgatcgtaaatcaagtatccaaagagtatcagtgcaacgacccgcaaatggaagcccccactcccccagggaccttcgaggaaaggctcgcgcaaccatcggcacgaccgagccctttgagggaccccaatgacacgccctccgacccgactccgggcgacctgtgcccctcggggcccgagggggtcaaccctgacccccctcgtcaggtcgtgtggatgaccgacatccgggcatatctcgaaggcaatactcatcctgaggatcgcgcagaagctgaaaagctcgcgcgcatctccaaacggtacgtccttgtagaagggaccctataccggcgtaccgccaacgagatactcttgaagtgtatttctcgagagcagggcatcgagctcatagccgacgcccatcagggtgagttccgagcccattcgaccttacgaactttggtcggaaaagccttccggcaaggtttttattggccgactgcattacaagatgcccaagaatgggtccagcggtgcaaggcatgccggttccacgccaagtggacccaccagccggcccaagccttacagatcatcccactatcttggcctttcgcagtttgggggctggacatccttgggccattcaaggcggctcgaggcgggtatcagcacttgtacgtcgccatcgacaaattcaccaagtggcccgaggcctacccagttgtcaaaatcgacaagcattctgctcttaagttcatcaggggcatcacgtctcgattcggagtgcccaaccgtatcattacagacaacggcacccagttccccagtgagctgtttggcgattactgtgacgacatgggtatcaaattgtgctttgcctcacccgcccaccccaagagcaacagccaagtcgagcgagccaacgccgaaatccttaaaggactcaagaccaagacgtacaacgtcctgaagaagcacggggattcatggctcgaggagttgcccgccgtgttgtgggcaaatcggaccactccaagccgcgccacaggggaaacaccatttttcttggtgtacggcgccgaagcggtcctacccttcgagctttccctcgggtcgcctcgtgtcgcgttgtacaacgaggccaaccaagatgcccttcgccgcgaagatctcgattatcttgaagaacggagaaggcgagcggccttgcgtgccgcgcgctatcaacaaagcctgcgacgctaccatcagcgccacgtccgggcccgatcactacaagctagcgacctcgtcctacgccgcgttcagtcgcgcctggggctgaggaagctctcgccaatgtgggaagggccatacaaagtgatcgaagtgccctggctaggctccgttcggttaaccatggaggacggcacagagctgcccaacccctggaatatcgagcacctttgtcgtttctatccatga

SEQ ID NO: 10664 - DNA, 3435 bp, Oryza sativa
  Clone ID: PAT_MRT4530_16963C.1
atggggagctcgggagaggtcggcgcaatggggaaaaaggtcatttataaattacaattttggcttgggaggaaaacttcggggtgtgacaattatggagacggtggttcgccccaaggtgcgcttcaggcagaaggcgcccttctacggcatcccccggtaaacccggagccggagactcctgttcagcgctggctggactacgtggccaacttggtcactgctgcccaacggcagttggccacgggtggccgatccacagccgccggtacatcacgtacctcggtcaccctctcctcgtcggcgaggagaagagctcgtcgatcggccacgatctcgaggcggtccacggtcccaacatcgtcgggggccacaggaagccgaaggcgtcatgacggcctctacggtacgcaggacgctcgaatcaacatcgagcgacgccgggatgagcgccgagttgcccgtatgggggaaggtgcctcctcatctggagcgtcacgctcctcttcgcgaggcggccctcctcccacactcacccctgggggaacatgttgtagggctttcgtggcgagtctccggaacgtccggtggcccccgaagtttcgccccaaccttacggagaagtatgatggtagcatcaatccctccgagttcctccagatctataccacggttatcgaggcggcagggggtgacgaccgggtcatggcgaattactttcccatgtccctcaaaggtcaggcgcgtggctggttgatgacccagccccccgactccattcactcttgggcggacctgtgccagcagttcatcacgaacttacagggcacatatcctcgcccgggggaagaggcggacttacacgttaacggcgtgcgacataatcgcatgctggagaagatcgcctccaaggagcccaagaccactaccgagcttttcgagctggcggacaaggtggcccggaaggaggaggcgtgggcctggaactcttcaggcaccggtgcggcggccgtggctaccccagagtctgccccccgctctaagcggcgagataggagaggcaaaaggaaatcagtccgctccgatgacgagggtcatgtccttgcggcagacgggcccacgcgggccccacgcaaaggaaaggccaccggcgataagccgagccccactgttccctccggtgagggccggtcggtggacaagtggtgctcggtacacaacacctaccgccacagtctcgccgactgccgctcgccccgggaccggagtcctccgttgctactctacttggccgcgaccccctatgtggtgagtgccgccctagtagttgagcatgaggaaggtgaatgggagggccctccggcttgcgatggcccctcgtcccccgaaggtctagcgcccaaagcttcctgcccccgggagggccccgaggcccccaagagaggatcggaggctttggcaggtggccctgggtttgatgattctggggcagtccgggatccccccgggacctccgaacagattttgcacaaccgagagggtactggacgggtggtgagatgggctatcgagctggctgagttcgatctgcgcttcgagccgcgacatgcgatcaagagtcaaatcctggctgacttcatcgcggaatggaccccggtggacgaaccgattccatccaatgtccctttctcccccggagaagaagaggacccaaacgccgacattcgtggcgggcactgggttatgcatttcgacggctccctcaaccttcaaggtgcaggtgtcggagtcacgctgacctcgccaaacggggatgtcctcaaatacgtcgtgcgtctcgacatccgagccacgaacaacatggcagaatatgaagggctccttgcaggattgagggcggcggccgaaatgggcatccgccgtctcctagtcttaggtgactcccagctggtcgtaaatcaagtatccaaagaatatcaatgcaccgacccgcagatggaagcatacgtccgagagcacgtgccccgacgcgacaacacagttgctgacgagttgtcgcgtgttgcgtcggcacgagccccactccccccgggaactttcgaagaaaggctcgcgcaaccatcggcgcgaccgagccctttgagggaccccaacgatgcgccctacgacccaatctctggcgacccgcgcccctcgaggcccgagggggtcaaccccgacccccctcgtcaggtcgtgtggatgaccggcatccgggcatatctcgacggcaatactcttcccgaggaccgcgcggaggctgaaaagctcgcgtgcatctccaagcagtacgtcctcgtagagggggccctctaccggcgtgccgccaacgggatactcttgaagtgcattcctcgagagcagggcatcgagctcataaccgacgcccatcagggtgaatgcggagcccattcggcctcacgaactttggtcggaaaagccttctggcaaggtttttattggccaactgcattacaagatgcccaggaatgggtccagcggtgcgaggcatgccagttccatgctaagcagacccaccagccggcccaagccttacaggtcattccactatcttggcctttcacagtctgggggctagacatccttggaccgttcaaagcggctcgaggcgggtatcagcatttgtacgtcgccatcgacaaattcactgagtggcccgaagcctacccagtcgtcaaaatcgacaagcattctgctcttaagttcatcaggggcatcacgtctcgattcggagtgcccaaccgtatcattacagacaacggcaaccagttcaccaatgagctgtttggcggttactatgacgacatgggtatcaaactgtgctttgcctcacccgcccaccccaagagcaacggccaagtcgagcgagccaacgccgaaatcctcaaaggactcaagaccaagacgtacaacgtcctgaagaagcacggggattcatggcttgaggagttgcccgccgtgttgtgggcaaatcggaccactccaagccgtgccacaggggaaacaccatttttcttggtgtacggcgccgaagcggtcctacccttcgagctttccctgggttcgcctcgtgtcgctctgtacaacgaggccaaccaggatgacctccaccgcgacgatctcgattatcttgaagaacggagaaggcgacgctaccatcagcgccacgtccgggcccgattactacaagttggcgatctcatcctacgccgcgttcagtcgcgcctagggctgagcaagctcttgccaatgtgggaaggaccatacaaagtgatcggagtgccccggccaggctccgttcggttaaccacggaggacggcacagagctgcccaacccctggaatatcgagcacctccgtcgtttctatccataa

SEQ ID NO: 10665 - DNA, 234 bp, Oryza sativa
  Clone ID: PAT_MRT4530_16964C.1
ggaagccaatgatttttaataattaccaatggggtttttacattacatgtcacgaaatgacatgaacggccaatgaatagatagagccacacaacaaaacaagtgcggagccaccaaagggagagacacggcctttaaggggcgggggcgaccataaagcataaagggcgaccccaaaacttgaaagcagcacacaaagcagaaatgcacaaggatatacatgaaaacatacgg

SEQ ID NO: 10666 - DNA, 4674 bp, Oryza sativa
  Clone ID: PAT_MRT4530_16965C.1
atggatctccaactcctccccgccgcgaaccttcgcggagggataattccgctcgttcaggtggttcgggactctctcctccctgtggcggagggaggctgcgacgcgtcggggtacgccgccgtctcgattatggagacggcggttcgccccaaggcgcgcttcaagcagcaggcgcacttctacggcatcccccagcggtctacggtcccaacatcgtcgggggcctctggaagccggaggcgtcatgacagcctctacggtacgcaggacgctcgaatcaacatcgagcaacgctgggatgagcgccgagctgcccgtatgggggaaggtgcctcctcatctggagcgccacattcttcctcacgaggcggccctcctcccacactcacccctggggggacaggttgtagggccttcgtggcgagtctccggaatgtccgatggcccccgaagtttcgccctaaccttacggagaagtatgatggtagcatcaatccctccaagttcctccagatctataccacggttatcgtggctgcagggggtgacgaccgggtcatggcgaattactttcccatggccctcaaggcccacgcggttgtatatgcgttccggaacggcgtgcgacacaattgcatgctagagaagatcgcctccaaggagcccaagaccactgctgagctcttcgagcaggcggacaaggtggcctggaaggaggaggcgtgggcctggaactctcctggcaccggtgcggcggccgcggctacccccgagtctgccccccgctctaagcggcgagataggagaggcaaaaggaaatcagtccgctccgatgacgagggtcatgtccttgcagcggacgggcccacacgggccccacgcaaaggaaaggctgccggcgacaagccgagccctactgttccctccggtgatggccggtcggcggacaagtggtgctcggtgcacaacacctaccgccacagtctcgccgactgccgcttgcctgatgaggagaagcggcagggtcgacgggagggcaaagcccccacgaccttaaccggtgaacatcgagaggaggccaagaacaagggccctgccgatgatggcggagatagtgaggatttggatttccagatacctcaagggaccgtcgccacgcttgacgggggagcttgcgctcacacctctcgccgaagcttcaaggccatgaggcgagagcttctggccgctgtccccacgcatgaggcagtccggaaggcgcgctggtcggagttggccctggtggtctacccaaccatccacaacgtcaagatgaaaagtgtgctggtggatggcggggccagtctgagcatcatctccccggctgcctttgacgcgctcaaagccccggggatgaagctccagccatcgctcccgatcattggcgttactccggggcacacgtggccgcttggccacatagagcttccggtgactttcggtgactccgccaacttccgcaccgagcggatcgatttcgatgtggcggatctcaatctgccctacaacgcggttctgggcagacctgcgttggtggagttcatggccgccacccattacgcctacctccagatgaaaatgccaggtcctgctggtcccatcaccatctttggtgatgtcaaggttgccctcgcctacgcagagcagcgtgcagacaacctggcggtggccacggaaccacaggcccatgaggcatctgcgtctcacacttccaagaagcacctcacctcggttgacgaggtgcccgtcaaggaaatcccccttgatatgcacggggtccccagggaggtgatcgagcacctccttgccgtgcggccggatgtgcgacctgtccggcagaaggtacggcgtcaagccccggagcggcaggccttcatcagggaggaggtggcgcggctcctggaggctgacttcattcgtgaggtgatctacccggaatggctggcgaacccggtggtcgtcccgaaggccaatggcaagctatggatgtgcatcgactacaccgacctcaacaaggcatggcccaaagatcccttccctctgccacgcatagaccaaatagtcgacaccgctgcggggtgcgaacttttgtgttttctagatgcatattctgggtaccatcagatttgtatggctagggaagatgaggaaaaaattgcttttattactcctgtgggcactttttgttatacaaccatgccttttgggttgaagaatgcatgccctacttttcagcgcatgactcgtattactttaagtaatcagatagggcgcaatgtagaggcgtatgttgatgacctggtagtaaagacgcgccaccaggacacgttgctacaggacctggctgaaacttttgatagtcttaggtccacgcgcgtaaagctgaaccccgataagtgtgtgttcgccccggggccggaggaacccttgctactctacttggcagcgaccccccatgtggtgagtgccgccctagtggttgagcatgaggaaggcgaacgggagggccctccgacttgcgatggcccctcgtcccccgagagtctagcgaccaaagcttcctgcctccgggagggccccgaggcccccaagggaggagtgcagactttgacaggtggccctaggctcgatgatcccgaggcagtccgggatcccctcgggacctccgaacaggcccagaaaatgctttatgccgtcttgatggcctcgaggaagctgcggcattactttcaagcgcatcgggtttccgtagtgacatcgtaccctcttggccaaattttgcataacagagagggtactggacgggtggtgaaatgggctatcgagctagctgagttcgatctgcacttcgagcctcggcatgcaatcaagagtcaaatccttgctgacttcatcgcggaatggaccccggtggacgaatcgattccatccaatgcccccttctcccccggagaagaagaggatccaaacgccgatattcgtggcgggcactggatgatgcatttcgacggttccctcaaccttcaaggtgcaggtgtcggagtcacgctaacctcgccaaacggggatgtcctcaaatacgtcgtgcgtctcgacttccgagccacgaacaacatggcagaacatgaagggctcctcgcaggattgagggcggcgaccagaatgggcatccgccttctcctgtgcaccgacccgcaaatggaagcatacgtccgggaggtacggcgcatggaacgccacttcgacggactagagctccggcacgtgccccgacgcgacaacacagttgctgacgagttgtcgcgtgttgcgtcggcacgagccccactccccccagggacttttgaagaaaggctcgcgcagccatcggcgcgacccagccctttgagggaccccaacgatgcgccctccgacccaacctctggcgacccgcgcccctcggggcccgagggggtcaaccctgacccccctcgtcaggtcgtgtggatgaccgacatccgggcgtatctcgatggcaatactcttcccgaggactgcgcgaaagctgaaaagctcgcgcgtatctccaagcggtacgtcctcgtagagggggccctctaccggcgtgtcgccaacgagatactcctgaagtgcattcctcgagagcagggcattgagctcatagccgacgcccatcagggtgagtgcggagcccactcggcctcacgaactttggtcggaaaagccttccggcaaggtttttattggccgactgcattacaagacgcccaagaattggtccagcggtgcaaggcatgcctgttccatgccaagcagacccaccagccagcccaggccttacaggtcattccattatcttggcctttcgcagtctgggggctagatatccttggaccgttaaaggcagctcgaggcgggtatcagcacttgtacgtcgccatcaacaaattcactaagtggcccgaagcctacccagtcgtcaaaatcgacaagcattctgctcttaagttcatcaggggcatcacgtctcgattcggagtgcccaaccgtatcattacaaacaacggcacccagttcaccagtgagctgtttggcgattactgtgacgacatggccatcaaattgtgctttgcctcacccgcccaccccaagagcaatggccaagtcgagcgagccaacgccgaaatcctcaaaggactcaagaccaagacgtacaacgtcctcaagaaacacggggattcatggtttgaggagttgcccgccgtgctgtgggcaaatcgaaccactccaagccgtgccacaggggaaacaccatttttcctggtgtacggcgccgaagcggtcctaccctccgagctttccctgggttcgcctcgtgtcgctctgtacaacgaggccaaccaagatgaccttcgccgcgacgatctcgattatcttgaagaacggagaaggcgagcggccttgcacgccgcccgctaccaacaaagcctgcgacgctaccatcagcgccatgtccgggccccatcactacaagttagcgtcctcgtcctacgccgcgttcagtcgcgcctagggctgagcaagctctcgccaatgtgggaaggaccatacaaagtgatcggcgtgccctga

SEQ ID NO: 10667 - DNA, 262 bp, Oryza sativa
  unsure (1)..(262): unsure at all n locations
  Clone ID: PAT_MRT4530_16966C.1
cgtaccgcagcgtccgctactccaccgnctccgccatggcggtggccgccacctcccctaccattgccactgcgccattctcgtctcttcctctccgccttcgcctccgccccaaacccctcctcttacttctcgcctctcctcccgtccaagtcctcctctggttgaatcgctcggagaagggagaaaagcggaggagatccaggaatcggccgggggagacatgacggaggacacacaaagcccgctgagccgggcgctt

SEQ ID NO: 10668 - DNA, 1845 bp, Oryza sativa
  Clone ID: PAT_MRT4530_16967C.1
atgcctctggttgtagagggggtgattatgatccaggtacggtgcactgtgtggtacacctctgatcagagtttaatctattcgaatagccgtacccgcggttatggaaattccgggcgtgacaatggttctccaactcctccccaccgcgaaccttcgcggaaggaggatcccactcgttcggatggttcggctctctctccaccccctggcggagggaggccacgacgcgtcggggcatgccgccgtctcgactatggagacgacggttcgccccaaggcgcgcttcaggcagcaggcgcccttctgcggcatcccccggtaaacccggagccggagactcctgttcagcgctggttggacgatgtggccaacttggttactactgcccagcggcagttggccacgggtggccggcagttggccacgggtggccgatccactgccgctggtacatcacgtacctcggtcaccctctcctcgtcggcgaggagaagggctcgtcgatcagccacgatctcgaggcggtccacggttccaacatcgtcgggggcctcgggaagccggaggcgtcatgacggcctctacgggacgcaggacactcgaatcaacatcgagcgacgccgagacgagcgccgagctgcccgtatgggggaaggcacctcctcatctggagcgccacgctcctcttcacgaggcggccctccccccacactcacccctggggggacgggttgtagggcctttgtggcgagtctccggaatgtccggtggcctccgaagtttcgccccaaccttacggagaagtatgatggtagcatcaatgcctccgagttcctccagatctacaccacggttatcgtggcggcagggggtgacgaccgggtcatggcgaattactttcccatggccctcaaggcgtacgtccgcgaggtacggcgcatggaacgccacttcgacggacttgagctccggcatgtgccccgacgcgacaacacaattgctgacgagttgtcgcgtgttgcgtcagcacgagccccactccccccagggaccttcgaggaaaggctcgcgcaaccatcggcgcgaccgagccctttgagggaccccaatgacacgccctccgacccgactccgggcgacccgcgcccctcggggcccgagggggtcaaccccgacccccctcatcaggtcgtgtggatgactgacatccgggcgtatgtcgaaggcaatactcatcctgaggatcgcgcagaagctgaaaagctcacgcgcatctccaaacggtacgtccttgtagaagggaccctataccggcgtgccgccaacgggatactcttaaagtgtatttctcgagagcagggcatcgagctcatagccgacgcccatcagggtgagtgcggagcacattcggcctcacgaactttggtcggaaaagccttccggcaaggtttttattggccgactgcattacaagatgcccaagaatgggtccagtggtgcaaggcatgccagttccatgccaagcagacccaccagccggcccaagccttacaggtcatcccgctatcttggcctttcgcagtttgggggctggacatccttgggccattcaaggcggctcgaggcgggtatcagcactcgtacgtcgccatcgacaaattcaccaagtggcccgaggccttcccggttgtcaaaatcgacaagcattctgctcttaagtccatcaggggcatcacgtctcgattcggagtgcccaactgtatcattacagacaacggcacccagttcaccagtgagctttttggcgattactgtgacgacatgggtccgcgtttactctaa

SEQ ID NO: 10669 - DNA, 444 bp, Oryza sativa
  Clone ID: PAT_MRT4530_16968C.1
cccacgcgtccgcccacgcgtccgcggcgattctcgccgacgtggacgtggatgaacgtgctcagactagtctgcctagatgtcttcctactcgacgacgacggttacatgcatggacttatcaaatacgtcgcacattacatgccattcagcgtttgctcatgatcaaaataataattatttgataatactgatgatgaagatgatatgacccatcgatcgatgaagaacaaagatatatatatagcgagatcgatcgatcgagcacgatcgcgaacgatctatataatacatagttaatcaatcagatgctaattaacgcgggtcagagcgtgtctttcataggtcataacgacaggttgataagagatgaatgctgaagcgcttaatgagatgtaatgaactacggatgtgataaagccaccctgatgatcatgatgatca

SEQ ID NO: 10670 - DNA, 136 bp, Oryza sativa
  Clone ID: PAT_MRT4530_16969C.1
agaagtgcataccggtatgacggaatgtgtgaaaacagtggtgtttggttggatggaactcctttccaggcaccttctcttcacacgtgcgtgattcttgaagcatctcggggtacagagctcgaattcggcataa

SEQ ID NO: 10671 - DNA, 349 bp, Oryza sativa
  Clone ID: PAT_MRT4530_1696C.1
gggaaaccaacgagggttacaatttcccacagaagtccataacagattcagggaatacaacagcagcaatttttttaacaatttagaaaacccaaccttgaaattttttaatagcaccagggttgataccccttatcaagcaagggaccacaggggccaagagtttggttttgcaaccaaatgcacgttgttttgcggcagaacacattgccgaatcaaaagcctttaggttatccttttttcctggtgcctataacgcaatggaacatcagatacagggggggcgtcttttccagcccaagttgttgaaagcctgaaactgaaagcaattttattcagtttttaggcc

SEQ ID NO: 10672 - DNA, 1164 bp, Oryza sativa
  Clone ID: PAT_MRT4530_16970C.1
atgggtgacctgggaggagcctggcatgaggcggccgcggcggaggaggaggaggcacaggcaccgggcggcggcgtcgggcccgagcccgaccacctggtggtcatggtccacgggatcgtcgggagtgcagctgattggaagtttggagctgagcaatttgaaaagttgctgtcagacaaagttatagttcatcgtagcaatcgcaacatgtacaagctaactttagatggcgttgatgtgatgggtgagcggttggcacaagaggttcctttcctttttggatttactgcaatagaaacttttgccagctacatcattcatttgatattcggaaaaactggcaagcatctatttcttatggacaatgatgatgggaagcctccattgttgctacgcatggtggatgattgggggggcgtacagttcatgtctgctctgaaagtattcaaacgaagagttgcatactccaatgttggtcatgatcgaagcaagatttacccacatattgtatatgaagaactatccaaagcagaaacaatgaatcaatgtactgatgttgccgatgtggacagctgcatgttagaagaacggcttttaagaggtctgaagcttgtgtcgtgggaaaaggtggatgtcagcttccacaacagcaaagtaagatctgcagcacatagtgtgattcaggtcaaagatcccgttatgcatagcgaaggtgccgatgtcataaaccatatgatcgaccatttcgtcctatagtaaaacagctccgatatctagaagcaagcttgagcgaggaacgtcagttgctaactgctgatttgccgagcctggtgagcaagtttatcgcaaaatccaggtttcggttgtgtgataaatggcactaaaaaggagaaactgataggcaagtacatatatacaggagaaatagaaaactcgctgcagatgcctcgtcattcattatgtattatgatcatgttcgttgttcgttgtaactggaatataaccggtatgtcattgtaaatgttcatcattgatttatttaaatcgtgagtcaatacgccccatatttgtttcctttcccctcgcgccgattcctccagcccgacatttagtactaagtatcgtttaaaatatcattccataacttgatgttgactaaga

SEQ ID NO: 10673 - DNA, 554 bp, Oryza sativa
  Clone ID: PAT_MRT4530_16971C.1
gaaaaactggcaagcatctatttcttatggacaatgatgatgggaagcctccattgttgctacgcatggtggatgattgggggggcgtacagttcatgtctgctctgaaagtattcaaacgaagagttgcatactccaatgttggtcatgatcatattgttgggtggagaacatcatccatcaggcgaaattctgagctaccgaagtggactgattcaggaagcaagatttacccacatattgtatatgaagaactatccaaagcagaaacaatgaatcaatgtactgatgttgccgatgtggacagctgcatgttagaagaacggcttttaagaggtctgaagcttgtgtcgtgggaaaaggtggatgtcagcttccacaacagcaaagtaagatctgcagcacatagtgtgattcaggtcaaagatcccgttatgcatagcgaaggtgccgatgtcataaaccatatgatcgaccatttcgtcctatagtaaaacagctccgatatctagaagcaagcttgagcgaggaacgtcagttgctaactgctgatt

SEQ ID NO: 10674 - DNA, 848 bp, Oryza sativa
  Clone ID: PAT_MRT4530_16972C.1
aacgaatggtttaagaatcatattgcaacattgacagaaggctattgttcaagccatgtcattgcttgttgatgtgaagacacgtttggtcaatttgagaaatgatgcttggcagccattatttgaagaggtaattagtcattttgtgatgcaaaaaaaaaaagattccagtgccaaatatggatgagccaataccaagatttggtcgatcaagaatgcaagggaacttaatcactcaagagcattattagcgtcttgacactttctttgcagctcttgatgctattatcactgagatgaatcatcgcttcaatgaggtatctcatcagagctactagttagcttttcttctattgatccaaggacccattctctaagtttgatattgataagattgctcgcttgactgaaatatatgatcaagatttctcaaatgctgatccttctaatataagggatcaacttgagaccttcattctacatgttccaagaattgatgattttgttggctgccattattttggaagtttggccattaagatagtagaaactgagaagaacgtgacttttccattagtctaacgtctaattgagttagcattgcttttatctgtggcaaccgcatctgttgaaagagctttctcagctatgaacataataagacatatttgtgcaataggatgtcagatgagtggctcaatgacttgatgttgtgctatgttgaaaatgagatatttcgaggacttcgtgttgatacaattaagaagacattccaggccttgaaaacttggaatatggacttacctatgcctccaaatgttctcagctctcataatatcttttagggg

SEQ ID NO: 10675 - DNA, 2031 bp, Oryza sativa
  Clone ID: PAT_MRT4530_16973C.1
caagtccaaagatggcaacacaagcgattgcaccgatgcacgccgccgtcgtgcaccgccaccacgttctaccaccccgccgctgcgtgcgccgccgtggcgtcttcgtccgcgcctcggccgccgccgccgccgccgccgccgagacggacacgctgtccgcggccttctgggactacaacctcctcttccggtcgcagcgcgacgagtgcctcgactccatcccgctccgcgtcaccgagggcgcgatcccgcccgacttcccggccggcacctactacctcgccgggccgggcatcttctccgacgaccacggctccaccgtccaccccctcgacggccacggctacctccgctccttccgcttccggcccggcgaccgcaccatccactactccgcgcggttcgtggagacggcggcgaagagggaggagagccgggacggcgcgtcgtggcggttcacgcaccgggggcccttctccgtgctgcagggcgggaagaaggtgggcaatgtgaaggtgatgaagaacgtggccaacaccagcgtgctgcggtggggcggccggctgctctgcctctgggagggcggccagccgtacgaggttgacccccggacgctcgagaccgtcggcccgttcgacctgctcggcctcgccgccgccgacgacaacaaggcaacgaacgcgtctgcagcacgacggccgtggctgcaggaggccggcctcgacgccgccgcgcgcctgctgcgccctgttcttagcggggtgttcgacatgccgggcaagaggctgctggcgcactacaagatcgacccgcggcgggggcgtctgctgatggtcgcctgcaacgccgaggacatgctcctcccgcgatcccacttcactttctacgagttcgacgcccacttcgacctcgtccagaagcgtgagttcgtcgtgccggaccacctcatgatccacgactgggccttcaccgacacccactacatcctcctcggcaacaggatcaagctcgacatccccggatcgctgctggcattgacgggcactcacccgatgatcgcggcgctggccgtggacccgagaaggcagtcgacgccggtgtacctgcttccgcgctccccggagaccgaggcgggcggccgcgactggagcgtgccgatcgaggcgccgtcgcagatgtggtccgtgcacgtcggcaacgcgttcgaggaggcgaaccgccggggcggcctcgacgtccggctgcacatgtcaagctgctcctaccagtggttccatttccacaggatgtttggttacaattggcaccacaagaagctggacccgtcgttcatgaacgcggcgaagggaaaggagtggctgcctcgcctcgttcaggtggccatcgagctcgacaggacgggagagtgccggaggtgctcagtcaggaggctgtccgatcagcacgccaggccggcggacttcccggcgataaacccaagctacgccaaccagaggaaccggttcgtctacgccggcgccgcgtccggctcccgcagattcctcccgtacttcccgttcgacagcgtggtgaaggtcgacgtctccgatggatcggcgcggtggtggtctaccgacgggcgcaagttcgtcggcgagccggtcttcgtcccgaccggcggcggagaggatggtggctatgttcttcttgtagagtatgcagtctccaagcacagatgccatctagtggtgctggatgcaaagaagatagggacagagaatgcacttgtggcaaaactagaggtgccaaagaacctcacttttccaatgggattccatggtttctggggagatgaatgagcatagagcaagcatcagatccagtctaactctggagagaaattgtcttgaaaaggcaagaattttgcctcgtgtattaataaaagagagttttgtgataatctgtacatggtggagaggaattatcaggggaaccaaataactactgtacatccagtctcggaatgaaaattcgtctcaccaattcatt

SEQ ID NO: 10676 - DNA, 204 bp, Oryza sativa
  Clone ID: PAT_MRT4530_16974C.1
ttttgggttttttgtatttatgggttatccatcttttttttttttgcaacaattcatttttttttggtgcaagagaacaaacattatatttgccatcatgggacgaggaaaatttgccaggcacccaacaaagatgggagaacatagaggacaaagggacaacttataaggagaaggctaacgacgcaaggacacaaagaaacg

SEQ ID NO: 10677 - DNA, 203 bp, Oryza sativa
  Clone ID: PAT_MRT4530_16975C.1
atgttgtttgccacggcaacaacattgtcttcaattgagaccgacgaaaccaagggtgacatagctcaagtcgaggaggaaccagcgttcccactggaggccagtcaagatgttgatggtgatggcggtgacaatgtcactgaggattgtgttgtgtttgctgaagcagatgccaagctcactattgtgcctgcattatgcat

SEQ ID NO: 10678 - DNA, 378 bp, Oryza sativa
  Clone ID: PAT_MRT4530_16976C.1
gtgattgtatttacaacaacacatgacattgagcaggctaaacaccagaacagcaaggcccactaccggagcagcacgcagcatactttgaaaacgggaacaacaatccccgcgggccacacaaatacgaacacatattcggtccacggactggcaccaacgcggaccgagaacacaaaacgcccactgatactgcagatgacggcgcagcgaagctcacaccaagggtagacggagcaagaaggccgatgcgcacgaggagtgaagaacggaaagcgagcggccgctcaattggcggggtacgaagcaggcggcgcaggcccaggcgttggtgacgacaggacagcacacggaggagcggcgaggcggacagagggg

SEQ ID NO: 10679 - DNA, 108 bp, Oryza sativa
  Clone ID: PAT_MRT4530_16977C.1
caattgctctccacctccttcgcacgtaaccgcgtacctctacggtgccgtcagagagatgctcttcgtggctgtcgcgtccgacagcctcactggatttggtggcat

SEQ ID NO: 10680 - DNA, 722 bp, Oryza sativa
  Clone ID: PAT_MRT4530_16978C.1
ccacctccccgccggcttcgcgctcccaacctcgccgtcgttcgtcatgttccggctgcgctcctccgctcgcctgctgagagagctacgggaggcgtcgcggtcgtaggggcgccgccgggaatggctctccggcggcgcagcagccttcgccgcgcggacgacctcgctcctgcaccctctgcccgggctcgacgtcccgcagcgcctccccgaccggctcggggtccagcccacccgggtcaccacgctccccaacggtgtccgcgtcaccttcgatgacctaccggtcccgtctgcgtgcgagtgggtggtcgtggattccggctcgtgttacgagacggcggagacggtgcgacgtgtcacacctgctcgagaggctgttcttcaaggacacggcgcgccgctaccaccgtgatactgtgcaagatagaggaggccaccgctggaaacatcgaggcgtgtgcatcaatgtagcagacggtgtacagctaccagactctcaaggcctacttgccgtaggccattcgaggcgctcatcgactgtgtgcgccgtccattgttcctccaggaccaagtcgaacgactggtggcctttgccaaataagaagttcaggagctacagaataacctgcagagatttcttcaggaatgacttaatctagttggattcacaggtgctcttgcaaattcactagtagccgctgaggagagtgtacacg

SEQ ID NO: 10681 - DNA, 603 bp, Oryza sativa
  Clone ID: PAT_MRT4530_16979C.1
gatgatgttctcaattaatctatcaacggcattctgattaaacatagtatgccaaaataaacatgtttatatatcaactcattccaacattatgcaaactaaacaaacaccaacgatcttggggatctgatcagtattgtttctctatatttcccccattttggagaattaaaaaaaacttcacaaaatggttaaattaagcaaactgctagatatatataggagatcaaagccctaggggtttattttcaccagagactaagtcaatacccgaaccaccacatcagcttgagccaagcctagcgcaaggttcgttcttgacttgatccctctgcaactcaccccatttaatttgctcatctatgcaaatatactccacacactatatataacttaattttatttttatcctcgctcgcatatcgtctctcgaaaactctacctgatcaacgattgagttgcatccatcagccagtttcgggccgcccccgcccgccgcggaagtcctctcagtcttctaaccttcaaaagttagacatttgagatggcatccgattcgactcaaaaatggtcgagtcggaatccacgtcaaatgtccactta

SEQ ID NO: 10682 - DNA, 166 bp, Oryza sativa
  unsure (1)..(166): unsure at all n locations
  Clone ID: PAT_MRT4530_1697C.1
ggtacaagacgnattatttggnacatatttattttagggccanatatgtnggnacacatcattcacatagntaatttagataacagtccnangggggcccaccactataggcagatccagaaccgnttccagngccanctncnatatccatggccacctgggncac

SEQ ID NO: 10683 - DNA, 223 bp, Oryza sativa
  Clone ID: PAT_MRT4530_16980C.1
ggagtgtgtgttggggggaatcgcgccagggacgtgaggggggtttattttaaatcaacgggggttataaaaaccaacaacatttccttttcaccaatttccatccattctatttcatttattgcgccatacactaaattcacaactataattaaattacccattaccagtccgtatacaaagcgaagaaccttgctcatagtcactctacatgactattccc

SEQ ID NO: 10684 - DNA, 1375 bp, Oryza sativa
  Clone ID: PAT_MRT4530_16981C.1
gcaacgcaaatcatggtgcaagagggcaagctagatttgctattgaaaactctagaataaaatgagaggaaaagagcggaggcagaagagagagctcgagcagatctgcaagatctcaaggttacggtgaaggcgcaacttccccaagtggagaaatgagtccaggatctgaatacaatgctgaggaatccgagtgcgaaggtggatcagctggagagcagcatattatgtcaggcgaagatagagaacatggtgggggagatcaaggaggaacactacagggcttctccatcacagacaccttttgctaatccataatttgataatattcgattcctttttcatatccgggtttccaattccgaaaaaagttatgaaaatgaatatgatagagctagtttccaaccgtattcgatccgttttcatccctagctagaagtgtacctccaatgacttgtccctagtttaacagagataatcctcagatgtggcatgctaattgtgaggtatatttcaatgtatatggaattcctcctggtcagtgggtcaaggtggccactctaaatttcgtaggcgatgctgtattctggttacagacttacagtcagtcagaaaccaacttattggagtgacatggtatgatttgtgtgagagtgtgcactcgttttactagagacatgcatgaagctttgattaggcaatggatccatgttaggcagactggcaatagataatgtggagcgctttgatagcctaatgcaccaattgcttgcatatgaacagtatgtacccactgtgtattttgtcaccaaattcgaagaaagtctcaaggatgaaattaggaggggaattttggttcaaaggccccaagatatggatactgattattctttagcactgttgcatgaggaagctttagagggagtgaaacctgtgtcttacacgaaatctgaacataattcctatgttaggacagtgaataggaccactggtcaaactccagtgaatgttacacctgaagataaaagaaatcaggatttcaacagaagcaaagatgacaggctatcttccttgaaagcatacatgagaaccaagggcttctgttttacttgtggagaaagatggggcaatgatcattattagtgttccacatcagttcagctctacgtggtacaagagttactggatattcttcaagaggaatcaacaactaatcagaacaatggcatttatgaagaagaagaggagataagtttggtagctatatcagaacaagctttgaatggtactgagtcaagcaattctattagacttaagagggtggtactgaatactcgtttattaagcttaattaattcgtcattagcacatgcgg

SEQ ID NO: 10685 - DNA, 854 bp, Oryza sativa
  Clone ID: PAT_MRT4530_16982C.1
tttttttttcaagagagttttttttaccttggatttagttcatttgttatccaaattagcatccatcactcaagcggtttcaacagttgacaaagctatttctgttcttcacacagcacaaatggtaatgacagcacaaaaagtccacaatgatattggacagttcttcaaacattccattttaggttatatcccataaaatccgatattttctggtgcaataatctgagattttgcaaactactatgcggatgtgcatgatgaatcgggtagtaactttattaggccaatgtcctcaaagcaaagcagggtactgcttggcctgaacacgaacacgcctcttatattctggtttgtcctgtataaaaatgtgataaccgtcagtctgtgcaggatcagcaggatttggctgatcaagcaagtcctgtattccaacaaggatctgctttacagtgatagcaggtctccagccactatcctcattaagaattgagaggcacactgttcctgaaggatagacatttgggtggaaaaagccctgtgggaacttgcacttgggtggtttgctaggatagtcctcactgaagtgaagggtaagagggtagtacccaccttcccaatcggtcccctgcttgccggggatggtgcagtgccagatcatgaggttcgccgacccgtcggccatcgtctccggcttcgccacgaacccgtgagggtggttcttccgccaggccttgcgctcctccgcgaggcggccgcgtgcgatccctcccgacatggcggcggcggcgggtggttgctggtgttgctggctggggcgggcttggctctcgctgggaagcctcgtcccgtgc

SEQ ID NO: 10686 - DNA, 1180 bp, Oryza sativa
  Clone ID: PAT_MRT4530_16983C.1
cgggctgcaggcctcgtcgtctcctcgcgccgccgccgccgccgccgccgcggggaagagctagccctagaggagaagtgggggtgagttgggagagaggagagggggcgagatgttccggtacgagaagggcggggacgtcgaggcggggacctcgggcggggcgagggagctctacccggggatgacggagccgccggagatgcggtgggcgctcatccggaagatctacgtcatcctctccatgcagctcctcctcaccgccgccgtcgccgccgtcgtcgtcaaggtccgcgccatctcccacttcttcgtctcctcccacgccggcctcggcctctacatcttcctcatcatcctccccttcatcgtgctctgcccgctgtactactaccaccagaagcacccggtcaacctgatcctgctcggtctcttcaccgtcgccatcagcttcgcggttgggatgacatgcgccttcaccagtggcaaggtcattctggagtctgcaattcttacaacagttgttgtgtttagcctgactgcctacacattctgggctgcaaagaggggccgtgacttcagcttccttggccctttcctcttcgcctccctcattgtgctgctcgtgtttgcgttcattcagatcctattcccgctgggcaggatctcccagatgatctatggcgggatcgcgtcgctcatcttcagtggctacatcgtctacgacacggacaacatcatcaagcgctacacctacgaccagtacgtctgggccgccgtctccctctacctcgacgtcatcaacctcttcctctccctcatgaccctcttcagggcagccgactgagttcctcgcatcgcgtcacatcgtgttcatatacgttttcatcagtgaatgtgaaaatgctctgcctttatcatgagtcgcgtacccaaaaacaacaattgtatagatgccacaagtaggatggtcttttatcatgctgtgttcaacctagtgatcttatctacgtaggaaatgcgaacaaatttagattctatatggatatggaggtgatgttggatttgggttaatttgcttgatgtatggtggacggatggatcatggatggcttggtttacctttggatgaatggaattgcttctctctttttaccattgttttaaaaaaaaaaaaaaa

SEQ ID NO: 10687 - DNA, 610 bp, Oryza sativa
  Clone ID: PAT_MRT4530_16984C.1
ggccgccatggagcagacggagagaacgcagatcgacgtcaggatcgccgtcgccttgctccactgccatgcttgcctccaacctctcaagcctcccgtcttcaagtgcgatgaggcgcatatcgtgtgctccggctgccgctgcggccaccatgggcagctgtgcggtggcgccgccgtgtacagccactgcgccgagctggacgccgtcgtcgccactgccaaggtgccgtgcgcccacgcgccgtacggctgcagcagctacgtcgtgtacgcgggcgtcgccgaccaccagcgcgcgtgcccgtgcgcgccatgctcctgcccggagcccggctgccgcttccgcagctcgccagcggcgctccccggccacctcgccgccggccactcctggcccgtcgccgagatcgcctacgggaagccgcgcaagctcgccgtgccgccgcccgcccacgtcctcgtcggggaggccgaccgcgccgtgttcctcgtgtcgtcgtgcgccgtcggcgcgggcgccgcggtgtgcgtggtctgcgtcagggcgaacggcggcggcgacaacgcggcggcggtggcgcggtacaagtgcaagttgtgggtggag

SEQ ID NO: 10688 - DNA, 249 bp, Oryza sativa
  Clone ID: PAT_MRT4530_16985C.1
atggcctggacaggctggttttattcatgcaagaggggtgggtggggccacgacgaggcagctcagataaactggagccgtgttggcgaaatgatgggtgggtggcagctgccggtgcggtggcgctgccaccgtgccatgtgtggggtggattgccgatttgctgggtgctctggggctttgacatccatgatgaattccatccaccatgtgggctgtggcgtcttgcctgcctgcccatctatttga

SEQ ID NO: 10689 - DNA, 144 bp, Oryza sativa
  Clone ID: PAT_MRT4530_16986C.1
atggcggcggatgacggtcttctgcttggtatcgccctccggaggttgattgccctttgctcggcctggagtagagttaggtggagcaggaggagcattggtgctgtggatgatatcgtcaatgttgctgttggagctgactag

SEQ ID NO: 10690 - DNA, 1644 bp, Oryza sativa
  Clone ID: PAT_MRT4530_16987C.1
atgcctgtaacgaggaggcgcgccgccgcagcggtgacggcggtgctggtcgaggaggagcgcgccgcagcgatcgacatctcgtcggattctgacgccggatctgagtctgggtcggaggaggacgacgaggaatccaccagcgacgaggactactacatcgacatcagcgacagcgacggcgaggaaggcggcggcgcggggagcgaggaggagtcggaatcggaatcggaggcggagcgggagcgggagccggagcaatcaggcgtggatcggggcgaggcctcctgcagaaaaatcgccgatctcctccgcgcggggcgaaatttggatgggattaagctggttgattgcaaagcatatttaaagaagaatggccttagccaaactggggacttggctacttgcatagaaagaatagtgttgcattggaggttcaaagatagggatccagagaagatctatccacgctcatccttttgtattaactgtaaaggtgccacctcagttggaaacaagcctttatctgtctgcatacgaaattatccaggtgatgtctgtagaggtgataccgttttattcaagcagaaggtttatgagaaaagtggaaaaaggcattcaaaatgtataggaaagcgaattgtagctgggagtgttattaaggaaagttatggaaaagagaagcagcagcacacttttactatccaagttttctggagcaaaggagtaggcaaattaccacctttgtatctgctacttgtcaaagggcgcaatctctacagaatgatgactttccgtcagccttggctaaatgaagcagatagatcgaaggctctagatgagaagcacagcaggggagatgctgcaaggcgtgttcgtgcattgagtagacctgatgctgcaggaaacagcaagaaaacgacgcaaaagggaaaacatcaatctcaagcaggacggcctgatagtggaagcagtatcaagaaaggcaagaagcgtgttatgcagtcctccaatcctgatctccccacaaaaagatccaggaatgaagagagccaatcgtcttccgcaaaacaattcgctggtggtcagaacacgaagacaagtcgtgcccggctggatagaagtgatcgcagcaccaacagagctaggatgagagaaaggaaagctgattcccagcaaaatctcgctggtggcagccatgctcaattcggagaaaggaatgcaggttcaggttatgatatgcaggcaagtcatggatatctggttggagtgcagcagtctccctttgagatcgtgaggccccagaggccacctccattccgtgaagttggcaatgcctcgcaacctcacgcagatggcagatcaacggcatgcccacaccctaggatgggtttccagcatccaaatgcggcattggctggttcgcatccacctgcttattatctgggaaacacaccgaatcaatttccatcatttgcatcactcaatgtgcgacaaactgtacaccaccatcctctggatcaacttggagcgtcatttgcaccattcaatgtgccacaaactgtataccgtcctcgtccggaaggaggatatgtgatgccacagttcagatattctggtggtagcaatggttttcctcggtag

SEQ ID NO: 10691 - DNA, 101 bp, Oryza sativa
  Clone ID: PAT_MRT4530_16988C.1
atgacggttctgtccaccatccattatgatcccaaggatggcttcccgccattgagtcgtcatggtttactgaggacgtccaccttcccgcctctcgggaa

SEQ ID NO: 10692 - DNA, 182 bp, Oryza sativa
  unsure (1)..(182): unsure at all n locations
  Clone ID: PAT_MRT4530_16989C.1
gattccgccgagaagaagatgcagaccgctgctancagtgtcgttggattgtcggccgtgttgcccgctgctgtnaaagggcgcanctgcaaattcangctcctcnccgtgttgcgttgccccttccttccgcggcggcggcggtggcaatggaagctgcggaagtggantacanctctaan

SEQ ID NO: 10693 - DNA, 780 bp, Oryza sativa
  Clone ID: PAT_MRT4530_1698C.1
ccgccgggtgttttccccggggtgataatggtgttccccaaccggtggggttgttccgggtgaatccaccctcccaatactatgccttgggttcctcgcggtggggttgaatcctccaacacatggcctttatttttgtgccgatgtttctgggtttcgtattattatgggtgtttggataagtctgccacctcgaatgagaaagtggaatcaccgcacacactgttgttccaggaataggggatggggttcatgcaccgctcacgggctgagtggaggatcccgggcactgggcggtcgcaaaataggtttgcatggggaatctcaaatgctggctgcctggcgaaagccggagcgtgtggccataaatggttggttgccgaggttggccaaactaatggtggggaataatggttgccgaaaacctaggtaataacggccgaaaaaccaaccaggatataaccatattcgttttcaggtcctaccagtacaccagggtcgagaagtgccactcgtgaaccccttgtgtatatgtgtagtgcgccaccatatgtaaagacacgccacccatatgagtgtggtttgtgtgtgtggctgattatgtgctgaattaaacccgtgtgttatcagattaattaagcagctgggtgcgcttcggcgactatgcgtggtatgcaacgtgatggaatttgtgtgatgtgacgtacccgtggctattctgcagtgaaattaatcaatcgtgtattcgtgtggtttgcctaaaaaaaaaaaaaaaaaaaa

SEQ ID NO: 10694 - DNA, 265 bp, Oryza sativa
  Clone ID: PAT_MRT4530_16990C.1
ggggtattacgaaattattacctgtgtgtgctggattccataatcccatattcaaagacacatactcggtcgaagcagtgcccaagtttttgcggactcacaagccctgaacccccgcccgggggtcctgacattactccattacagccagtcaacaccccctacaacatcggcggctaagttacaaaacggcccccagaacgatctcccgccggcagctagcaatgcatggcagaacctctcgaggatgaaagggggggagagg

SEQ ID NO: 10695 - DNA, 294 bp, Oryza sativa
  Clone ID: PAT_MRT4530_16991C.1
atgcccttgcctcccccgccgtcttcctaccctaccctcgccgcctccttcgacgccattaatcgcctccatcgcccgaccatctccctcgccgcgtccatcgcctccagcgccctcacggccctctgccccatccgcctcctccgcctccagcgacctcgggtgtggctgtggcgattcgccggtggagcagggtcagtatgcaagacggtggcgtgcgtgaaggggatctgcatgccggcaaaggggttctcggtgtataggtgcgacgtagaagcagatgcacgtgagtga

SEQ ID NO: 10696 - DNA, 222 bp, Oryza sativa
  Clone ID: PAT_MRT4530_16992C.1
atgaagcgaacatgtgccttgctaccgtcgtccttggtcgccactcagttttcggtggttctctcaagcggtggcggggtggagggaaatttacatggttatccttatgaaagggacatttacatggcatatactcttcgccctgcatccttcgcccaagaggcctctggcttggcagagtacccgcacgatcctccgcctctcgccgtccttgttccatag

SEQ ID NO: 10697 - DNA, 597 bp, Oryza sativa
  Clone ID: PAT_MRT4530_16993C.1
atggaggaggcggaggagatgcaggtggagaggatgcaggaggaggtggagggaggcggcgcggatacggataagctcagctacgagattttctccatcctcgagagcaagttcctgttcgggtacacggacccgcaccagctgtggctgcccaaggcgccggcggcgcaggcgtcggcggcgacggccgtgccgtcggggaaggcggcgcagcgtgggaaggtgtgcgtgctgtgcgtggatggcggcggcggcgggctgcgggcgctgctctccggccgggcgctggcgcacctggaggccgcgctccggcgcgcgtcgggcgacccggacgcccgcgtcgcggactacttcgacctcgtcgccggccgcggcggctcgacgtcgctcttctgccgacccaagaagcggcccctcgcggcgccgacggcggcgctggacgcggccatgaagacggcgttcggcgaggagctcaccctgcgggataccatcaagcccgtgctcatctcctgctacgacctcaagtcgtccgcgccgctcgtgttctcgcgcgccgacgccctggagagcgagagctacgacttccgcctcttcgag

SEQ ID NO: 10698 - DNA, 1225 bp, Oryza sativa
  Clone ID: PAT_MRT4530_16994C.1
gagagagagaggaagacgacgacgacctttgttgtgctcgccgcctctctcttctcttctcctcatcctcctctttagcttcctctcgcgctcgccgtcgctctctctctctctctatcgggcgcgcgcctttctgtgttggtcgtctctttcctcgcgtgctctgccgctgcgcaagaatcaaaaggcgccggccactagagagagtgtgtgtttgtgtgtgtgtgtggcttgagttgagagttgagagaccaatcgaccatcggctgtgatctcaaaagagagagaggggcaaagcgaagtgggcagacttgggcggcaatccttgcgaatcatcaagggattctgtcttttctttggtgcgattcgattgtttctttgtagggggaagggagagaggagggggggtttttggcaattggcatggaggaggcggaggagatgcaggtggagaggatgcaggaggaggtggagggaggcggcgcggatacggataagccccgctacgagattttctccatcctcgagagcaagttcctgttcgggtacacggacccgcaccagctgtggctgcccaaggcgccggcggcgcaggcgtcggcggcgacggccgtgccgtcggggaaggcggcgcagcgtgggaaggtgtgcgtgctgtgcgtggatggcggcggcggcgggctgcgggcgctgctctcctgtcgcgcgctggcgcacctggaggccgcgctccggcgcgcgtcgggcgacccggacgcccgcgtcgcggactacttcgacctcgtcgccggtacgggcgccggcggcgtgttcgccgcgatgctgttctcgacgcactcgcgcggcgcgcctctgttccacgccgatgacacatggcgcctcgtggctgaccacgctccccggctcttccgcaaggccgtcggcggctcgacgtcgctcttctgccgacccaagaagcggcccctcgcggcgccgacggcggcgctggacgcggccatgaagacggcgttcggcgaggagctcaccctgcgggataccatcaagcccgtgctcatctcctgctacgacctcaagtcgtccgcgccgctcgtgttctcgcgcgccgacgccctggagagcgagagctacgacttccgcctctgcgaggtcggccgcgcggcgtggtcggaggccggccgattcgagcccgccgaggtcgcgtcggtcgacggcgccacgtcctgcg

SEQ ID NO: 10699 - DNA, 322 bp, Oryza sativa
  unsure (1)..(322): unsure at all n locations
  Clone ID: PAT_MRT4530_16995C.1
atcgtttttannggctacagggaggcatctgggggagatctgcatgagtgaggacgccaagcacgtcaagacaaacctaaggctgctgacaaacctggccganananacgcagacacacaacaggacagacggacagcccttgatatcaacatacggcgnnntnatccgccgacggccggcgtcctcatcaccggggccagcgctcgagcgcttccgggcatccaaaaataccgcgtgaggaagctggaaaccctgaaaccacaccagggaggacgggaaggagtccgacccccaccgggagaggacgaagcagaagccggc

SEQ ID NO: 10700 - DNA, 362 bp, Oryza sativa
  Clone ID: PAT_MRT4530_16996C.1
ggtaaaactagatctgaaaggatttaactgcacggcgtgtatagacatattgccgaaggtaccgcacacatctagcactgcaactggacagatgctctagtctctcataatctgaaaacctgcctagacagcagctcagacacacgtgccatccataaaacattcaagaccagccagtcgccgacgcgccgtcatgccggcgacggctagctctcgccggccacgatggcgactgcggagctagctagctagaacgtgggcagtttgaccttggcgcgtgccttgccttgcatactgagttggccgtagacgagcttgttaacggagcggtcgtcacactgttacacgtggaacagctgggt

SEQ ID NO: 10701 - DNA, 1646 bp, Oryza sativa
  Clone ID: PAT_MRT4530_16997C.1
tgcaggaattcggcacgagggttcatctccgcggggctcaactcaactgaagtctggtgcagtgcagggtagtgtagtgtagtgtagtgtagcttgttgattcgagctgcattgcgctgatggacttgaagagggttttggaggtggaggaagaggtggtcgacggcgacgaggacgagctcgcctccccggaggccaagcgccggcgaactttcatcaataatagctcgatgcaggaggccattggcgcgcagtacatgcagaggcatctgcccaagctggagccgtttctgcgcagagttgtgcaggaagaggtgcagaatgttcttatccgccacattgattcggcacacaggcttccccttcagctaaagacaagcagtaaacgatacaagctgcagttccagggcaacctgcctctgaccctcttcacaggcaacagagtggaaggggagaacaagcagcctctccgaattgttctcaccgacgctgtcagtaaccagacgatcacctccggcccgctgtcctccatgaaggttgagctcctcgttcttgatggcgatttcaacgctgacgagcgcttggagtacaccgagaaggagttcagcgagagcatagtctttgaaagggaaggcaagaggccactgttatccggcgaggtgatcattgtgcttgagaaaggtgttgcatctatccgcgacatttctttcacggacaactctagctggataaggagcaggaagttcagacttggtgcgaggatctctcgggccagctccatcgaagaaagagtgcaggaagctgtcagcaatccttttctcgtgaaggatcaccgtggggaagtttacaagaagcatcatcctcctgcactagctgatgacgtttggcgtttggagaaaattgggaaagacggcgttttccacaagaagcttgcagactttggaattcacactgttcaagacttcctccggaacttggtgatggatcaatatggactacgtagtttacttggcagtggaatgtcaaacaagatgtgggaagcaaccgttgagcatgcacgggagtgcgttctggacgacaagctttactcctactgcagcgggcatgggataatccttctcttcaactgcatccatgaggttgtcggtgtgatcgttggaagccactgcttcactctgaatgctcttactccaacacagaaggcgctggtggtgaagttgcagcaagacgcctacaagttccccaaccgcatagtggaattcaaggtgcagtcccagtgcaccagccagtcatcaccaaccaccatccagtcccagtccgtgcagatgccggcttcagagaacgcacagattctgaacctacctcaaggtgcccattgctttccatcaggtgagctgccgagctcttcacaggactgcttgctgaatccgctccagtaccagccgctcaacgaggcgctggaagacgtcctccagacagccggcggcagccaccaccaacaccagggtggtagcggcgagctgccatggatagcgtcgtcgttcggagcgggcggcttcgtcgacgcgagggaccctttcgacgtgcagttcagcggctcccagccgtgcgggctgctgctctccagcagcggcgccagattgtga

SEQ ID NO: 10702 - DNA, 194 bp, Oryza sativa
  Clone ID: PAT_MRT4530_16998C.1
aagttgatggctgatggtgatggaatgtatgtctggttggttgtggtgctgggcacaccatggatgaaatccaccttctgatgggtaacaaaccagtaagggtagtctgatcttcggggttgtactgttgtaaactcttttataagaaaaaaaaaatattagtcagtcattttgaaaaaaaaaaaaaaaaaaaa

SEQ ID NO: 10703 - DNA, 285 bp, Oryza sativa
  Clone ID: PAT_MRT4530_16999C.1
atgcaggcaggcaggcaggccaggacaagccaaagagagacggatgcttctctgctcagccacgacgctgctgttgcaagagatggcgccacaggtgaagcaagagctgtttgggctggccaaagaaagattttgttattggggaggaagatgaagaagaagacgaagacgaagacgaagacgaagaagaagaagaagggaatggcttgtgtaggagtaggaggagaaggtgagcaaagtgcatgcgatgctgctgctgctactgctgctgtctgctacttctag

SEQ ID NO: 10704 - DNA, 4251 bp, Oryza sativa
  Clone ID: PAT_MRT4530_1699C.1
atgtcgaacgaggtgaaccatgtagggaaggctcccatgtttaatggcacaaactattccacttggaaaattaaaatgtctactcacctcaaggctatgagcttccatatttggagtattgtggatgtaggctttgctatcaccggcacgcccttgacggagattgatcaccgcaacctccaactcaatgcccaagccatgaatgctttattcaactgtttgagccaagaggagtttgatagagtgagcaaccttgagaccgcatatgagatttggaacaagttggcggagatccatgagggcacaagtgagtacaaggatgccaagcttcacttcctcaagatccaatatgagacattctccatgctcaatgtcattgtgaatgatctcaaggggcttggtgcaaactacactgttcttgaggttgcccaaaagatgcttagggctctaccggagaagtatgagacccttgttaccatgctcatcaactccgacatgtcaaggatgacaccggcaagcctcttggggaagatcaacaccaatgacatgtacaagttgaagaagaaggagatggaggaagcctcaccttccaagaagtgcattgctctccaagccgaagttgaagacaagggcaagggcaaggtgaatgaagccaatgagaacttggaggaagagattgcccttcttgctagaatgttcaatgatctcttgggaaggagaaaagagagaggaaggggctccaactcaaataggagaagaaatagaagacccaacaagactctctccaacttgaggtgctttgagtgtgactcaaatgaggagagctccgcctcatccgggtccgaggaagaagatggtgatgatgcaagctccaagaagaagaagatggccgttgttgccatcaaggaggctccatcactcttcgctccactttgtctcatggcaaagggctcttctaaggtaacatctcttagtgatagtgagagtgatgatgattgtgatgatgtttcctatgatgagcttgtgagtatgtttgaggagctccatgcttatagtgagaaggagattgtcaagttcaaggccctaaagaaggatcatgcttctttgaaggtcttgtatgaggagctaaagacttctcatgagagactcaccatttctcatgagaagcttaaggaagctcatgacaacctcctttccactactcaacatggagctctcattgatgttggcatatcttgtgatttgcttgatgatagtgctacttgccatattgctcatgttgcatcatctagcatttctacctcttgtgatgatcttgtggatatgtctagctctagctctagctcttgtgtttctatttgtgatgcctcacttgttgttgagaacaatgagcttaaggagaaggctcatgatggtggcattgttgctagatatatgggttcccctatactcgatggtataaagaatgccatttgggtgcccaaagctttggtctctaacctccaaggatccaaacaagtttgggtgaactaccacaccggtaggagccattgggtgcttcatagtggatgcactcaacacatgaccggtgatagggctatgttcaccatatttgaaataggagagaatgaacaagagaaagtgacatttggagacaatagcaaaggaaaggtgaactaccacaccggtgggagccattgggtgcttcatagtggatgcactcaacacatgaccggtgatagggctatgttcaccacatttgaaataggagagaatgaacaagagaaagtgacatttggagacaatagcaaaggaaagtctattgttgctgagcttttcaaaaagtttgcaaaaagggcccaaaatgaatttagttgcactcttgtgaaaattagaagtgacaatggttccgagtttaagaataccaatatcgaggactattgtgatgatcttggtattaaacacaaactttccgctacctactcacctcaacaaaatggtatagtggagaggaaaaatcgtacattgattgagatggcaaggactatgcttgatgaatatggtgtttccgattccttttgggcggaagccataaacaccgcttgccatgcaaccaataggctttatttgcatcgtctcttgaaaaagacttcctatgagctaattgttggtaggaagcctaatgttgcctattttcgagtttttggttgcaaatgttatatttaccgaaagggtgttggactaaccaaatttgaaagtcggtgcgatgaagggtttcttctaggttatgcctcaaataacaaggcataccgggtctataacaagaacaaaggtattgtggaagaaaccactgatgttcaatttgatgataccaatggctcccaagaggggcacgagaatttggatgatgtaggtgacgaaggcttgatgagagctatgaagaacatgtcaattggagatgtcaagcctattgaagtggaagacaagccatccacctccactcaagatgagccatctacttccgctacgccaagtcaagctcaagttgaagtggaggaggagaaggcacaagatccacctatgccaccaaggatacacaccgctctttccaaggatcacccaattgaccaagtgttgggtgacattagtaagggtgttcaaactcgatctcgtgtcgcttcgatttgtgaacattactcgtttgtttcttgtcttgagccaaaacatgtagatgaagctctttgtgatccggattggatgaatgctatgcatgaagagctcaacaactttgcaagaaacaaggtgtggacttttgttgaaagacctagagaccacaatgtcatagggacaaagtgggtctttaggaacaaacaagatgagaacgggttggtggtgagaaacaaggcaaggttggtggcacaaggtttcacacaagttgaaggtttggactttggtgaaacttttgcccccgtggcaagacttgaggctattcgcatccttcttgcatttgcatcatgctttgatataaaactatttcaaatggatgtgaaaagtgcttttctaaatggtgaaattgccgaacttgtctttgttgaacaacttcccggttttgaagatcctaaaaatcctaaccacgtttacaaactctcaaaagctctttatggtttaaaacaagctcctagggcttggtatgaaagattgagagattttcttttgtcaaaggttttcaaaattggaaaagttgacaccaccctttttacaaagatcattggtgatgatttctttgtgtgtcaaatttatgttgatgacatcatattcggttttactaatgaggtattttgcaagaaatttggtgatatgatgtctaggaaatttgagatgtccatgattggagagttgagcttcttccttggacttcaaatcaagcaactcaaggatgggacgttcgtgagccaaaccaagtacatcaaggatctacttaaaaggtttagcttggaggatgcgaagcccatcaagacacctatgacaaccaatgggcatctcgaccttcatgagggaggtaaaccggtagatttaaagctttatcgttctatgattggtagcttgctttaccttaccgcatctaggccggatatcatgtttagtgtttgcatgtgtgcacggtttcaagccgctcctaaggagtgtcacttagtggccgtgaaaaggattttaagatatttaaaacattcctctactattggcttgtggtacccaaaaggtgctaagtttaaatttgttggctattccaattcggactatgccggttgcaaagtggatagaaagagcacatccggtagttgccaaatgcttggtagatcccttgtgtcatggtcatccaagaaacaaaactccgtagccctctctaccgccgaggcggaatatgtttcggcaggtagttgttgtgctcaattgctttggatgaaacaaatattgttggactatggtatatccttcaccaaaactccacttctatgtggcaatgatagtgccataaagatagccaataacccagtccaatattctagaactaagcatattgatattcgccatcacttcctaagagaccatgttgccaagtgtgacatagtcattagccgcataagaaccgaggatcaactagccgacatatttaccaagcctcttgatgaaacccgcttttgcaggttgaggaatgagttaaatgtcatagatttctctaatgtggcttga

SEQ ID NO: 10705 - DNA, 795 bp, Oryza sativa
  unsure (1)..(795): unsure at all n locations
  Clone ID: PAT_MRT4530_169C.1
canatttccagagaaaaaatagcatcttgtactgccctacatttataacacaatggtgcatcattaattaatttgggaacctgccaagatcactaattttctggatgcactatgctatagcatagccttatgtagtgtacctcatccgcagtctcatccgcagtctctagactgggagcacatgcaaatcattaccccaatatcgagggttggtgaattatctctagaatagggaacacatgcaaattaataccacattcagggttgtgaatgtctctagttggttattatcttaaggcttaagaagctcactgcaggcctactactgcctcacatctcatatcatgcaagacaatatggcacaaatttctcacatgtactatgtacctgtgtcttactaattttcacaacgatgagctactacacatgcatggcttcagttgagaaagatatatatcggggaggctcaaattctacttgatgtgaagatgaagatgaagcccaaatcaaaacgtttagatgctaggatcaagtttttaccagaaatgttgttcgttctgagttgtggcttacaaggattgctttgaaatttactacttttcagccaatttacattgcaaacacaaagttcataacctacaaaggttcagttagttgagtccaacaagtctatttacttggtttgtgccgaatctagtaactaggattgaaattgttggcactaaagggtgtctttgtatactcaaagggcttaatgtaagtggttcactgccacgtcaagaatattctgccaat

SEQ ID NO: 10706 - DNA, 387 bp, Oryza sativa
  Clone ID: PAT_MRT4530_16C.1
atggaggaagaagatgaatctgacggtgggtcccacgtgcaaatggggaagatgatggaaaacttgacggcgattacatgcacgcgccattgtcttctacatgcatggcgaagtgtggtacctgaggtagctaaggtggtctaccaaggtgatcacgactgccacagcaaccgctttgctaagatacgtcgacgacatagacattgctctgtgtcggcgtgtgatggattcgtgcattttcttgtaagttacagtgtaatttatgaaacttacactgtaacttttagcatcagcagtaataggagactactactggttgttgcctcctctatggttcatcagttccctgatggatctccccagctagggcctgtacaatctgccatg

SEQ ID NO: 10707 - DNA, 2141 bp, Oryza sativa
  Clone ID: PAT_MRT4530_17000C.1
gttcaagatgaaaagggccgcccttttttttttttttttttttagttacaagaggatgtaaattaaatatgctttgtgtctgaggttgcatttacacacttggcgtgcagttaaaggggttcatctatgtaatattagtgaatcataaaatattttcgaattcaatttttgtacagtcctacaaatgccatacatagagtgacatttttgggtgggtcgatcaagaagcagcagtgctccctttgtatcgcatggcgcagaagacaaataagagcaggtcgaggagcaagagagcagccatgagccagaagaagtagtcgaggtgtcccttgttgaggtcgtcggggatccatccggggtcgccgccgcgcgtggtggcggaggcgacgacggcgaggaggaacgcgctgaggtagttcccggcggcgatggcgagctggccgagcgcggtgcacatgctcctcatggagcgcggcgcctggtcgtagaagaactccgacttgccgatgctggtgaacaccaccgccatgccgtgcatcagctgcgccggcacctgccacaggatgctcgtcctggcggcgccggcgcgcgccgccgccagccgccgctcctcgaccagcgccgagtaggccatgatgagcgcggccacggcgaggccgacgccgatgcgctgcagctgcgtgatccccttgggcttgccggtggcgcggcgcgccaggggcaccagcgcgacgtcgtagacggggatccagaggaggacgccgatggagtggaaggtggcgagcgaggccggagggatggtgaaggggcccacgcggttgtccatggccgtgccttgctccaccagcgtcgacgacatctggctgctcaccgagaagaagagcaccaggcatgcccagatggggcacatccgcaccagcatcttcacctcctccacctgtgtcactgtgcactgccgccatcggctcaccggcgccgccgccgctgccacgttacccttctccccgcttaacgacgatggtgtcaccactatcgcagccttgtccaagaacctgaattgatcagtatgcttaatccggtgatctgcgacttgagcctcatacagaagcgagctatcatccggcaactccaaatgccatttcctgacggcggcgaccaccacctggcagacaccggtgagtgggctccccctgaccggcctgtacctgtaaaccctcgagccggcgaagaagacggcgaggaagaaggccatgaccacgacgacgatcacgaagctgatcccccagcccacattgtcctgcagccagaccagcaccgtggacgccaggagcgacccgctgttgatcatgaaggtgtaccagttgaagaaggaccccttcctcctcagctccgccgcgtcaccgccgtcgaactggtccgccccgaacgccgacgtgcacggcttcacgccgccgttcccgaaggcgacgaggtacagcccgaggtagacggcgacgctgtgaagctggtgaccggcgtcggaggacgtcatgctggatgggagtgacgtcgacgccattagagtaagcaatcccaggatgtaaatcgggagaaaagtaagaacagtccggtatttcccccaatatgtgtcagccaagaaagctccaaagagtggcgtgaggtagcaggcgcccgaccaagcagaggaattcctcgcggcgttcactttgctctcgtggagaatcttggtgaggtaggtcaccaggttcttggagatcccatagtaagccaaattctcactgaattcgacacctaggatcatgaagcatgctctccaattccccgtgctgcgcttgagagcaggctggttgttgacgtccaccgatccatcacctgtatactctgaatctgcatccccccgtgaaggttgaggttgaggttgaagcagaggcgccctctcctcatctgctgcttccatggccatctacctgatgagaactacaccttgagaattcagagtgagcacagaggttggagtaggttgatgttgatgaattagctgtacggagcagctcgattccatgccagcatagctactagtagtagtagctgagcaggagggaggcagggagagatagagaggggaggataagaaattttgt

SEQ ID NO: 10708 - DNA, 283 bp, Oryza sativa
  Clone ID: PAT_MRT4530_17001C.1
cccacgcgtccgctctagacaaggtggaccaccgcaacctcctgcccggccaaggctggtactggtccaaggacgagaagctcctcgtctgcaactacctccccgccggcaggctctccgccacgctccacgggagccggggcaccgggaggaggacgatggactgggacgcgcggatgcgctccgcgctgtctgccgcgcgcggcatttctcacttgcacgccgcatcacatgcgttctcaccgcaaccttaagtggtacaacccccctgtgcagccttgcc

SEQ ID NO: 10709 - DNA, 336 bp, Oryza sativa
  Clone ID: PAT_MRT4530_17002C.1
atgaccctccatgcattttactcaattaaactgcactacagaaaaggggtgggccacctgggtgaaaaggacccggcgggtgagcgggcgctcacccccgcatcacccggggtgcacaaggctgccaatgttgaacggcaactcagaaagaatgaaagatggcatggggtgagtcaagcactcggacagtcggacggcatgcctgcaacgcgcggcgatggcgctccactccggctcgatgttgcgggctccggcgctctggtcgccagcgtcgcgctccgcttcgccgccacgccgccgccgcacgcaatgggcgcccgggagctaccaaactaa

SEQ ID NO: 10710 - DNA, 576 bp, Oryza sativa
  Clone ID: PAT_MRT4530_17003C.1
ggaaaaaagattcacatggaaaaaacggggattcgtatttttcctcgggtacatgggaaaaacaggatgggatattaaacaacacaatttttttgggggccccaacaaaatttacaggaacaaattttcaatcctacaaaccccggggtgggattaccggaaagggggcgtttcctaaattaaaactctggcccaggagcttatgcttttcatagaacaaacttttatcgaaggggggaatggatatacaaattttcaaacgttataaacacgttccacttttttaaggacaaatgggattcttctcaagcccctaggggtccaaaaacgggatgggctccacaagggggggggaggcataaacccaaccacaaggccttccgaaaaacccctggacatggaaggggccaatcccagcctttttttccgggtccattccagtttaagggaagggggccagtttttcccaaacattatcacacatattttcaatatttgggaaattgcacatgggagggggccccactttcccaacggggccacaaccagggctccctggaaaaacatagcttccat

SEQ ID NO: 10711 - DNA, 348 bp, Oryza sativa
  Clone ID: PAT_MRT4530_17004C.1
tttttgtttttttttttttttttgtttttttttttttttttttttttttttttttttttttttttttgtcttttttttttttttgtttcactatttttattgactttcttggtttgaagcaaaatagcactgaaacacaaactgagctatgggctgcagcaggaaaagcatacatgagaccaaagcataaaagggcaagcatcataagggtcgaaaaggacagggggtgctgcacccattgaaaagggggaaaaaaatgttgtcgctgcaatagggggcctagaaggcaaacgccaaacattggtcatggagaacaacaccccacggggcgctcattgcctgaaaaac

SEQ ID NO: 10712 - DNA, 200 bp, Oryza sativa
  unsure (1)..(200): unsure at all n locations
  Clone ID: PAT_MRT4530_17005C.1
agaacctnagtccgggancgccgntggggttccgancccttcgaaggggggggggccccgggtanccccnaatttccgncccccttantaagtggaggtccggtanttaacgncgncgncttcaacttgggncccggtcgntttttaacaaacggtccggtggaacttggggaaaaaccccntgggcggttaccccaatt

SEQ ID NO: 10713 - DNA, 705 bp, Oryza sativa
  Clone ID: PAT_MRT4530_17006C.1
atgaaccggaaatacttggggaaaagaacaggtgaggagaggcgaagccaaccgccatctaacctgacgatgatttgggacagatgtataacgaccgtcgacgaggctagtgttgatcatataacaactgacaagtctgcaccgaatctgattctccaccacatcgagccgccgcgccgcgtgcgcgcgcgcctccgcgattcgatccgcccgattcggtcccatctccgatcgcaacgcattttccgcagtctccggtctcccgtgcgcgagcgcgatcgtacatgtgtgttgggctcgcgcgatcggctgactttgctggcggcaacggctgcgttcttctttggagggacgcttcaacggacgcgtctcgcgcgcgcggctgaccaccaacaccacaccaaatgcggcgttttcttcttttctgctgccaaccgcccaaagtcagaaagccgaagccgtgcctgcacgacctccaccccgtttctcaccgcgccgcccaacccaaacctcctcacccttcttcgcgttgacaccgtcgtcctcctcgatctgcccctgactggtaacacgcggcgtacccatcatgtgggtatagtaaaatcaactggaactgtgcttgaaggacggcttggactctcaactttgaacagtcgattcgctgaagaaaaaaatttaactttgaacagtcgtgtgtctctggtc

SEQ ID NO: 10714 - DNA, 783 bp, Oryza sativa
  Clone ID: PAT_MRT4530_17007C.1
atggggcgcggcaagatcgagatcaagaggatcgagaacgcgacgaacaggcaggtgacattctcgaagaggcggggagggctactgaagaaggcgaacgagctcgccgtgctctgcgacgcccgcgtcggcgtcgtcatcttctccagcaccggcaagatgttcgagtactgcagccctacctgcagtttgagggaactcatcgagcattaccagaccgtcaccaacactcatttcgaggagatcaaccacgatcagcaaatatttgtggagatgactcggatgaggaacgagatggagaagctggacggtggcatcaggaggttcaccggcgacgacctctccaacctcacgctcgccgacatcaacgatctcgagcagcagctcgaattctccgtcaccaaagtccgtgcgagaaagcatcagctcctgaaccagcagctggacaaccttcgtcgcaaggagcacatcctggaagaccagaacagcttcctgtgccgcatgatcaacgagaaccatcatcaggcggcggtgggcggcggcgacgtgaaggcgatggtggagatggcgccggtgctgtcgatgctgacggcggcgccggcgtactacggcgaggagtcgtcgagcaccgcgctgcagctcaccccgccgctgcacgccgtcgacgccgccgccgccgccgggttccggctgcagccgacgcagcccaacctgcaggaccccggctgcagcagcagcagcttccatgccgccgccgccggccacggcctgcagctgtggtaa

SEQ ID NO: 10715 - DNA, 743 bp, Oryza sativa
  Clone ID: PAT_MRT4530_17008C.1
gaagtcagcgattgggcgaggaagtcggggaaggggatgagccgggccaatgccagtcgaccgccgccgccgccgccgccggcgagcggaagcggcggccgcctcgcagttctcgtgtctcacttgtcccaatcttctcggacggccggcgaaaaggaggccgcactcgccgccggcccctccgacggaccaaccatttttgacaaaattttgcggaaagagatcccatctcaggtggtttatgaggatgaaaagacccttgcattcagagacatatcaccccaagctccagtacatattataataattcccaaggttaaagatggattgtctaggctctcaaaggcagaagaaagacacgttgaggttatgggccatcttctttacgctgctaagaccattgcaaagcaggagaaccttcacgagggattcaggattgtcatcaatgatgggcctaacggatgtcagtctgtatatcacctccatattcatcttctagggggacgtcagatgaactggcctcctggataagttgtatattcccaaagaggtgctctgttatgaaaatgtaaccggtaacattctctttatctccatttgatgtgatgagcagtttcctttatggtatgtgctctgtaactgctatatactggtcttaaggttttccgtttcctgtttgcgacaacatagccatgtcaacagattgatctctgaagcagtggctaatttctattgacagccgc

SEQ ID NO: 10716 - DNA, 285 bp, Oryza sativa
  unsure (1)..(285): unsure at all n locations
  Clone ID: PAT_MRT4530_17009C.1
cattgtctccaacgctagncgcacccaccaactcactggctcctctcgccaaggtcntcaatgncagatttggcanagnncngggnntcatgaccactttccatgacatcactgttacccaggagactgtttcatgcgccctcgatcaaggactgcngaggtgcnagngntgctaggtanaacancattccgagnagnacngnagntgccaagnatntcggcaagntgnttnntgcnntnaatgtaaacggtgactggaatncattnncgttgatcccacagtcg

SEQ ID NO: 10717 - DNA, 1644 bp, Oryza sativa
  Clone ID: PAT_MRT4530_1700C.1
cggacgcttgggcgcgcggtcggcgctcgctcacgcgacacgcaccaacgccctctccccgccgtcgccggcggcaccaaacgccgactacgaagaagaagaagaagcctccctcgcaagcagaaggggatttaatacgccgccctgctcgtctgggttcctgggaacttctcttctgctccgagttgggctgacagtgcgctccgctccgctcgcgcctatccgcggattatatggcatcgacggcgctcggtggcgggactcctgctcgcctcggcttgacccgcaaggatgctgattaatttcttaggcagtgtgtggttacaacttacaagcagtgctgaatttgccgagaagggagtctgtgggcttaatttgaagtcatgcagtggtttcatgctcaaaacgactccaaaggtcggatgcccttcgctccgtgtgagggcatctgtctcttcaccacagaaactatactcttctaagacaacacaagttaaatcaggggaggaggtgcagattgcggttctaggggccagtggttatactggagctgagattgttcggcttctggcaaaccaccctcagtttcatatcaaagtgatgaccgcagatagaaaagctagcgaacagttcggatctgtatttcctcatttgataacgcaggacctcccaaatttagttgcaataaaagatgcagatttttcaaatgttgatgcggttttttgttgcttgccacatggaacaacccaggaaattattaaaggtttaccgaagcaactgaagattgttgatctttctgcggatttccgtttgcgtgatatcaatgagtacgctgagtggtatggtcatgcacatagggcaccagaacttcagcaagaggctgtgtatggtttaactgaagttcttcgagatgaaataagaaatgcacgacttgttgcaaatccaggatgttatcccacatctattcagcttcctcttgttcctctgataaaggcaaaactgatcaagctgagcaacattatcattgatgcaaaatctgggtcgataaagtggttacagaatgtttacttatatctggctatctgccctccaagtgcttttaaactggccctactgacacattgcaataaaaccgtgttagctcccgagattgaacaaggactttcagaggctgctaaatctaaagtcactatcagttttactccaaatctgatctgtaaaaaacgtggaatgcaatctaccatctttgcagaaatggcacatggggtgactgccgttgatttgtaccagcatctaaagtctacttatgaaagcgaagagtttgtcaagcttttacatggcagcactgttgctcacacgcgccatgtcgtgggatcaaattactgcttcatgaatgtcttcgaggacaggattcctggaagggccatcatcatctctgttgtatgcgtcttcaaccatctttatgcccattgtcaaactagtttcttcagacttaaagatgcgaaattcttattttcttgttcttcaactccacagatagataatcttgtgaagggagcgtctggtcaggctgtccagaacctcaatctgatgatgggcctgcctgagaacagagggctgcaatatcagcccctatttccatga

SEQ ID NO: 10718 - DNA, 1755 bp, Oryza sativa
  Clone ID: PAT_MRT4530_17010C.1
atgggtgacgtcttcatgacccctaattacaacatcgtggcaaccaaggcatcgccagacaacatcaacttcaatgagtacatggttgtcaactccactatcggccaaatcaaggttatggtggaagccaccgccgtacaacacatggagatggcccccaccatatccgcggctggcacatcgtcctccaagaccccgcaagcaagaagctcataccggaacacccacagcgacctgcgcgagaagatcgactccaaccgacgactcaatgccaacctccgtaacgttctgaacgagtggcgccgacaacgagacacggaacaactctgcatccacaatatcgatgaacaagcaggacgacgacatgtcgagcgcatgccggacggtcacatcgacgaccgtcccatgcacgactacatcgacctctcccccgatccacgacatcgccgtgacgacacggtcaagggcatcccgacattcaccgaaccactccgctgggtacaatggcccaccaacgtcaaacccatgggtattgacaaggcttggttgactggcctccccgagtataccatcaacagctgggccgagctgaaggctcgattcattgccaactttcaaggcaccttccctcatcccagcacccactgcgacctctatccgatcacacaaggtgatggcgagcgcttcaccgactacatccaccgcttcaaagaacggcggaacacaatcccttatgtcaaggacaccgaggtaatggcggcattccaccaaggctgcaagaacgaagacttcatcaagtggtggccccgcaaaacttcactcagcgcgagcagcgccatcagcgtccaacaaatgttcgaccgcgccaacaaggacgccaactccgagcttgtggaatatgcgcaaatcaagaaacggtcctcataccaatcccgccgagacaacgctgactcaaatcgtaacaaaccccccaaacgcaagagcaaacaggaggtcaacgtcgccaagcacagcaacagccagcgacgcttcaagccacccaagtccgacaacatcaacaagttcatggatggtccctgtttatacgatcccaattcaaagcacaacaactccacgcggacaagtccaccctgccaaaggagacacacaacccagcgcaagacgatgacaagtccaggcgtacgactcaaaagggtacttgtcgacagaggcagcgccctcaacatccaattctccaagaccttcaaggacatggggctctcgcaatccctcctccaaccaagcaagtcaccattccatggtgtcatccctggcacttcatcaactccccttggccaggtcactcttcaggtcactttctgcaaaccagataatttccgcaccgagagcgtggtcttcgaggtcgccaacttcgaaacggcctaccacgctatcttcggcaggccagcgatggccaaattcatggttgttcctcactacgcctacgcgatgatgaagatgcccagccccaatagcataatctccctccgagcagacatcaggcaattcttcgtctgcgacaaagaaagctgcgacatggcccaatccctcgaggccatcaagaggctatcgccaacgacgcattggcaaaatcagccggcgacattgagttgtctgcttccaaaacttccaagatctccatcgacacatctgatgctcgactcggccactcctaccaagacagctaccatcggtgttggcctcagcaccaaatag

SEQ ID NO: 10719 - DNA, 942 bp, Oryza sativa
  Clone ID: PAT_MRT4530_17011C.1
gcgcgtaatacgactcactatagggcgaattgggtaccgggccccccctccggccgggcccacccggccgcgcacccggcctcgcactcctctgagcgcgcgccgcctcgccctcctcggctattcctcccctcgctttgtgccatcgtcgcctcaccctcctcctattgtcgttgcgccggcgccgccctccttgccagtggatccagccatccggaggaaggaagggtcacgaggccatcaagccatcgctgccctcttctcccctctcatctccagaccactaccgccttcctcttcctctccctatcctcggtgagctacagatccggtttggggtcattggaatcgatggtctcggcctccccactggtggatccgatcactggaatcatcggtgagctacaggtccggtttgggggtcagcggaattgatggtctcggcatccccactggttgatccgatcactggagtcacttgcggccattggtttcctttctggtgaatccttttgataccctttcagccacaatcgttttgtgcatacatttagcacaaaatccataaggtaaggcaatggttttgactcgccattgagcatttgcattgcgtttgctggtgtttttacataatcccccatcttgccttaggttctgtggagaaactgatgggctaggatgaggtgtaggtcacagattatagagaggacgacttccatgctgcgcatctaccgtcatgctgagcaagctatcgagctttctcctctcttaagcagggctgcgagatttagattatgttgagtttttcttgagttcagattacttcatatgaatttagctatcagaagttccatggttattggttttgttgctgcattgtatgacaccccttgatagaatgacatcaggaagaaaaaagaaaaccatgctaggtattactac

SEQ ID NO: 10720 - DNA, 1012 bp, Oryza sativa
  Clone ID: PAT_MRT4530_17012C.1
atgttcgaattattgttccttttattacctattgcagcgctttatggctggtatattggacgtcttagtgttaaaaaggagcaagaatctatcaataataaattttctcgtgattatgttacgggtttaaattttcttttgtctaatcagcaagaaaaagcggttgatctttttctatcaatgcttcaaaaacaggaatctgaaaatcagattgccacggaatcacaatttgaagcggaacttactttaggtaatctttttcgttctcgcggtgaagttgatcgcgcattacgtattcatcaagcgctagattcaagtctaaattattctattgaacaaaaactattagctaaacagcaacttgccaaggattttatggcggcaggtttttatgatcgcgcagaaaactattatattttgttgttagatgagccagaatttgcggtaaattcacttacacaattaatggttctttatcagaaaacaaatgagtggaagaaagcgattaatgttgcggaaaagcttttaaaaattgatcctaaaactgatcgtattcctttatcgcattattattgtgagtatgcacaagctataaaatcggaagatgaggatttatatttgaggcttttaggtaaagcattagaatattcaccattgtgtacgcgagcctctatgttattgggtgattattatttggcgcaaggacaattttcgcaagcattaacacattttgagcatattttagttaagatcctgattatattagtgaagtgttgcataacattaaaacgtgtcatgcggcattacatgattttataaattacgaattatttctaattagatcaattcaagttaaacataatagcagtgtggacatagcattagcggagttaattgaacaaaaagatggtttgattgcagcgcattttaagttatatcaacaattaagcaagtatcctagtatgttgatttttcatcgttttatttattatcaaataaatgaagcagggga

SEQ ID NO: 10721 - DNA, 488 bp, Oryza sativa
  Clone ID: PAT_MRT4530_17013C.1
cttttatttacttttcttcctcagcaaaattacttccactacattgctcatcaaacttccatttcatttccaagttcccatctctcccatttcccaaaattactcccacttgatcacgcatgtcatatttgtttgtggctttctaacattgtcaagggatttccaagttcccatctctcccatttccctattatttacttttcttctttagcaaaattactcccacttgatcatgcatgtcatatttgtgtggctttctaacattgtcaagggaattaggatgatgtgacttgtttaattaccttgtcgaatttcgtcctattcagtattcacaatgattctcgctcactttctctgactttttagcatgctgacctgagtattgactactgtcgatcactgcatctcatgtggaaaaagaaaaaagtttatcttggtgcttgtaactcctctttttcttttaatgcatgaatctgggagcagctgca

SEQ ID NO: 10722 - DNA, 2259 bp, Oryza sativa
  Clone ID: PAT_MRT4530_17014C.1
atggcgacgccccgcgccccgccccaggcggccgtccccggaggaggggccggtgccaccgccggtggggtcaccatgcggatgttccacggcgacgtgttcctcggcgaggcggaggtgttcccgatgaagcagggggccgaggggagcctgccgttcccgagcaacgagatccgcatcagccacctctcgccgacgagcgagcggtgcccgccgctcgccatcctgcagaccatcgcgcccttctccgtgcgatgcaagctccaggccaagctgatgcctccccacccgagcctacaccgcctctacctcacttgcttcaacgagtacaagagcgcagtggtagtagttgtagatgaggagctacacctagtggcaatgctgagcaaggtggagaaggtgccatgcttttggtgctgttcagtacgctctgggatctatgcagcatctgttgggatgctgaacttgcggtgccttgctatcgtatttgatctcgatgaaacccttattgtcgctaacacaatgaagtcctttgaggaccggatcgagatgctttcccgtaggatggatattgaagacgaccccgtcaggatagcagggatgtctgcagaaatcaagcggtatattgaggacagggagctgctcaaggagttcattgacacagatacagttacagataatggcagaatcgttgggacccaaaaggaggaagttctgcctatctctggtgggcaggagcgtgttctccggcctgttatcaggctgccagaaaggaatgcgattctaactcgcataaatccagaggttcgcgatactagtgtttttgtaaagctaaggcctgcttgggaggatttgagaagttacctgactgctaagggacgcaaacgatttgaggtctatgtatgtacaatggctgagagagattatgctcttgagatgtggaggcttcttgatccagaagccaacttgataagctctcataaccttgcagagcgtgtagtatgtgtaaagtcaggttcgaaaaagtgtctgcagaatgtttttaaagacaaaggatgccatccgaagatggccatggtaattgatgaccgactgcaggtttgggatgagaaggatcaacctcgagttcatgttgtcccagcatatactccatattatgccccacaagctgagatggcaaatgctgtgcctgtgctttgtgttgcaagaaatgttgcttgcaatgttcgtggtggtttcttcagagagttcgatgaaaatctattgagaaaagtgtttgaactaatgtatgaaaatgagttgctagatcttccatatgctcctgatgttggtgactacttagtctgtgaggacactaattttgcaccaaacaataaggatgttgcccctatacctgagggtatgagtggagctgaagtagggaagaggttgaatgggctggcatatcctagagaccagaaacaaataccatcatcaacccgtttgtcagatgacgacggagtggcactccgtggcattccaggtggtacaaatatccaatctaacgggggatcattggcaacaaccccctcattatttgtcacggtgttgcaagaaattggacggctgtgcgaatccagggtggagttcaggtctactgttctatttagtaatgaaaaaatcgggatcggcattggaaaaacaagagatgaagcccaagtactagctgctgaaaaagctctccagaatttggaaagcaattacttgtcattcatggctcctgttgctggagttcttaataaagatgtgaacaagcctcctgggagtggaaatggctttctcgaagatattactctctcagaggatatttctatggaagagccatctggaagtacattaaaagaacaggatcattcaaaagctttggataggttgtcctctgttataagtcttattagagaactttgcttggaggaccaacatgtagtatttcgcgatcaagtacgggattctggctcagcattaaatggagaataccatttccaggctgaattaggaggacaaattcttgggaggggcattgatttgaacaaagattttgcgaagcttcaggctgcagaagaggcgctgaagaccttgaaaacaactacggacccacaaatcaagaagcatttgagaccagtaagcttgtcatctcttcttattatttttattccagatgcaacagctgaatttccccttatatcccacagaggtgagtttgataatgttgaaatgtga

SEQ ID NO: 10723 - DNA, 381 bp, Oryza sativa
  Clone ID: PAT_MRT4530_17015C.1
atgtcatccttactcctctctcttctctctgtccccctctctcaatctcccctgctctgcagtctgcaagagaagaccggagcggtggcgcgcgaagtcggcagggcgacggcggcccgagcggcagcgcgtgaagccggcgaggcggcggcgaagagcccgcgggagtcgaggtcgtccggggaagcagtggcgacggcggccggaccggcgacgcggcggtgggtgaaaacaagacagagttgctgtgcttctccttgcacgaagacgacgggctcatcgagctgctctggtgcaatggccacgtcgtcatgcagagtcaggcgcccggaagccgccgaggccggagaggacggcgacggcggcgatggcggaggatga

SEQ ID NO: 10724 - DNA, 2277 bp, Oryza sativa
  Clone ID: PAT_MRT4530_17016C.1
atggggggaatgaatcggatcgggattcgggagcgcgagacccgcggcggaagcttaattggcattgttgttgtaggcgccgccgccgccgcccacaccgcgcatcaaccatcaagtaggggaagggctgattcgccgcggatgatgcgcgcctctctgctcgctcctctcgagttgagcgctgatctcaccccgccgttacccagtgccaggcacttcgcctcgaggttgacaaattgtttcttcaaggccctcatggtcaacgcaagctcactcaaagtgcttcaacacctccagccatctccattttcagaaaagctggttgggatactgcgggaggaatttgtgaagacattatttgtgagaagagatatcaggaggctccgtgaatctctgaagtactttgattctgttcgtgaagatgccgatgctttggccttggaaaatagagtgacaggaacatggtggagtgatgtgaaggatgttatgtatgatgttgacgacattgtagattttttgagagctcactcgtacaagcagcgatgttgtgatcgtgtcctgttctctaggctggcacaacttccacttgattacaggattgccagaagaatcaaatatgtaaatgaaaggcttgtgcaaatcacaatgaacagcaagatgtttgttccactggcaatgaggagtcctcaaactctccaaagaaacggtgttagtaggtatgtggctgctttggttgatgaacttgatgttgtcggaagagaaatcaaggaaactactgatgatatggttcaaatgatcattggatgtggccatcagagcaccatatcagtttacgggatcctagggatgggaggaattggcaagacaactttagctcagaagatatacaatgatcgaaggataagggagaggtttcaccatgtccttatatggctgtcaatttctgagagcatctcagagactgacttgctgaaggaggccattgaaaaggcaggaggacagtcttatcagggcaagagctttgtgaagaaagagggcagcagaccgatacaggaggtagctgaagattactaccacgagctaatcatgagaaatctactgcaggcaagaccagagtacatagacaagggaatttctaccatgcatgatctactaaggttgcttggccaatacttgacaagagacgtagccgtgttcatggatgaggacgaaacccctccaaatgttcggcgtttagcggttggcaacgccgttgaggaaatacctggtatacaagaccagaaaaacctacggtgcctcctagtgtatcaccacgacgcatgcagatcagtcaagagggacatttacaggaagctggagcatcttcgcatcttaattctagttggagcaggcctccagagcataccagagtcagttgggcacctggtgctgttgaggctgctggatgtcagctgtaatgaagaaatcaagcaacttccgggatccatcggaaaccttacctgccttgaacacctctcagtgtctggttgcgaaaaattggcatcgctgccggcgagtctgatgacgctgtccacgataagcttcctcaatataggtggcacagcactgaccccaagttcccaaagggatcgctacgaggacagtgaagtgaagaacatcgaggagatctacaacaagctctgtccatcacgaaaattgcagtacatctttatagatgggttccctggccagctaccaatgttgcaggttcttcatgtcaaaggggctgatgcagttgtgagcattggccatgaactctttggtaaaggggtagtgtctccaacacataccattatatttccaaagcttgagctgcttgagatcgttgacatgtacctgcagctgataaattgcccaaaactgagagctctccccgaagatctgcacagaattgttaacctacgaagggttcttatagaaggtgtgcacagcctgcaggaaatcgtctaccatcccggaatcgtctggctcaaggctgaggagcttagctcgctgaaaaccttgtacatggtcgactgtccaatggagcaaatgttctgggattgtttctccaaggagcaacagagcatgatgacccatcggaagaagacgctgagaagtcgaaggaactatcgcgaagtagcgcgcatcgatgtagaggaagtagtcgatcgcaccggctcgaccttctcctcctctggtaggtgccgtacctctcgacagcgagacgcctgtggtgacttcgtcaactgcaagtag

SEQ ID NO: 10725 - DNA, 366 bp, Oryza sativa
  Clone ID: PAT_MRT4530_17017C.1
atggccggcggcgaggacgtcttggtggtggcgccgggcggcggtcgcgacgcgctgctgcttgttgcgcaggagagcgcctggaggaattcggatggtgccggcgacggcgacgacgacgactacggcatgctcaacttccggccgggcttagacggcggcgacgacgacgacggcttcccctacgagacgatcaccatgtggttggtggtggtgttcttggcgatgtgcctctacgggttgaccaagcttgtgttggcgtatgttcctgcgtcgtggattattattcatcgtgggttcctgattgatcctgcgcgtgcacattattgttgttttgagttgttgaggacgggcaaattatattaa

SEQ ID NO: 10726 - DNA, 2793 bp, Oryza sativa
  Clone ID: PAT_MRT4530_17018C.1
atggagctgggagcctgggagctcgactctatggctccaggggctcatgcttccttgaactctgaccaggaggagacttcttcagaatatgtgactacaatcaaaagaggaaggagcaatcccaggcagttgcaggccctcatggtcaacgcaagctcactcaaagtgcttcaacacctccagccatctccattttcagaaaagctggttgggatactgcgggaggaatttgtgaagacattatttgtgagaagagatatcaggaggctccgtgaatctctgaagtactttgattctgttcgtgaagatgccgatgctttggccttggaaaatagagtgacaggaacatggtggagtgatgtgaaggatgttatgtatgatgttgacgacattgtagattttttgagagctcactcgtacaagcagcgatgttgtgatcgtgtcctgttctctaggctggcacaacttccacttgattacaggattgccagaagaatcaaatatgtaaatgaaaggcttgtgcaaatcacaatgaacagcaagatgtttgttccactggcaatgaggagtcctcaaactctccaaagaaacggtgttagtaggtatgtggctgctttggttgatgaacttgatgttgtcggaagagaaatcaaggaaactactgatgatatggttcaaatgatcattggatgtggccatcagagcaccatatcagtttacgggatcctagggatgggaggaattggcaagacaactttagctcagaagatatacaatgatcgaaggataagggagaggtttcaccatgtccttatatggctgtcaatttctgagagcatctcagagactgacttgctgaaggaggccattgaaaaggcaggaggacagtcttatcagggcaagagtaaggatcaacttctacaagctctactaaattgtatcactggacaaagtatcttccttgtgttggataatatgacaagttcacatatctggattgatcttcttcggtccccaatagagagatgtgcggatgcccatattgtcaagaaatgtgatgggcttcctcttgccatcaaggccgttgcaggtgtcctgtcctcgaaggcaacgaaggaagaatgggctagagtcctggagagcagatggtgttatgaaggacttccagaagaaatacaaggccccttgtatttaagttacaatgacttatccccacagcttaagagctgtttcctctggtgtgccttgatgcctcaaaatttccatattcaccgagatgtcacttacttctggattgctgaaggctttgtgaagaaagagggcagcagaccgatacaggaggtagctgaagattactaccacgagctaatcatgagaaatctactgcaggcaagaccagagtacatagacaagggaatttctaccatgcatgatctactaaggttgcttggccaatacttgacaagagacgtagccgtgttcatggatgaggacgaaacccctccaaatgttcggcgtttagcggttggcaacgccgttgaggaaatacctggtatacaagaccagaaaaacctacggtgcctcctagtgtatcaccacgacgcatgcagatcagtcaagagggacatttacaggaagctggagcatcttcgcatcttaattctagttggagcaggcctccagagcataccagagtcagttgggcacctggtgctgttgaggctgctggatgtcagctgtaatgaagaaatcaagcaacttccgggatccatcggaaaccttacctgccttgaacacctctcagtgtctggttgcgaaaaattggcatcgctgccggcgagtctgatgacgctgtccacgataagcttcctcaatatagttttccaagatggtactggcgggttccgattggatgaactagatagtctctccaagatacggcgcctcttgctgatcaagctggagaaagcctcaccgccagcttcacccgtgttgtgcaacaagcgtcacctcaaagagctcggccttacctgtacaatgggtgaagaagctgattgtcgaaccagctacgaggacagtgaagtgaagaacatcgaggagatctacaacaagctctgtccatcacgaaaattgcagtacatctttatagatgggttccctgagcttccgcctgcaggccagctaccaatgttgcaggttcttcatgtcaaaggggctgatgcagttgtgagcattggccatgaactctttggtaaaggggtagtgtctccaacacataccattatatttccaaagcttgagctgcttgagatcgttgacatgtacaactggcagagttggtcggttagcacagaaagcttgtctgatggcacatcggaaaccatctcacgatcagtctttcttatgccatgcatcaggtacctgcagctgataaattgcccaaaactgagagctctccccgaagatctgcacagaattgttaacctacgaagggttcttatagaaggtgtgcacagcctgcaggaaatcgtctaccatcccggaatcgtctggctcaaggtcaagaacaataaaagcttgaggaggatatccaatctttctaagttgcaactcttacttgcgcaggactgctcggaattgcagcaggctgaggagcttagctcgctgaaaaccttgtacatggtcgactgtccaatggagcaaatgttctgggattgtttctccaaggagcaacagagcatgatgacccatgtagttgttgggatacgcgtgggctacgatagcataaattaa

SEQ ID NO: 10727 - DNA, 447 bp, Oryza sativa
  Clone ID: PAT_MRT4530_17019C.1
agtgggagtgggctgccgggacgacctcgccaccgccttcgcagccgcgggcgtccacgcctcctccctcgccgccgctgggctgaccatgccgacgtcgacggcgacgttgactgtgctgtggagctgtgcagtggctggctcgggagagacctgggacactcggatccggcctgtgagctgtgtgctgcctgccgctgccatggcctctgggagcgggagctgggctgctggggacaacctcgccgccgtggacgacgcctgcgggcgtcctcggcgccgccttcgcagccgtgggcgtccacgcctcctccctcgccgctgcaggtgtccacgcctcttccctcgtcgccacgagtgaccacgccgatgtcgacggcgacgatgacgatgggagcggcggcagctggctcgggagaggccggggctcgtagattcggccgtggc

SEQ ID NO: 10728 - DNA, 9114 bp, Oryza sativa
  Clone ID: PAT_MRT4530_1701C.1
atgtcgaacaaggtgaaccatgtagggaaggctcccatgtttaatggcacaaactactccactggaaaattaaaatatctactcacctcaaagctatgagcttccatatttggagtattgtggatgtaggctttgccatcactggcacacccttgacggagattgatcaccgcaacctccaactcaatgcccaagccatgaatgccttgttcaactctttgagccaagaggagttcgatagagtgagcaaccttgagaccgcatatgagatttggaacaagttggcggagatccatgagggtacaagtgagtacaaggatgccaagcttcacttcctcaagatccaatatgagacattctccatgttgcctcatgagaatgtgaatgacatgtatgggaggctcaatgtcattgtgaatgatctcaaggggcttggggcaaactacaccgatcttgaggttgcccaaaagatgcttagagccctaccggagaagtatgagacccttgtcaccatgctcatcaactccgacatgtcaagaatgacacccgcaagcctcttggggaagatcaacaccaatgacatgtacaagttgaagaagaaggagatggaggaagcctcaccctccaagaagtgcattgctctccaagccgaagttgaagacaagagcaagagcaaggtgaatgaagtcaatgaggacttggaggaagagatgatccttcttgctagaaggttcaatgatctcttgggaaggagaaaggagagaggaaggggctccaactccaataggagaagaaatagaagacccaataagactctctccaacttgaggtgttttgagtgtagtgagaagggacactttgcttccaagtgcccttccaaggatgatgatggagacaagtcatccaagaagaagagtggaggctacaagctcatgaagaaacttaagaaggaagggaagaagattgaggctttcatcggggaatgggactcaaatgaggagagctccgcctcatccgggtccgaggaagaaggtggtgatgatgcaagctccaagaagaagaagatggtcgttgttgccatcaaggaggctccatcactcttcgctccaatttgtctcatggcaaagggttcctctaaggtaacatctcttagtgatagtgagagtgatgatgattgtgatgatgtttcctatgatgagcttgtgagtatgtttgaggagctctatgcttatagtgagaaggatattgtcaagttcaaggccctaaagaaggatcatgcttctttggaggtcttgtatgagtagctaaagatctctcatgagagactcaccatttctcatgagaagcttaaggaagctcatgacaatctcctttccactactcaacatggagctcacattgatgttggcatatcttgtgatttgcttgatgatagtgctacttgccatattgctcatgttgcatcatctagtatttctacctcttgtgatgatcttatgtatatgcctagcccttgctctagttctagctcgtgtgtttctatttgtgatgcctcacttgttgttgagaacaatgagcttaaggagcaagtggctaagctcaacaagagtttggagagatgcttcaagggtaagaacactcttgacaaaattttgagtgagcaacggtgcatccttaacaaggagggacttggattcattccaaagaagggtaagaaaccttctcaccatgccactcgttttgtcaagagaaatggtaagtattgctacaagtgtcgtgaggttgggcatttggtgagtgattgccccgaaggtaagcctcctaagacatgtatgtttgattctcattatatgcttagtaaggctcatgatggtagcattgttgctagatatgtgggttcccctatactcggtggtaaaaagaatgccatttgggtgcccaaagctttggtctctaacctccaaggactcaaacaagtttggattattctcgctatacttgggtgttttttttgcatgataagtctattgttgccgagcttttcaaaaagtttgcaaaaagggcccaaaatgaatttagttgcactcttgtgaaaattagaagtgacaatggttccgaatttaagaataccaatatcgaggactattgtgatgatcttggtatcaaacacgaactttccgctacctactcacctcaacaaaatggtgtagtggaaaggaaaaatcgtacattgattgagatggcaaggactatgctagatgaatatggtgtttccgattccttttgggcggaagccataaacaccgcttgccatgcaaccaataggctttatttgcatcgtctcttgaaaaagacttcctatgagctaattgttgtgaggaagccaaatgtcgcctattttcgagtttttggttgcaagtgttatatttaccgaaagggtgttagactaaccaaatttgaaagtcggtgtgatgaagggtttcttctaggttatgcctcaaatagcaaggcataccaggtctacaacaagaacaaaggtgatgaaggcttgatgagagctatgaagaacatgtctattggagatgtcaagcctattgaagtggatgatgagccatctacttccgcctcgtcaagtcaagctcaagttgaagtggaagaggagaaggcacaagatccacctatgcctccaagaatacacaccgctctttccaaggatcacccaattgaccaagtgttgggtgacattagtaagggtgttcaaactcgatctcatgtcgcttcaatttgtgaacattactcgtttgtttcttgtcttgagccaaaacatgtagatgaagctctttgtgatccggattggatgaatgctatgcatgaagagctcaacaactttgcaagaaacaaggtgttgactttggttgaaagacctagagaccacaatgtcatagggacaaaatggatctttaggaacaaacaagatgagaacggattggtggtgagaaacaaggcaaggttggtggcgcaaggtttcacacaagttgaaggtttggactttggtgaaacttttgcccccgtggcaagacttgaggctattcgcatccttcttgcatttgcatcatgctttgatataaaactatttcaaatggatgtgaaaagtgcttttctaaatggtgaaattgcctaacttgtctttgttgaacaacctcccggttttgaagatcctaaaaatcctaaccatgtttacaaactctcaaaagctctttatggtttaaaacaagctcctaggcttggtatgaaagattgagagattttcttttgtcaaaggatttcaaaattggaaaagttgacaccactcttttcacaaaaatcattggtgatgatttctttgtgtgtcaaatttatgttgatgacatcatattcggttttactaatgaggtattttgcaaggaatttggtgatatgatgtctagggaatttgagatgtccatgattggagagttgagcttcttccttggacttcaaatcaagcaactcaaggatgggacgttcgtgagccaaaccaagtacatcaaggatctactcaagaggtttggcttggaggatgcgaggcccatcaagacacctatggcaaccaacgggcatctcgaccttgatgagggaggtaaaccggtagatttaaagctttatcgttccatgattggtagcttgctttaccttaccgcatctaggccggatatcatgtttagtgtttgcatgtgtgcacggtttcaagccgttcctaaggagtgtcacttagtggcctacccaaaaggtgctaaatttaagcttgttggctattccgattcgaattatgtcggttgcaaagtggatagaaagagcacatccggtagttgccaaatgcttgctatgcctccccgcactcggcatggtcgtcgtgcgcccacgcccgatcccgttagtgagaatgaggaatcaagcggagatgagtatgttcaaagtgatgaggacaatatggaaaatgttgagggtgatgagatggaagtaagtgatgatggtgatgacaatgagagtggaaatggtgaagatgatgaggcaagtgatgatgggagtcctttcgattcctccatccaatttgtgcttaatttgaggaatgctcaacaatacgctatcctccatcatcatgatcaatttcggaggcctaacgattgtaatgatccaagatttcatacacggttccaaaagtccgtgtatgtacaagtgtatgccaagaaagccttcaccgaacacaaatggatctcttggaggcacattggtgagacaccggagtttgagaatgtgcaagagatgttccggaccgttgggattgatagaattgtcaccatgaagcaaccttttgatgaagatctcatccggcaattctatgccaccgtatgggtgtccggcgattgtgatgcaatgaagtggatgtcggggaccctccgatgctctatcaaccgccgtgaattcaaggagctcttgcacattcgcttcaacaacggggatgaccttcatgatgagcacacccacaatcccttccccattgatcacttttctcagttttatgaagaagggggaaggcacacatatggaaaggtggcgggtttaagggctctcccaagtgtgatcaaccgcatagtaagggccaccatcctcccaagatgcggcaacaatgatgacatacgcggagttgcttggcatgttattgatgccattatggatggtcgtcggtttgatgttatcaactttatgatgaaggagattaccatctcaaaggggactattggacaaggaatctattatgctccctacataatgaggttgccgcctcctagacggcttgtggaggagttgcccggtgacctctccgagaagattgtggaggaggcccggcaccggtttgtgagtggtttggagttcaccaccttcggagtgaaggaagaactaccccgagtgatcgaggcttgggtagtcctctccgtgggccggctcccgccttgcccaccccttgacgaagggggcgtgcggtggcttcgtggttgagcggtggagttgggctcgcctcaacggggagtaggaaaccggcgagtttccgaacctcggtgaaaaatctcttgtctcattgtctcatttgattgtcgcatttacatttgtgcaatttacatttctagagacacacttgagatcatatcaccctaggattgcgactcaaatgaggagagctccgcctcatccgggtccgaggaagaaggtggtgatgatgcaagctccaagaagaagaagatggccgttgttgccatcaagaaggctccatcactcttcgctccactttgtctcatggcaaagggctcctctaaggtaacatctcttagtgatagtgagagtgatgatgattgtgatgatgtttcctatgatgagcttgtcttgtatgaggagctaaagacttctcatgagagactcaccatttctcatgagaagcttaaggaagctcatgacaacctcatttccactactcaacttggagctctcattgatgttggcatatcttgtgatttgcttgatgatagtgctactcgccatattgctcatgttgcatcatctagcatttctacctcttgtgatgatcttgtggatatgtctagctctagctctagctcttgtgtttctatttgtgatgcctcacttgttgttgagaagaatgagcttaaggagcaaatggctaagctcaacaagagcttggagaggtgcttcaagggtaagaacactcttgacaagattttgagtgagcaacggtgcatccttaacaaggagggacttggattcattccaaagaagggtaagaaaccttctcaccgtgccactcgttttgttaagagcaatggtaagtattgctccaagtgtcgtgaggttggacatttggtgaatgattgccccggtggtaagcctcctaagacttgcatgtttgattctcattatatgcttaggaaggcttatgatgcaagcattgttgctagatatgtggattaccctatactcggtggaaaaaagaatgccatttgggtgcccaaagctttggtctctaacctccaagtgaactaccacaccggtgggagccattgggtgcttgatagtggatgcactcaacacatgaccggtgatagggctatgttcaccacatttgaagtaggagggaatgaacaagagaaagtgacatttggagacaatagcaaaggaaaggtaattgggttaggtaaaattgctatctccaatgatttgtcaattgataatgtctctcttgttaaatccctaaatttcaatttgctttcggtcgctcaaatttgtgatcttggcttgtcatgtgctttcttcccgcaagaagttattgtttctagccttcttgacaagtcttgtgtgttcaaaggttttagatatggaaatctttatttggttgattttaattctagtgaagcaaatttgaaaacttgtttagttgcaaaaacttcgttgggttggctttggcataggaggctagcccatgttggcatgaatcaattgagtaaactttcaaaacgtgatctagttgtgggcttaaaaaatgtgaagtttgagaaagataagctttgtagtgcttgtcaagccggcaagcaagttgcatgttctcatcctactaaaagtatcatgtccacatctagaccattggagctcttgcatatggatttgtttggcccaacaacctataagagcattggtggtaatagtcattgtcttgtgattgttgatgattattctcgctatacttgggtgttctttttgcatgacaagtctattgttgccgagcttttcaaaaagtttgcaaaaagggtccaaaatgaatttaattgcactattgtgaaaattataagtgacaatggttccgagtttaagaataccaatatcgaggactattgtgatgatcttggtatcaaacacgaactttccgctacctactcaccccaacaaaatggtgtaatggagaggaaaaatcgtacattgattgagatggcatggactatgcttgatgaatatggtgtttccgatttcttttgggtggaagccataaacaccgcttgccatgcaaccaataggctttatttgcatcgtctcttgaaaaagacttcctatgagctaattgttgggaggaagccaaatgttgcctattttcgagtttttggttgcaaatgttatatttaccgaaagggtgttagactaaccaaatttgaaagtcggtgtgatgaagggtttcttctaggttatgcctcaaaaagcaaggcataccgggtctacaacaagaacaaaggtattgtggaagaaaccgccgatgttcaatttgatgagactaatggctcccaagaagggtacgagaatttggatgatgtatgtgatgaaggcttgatgagagctatgaagaacatgtctattggagatgtcaagcctattgaagtggaagacaagccatccacctccactcaagatgagccatctacttccgctacgccaagtcaagctcaagttgaagtggaggaggagaaggcacaagatccacctatgcctccaaggatacacaccgctctttccaaggatcacccaattgaccaagtgttgggtgacattagtaagggtgttcaaactcgatctcgtgtcgcttcgatttgtgaacattactcgtttgtttcttgtcttgagccaaaacatgtagatgaagctctttgtgatccggattggatgaatgctatgcatgaagagctcaacaactttgcaagaaacaaggtgtggactttggttgaaagacctagagaccacaatgtcatagggacaaagtgggtctttaggaacaaacacgatgagaacgggttggtggtgagaaacaaggcaaggttggtggcacaaggtttcacacaagttgaagatcctaaaaatcctaaacatgtttacaaactctcaaaagctctttatggtttaaaacaagctcctagggcttggtatgaaagattgagagattttcttttgtcaaaggatttcaaaattggaaaagttgacaccacccttttcacaaaaatcattggtgatgatttctttgtgtgtcaaatttatgttgatgacatcatattcggttctactaatgaggtattttgcaaggaatttggtgatatgatgtctagggaatttgagatgtccatgattggagagttgagcttcttccttggacttcaaattaagcaactcaaggatgggacgttcgtgagcaaaaccaagtacatcaaggatctactcaagaggtttggcttggaggatgcgaagcccatcaagacacctatggcaaccaacgggtatcttgaccttgatgagggaggtaaaccggtagatttaaagctttatcgttctatgattggtagcttgctttaccttaccgcatctaggccggatatcatgtttagtgtttgcatgtgtgcacgatttcaagccgctcctaaggagtgtcacttagtggccatgaaaaggattctaagatatttaaagcattcctctactattggcttgtggtacccaaaaggtgctaagtttaagcttgttggctattccgattcggattatgccggttgcaaagtggatagaaagagcacatctggtagttgccaaatgcttggtagatcccttgtgtcatggtcatccaagaaacaaaactccgtagccctctctaccgccgaggcggaatatgtttcggtgtgtagttgttgtgcccaattgctttggatgaaacaaacattgttggactatggcatatccttcaccaaaaccccactcctatgtgacaatgatagtgccataaagatagccaataacccggtccaacattctagaaccaagcatattgacatacgccatcacttcctaagagaccatgttgccaagtgtgacatagtcattagccacataagaaccgaggatcaactagccgacatctttaccaagcctcttgatgaaacccgcttttgcaagttgaggaatgagttaaatgtcatagacttctctaatgtggcttga

SEQ ID NO: 10729 - DNA, 993 bp, Oryza sativa
  Clone ID: PAT_MRT4530_17020C.1
atgaacaatctcttctctagctcgtggaagcgcaccggcggcggcggcggcggcgacggggatattgaatcgggcggcggcgtggagatggcgccgccgccgggggcggcggcgggggcgagccttgataggttcttcgaggacgtggagtcgatcaaggacgagctccgcgacctggagcggatccagcggtcgctccacgacgccaacgaggggggcaagtcgctgcacgacgcggcggcggtgcgcgcgctgcgggcgcgcatggacgccgacgtcgccgccgccatcaagaaggccaaggtggtgaagctccgcctcgagtcgctcgaccgcgccaacgccgccaaccgctccgtccccgggtgcggcccgggctcctccaccgaccgcacccgcacctccgtcgtcgccggcctccgcaagaagctccgcgactccatggaatccttctcctccctccgcgcccgcatctcctccgagtaccgggagaccgtggcgcggcggtactacaccgtcaccggcgagcagcccgacgaggcgacgctcgacaacctcgccgagaccggggaaggggagcggttcctgcagcgcgcgatcgccgagcagggccgcggcgaggtgctcggcgtggtcgccgagatccaggagcggcacggcgccgtggcggagctggaacgctcgctgctcgagctccaccaggtgttcaacgacatggccgtgctggtggcggcgcagggggagcagctcgacgacatcgagacccatgtcggccgcgcgcgctccttcgtcgaccgcggccgcgagcagctggtggtggcgcggaagcatcagaagagcacccgcaagtggacctgcatcgccatcatcatcctgctcgtcctcatcctcgtcgtcgtcctccccatcgtgctcaagttcgtcaacaacaacaagagcagcagcagctcgccggcgccggcgacgccgtcgccgccgccgccaacggcatga

SEQ ID NO: 10730 - DNA, 801 bp, Oryza sativa
  Clone ID: PAT_MRT4530_17021C.1
atggcgccactagtctcccacgcgaaaattctcgccccgattcggagggactccccccccctcgaccccgcgccccctgccgccggcgccttcctcgcctccctcttcccctcacggcgctcccgcccttcgccagagaaggattagctcctccgccctcccgccgaccgccagtgatgtgtcagctcctgcccccccccgaccaactactgcagccacttcaacggctagaacgcccacgccccccatgcgaacaaggacgctcccttacccggccacgtctggtcttctgcgatttggtgtcccatgtacagtgccgaacagattccacccttcgagtcgcacaaccaatccaacccgcccggatggtacccagcagtgcaccacgaagacctccccagacacggcggagcgaacctgccggagggagtggacgaccgaggcggcggcctctgcggcgacgacagcgtaccgcgagcagatttgtccggcgacagagattagaacatagtactacttgctccatttcaacatatagctatttttagtacagtactttgttctaaaataaagctatttcttcatctatattccataactccctcacatccaattcttttgaaaaaaaaaaaaaaacgcagtcgaacaacatatggtgaggctttaggaggacaggccctccctgaccaagtactggagccacttcaaaggatagaaggcaaaggctccccatgtgaaaaaggacgctccatgaccctgccatgtgtggtcatctgcgatttggtgtcccatggacagtga

SEQ ID NO: 10731 - DNA, 114 bp, Oryza sativa
  Clone ID: PAT_MRT4530_17022C.1
atggggagctatttactcttgaaaagtggactggagcagaaggagttggagggcctcatcaacgtcatcttcaattatttcttcatccagagcttgttcaatggatggatctag

SEQ ID NO: 10732 - DNA, 851 bp, Oryza sativa
  Clone ID: PAT_MRT4530_17023C.1
gctgcaggaatcggcacgagggcttgatgaacgatgagctgctactactactactagtggcagcagcagttgctgcatgctagtagcttggaggagcgtgcaatgtgcgcgcatgtgtgcctgtgtgagattggatgggacgggaggggaatagggcactttgaggcagagctctctctatgctttgctttgcttgcagctgcagctgcagctatttataggggcgagcaacaagaagcttgtcttccgccccgtcctgcacatctccaaagctctcttctcaccaaacagacatgtagtacgaacgccattgttcatcttgtactactttctgtgtgtgtgtagttgtgtactgtctcttcttcttcttcttcttcttcttgtttctccagctgccatctccatcacaatgtcatgccagctgagctcttggctttggtggagtagtagtagttgtgttgatgtacatatataggagttgttgttgtcttctcttctcttctccaagtgttctgggctttgagtctagcattggggtgtgtgtgtgagatgagcactgcagtgttgaaagaagggaatgcatggcatattggcaaggatgcagaaggtttggaagctgaaaagcaaaagagaggggaaaaaaaggggatatgcctggctccctgtatgccactcgcgtagctgccaaactcagttgaaacaactgccttctcccggcgagattcaggcattgtgttcgtacgtttggctctactgcggatggcgtgcgaggagccaagcatgaccgtctctctctgtctctatctctctctcattgactcattgtgtgtgctcacttaagattacacgct

SEQ ID NO: 10733 - DNA, 348 bp, Oryza sativa
  Clone ID: PAT_MRT4530_17024C.1
gtcatactggtagcatggtgcatgatgctgctgcaggagagaagagcatcgcaggcatgggaacgcgctagagggcactagaagctcctaggctgcggactgctccaagcactactaccagatacagtgagagaggcccaggggcgaagcgcgctcaagaagcgcatatacgacgagagcagtcgcgtcgtcgcgcgactatgaatacagggacgcgatgaccctctgtgcatataacaggacaactacatggacataggtcacaaagatgtaaccaaggctgttgtacagacgacactactctgcactgctgcagaaaaaaggctgcgagaacaaaggcacttaaag

SEQ ID NO: 10734 - DNA, 2847 bp, Oryza sativa
  Clone ID: PAT_MRT4530_17025C.1
attttgtttgcaagcactcccagacagtaccgagtaatatatggacagtattatcttcaatttctagttacctggagatcaaatgtgacaaatatgcacacaaggggagcatcttcagatgttcttagagcaagcatttctagtgcacctagtacatctagccatggttctgcacaagatgactgtgattctttaggtgatgtctacgtgtggggtgaagttttttgcgaaaactctgtacgagttggttctgatactataattagatcaacggagaagactgatttcctactcccaaagccgttggaatccagattagttcttgatgtttatcatgtagattgtggggtcaggcatgctgcactggtcacaagaaatggagacgttttcacatggggtgaagattctggaggtcgcctcggacatggaacacgagaagattctgtccatcctcgtcttgttgagtctttagcggcttgcaatgtagattttgttgcttgtggggagtttcatacttgcgctgtgacaacaacaggcgaactatatacctggggagatggaactcacaatgttggacttctaggacatggtactgatgcaggacattggatacccaagagaatttctggagcactggatggtcttccagttgcttatgtttcttgtggaacctggcatacagccttgattacatcgatgggccaattgtttacttttggagatggttctttcggggtattaggccatgggaatctaacaagcatttcatgtccaaaggaggtagagtcactctcagggttgaaaacaatagcagttgcatgtggtgtatggcacactgcagctattgtggaggtcattgtcactcactctagttcaagtgtgtctgctggaaagctattcacctggggagatggcgacaagcatcgacttggccatggtgacaaggaatcacgactcaagcccacctgtgtagcttcgcttattgattatgatttttacagggtagcatgtggtcacagtcttactgtatgcttgacaacttctggaaaagtgttgagcatgggtaattctgtttatggtcagctcggaaatcctaattcagatggaaggcttccatgtttggtcgaagataggattgcaggtgaacatgttctccaagttgcttgtggatcctaccatgttgcagtattgacaggtaggagtgaagtttttacatggggaaagggagctaatggaagattaggccatggagatatagaggatcggaaggtacctacacaggttgaggcactgaaagatagagcggttcggcacatagcatgtggtgcaaacttcactgctgctatatgtcttcacaaatgggtttctggagctgaccaatcacagtgctcatcatgtcaacagccatttggatttactcgaaagaggcataattgctataattgtggacttgtccattgtaatgcatgcacctcaagaaaggctttgagagcagcattggctcctaatccagggaaaccttaccgtgtttgtgattcttgtttcttgaaattgaagaacgccttggattctgattcgtttaataagaggaaggacattgtttcccaccttgcaggtgaaagcaatggtgataccaaagcatcgaaaaccatcttgtctagcaatatggatataattaggagtttggatagcaaggcagcaagacaggggaagaaaactgatgcattgtcatttctccggactcctcaagttagttcactactgcagctgagagatattgctttgtctggtagcgcagatatgaacagatcagttccaagagcagtgcgtacatcagcagttcggtcagtaaccacttcaagagctgtttcccctttctctcgaaagtctagtccaccacgttcaaccacaccagttccaacaactcatggcctttctttctcaaaaagtgctaccgataatctggcaaaaacaaatgagctcttaaaccaggaaatcgataggctgcatgcgcaagttgataacctcagacatcgttgtgagcatcaagaagttgagctgcataaatcagccaagaaagttcaggaggccatgacactagttgcagaggaatctgcaaaatctaaagctgcaaaagaggttatcaaatctctaacagcgcagctgaaggatatggctgagcggataccaccagaacagggcacttacgatgtcagtgaggcaaagccagtgcacgttccgaatggcattgattcacatattgcaatctactctagcataaacgtagctcaccagccacagaatgagctcctcaatgcttcaaatgcgcaaagcctgaactctggacgatcattgcatccaaatggaatctcaagccaacacaggttactaggtaatgctaccgaagctagtgaaggcagcgctcaaagccatcgaattactagtccctgcaagttggatgttcctcatcgaagagcgcacagcaacagcgacgatatgctgactgcgagtcatagaggggatgataatgtgagcatagatgcaatgtcccttcagaatggtgaggatggatacaagcctcgaggcacagtatcatcaatatccagcagccaagttcaggccgaatggatcgagcagtatgaaccaggtgtatacataacactcacaacactcttggatgggactcgggatctgaagagggttcgtttcagccggagacgttttggggagcatcaggctgagaagtggtggaacgagaaccgtgagaaggtgtacgagagatacaacgtgaggagctctgaaagagtgtcttcttcttcagcagcctccacccgctcagcctattga

SEQ ID NO: 10735 - DNA, 255 bp, Oryza sativa
  Clone ID: PAT_MRT4530_17026C.1
atggaaataggactcgtccaagttgagcgagatgggccttggtgggttcaatctctcagttaccaggccacacggccgaaggaggagtgggctgccggcctgagcgaggccgatcacaaggccgaacaggatggccaattagcgcagctgcgtctcacacttttggtccacaaatttcacgtcaaagtttcatatgagaagttttcgaatgaaaattttcagatgaaagttttacaaataaaagctttcagataa

SEQ ID NO: 10736 - DNA, 4031 bp, Oryza sativa
  Clone ID: PAT_MRT4530_17027C.1
ggaacaaacacaagtttcttttttttttcttataaaataaggcttcatcaggaaaatgcaaagtaaaaaaaaattaaatcatgtcatgaaagaagggcctgtaacatcatgacacgggtctagattatagaacaccatattggcatacttccataacattttaaacatgctgaagaccctctttataactaaaagaacaacgtggtcattttgtttttggattaaactacggcgtggaatgtcaataaaatttcggaaagaaaactcgtcctaggaagcaatagctagcagtatgcatatcagttcacgaatcacgaactgctagactgcaaggcaacaagggacgcataagctccaccgggcaagcgcagcagccgcccgtgccggccttcctcggcaacgacgccgttcttgatgacggcgatcttgtcggcgccggtgatggtcgacagccggtgcgccacgatcaccgttgtccgcccgaccatcaccctgtccagagcctcctgcacgatgcgctccgactcagagtccagcgcgctcgtcgcctcgtccaggagcaacaccttggggtccttgaggatcgcccgcgcgatggcgatccgctgcttctgcccgccggagagctgcacgccacgctcgccgacgctggtgtcgtacccgtgcgggagcgaggagatgaagcggtgggcgttggcggcctcggcgacagcgacgatctcctcctcggacacctgatcctgcttgccgtaggcgatgtttgctctgatggtgccgttgaagagaaccggttcttggcccactagccctatctgctgcctgagccaggtgagcttgagggtcttaaggtccatgccgtctagaaagatggcgccagagtcagggtcatagaacctctctagcaaggctaccactgttgatttaccgcttccgctttcaccaacaagcgcaacagtcttgccagatgggatcctcaagcacaaatttgtgaagatctgcacgtcagttcgagctggatacttgaagctcacatgctgaaactctatattcccctcaattttctctggagccattccatcatctgagcttgcatctatcttggatttcctatctataatcttaaaaatggaggctgccgcatcttgcactttgctaaaatcccgagcaagagaactcgattgtgaaactccaacagccatcattgttaaagcaaagaagaccttaaaaacttccccaacgtcagctgttccattgtgtacaaagcgtgctccgacataaaacgatacagcataaaagcagaagagcaaggcaaatgagaatccataacccacaccacttatagctccctgacggactcctttcttcacaggacctttgcatttatttcggtagctttcaattatcttctctcctacacagaatgaagtgacagttctaatgttactgatggcatcactagcaattgtgctcgcttgttcatacatttcctttgcatcagcaccaaatcccctcattaaccttgattgagcataactctgcgcaaatacacagggaacgaagcacaagactatgaatgctagcttccagtttgcaatcatagctattacaatgccgacaagagcagtgcttatactttgaacgatcaatgataaaacatctccagcaatgcttttgacggatgcggcatctgcggatagcctagcacctattgcgccactgctgttcagagggtcatcaaaccatccaatatcctggtaaacaacccgactaaatgataaggcacgtatacgctcgataagcttcccacctgccatgttgaacaaagtgtgttgcactggtatgataaagatggatacaacacccaagatcacgtatatttctgcccagaacactgaatcttttcgcagtttgtgtggtggttcatagaatgcgttgatggcacttgaaagcaacaggccaaacactggaagtatagctccattggcggaggcggcaatgcatcctaacagaaggattgcagtttcaggcttatgaaggtgtagtaagcgcctaagtacattcttgccagacttcgtgtcatcacacccttcgatttcatcttcagtcaatgcatatgtctgtgaattccttctgcttccacccagtgacgaatgtctgctcatagatctctcaaaggatagctttctaatgctatgtcgacttacaaaatttccagcatcagatagtctgttcgcagcatcagatagtctgtttgcaacatcagatagtctgtttgcaacatcagatagcctattggggtcaagttcataagttccattccttctcgcgtttacctcttgaagctgtaaaagttgatagtatgctccattggaatattttatcaactcagcatgaggtccttgttccacaagttgtccacgatgtagcacagatattgtatcagcatttctcactgtgctcaggcgatgggctacaattatggtggtcctgttaaccatgatattattgagtgcatcctgaactacatgctcagattcagcatcaagggcgcttgtagcttcatcaagaagtagtatcctagggtccttcaaaattgctcttgcaattgcaattctttgtttctgtccaccagatagctgtgtgccatgctcaccaaccattgtatctagtccatttggtagcttatcgatgaacttcgcagcattggcaaggacaattgctctcctgatttcttcctctgatgcatctttctttccatactctatattttctctgatggtagttgtgaaaagaataggctcttggctgacaagccctattttctgtcttatcctgctaagatttagcaatttcatattaacaccatccaaaagaacttcacctgattgtgggtcatagaacctttcgaccaaactaatcacagtagatttcccgcttccactttcaccaaccaatgccattgtcatgccacttggaatgctaattgagaagccagtgaagatcagttgctcaggccttgcagggtaactgaaatggacatctttgaactcaacatctccaacaaaattctccaatacaaggccactcctatcactggcatcaatctcaggttccctattgattgttgcaaacattttgtaagccgcaatctgtccagatgcaaaagcatttaagcatggagaactctgaccaagtgccattgcaccactcatgatggccatcaatacattaatgatatatcccccagtataacccttttcaataatcagctttgcaccgtaccataccgctaacccatagctacagaaaacaataaacataactgaaccaattccgagtcccatagccgcgccctggtgaacagctgatctatatgatatttttaagaattcattgtatttgtcagttgctctcctctcaccagtgaaagataccacagttctaattgatcctattgtctgctcaaccagcttccctgcttcagcataggccagctgggaacggtttgctagctttgatatggcaattgacatggccactttttctccaatggcatcttggatcaacactgtgtcgctagacatcctttcagtaacttctccggttgatgtctccaaatcaaagaatgtaatatcttgtctaagtatcgcctcaaggtacagcccacggatgcgtgcagcttgcctttcaccagtcaccatccagcatgacacctgaagaaatcctgctattccagagccaattgccacatatgtaaatctgagagaaatcttggagacgacgtgcacgacgtgggcgcggtcggcggcgccgaacgcgtcgacgagctcgccgatgaggaacgcgaggaacggcatcgccaccccgttcgccacggccgccactccccccaccgccatcagcgccgcgtccagccggtccgcgaacgtgaacagccgccgcatcggcaccctcttcgcgccgccgccgccgccgccgcccgcacccgctcccccacccccatcgccgccgcctccccctcctccggccat

SEQ ID NO: 10737 - DNA, 2480 bp, Oryza sativa
  Clone ID: PAT_MRT4530_17028C.1
atggatgctccatttcttactacttcccttgctgttctggccatcctctttttgcttgctctaccatggagtgctgcaactcatgatattctaccactgaaatcctctctatttgttgaagagtatgaaaccaacatcctgcagtcatctgatggcacattctcatgtggcttctacaacatcactaaagcctacaacatcactagcgccttcaccttctcaatttggtactccaattcagctgacaaggccatcgtatggagcgcaaaccgtggccgtcccgtgcactcaaggagatcagagatcactctgcgcaaggatggaaacatagtcctcactgactatgacggcacagtcgtgtggcaaactgacgatcctgattacctgtactatgagaataataggaacctttataacagtacaaggataggtagtcttgatgattatggagaatttttttcgagtgatcttgctaagcatcaagcccgtgttgcctctgatagaagtttggggattaaaaggaggcttaccttggattatgatggtaatcttagactctatagcttgaataactcagatggaacatggacaatttcatggattgctcaacctcaaacatgcatgactcatggtttgtgtggtccatatggaatctgccactattcacctacaccaagatgttcatgcccacctggttataagatgaggaatccgggtaactggacacaaggttgcaagcctattgtcgaaattgcatgcgatggtaaacagaatgtaacatttttgcaacttcgaaacactgatttttggggttctgatcaacaacatattgaaaaggtaccctgggaggtgtgttggaacacttgcataagtgattgcacatgtaaggaatttcagtaccaagaaggaaatggtacatgctatccaaaatcttttctctttaatggaaggactttcccgacaccttttgtgcgaacgatgtatatcaaacttccttcaagtttggatgtttctaaaaaacccattccacagtctagtatacatgattatacaccaagtagacttgactgtgatcgtgtaaacacaataaccacagaggcagttcgtaacatgaataagattggtggggaggaaccaaaatggttctacttctatgggtttatcggtgtgtttttcattgttgaggttttcttcttcgcatttgcatggttccttgtcttgaggaaggagatgtggtcatctgaagtatgggcagctgaggaaggctacagggtgatgactagtcattttcgaatgtatagttatagagagctggttaaggcaactgaaaggtttaaacatgagcttggatggggaggttcaggagtcgtctataagggaatattggatgacgatcgagcagtggtcataaaaaagttggaaaatgtcacgcgaaatagggaggagtttcaggatgagttgcatgttatttcaagaatcaaccatatgaacctagtaagaatttattgtttttgctcagaaagattccataggttgctggtcttagagtatgttgagaatggatcattggctaatgtactgttcaacagtaaaatcttgttagattggaagcaaaggtttaatattgctttaggcgttgcaaagggactggcttatcttcaccatgagtgcctagagtgggtcattcactgcaacctaaagccagagaacattttgctggatgagaacttagaacctaagatcgctgactttgggttggcaaagctgcttagtagatctggctctaagcagaatgtttcacgagcacgagggaccataggttacattgctccagaatggatatctggtttaccaataacagcaaaggttgatgtatatagttatggagtcgttcttcttgagctagtgtcaggaaaacgagtctttgatctgatcataggagaggataagacgaaggtgcatgagatgctcaagaagtttattaagatgatttgttatagattggacaatgagaaatcattgtggttagcagagttcgtagatttcagagtgggtgatgaattcaactacttgcaagcaaaaactttggtaaagttggctgtgtcctgcttggaagaagataggaagaaaaggccaagaatggaatcaatagtcgagagcctcctttcagttgatttagctacaagttaagggcatgtatcttgaagcactactgtatagtgtaatacacagggaatgatgaataaaattcactcctggcttacttccttcttttcgtttcttttcttttcttttcttttttttttgctttctccatatttatatcggatgagactagatggcgcattgccaccgtgttgctttgttccaaggataacaaatatgagctctttggcctgggaaagagaaaataatttggtccaaggataacagatttgtagagaatatcagaatttgattaaggatttgaacttgacctg

SEQ ID NO: 10738 - DNA, 1410 bp, Oryza sativa
  Clone ID: PAT_MRT4530_17029C.1
cccacgcgtcctgccacgcgttcgggcctgcctttttttttttttttttttttttttttttttttgacattgaataatactccacaagaatggagtattgattgagtttactctgatgtgtgttacaacaacaagatacagggctgcttgcaaatcagttaacacaacaatgtgtaatcatctcagattatcctcccaatttatgtatgattggctcagatcgaaatcgcagcatatgcatacatacaaacatgaataagcaacaacttgtcccttgttatttttcaggttgagaatgcaggttgaggttcagaaactgagtgtacttgtttgtagtacgttcagagctgcacttggctgacgagaggcttcccggagaagaaggcgtcaaggttggccttgacgacgtcgacgacgccttggatggactccggcgtgatcaccgcgcggtggtccgacagcacgacgttgtccatcccccacagctccggcggcacctccggctcgttctcgtacacgtccagcccggcgccgccgagcaccccttcccgcaggcacctcaccagctcggcctcgtccaccagcccgccgcgccccacgttcaccagcacgccgcccttccccagcgcctccatcacctcccggcccaccatgcgccgcgtctcctccgtcagcgcgcagctcagcaccagcacgtcgctctccgcggcgagctcccgcacgctggggtaaaacttgtacggcgccgacgccttcggtgacctcgagttgtaggcgatcacgcagccgaacgccgccagccgccgcgccaccaggccgccgatgcttcccagccccacgatccccacccgcttgccgctcaccttgctcgcgagagggtaatcgccggcggccggcccaggcgccgcgcctgacgtacgcgtcggcggcagcgactcggcggagcacggccacgagcagcccgacggcgtagtccgccacgtcgggggcaaacacctcgccggcgttggtgacgctgatcccgcggcggcggcacgcgtcgaggtcgatgtggtcaacgccggtggacgtggccacgacgatctccagcttggggagcctagccacgagatcagcggacacaggcgtcagagccggcacgagcacggccctcgcctctgctgcgttgccctcgtcggcgtcggcggcaagcacgaagcggaagcggccgtccagcgcggcagcgaactccgggtagagcggccgcggcaggatcaccagcggcttcccggcgtcgggcgacggcgccaccatcttctcctccactttgggaattgtgaattggaattggaattgggatagctctgctcacctcaccagcaccaggtaaggctgtggtcgattgttttttggaagactgattcgatggaa

SEQ ID NO: 10739 - DNA, 428 bp, Oryza sativa
  Clone ID: PAT_MRT4530_1702C.1
ccaaaatccaatctccagctctcttccccccccccccatggccgagcggggtaggggcaatcgaggcggcctcccgctgggaggggcctgcggctccgccggcggagtcaactggaacgggctagggtgctcggggtcggtggatgagatcgggaacgacttgtacgagggagccaccgcctccagcggtgtcgtctcggggcgcccgacggcggcggaggcgttcgacaccgtggtcacagggtgggggtgcctggacaacaagggggagggccggatcaggtgctagaggatgaagcgggcgcgagaggccgggggcggcggaggcaccgagatgggcgggttcaccaagagggttcagttggggaagcccgacgggttggacgaggagagggacacctttgacggccgacgggcacgtgcgggcc

SEQ ID NO: 10740 - DNA, 607 bp, Oryza sativa
  Clone ID: PAT_MRT4530_17030C.1
gtcgactctagaggatccccattggaagcaaaggtttaatattgctttaggcgttgcaaagggactggcttatcttcaccatgagtgcctagagtgggtcattcactgcaacctaaagccagagaacattttgctggatgagaatttagaacctaagatcactgactttgggttggcaaagctgcttagtagatctggctctaatcaaaatgtttcacgagcacgagggaccataggttacattgctccagaatggatatctggtttaccaataacagcaaaggttgatgtatatagttatggagtcgttcttcttgagctagtgtcaggaagacgagtctttgatttaatcgttggagaggataagacgaaggtgcatgagatgctcaagaagtttattaagatgatttgttatagattggacaatgagaaatcattgtggttagcagagttcgtagatttcagagtgggtgatgaattcaactacttgcaagcaaaaactttggtaaagttggctgtgtcctgcttggaggaagataggaagaaaaggccaacaatggaatcaatagtggagagcctcctttcagttgatttagctagaagttaa

SEQ ID NO: 10741 - DNA, 3554 bp, Oryza sativa
  Clone ID: PAT_MRT4530_17031C.1
atctgacccaatcacccaaacatggcggaggcggggcccagccggccggccgccgccgccgccgtcgccgccggcgacttcccggagctcctcgccttctgcgcccgcgcggaggccctcatcgccgagctcctcctcctctccgaccgcgccccgtcgcagttcgccgaccgccgcttccaccccgtcctcttcgacttccgatacttcgactccccgggcgaattcgaggcgaggatcgaggggaacatggagctggaggccctggaagacgagctccgcgagtcctgcggctcctacatgcggaggttcttcgccttgctggatgccgccgtcgcttaccacgacgagctgtgcagctacctcaacgacctgcaggaagggctgtatgtgcattgcacattggatggtgtactggagagtaactgggcttgccaattgcttacagaatcgatgactttgtttgggtgtatggctttgctaatggagcacaggattagcggattgctgcgtgagagacttctggtggcgtatctgcggcacgagcgttgcttcagcttccctaatgtggagcgcatatgcaagctctgtcgtcggcacgtgactacacctccttcgcctggtgcctccggttcatcgttgcatactgtggaaatcatctctgtacagaagcctgaggatctgcttaggaggtttcagtttcctgagctcattgtggatgctgtcataacttgcttgagaaatggtgatgtttacaacaatgtccggttctaccctgatccgcagcaccggacaaccgctctctcattgcaaggtggacacatgtatgtgttgttattttattctcgtgaccttctacacaacggtttggctatgcgggagattgttgatcgcttctttaaggacaactgggtggttcccatcttcttgcatttctcggtagatttacttgtctcatgggatgcattcaaagaagcgaaatcatcattagtttcttgcctttctcccaccttcgtacgtgatcgcagtctataccactatacaaaggtatcttctcttctagctgacctggatagtcatatgcatgcggtaaacaaggaatatgttctggataattctctgaatcttctttctatcatcagagagtgcaattgcacactgcgttggcttttgcttcaccgcatgcttgagtttgaggtgaaggaactgcatgctgaactattgaaaaccagaaaaagtatgtggtatgagaagaggcatgatgctttggaatgtatgaaggacctgtctcagaactatcttgggacttgggctgcgtcatgcaaattaaaaaacaagagcatcaaagactggttggagcacctgtcatcagagtcatggaagcttctgacaattttgtatgttagctccctggattatgccacaattggaaactccggcaggataattcatcgtgtgctatctacgctaaaagatattgagctacttcaccaaatcaaagagaatatacagataaagcatggcttctccaaaatacagaagaatcttcatgatatgataaaagttctaaacctaaaccaagagtccataagtgttttctcagtgattactgatgatcttacttctgaatttcaattgtcaaaacttgacagtccagatcttcagtatgtctcaacctactatgcttcaaagtatgcagctaaaatatttgcagttctagatattatcccggctatattgcttaaaatttctattgatgtggattacatcaatgctgaacagtccactcatctaataaatcgcatcaacaaggaaacattggaagatctcatgcagttggatcaacaactatgccaagcacagcaggctgccaaactatgcattgtttcagagggccttttgaacatgtcaaagaactttgatggccttatagatctgaatttaggtggatggcttaagcaaatgataaaaaaggagttagtaagccaactacaaggcaagctgaaagccttatcattgctcatttatggtgatatagaaggcaatctcatgtcattgtcaaattatatgctttcacagatgcagagaatggaattcctacagaaatatccattagtatacaccagtcttcagttaatacaaccatgtcacctgctgcaatatatagttcatttaacggatccatcgcgctccatgtttatagaggctatgatgggttggtttgatgcaggaggaaatgaattgcttggtatgcgcttctttcatttgctggaatcatgtgtgggacaagttggattagcttgcttggattccttaatacatgtactagtaaagcagagtgtggagcatgcaatgaaagatttacatacattggttgatgttaaatgtcgagaggaattgaataagctggatgatctactggggcctcccatgtccattcctctgatgggttggtcatcatataaggaaatggtgaagatgttgcattcatcatggggaccactggttgagaaattagcaacaatcggacagctgcaattggttcgaaatctcgtgtcctttaaattgagatcagcatgcaaggtcagagcaaacactataagctcggctgtggacattttgtcatcttcagtttgtttgcagaatgggaggtttgagacaggggccgaggatcacaatgtcagactcttccttaacaatataaaggatcagcagaacttttgcggcttactttcacctcttcaggctatctatatttctgaagagcctccaatgttcttgaccagattgctgtgcatcttttccatatcgcagttaccaaaatatgttcttgacattcacttgggcaatttgaccaatccactaaagaaatctgtagctgatttctctgctctggtcatagggcttggtacacttctgcagcagtttggtccttcccatataacccagtatattgagtttatgattcaatatatacggatggcagaagcagcatttaatcccacacctgttacaaacaagggatctgctcattcctctgaggctccaaaggcgttatattgggtgatgtccttctgcaagtacatggatatctccatggatttagtcgagtcatgcttaccatcttcctctctggctatcctgcaatcctgacccttctgttgtagttatacataggtttacaaaatcggttaagccttagaactgttagcttttgagcttttcttctccattccatgatccagggtttataacttacgaggtcgcaatggtgctagttgacacttgacagtgccctgaccctgaaatgctgcaagtgcagtagctctagtgggattctcagtacagctacgcttttggtggtaaaatgaaatggagtagagcgcgtactgttgaacattcatgtgagtttttcatcagggacttgcggttattttcatgcgagattttcttaaccctatcttgtattttggtgtgttgagccagtcagagactacatagtgggaagctggcccataaaagttaaaataatagatttgacagtattatccatc

SEQ ID NO: 10742 - DNA, 3108 bp, Oryza sativa
  Clone ID: PAT_MRT4530_17032C.1
atggcatctatagcgtttggtcaaagaaatctgcgtgtctttcccctcagaaggcacatatgggatgcggtgtttcagcatggtccttataattgcaccatacagaggaggtggaaaaaaccagttgattcagcaagaactcgacaggaaggcagaacaagagatcataaactggacaagctgatgattcaactgaagaacctgaggctagctttggatttacacgagttgatatctcagcagaggaatggctttgcatctctccaactcctctccaggtggagacatgaggttggcctaaatattgagattggcgctttccttaagaaatatccccacattttttacatttatgtgcacccagtcaaaaggaatgaatgctgtaaggtcaccccaaaaatggctgaattgattgcagaagaagatgctgtcatcagggaaaatgagcctgctattgttaagcggctgaagaagctcctcatgctaatgaaagatggaactctgaatatgcatgcattgtggctcataagaagggaacttggcctgcctgatgactataggtgctctatactaacaaaccatcagtctgatttttctctaggttcccctgatactctgacattggtcactagggatgaaaccggctttaagatcgagaatggttttagggaaaagcttgggaactggcagaggcttccctatactaaggcttatgataagaatgatttgcatccaatccacaatgtcgggcggctcgagaaacgtattgttggcattcttcatgaacttttaagcttgacagtagaaaagatgataccacttgagaggttgtcccacttcagaagaccttttggtatggaggtaaacctgcgggagcttattcttaagcaccttggcattttctacatctcaaccaaaggaagcacacagcatgtccttcttagagagagttacagtaagggatgcctggttgatccaaaccctgtctataatgtttttcaaagagaaggagctctgcatcatcgtcttcgagcagttctttctttgaattacgagcaagctgctgtagaatacagcaaggaagttcgtaagagatgggacataatctggaagagacaacagatgccaacagagagggaattatatgtcaataatggtatcttgatgtcaaattcgcatgattgttttcgttttgttgaagtggattatgaatttggacttcccaaaacttgcatcacactcactaagttagattgttccttccaagctaatataatttattcaaggtgcatcttagggatgtttgttttggctatatattcaagctcagaccatctctccaagactgcaaccatggatgctccatttctttctacttcccttgctgggcttgccaccctctttttgcttgctctaccattgagtgctgcaactcatgatattctaccactgaaatcctctctttttgttgaagagtatgaaaccaacatcctgcagtcatctgatggcacattctcatgtggcttctacaacatcactaacgcctacaacatcactagcgccttcaccttctcaatttggtactccaattcagctgacaaggccatcgtatggagcgcaaaccgtggccgtcccgtgcactcaaggagatcagagatcactctgcgcaaggatggaaacatagtcctcactgactatgacggcacagtcgtgtggcaaactgacggtaaattccctaatgttcgatatgttcaattattgaacactggtaaccttgtcttgaagaactccagtggaaacattgtttggcaaagtttcgattcaccgacagatactttgcttcctactcaacgcattctcgctacaacaaagttagtctctaccactgggttacaggttcctagtcactataccttccgtttcagcgatcagtcgatattgtcacttatatatgatgacactaatgtttccggcgtatactggccagatcctgattaccagtactatgagaataataggaacctttataacagtacaaggataggtagtcttgatgattatggagaatttttttcgagtgatcttgctaagcatcaagcccgtgttgcctctgatagaagcttggggattaaaagaaggcttaccttggattatgatggtaatcttagactctatagcttgaataactcagatggaacatggacaatttcatggattgctcaacctcaaacatgcatgactcatggtttgtgtggtccatatggaatctgccactattcacctacaccaagatgttcatgcccacctggttataagatgaggaatccgggtaactggacacaaggttgcaagcctattgtcgaaattgcatgcgatggtaaacagaatgtaacatttttgcaacttcgaaacactgatttttggggttctgatcaacactgtattgaaaaggtaccttgggaggtgtgttggaacacttgcataagtgactgcacatgcaagggatttcaataccaagaaggaaatggtacatgctatccaaaatcttttctctttaatggaaggactttcccaacaccttttgtgcgaacgatgtatatcaaacttccttcaagtttggatgtttcaaaaaaacccattccacagtctagtatacatgattatacactaagtggacttgactgtgatcatttaaacacaataaccacagaggcagttcgtaacatgaataagattggtggggaggaaccaaaatggttctacttctatgggtttatcggtgtgtttttcattgttgaggttttcttcttcgcatttgcatggttctttgtcttgaggaaggagatgcggtcatctcaagtatggatagctgaggaaggctacagggtgatgactagtcatttccgaatgtatagtcatagagagctggttaaggcaactgaaaggtttaaacatgagcttggatggggaggttcaggagttgtctataagggaatattggatgacgatcgagcagtggtcataaaaaagttggaaaatgtcacgcaaaatagggaggagtttcaggatgagttgcatgttatttcaagaatcaaccatatgaaccta

SEQ ID NO: 10743 - DNA, 317 bp, Oryza sativa
  Clone ID: PAT_MRT4530_17033C.1
ccatcaaggacctcgttggtgagcgtggagaaagaatcgccggggagggggaggcggaggagaagcggcgcacgcagggggtggggcaacttggggcgcccccggggagaggaagcgagggcgtcggcggcgggcccgcgcctggcacgcgcgcgatggaggaagcgagggcgtttggcggcgggcccgcgctggcgcgcgcgcgatggggagaggaaccgagcacgcgcgatggggagaggaagaagcacgcgcgcgtgatggggagacctggcggcggcggggacaacaaatcggtggcggagggatgtgcgtga

SEQ ID NO: 10744 - DNA, 174 bp, Oryza sativa
  Clone ID: PAT_MRT4530_17034C.1
atggtcgccaagccgtcgccgatctcgtccacccctccgtttccgccgaagatcgctggagcaccgccgtcgtcgtcaagccgaagttcgccggcgagcttgcgccgtccggtcgtcgccggtgatgacgtcatcgccgacgtcatcgatgtcattccccgtggaccgcggtag

SEQ ID NO: 10745 - DNA, 211 bp, Oryza sativa
  Clone ID: PAT_MRT4530_17035C.1
ctgcgcttttgacgagctccgatccgacggccacggggacggtcgactgttaagagcacctcctgccgcgacagaagggacggcgcgctcggtagaaatggatcactttcacacgtgggggtgagcttgctaggcgaaacctccctcacaggataaatttaaagcccgagggtctcctggaccgtttataagtgttttactactttaatag

SEQ ID NO: 10746 - DNA, 1256 bp, Oryza sativa
  Clone ID: PAT_MRT4530_17036C.1
atggcggacgacggagacggcgactgcgtgaacctggagcctttcttctacgacgaggcagcgaccgtggccgaggcggcggcggcggcggagaggcgggagcgggaggagcaggagaaggcgcgggaggcggcggcgaacgccaggagatgggcggcgcacaacgccgccctcgccggcatccgcgagtacgaccccgccgaggagacgtacatctacacccgctaccactacgcggacctgtccgagttcgacctcgacgaggagtcccgcctccctcccatgcgccacaccgccgccacctacgccccgccggcgcgagccctccacttcctctgcgatatgatcaacgtcctcgccgtccgcatcatcctcccctcctccgatcgctctgatggtggtggtgtcggcttccccatcagcgtctacggttctgtcatcgccagagaccagcttgattacaaatgtgtacatctcttccgccgctgcagagacgatcctcagctaatcacctcagaggatgaactgtcgttgatattgactgggcctcatcgaggacttgtgctgtatgacgctctgtacattgaggtcgatctcaagatgaaggtgaagggtgatcaacaacaaggctgcaaggacaagcgactcagtaaagggctgatagtgttggatggcgtactgctctcaacaaacttgagcgaccatttgcgtgctgcggttaaaaccgccactcttgataggagaagcaccatgccctgtgccgtgcaggtcacttacgccactatccgagatagcattgtgctccatgatagcagattactagcagatgatggcattgtggctgatggatctactgtccggctattgcgccgcgtgattggcgtctgtttggatgaggtgctgatagtgacaattgttgctcaagatggtgaccttgcaaaggcaactaactactgcagacaaaccgttgattttacaccttgtgtcaatggtggagacgaagctcgagttgtgggtggtgtcggcagttttcttgtgaaggttcaattttgtgctacattcacaagccatgtttaccaggaggttgtatatggagatcaacttcgttttatacacccagagtgtttcgcgtttctgctagggtttgacaaattgtaccagcagattcaggactttattcccaaggcgagtttgaagtttgatctactgcttctggattgacgtgccggccaaagatgtgtaaaaaaaaaaaaaaa

SEQ ID NO: 10747 - DNA, 296 bp, Oryza sativa
  unsure (1)..(296): unsure at all n locations
  Clone ID: PAT_MRT4530_17037C.1
caggtcnggnccngtcgcgccatccccgtgcgngnnctcctccgcctcgtnttcgccgccctcnanatcctcctcgcgtcccgccctcggggtngcggggctcgcaanatcccgcgccccggttaattggggcgccggtnttatggcgcggcgccgcgggttgcggcancggcnaggtgcgccctgagcgcnagtttggatggcgtggggggcggggacgcggagttnttgcggcgnatcgaggagctcgcggcggcggtgggtgtgcagccacggnttgcgggtggccggcaagc

SEQ ID NO: 10748 - DNA, 210 bp, Oryza sativa
  Clone ID: PAT_MRT4530_17038C.1
atggaatcgcccacgtggcctggcaccttcggggacgtcgggcccgagggtgaggtgtccgccctcctcctgatttccccgagggggggggtcgggttgctcctgccccgaccccgagggccgaggtgccccgaccccctgtgggcgcaatgcagcgcgatcttttatccggtctgtgaccagtcacagaccggtcagatcaacggttag

SEQ ID NO: 10749 - DNA, 1001 bp, Oryza sativa
  Clone ID: PAT_MRT4530_17039C.1
cctagtcttctcctccgccactccatcggcaaggaggaagatctcggaggcggtgcccggaggaggtgaggcgagatgggcgggcgggtggatcacgagtactcgtacctgttcaagatggtgctgatcggcgacagcggcgtcggcaagtctaatatcctctcccgcttcacccgcaaccacttctccctcgactccaagtccaccatcggcgtcgagttcgccaccaaatccctgcagatggagggcaaaacaataaaggctcagatctgggacacagcaggacaggagagatatcgtgccatcacaagtgcttactaccgtggcgctgttggggctctccttgtttacgacatcacaaagaggcagagcttcgacaatgtccacaggtggcttcgtgagctccgcgaccatgccgactcgagcattgttatcatgatggtcggtaataagtctgatttgattcatctaagggctgtctccgaggatgaaggtaaggcattggctgaaaaggaggggctgttttttcttgagacatcagctatggaggccgtgaatgtggaggaagcctttcagactatcatcacagaggtctatggcattgttaacaggaaagcactggccgccaaagaagcagctgctgcttctgctccgctgccttcccagggtaaaactatcagcattgacagcgctgcaggaaacacaaagagggcatgctgctctgcttgatatgtacaatggagcgttcaacatcatattgtagagagccaggtgtgagattcgcgggtagactcggagcatagtgatcttaaatggtttggaggcaagtcctacttttttttttttcagttgcgtgaacattccagagtgcctagctgcagttgcagtttgttcagtgtttcctaatcaaaagttagatgtgtgtattaggattcattccatttccgttctgattatacaacgcaaactatagctgcaatatatctcagattatacaattc

SEQ ID NO: 10750 - DNA, 4716 bp, Oryza sativa
  Clone ID: PAT_MRT4530_1703C.1
ttcaataggcttgacatctccaatggacatgttcttcatagctctcatcaagccttcatcacctacatcatccaaattctcatgtccctcttgggagccattagtctcatcaaattgaacatcggcggtttcttccacaatacctttgttcttgttgtagacccggtataccttgctatttgaggcataaccaccagggcaatcattcaccaaatgcccaacctcacgacacttggagcaatacttaccattgctcttgacaaaacgagtggcacagtgagaaggtttcttacccttctttggaatgaatccaagtccctccttgttaaggatgcaccattgctcactcaaaatcttgtcaagagtgttcttacccttgaagcacctctccaagctcttgttgagcttagccacttgctccttaagctcattgttctcaacaacaagtgagacatcacaaatagaaacacaagagcagattactccaaagccgagtgcttcaatcatctttgtcatggtctcccgagtacttttaccaaatctgaagactgtggaggggtggcaaaaagcaatgatattgtatccaatcaattgcttgataaacccaaacagcaccttgacagtcggcggcggtcgaggtggccggtcggtgacgacgtagacgcccaacaacggcggcataataggccagccgtgcaggcggaagcaccagtcggcggcggacgaggcggccggtcggtgaagacgtagacgcccaacaacggcggcataaaggccagccgtgcaggcggaaacaccagtcggcggcggcgaaggcaagccggtcggtgaagacgtagacgcccaacaacggcggcataaaggccagccgtgcaggcggaaacaccagtcggcggcggcgaaggcaagccggtcggtgaagacgtagacgcccaacaacggcggcataataggccagccgtgcaggcggaagcaccagtcggcggcggacgaggcggccggtcggtgaagacgtagacgcccaacaacgtcggcataaaggccagccgtgcaggcggaaacaccagtcggcggcggcgaaggcaagccggtcggtgaagacgcagacgcccaacaacggcggcataaaggccagccgtgcaggcggaaacaccagtcggcggcggcgaaggcaagccggtcggtgaagacgtagacgcccaacaacggcggcataataggccagccgtgcaggcggaagcaccagtcggcggcggacgaggcggccggtcggtgaagacttagacgcccaacaacggcggcataaaggccagccgtgcaggcggaaacaccagtcggcagcggcgaaggcaagccagtcggtgaagacgtagacgcccaacaacggcggcataaaggccagccgtgcaggcggaagcaccagtcggcggcggacgaggcggccggtcggtgaagacgtagacgcccaacaacggcggcataaaggccagccgtgcaggcggaagcaccagtcggcggcggacgaggcggccggtcggtgaagacgtagacgcccaacaacggcggcataaaggccagccgtgcaggcggaaacaccagtcggcggcggcgaaggcaagccggtcggtgaagacgtagacgcccaacaacggcggcataataggccaaccgtgcaggcgaaaacactagtcggcggcggacgaggcggccggtggtgatgttctgactgatccattccgtataggcggggacaccactcggcggcgacggaggcaggccggcggtgaagtcgtagacgcccaacagcggcggcataataggccagccgtgtaggcggaggcaccaatcggcggcgacggaggcaggccggcggtgaagtcgtagacgcccaacagcggcggcataataggccagccgtgtaggcggaggcaccaatcggcggcgacggaggcaggccggcggtgaagtcgtagacgcccaacagcggcggcataataggccagccgtgtaggcggaggcaccaatcggcggcgacggaggcaggccggcggtgaagtcgtagacgcctaacagcggcggcataataggccagccgtgtaggcggaggcaccactcggcggcgacggaggcaggccggcggtgaagtcgtagacgcccaacagcggcggcataataggccagccgtgtaggcggaggcaccactcggcggcgacggaggcaggccggcggtgaagtcgtagacgcccaacagcggcggcataataggccagccgtgtaggcggaggcaccaatcggcggcgacggaggcaggccggcggtgaagtcgtagacgcccaacagcggcggcataataggccagccgtgtaggcggaggcaccactcggcggcgacggaggcacgccggcggtgaagtcgtagacgcccaacagcggcggcataataggccagccgtgccggcgaggacaccagtcggcggcggacgaggcggccggtcggtgaagtcgtagacgcccaacagcggcggcataataggccagccgtgtaggcggaggcaccagtcggcggcggacgaggcaggccggcggtgaagtcgtagacgccactcggcggcgacggaggcaggccggcggtgaagtcgtagacgcccaacagcggcggcataataggccagccgtgtaggcggaggcaccactcggcggcgacggaggcgggccggtcggtgaagtcgttgttgttatcagcaatggcggtggcgaagacaagccggcagagtggactcgcggccgatcgaccggaaagccataatatccacatggtgagtctctcatgagaagtctttagctcctcatacaagacctccaaagaagcatgatccttctttagggccatgaacttgacaatctttttctcactataagcatggagctcctcaaacatactcacaagctcatcataggaaacatcattacaattatcattactctcactatcactaagagatgttaccttagaggaaccctttgccatgagacaaagtggagcgaagagtgatagagcctccttgatggcaacaacggccatcttcttcttcttggagcttgcatcatcaccaccttcttcctcggacccggatgaggcggagctctcctcatttgagtcccattccccgatgaaggcttcaatcttcttgccttccttcttgagcttcttcatgagcttgtatcctccactcttcttcttggatgacttgtctccatcatcatctttggaagggcacttggaagcaaagtgtcccttctcaccacactcaaagcacctcaagttggagagagtcttgttgggtcttctatttcttctcctatttgagtttgagccccttcctctctcctttctccttcccaagagatcattgaaccttctagcaagaagggcaatctcttcctccaagtcctcattggcttcattcaccttgcccttgcccttgtcctcaacttcagcttggagagcaatgcacttcttggaaggtgaggcttcctccatctccttcttcttcaacttgtacatgtcattggtgttgatcttccccaagaggcttgccggtgtcatccttgacttgtcggagttgatgagcatggtgacaagggtctcatacttctctggtagagccctaagcatcttttgggcaacctcaagatcggtgtagtttgccccaagccccttgagatcattcacaataacattgagcctcccatacatgtcattcacactctcatgaggcaacatggagaatgtctcatattggatcttgacgaaatgaagcttggcatccttgtactcacttgtgccctcatggatctccgccaacttgttccaaatctcatatgcggtctcaaggttgctcactctatcaaactcctcttggctcaaagagttgaacaaagcattcatggcttgggcattgagttggaggttgcggtgatcaatctccgtcaagggtgtgccgttgatagcaaagcctacatccacaatactccaaatatggaagctcatagctttgaggtgagtagacattttaattttccaagtggaatagtttgtgccattaaacatgggagccttccctacatggttcacctcgttcgacatcttctctctaggcggtgaagcccaatcaagagagaccaagcccccgttgaggcgagcccaactccaccgctcaaccacgaagccaccgcacgcccccttcgtcaaggggtgggcaaggcgggagccggcccaccggagaggactacccaagcctcgatcactcggggtagtttttccttcactccgaagaccgtgctactctacaacggctagttttctaaccattgtagccctgtcattgggccccattgccctggccggtcagaccggcctcggctcggtcagaccgaatacggctccgtcggctctatatcgcccaaaccagagcaacaccatcccggcctccagggggccggtctgaccgcacaagtgccgccggtcagaccggccagtcatgctggttagaccgccactaggtggccagtcagaccggcctctgacctgcggttagaccggcttggagcaagcggttagactggccctggtcaggccaatctcaggcaagcgagactggttggcgatggcgagatagacggggcaacgcggcacagccccatcgtgcaagcattt

SEQ ID NO: 10751 - DNA, 1380 bp, Oryza sativa
  Clone ID: PAT_MRT4530_17040C.1
atggaactcttcccccgtatgccttttggtatttctgaattggataaaattgtaaagaatttacccatagatagagctcctgggcctgatggttttaatgggctgtttgtgaagaagtgttggccaatcatttgtcaagattactacaaacttgcagctgaattttactctggcactttggacttggatcccctaaatcactcttttatcattttggttccaaagaaacctgtccgtgaaggaataaatgactataggccaatatcactcctaagaatttctcttaaaatcctgacaaaaattctggctgacagactgcaaaagtgccatcattccaaaagagaaatagttttgttaaaattggacattgagaaggcttttgatactattgaacatgaagccattttgctaggaatggaagctatgagtttcagtgttacatggcttggatggataaggaagatcttttcttctgcctcctcctcagttctgataaatcgggttcctggaaacaattttcattgcaagaggggggtgaggcaaggtgacccactttcacctttactctttgtattaggagctaagcttattcaagctattgttaacagagcttatagtatggggctcctttcaaagcttcttccttcagatattgatccaaatttccccattgtccaatatgctgatgacactctcctctatttgaaagctagtgatagagaactttttattctgaaggctttattacaaacttttcagctggggactggtctgaagttcaatttcaataaatcttgtctcattccaataaatgttgatgaggggaaagctcagaacttagctgcagtttttggatgtaaattggggtatttgccttttacttatttgggtttacctcttggtaccactaagccagagagcaaggaggcattgtctttggagaggctatcattggcagcctgggataaggtttgtaagcctaagtgcaaagggggccttggagttctaaacctttctatccaaaaccaagctttgctcatcaagtttttggataagttttacaataagaagaatttgccctgggtcaatcttgtttggacttcctattatggtaatactatccctcatttatcaaatttgaaaggctctttctggtggagagatatttgcaaattgatggatgtcttcagaggtcttgcaaggtgtcatctgaaaagtggaaataccggttcgttttggtatgatgtatggaatgatcaatctcctcttttttactctatgccgaggctatgctcttttgctcaggaccataatgtatcagtctccgatttcctatccatcgaggcagaaggcaatttcacattgccactatctatctag

SEQ ID NO: 10752 - DNA, 1864 bp, Oryza sativa
  unsure (1)..(1864): unsure at all n locations
  Clone ID: PAT_MRT4530_17041C.1
ctagtctcgagttttttttttttttttttttttacacnctatatatttattttcttaggaactgatagcgaaatatgaactgttgttgccagcattttacatactacacgtgaaacaattatgtgtatgtactgtaagcataattgccttagtttcataaccgtttagcaggcaaagaattcctgaactttttcctaaacaagataaaacccagggcaccaaggaaaggccaagatgttacaaaagcaatgtaagtaagcaaccaaacagatctcccctgcgatcgaatgagctgattaatggatatctttacaggagcaatagcatcctggattttatctatgttttgttttggctgttcctgtgatcctacaggaccttgggctggcgtcacattctcttgtgacctattaccgtcacactcattctgtatttctgtggcgattccatcctgttgcacaccaaccatgccattgcggagttccatttcattggaaataggattatctgagtcactattgttggcatcatcatttgtcaccgcagttaccatcccatcttccatgaaattcacatatgggcttttatcaatggatgattccaacgaagtgtgcaagctgtgttcttgtgccttttgccgatgcatgcaggggctatcatgtagagcaagtagaaactcagaaacagctcccacccaccacagctttccagcagttagcccttgaaaaaaggcaagatggccaccgttaggtgcagttgccaaaacaatgtttttgtttgccctgcattcgtcccagggaatggcctcccttgtgcaaagtgggtcatcaagagcactgatacaaagcaggggcactgacacattactaatgtaatttgcactgctgcaccgacggtagaatgtgtccactgtctcatattttgcaaccacacaagtggcatgacggtcgaattccctgatagatcgtgactttctaatatcttcccagttagcaagtcttgccaagacgggttggtgtagttttgcatatcctttcagaccaattgcaagagctttgtcataacatcgttgcacaagcttgcgctgaataaatctgttggtcaccagcagatcccagggtgagcaaatagatacagcaccagccacaggggtaccctcaccttcttctccgagatacttaaccagaatattggcacctatgcttgtcccaacagcaaataatggagcctgtggatacttctgatgaaggtaattgacaatctcacggaaatcttctgtccatccagcattgtagaagcaatcagatgcaacagacagctgcatcttgtttagaacaattagggaaggtagcccaaatacagcagcagtagaatcactagttaatccaggtatcacaacaacaagaggcgtcgaatcatccctagagataactccatcacaaaaaccaacatcttcttcttcacaatcagaggctagtaaccaatccaaagcaatggtcccaccatcgcgaactgtgtacagctgcctcctatacgtgaacgaagggggtctcccagagatgctcaggaacagtgtctgcaaatgagggctcgcaagccacggcgtcgccaagtacctgccatggagggagcggcacttggatgcgacgcggtggtagacgtgggaggcggggtggaaggtgagcgcgacgcggcccccgcggaggccgcggaggaggtcgccgatgaggtggagctcgaggaagcggtacagtaaggcgcaggcgaggaggagggcggcgagggcgtagtgcgccggcggcaccagcgccgccgcgcggagcagcagctcggcggccgaatcgccggcggccgcgtttcccat

SEQ ID NO: 10753 - DNA, 283 bp, Oryza sativa
  Clone ID: PAT_MRT4530_17042C.1
gctccgaagagccacccccagggtcctaagcctgcttcatgttgagggtgccacacctggagactgtcacccccctcccgtacgatgtggtccatgatctcacagggtggttactaggattttccatctatcgcctgcgctacccattcttatacccctccctctaatgagtagaattttgctcgctctgaccattattagtcggaacctttgttctgtggggttccgttccaaaaaagttattcgtcccgatcccgtgtccgaggttttccagaaaaaaaaa

SEQ ID NO: 10754 - DNA, 972 bp, Oryza sativa
  Clone ID: PAT_MRT4530_17043C.1
atggcccgcatcttctctatcgacgtgccggcaccgccgccgccgccggcggcggcggcgacggatgagccgtggatcaccgacacactcccattcgtcccatacgacaatagtatgagctatacaaattattgttattatcccgagatgtttgaagatgcgaatcctgacattagtaaagagatggcgacaataggtggagaagatttacttgttgacaatgcaaatcagcaagattactttcaagcctggacaaactcgtttgattcagtcgcactaatggaaccaggagcattgcaagaaccttcttatctggatttggatccttcttatttcgatttgggatcctatctggaccctgatcatcagcaaatggcatcctcatcgtgttcagacatcgcactgttatcagatactagctttctgcagcctctgaacatgagcaacgcaccttatgttcagttaccgatgatggacgcgaacatcaacaacgagataggagcagcaacttcatcttcagaactcgcacagctcataccgcaatcttcagatcatagtcttctgcaaccactgaacataaacgacgaaacggcatatgatcagttaccggtgatagacacaaacagtagcaacaacaacacaggttcagagtttccctgtgtgaattttcagagctccaacacgggctcgctgctgggtgggagctcaaacatgtttgacggccaagatcaacagacctcgcatatcgtgctgcccgagaaatcttgccctgatccggagaagagacagcgagctgtgcagagatacaaggagaaaaagagcaacaggaggtttgtcaagcagataatgtacgcctcccgcaaggcaacagcagacacgcgaaggcgtgtcagaggcagatttgtgaaggcctcattggagcagggcaccagctctaatgacaataagcagccgaagcatgagggaaattga

SEQ ID NO: 10755 - DNA, 468 bp, Oryza sativa
  Clone ID: PAT_MRT4530_17044C.1
atgtcctccttcctctcccgcagtggaaaccgcctcctacgggtgcgccacatccgggaacacgcatggtcgccggcatcgcagcctgttagccaccggagcgccgccgccccaaccgcctcctcctctcccttctatcggctggaggaagaagaagacgagaagaaggagagagaaagagaaaagaagaagaaggaaaaagaaaaggaaagaaaggctgacaggaggcaaacttatgccgagcagggcaatattgtgatatttaccgaggcgcagttctctctaaagacctcgggaacgccagaactcctctcgctgctgataacgttacgttcagagcgcatggggactaaagttcatggaacaggtaaagcgtatatctactgcagtaggaatattcttaaaaatattcgaatagccgtgctcgcggttatcgggcattgggactcacaatggcatcttggttag

SEQ ID NO: 10756 - DNA, 105 bp, Oryza sativa
  Clone ID: PAT_MRT4530_17045C.1
gcggaccctagattctcgtgtcgacccatcgcgtgcacagaggctgctgttcctgaccgcgctgctcgggacgtgtatgtgtatgtactgacgggcgtgctcgac

SEQ ID NO: 10757 - DNA, 270 bp, Oryza sativa
  Clone ID: PAT_MRT4530_17046C.1
atggctcacaaagatcagcccgaggagcagaaatgttttgaattggctatcaccacctgccgcctacctctgacaaatccgtgggatacacaacaaacaaagatattgacggtcaaatattatgatttaagggccgtcaacagctgggcgcttggccaagcggcaagtggcggcagcggcacgacatggcacggcaaggccagcagcggcatgggagcgacgcggctaggtggcggcaacgtgcggcaagcgacggtgacagtgcggtag

SEQ ID NO: 10758 - DNA, 1361 bp, Oryza sativa
  Clone ID: PAT_MRT4530_17047C.1
atggggaactgcatggacaccgcggcggcggcggcggcggcgccggataccaacaacgccgatccatcaaaagctgctagcaagacaacctattcatcttacccttcaactacaaaaagcggttcatcttggactgtaccttcctataaggatcgtagcgaccttcctactcctaggacagaaggagaaattttatcatcgtcaaatttaaaggcattcacactgagtgaactcaaaaatgcaacaaagaactttaagcccgacagtctccttggggaaggaggatttggctatgtctataaaggttggatcgatgagcaaactcttgctcctgcaaggccagggagtggtatggttgtggccgtcaaaaagttaaaaccagaaggttttcagggtcacaaggagtggctgacagaggttgactaccttggccaacttcaccatgagaatcttgttaaactcattggttattgttcagatggtgataaccgacttctggtgtatgagtacatgcctaaaggaagcttggagaatcatctatttaggcgtggtgcagatcctttatcctggggaataaggctcaaagttgctattggggctgctaggggtttatcatttttgcacgatgctgaaaatcaagttatatatcgtgatttcaaggcatcaaacattctccttgactcggagttcaacgcaaagctttcagactttggtctggcaaaagcaggcccaactggggatagaacccatgtttccacacaagtcatgggtacccgaggttatgcagctccagaatatgttgcaacaggtcgcctctctgtaaaggcagatgtctatagctttggtgttgtgctgctcgagttattgactgggagacgggccttagacaaatcgaaaccagcatcagaacagaacctggttgactggacaagaccctacttgggtgacaagcgcaggctgtaccgcatcatggacatgaagctgggcggacagtaccctaagaaaggcgcccacgctatcgcgaccattgccctgcagtgcatccgcagcgaagccaagatgcgaccccagatgtccgaggtcctggagaagctgcagcagctgcaagaccccaagtacaacgtgacctcaccgcaggttgacacccggaggagatcatcgtcgggttcagttcctaggtcgccgatgcggatgcagccttcgccacggcgcctttccgcctcggcttccccattgccggctgcaggctccccgctgccggcttgtaggactgcgcaagtgcactagatgcacagcctaggatagtttggaacttcgtgctgtagttgtttgtaacctctagctgtatattttggtttgat

SEQ ID NO: 10759 - DNA, 407 bp, Oryza sativa
  Clone ID: PAT_MRT4530_17048C.1
tttatataacatgcggaaggtcctgctcgctctgctcactcagctctgccccgcgcgcgccaccagcgcgctcatgtcgagcaacatcgacttatgacgattacaagactacttcactgcggactgccttaagggctaccatgacgagttcatttccaccctcggattggcctaaggcggcgtacgttgccacatcccctacaccaagatgaccggctacacgccttttgaccactacggtctggtagacatggagaggtgccacgacctctggctgacatcggggggggacataggagcccacatctgccgtggtcacgaaaaccatgacggcaacttgggccttgccctctgtggtcagaccaacatgcttaacggagtattctactggaacggccagctactgg

SEQ ID NO: 10760 - DNA, 246 bp, Oryza sativa
  Clone ID: PAT_MRT4530_1704C.1
atggcacggtcagcggatatacatgacgacgtttcccacaaccaatgctcgacaaagcaaggaggaggaggccatgacggaggtgctggtcaacagtgtggacctagtgaaggtgctgtcgcttcatatgggagctggctgaaacaccagttcagtcctctaccggagctagcaccatccgacacgcggcgctctaccgctggggagaagaagatgagctacagttcagtgcagaacgctagctag

SEQ ID NO: 10761 - DNA, 286 bp, Oryza sativa
  Clone ID: PAT_MRT4530_17050C.1
acaagttccctttttgaggggccggggccaccatgaacctctcctgccgggggatgcccctcgcggcgcctttgacctcctaaatgctcttcggtaagtcctggatcatcatgcgcaaaaccgacgggaagccaaagccggcggcgtaaatcgggaagcccgtggtacggcgccgaccgcgtcctttacctcggcccgctctccggcgagccgccgagctacctaaccggcaagttcccgggcaattacggtgggaacaccgggggcttttccgccaacccgaaaa

SEQ ID NO: 10762 - DNA, 1824 bp, Oryza sativa
  Clone ID: PAT_MRT4530_17051C.1
atggctgagctcggtctacggctcaccggcggcgatcgggtgctcaccaagcagagaaacggaggcagcgaggtccagggagcggcggagacggtggttgatggccaacggcggcaaaactccggcgtcgacgtcgccgggtcgactcaaggcgcgaactgtaacttcgagagtacgggggtattagagatgagccacagagggtgcatgcgcgaggaatccggcggaaactcaccggagcttggtgttgcttcggtggtgaggaacggcggccggagcggcgtcggtggttcgggtggccggcggcgaggacgcaagaaatctgggctagatatcctcttggtcaggggtgatgtggagagtaaatgtgctaaagtggatctccgacgccggccggccaccgccatgaactcctactccggcgaccgctcctcctcctcctcctcctcccgccccaccaccacctccttcgactcctaccagttcgacttcggcgtcaactcgtcccgctcctctgcgtcccgccccctcagaccggggcccggggcaccggcgggagggcgattgatgctcgcgattgtaaatgactatccaccccgagccgttatggcgcagccattccccccgggccctgggaaacagccggctaagacgacgtcgtggacccaccagccgtcgcccgcctccgcggcggcgggggctggatccgggcccacgtccatggtcggcgacatcttcggccggagctggtcctccgccgcgccgtcctccggcctcggcatcccgcaggccaacaaccccggcctcttcagcgacctcctcggctccgcgctcgggtcgtcctcccgcggccagcccaacgcgccgctcagatcttcggcgccgcagacctacaagccggccaacgccaacccaaaccctagcggctctccgttctcgatgggcggcatggcgagcacgctcccgaagacgaccaccgggtcgccgatgtcctccggtggtggcgggtatggtaccccttcgctggggaagcccggttctatgaatgctgcaaagaaggtaatccccgtcaagccgggatcaaggtttggggcgttccaaggcgtgaattcaggtggcattgcaggattatcgggcttccagaccgctgacagtggatttggtagcttccagagttccggtgctgtgaaaccttccagctttactccactggcaccagctccagcgcctgctcctgcggctgctgcagcgaactccggtgtagatcacttggactcgctgtttgcttcgacaacagctgctccgactgcggtgagtaatggtggtggggggggtgacatgtttggtgagatggatggctgggtggatgtggaggcagattttggtagtggtgacagcggtggcgcaaccacagagttggagggactcccaccgccaccgtctgggttgacagcatctgctgctaagtccaaagggatggataattacaagggtgggcagtatgctgatgcgatcaagtggctgtcatgggccgttgtactcattgagaagtctgggaagtatgctgacattgtagaggtgctgtcatcaagggcttcatcttacaaggaggttggggagtacaagaaggcaattgccgactgttcgaaggtactagagaaagataaggataatgtttcggtgcttgtccaacgtgcccttctatatgagagctctgagaaatacaggcttggtgcagaggacctccgtttggttctgaaaattgacccagggaataggcttgcgaggagtatgatccatcgcctgaacaagatggctgactag

SEQ ID NO: 10763 - DNA, 300 bp, Oryza sativa
  Clone ID: PAT_MRT4530_17052C.1
atggctgagctcggtctacggctcaccggcggtgatcgggtgctcaccaagcagagaaacggaggcagcaaggtccagggagcggcggagacggtggttgatggccaacggcggcaaaactccggcgtcgacgtcgccggcggaaactcaccggagcttggtgttgcttcggtggtgaggaacggcggccggagcggcgtcggcggttcgggtggccggcggcaaggacgcaagaaatctgggctaggtatcctcttggtctggggtgatgtggagagtaaatgtgctgaagtgggttga

SEQ ID NO: 10764 - DNA, 2141 bp, Oryza sativa
  Clone ID: PAT_MRT4530_17053C.1
atggctgagctcggtctacggctcaccggcggcgatcgggtgctcaccaagcagagaaacggaggcagcgaggtccagggagcggcggagacggtggttgatggccaacggcggcaaaactccggcgtcgacgtcgccgggtcgactcaaggcgcgaactgtaacttcgagagtacgggggtattagagatgagccacagagggtgcatgcgcgaggaatccggcggaaactcaccggagcttggtgttgcttcggtggtgaggaacggcggccggagcggcgtcggtggttcgggtggccggcggcgaggacgcaagaaatctgggctagatatcctcttggtcaggggtgatgtggagagtaaatgtgctaaagtggatctccgacgccggccggccaccgccatgaactcctactccggcgaccgctcctcctcctcctcctcctcccgccccaccaccacctccttcgactcctaccagttcgacttcggcgtcaactcgtcccgctcctctgcgtcccgccccctcagaccggggcccggggccaccgcggggggcggctgccgccggcggtgtaggcgtcggcggcagcgcgtggacgcaccagccggctaagacgacgtcgtggacccaccagccgtcgcccgcctccgcggcggcgggggctggatccgggcccacgtccatggtcggcgacatcttcggccggagctggtcctccgccgcgccgtcctccggcctcggcatcccgcaggccaacaaccccggcctcttcagcgacctcctcggctccgcgctcgggtcgtcctcccgcggccagcccaacgcgccgctcagatcttcggcgccgcagacctacaagccggccaacgccaacccaaaccctagcggctctccgttctcgatgggcggcatggcgagcacgctcccgaagacgaccaccgggtcgccgatgtcctccggtggtggcgggtatggtgttggtggccgtccgatgaagccggcgggcatggcgtcggcggccgcggcacagccgatgatggggcagaagaaggatccgttcggttcaatagaccccttcgctgcgaagcccggttctatgaatgctgcaaagaaggctaatcccgtcaagccggatcaaggttttggggcgttccaaggcgtgaattcaggtggcattgcaggattatcgggcttccagaccgctgacagtggatttggtagcttccagagttccggtgctgtgaaaccttccagctttactccactggcaccagctccagcgcctgctcctgcggctgctgcagcgaactccggtgtagatcacttggactcgctgtttgcttcgacaacagctgctccgactgcggtgagtaatggtggtggggggggtgacatgtttggtgagatggatggctgggtggatgtggaggcagattttggtagtggtgacagcggtggcgcaaccacagagttggagggactcccaccgccaccgtctgggttgacagcatctgctgctaagtccaaagggatggataattacaagggtgggcagtatgctgatgcgatcaagtggctgtcatgggccgttgtactcattgagaagtctgggaagtatgctgacattgtagaggtgctgtcatcaagggcttcatcttacaaggaggttggggagtacaagaaggcaattgccgactgttcgaaggtactagagaaagataaggataatgtttcggtgcttgtccaacgtgcccttctatatgagagctctgagaaatacaggcttggtgcagaggacctccgtttggttctgaaaattgacccagggaataggcttgcgaggagtatgatccatcgcctgaacaagatggctgactagaggtgttttgctagtgcattgtgtacaaccactgtaatccaccttgacacgagaactgtgagttattttgaattgatttactatacttgtgcctttgggggaataatttgccgatgtgttgttataaaccgtgggattacatctttacctacagtatattcttttatttgtataatcatataatgtatcaagcttgctttaagaattaaaaaaaaaaaagcaaaaaaaaaaaaaaaagaaggccgctcgcgatcta

SEQ ID NO: 10765 - DNA, 402 bp, Oryza sativa
  Clone ID: PAT_MRT4530_17054C.1
ggggggaggggttttcccccaagaaaaaaccacgcttaagccacacttttttttttatttttagggcggtttggatccgatcgatcgacacgatgacccatgcccgaggggggggcacaagttggtgggctagttggtggttcatcaaacaggggcagggtttggtgcacattccggggggggggaccccggggcagtacccgtgggggaacccctccgggttgaataccctggcccagtttgttttgggggcccccgggcctttgaaccgggggttttgggacttgtacgtccgagcctccgccactattaccggcccggccatttaaccaggggttgtaagcagcagccccttgagaagcttgggcgaaaacaccttgggggaagccttcattttttttt

SEQ ID NO: 10766 - DNA, 492 bp, Oryza sativa
  Clone ID: PAT_MRT4530_17055C.1
cggacgcgtgggcgctcgtgccgtcctcgacgacaccctccacctggtgcacgcgcgcggggacggcgggcggagggagggacggcgccgctcgggagagggagcaggagcgcgcgcgtcgccggtggccgagccaagccgagctgcgtcgcggtggtgctctccgcgggaggcgagattcagccctgatccgaggaagtactacaatgcaagaagcacagaaatagttgaggcaggggaagctttgggaatgcactgatatgccactaattgcttacacaccgaggagcttctcaagcattgccaaatttggcttgccaagacagatgctcgtcatgggcatctattttcataggcatggaagtaaaaattttacctgtgaagaagtttgtgcacccatgtgtggtgcaaggacgagccaccaacaccaccaggttatggtttgtcttgctcgctaagctcggctcgacgcatttggataagtttgagaca

SEQ ID NO: 10767 - DNA, 1013 bp, Oryza sativa
  Clone ID: PAT_MRT4530_17056C.1
tgaaaagttcaagtggagacagtgatgatgaattagatatccccttcatagcaactagaggttatgacagtgtagtatggagtcgtttgtactcacaaggccctacggaaatgacgcgtcattcctggaagctatcttctgtggttgctgaacgaacactgaaatctgtgggagcaaaagggatggttgtagggcacacaccccagactcgtggagtgaattgcaaatgcgatggcaaggtttggtgtgttgatgtgggcatgtcttatggtgttctctattcaaggccagaggtcctagaaataatcaatgacagaccaagggttttgaagaatcggagggactcatacgacgagatggaagttttagacttcatataaaaccttaagaaacctgcatgtgcaggcatgtataggaaaaattctttttctggaaagctactgtactggacaattttggatggacatacaggagtggaagtactagagggacagatgacttgtatacacaaatgggaattgatctgccttcctccatgttattttctgacagaacatccagaaagaaatacccatgctagcttctgtagactgtagaaaactgccattgagtacttgcacgcaaggaagctgaaggtcagaagcttatctcaacaaattggtggtgcttgtctataccagcatacaaatttccccatgaggaatttttcatggccctcgtcaagtctaactcaagagtccagacatggcaggaattattaaagcagtgtaattaactggggaaggcatgtataactgattaattgtatattcatagcattctcatacatctgtagaaaacatgtgctatttcctttatggtggccatagcacacccagacttgtagcattcaaacaaacagaccttgtgaagcatcggtagcattatttcatctctagcatacagcacaaaaattcaacagagatacatttgacaaatgaataccctttgttaccccaaaaaaaatgtaatac

SEQ ID NO: 10768 - DNA, 1189 bp, Oryza sativa
  Clone ID: PAT_MRT4530_17057C.1
gattaaatatacatggaaaaaacccatgcaccggtagattcacaagaaggccaagtaaataaagacatgatgctatggttgattcaaaaaaaaggccaaataaataaagacatgataatcgttactgcctttcaaaaagaaataggaggttaagaggcctacctgcaccacacatgggtgcacaaaactcttcacaggtaaaatttttacttccatgcctatgaaaatagatgcccatgacctacagaaaagatgagcttccattgatcaaatagacaaagaaaacagactgtcctctagaaaagagaacagagaacatattgggagcagatatattgcatggtacatgaccattatccctttggcctaacaagaaaacataacctagtgtctgtatcttacataaaacataagactacttatactatcaaatttgaattactaaatcaagatttaaacaatgtgttgtgcattctagaaacttcatggcctttgggatagattattcccatataacattgtaatagccagctgttgttgatggaaaagatggttggatcaaaagttaggttcttgcaagaaaataaacataacaaagtgcacatcatgaaggagtgctgcatgatgaccatctcttcaagctagtagcccatttgttagacttagctgggaataatcaaagcaaatcaacgtctaatggcttgttggatatgcaaaggtagcggaggttatcgataacagtaggaatcaaatggctttattattaaacatgtagggaaatacaaaaataactcaagtgtttcaatagatagttagctacgagcatctgtcttggcaagccaaatttggcaaatgctgagaagctcctcggtgtgtaagcaattagtggcatatcagtgcattcccaaagcttcccctgcctcaactatttctgtgcttcttgcattgtagtacttcctcggatcagggctgaatctcgcctcccgcggagagcaccaccgcgacgcagctcggcttggctcggccaccggcgacgcgcgcgctcctgctccctctcccgagcggcgccgtccctcccttcgcccgccgtccccgcgcgcgtgcaccaggtggagggtgtcgtcttggacagcacgagctggagggggaggctgaagctctgactcttatgtcgacccttgaatttcgg

SEQ ID NO: 10769 - DNA, 4629 bp, Oryza sativa
  Clone ID: PAT_MRT4530_17058C.1
gcacgagggagagaactagccgcgcgtggcccccgctattattttcagtggtctgatactctgatacaacttcaaacccaatattcaagaatcactaggcatttacatgcaatattttcatacattatatgccataacttgatggcagcaagaaggaagccacattattacttatcgaattaatattaacaatgccggaagatctgtactgtactatcaccttatcatttattatctacttaaaaacaaataccacatctctctatgctcatccctgcaactcccatcacctacctccgtatgaactaaactacaaatgccatgttctacgccaaattgtcgacaaggtcttttttttttctttcttcaaagacaatgagactgaaaacctgtacttttcactcacaacagctgctttgcaattgtacacacttctagacagcctgacatcaacaagcagcagcaggccagcagctgggactgggaagccgaatgccgagaaatgcgaaccggtcagacaaatcattggtggatctcgcatagctcccagtttccttctccgtcgatgagtttcagctccaaggaatggaaggggatcaaagctggcctttgcgaggaagtaatcacagtgatgcccatgctagttgctagcttgtacaaatgctcttcaacatcaacgcttgtagcattcgtgcattcgtcaagaataccaaatttaggatggtggaaaaacaaacgggccatcccaagcctctgctgttctcccaacgataaaacatcttcccagtttgaagttgagtcccatccttctctttctagaagatagaccaaccgaacattcactagaattgtcttcaggtgatcatccagcagattagaagcactagacccgttaccatcattgtataacgaacaaatcttcatctctgcttcctcccttgagagagggtatatgatctgatctctcagagtacccaagctggtatatggacgctgaggaacatgaaacatcccatctgaaggtttggtaactctcccagaacacactggccataaatctctcagaactctgaaaatagagctctttccactaccgttggggccagtcagaagaaggcttttcccttgtaccacattgcacgacagcttgctagccaacagtttctgcgatggtgttacaatatccacttcgtgaaatgaaatggtttcttctgcactagtggcatcggaaggcacaaaagtatccctttgagatacacgaagaagctcctcaagctcaaaaatccggttaatcccaccagaaagttcaaggaactttttgtgtaagtcaagaatgtcaccaaaggctatgaaactttgtgacacaacagatgccaagaaccgcagagcatgtgccaactctccttgagttgaagtcaaagctctgtcacccttgtgctctagagcatataacaaactaagaccccatgttacattgtgagggagttgctttgttacaaaatcatcaacaataccataaagccactgctttctcaacagaatctttgagtggtcaagcaatttcatgaatttagcctcaacaatagctttctctcttgatccaccaccaaagaaagcaattgattcagcatgcgttcgcagtctcgagtgcatgaaccttgtaacatagttcaccaggttaaaactgaaagttccttcaagctcttgttcttgcccagcaagatgaccaaagtctggggatacagctctcaggaagcccaaacctagcagcatgtaagcatacaagatagcaactcctcttcgcccagacaaaagcttcattctccatgtaaaccaaagaatgtcgacaagtggttttaccattccagtaactaagccagcaaggtcggtggtcaatttatccacatcaagtgttaatctttggtctgcatcaatacttttacctgacatgttgaataccttgtagaatgcatttcttttcaaataatattgaagcaaatgattggtcaggcgaatccgccatccaagggcaagtcttccagtaagggttctcaaagatggggccacaaaagaatttgcagaactttgcaggacactgataccaatcagacgaataaatgcagctttgtcctgctccaagacaaacttaacagttgtcccattcagtgaagcaattcggtctgagatccaagttcgagagaaaacaagtagtgcaacagcaagcaactgccctccttgtttgtcaagtagcttaggaaccaatattttgaccattgcagctactctggcaggcagaggccttgggaagcaccgtaaatgcgggactctatgtgtttgtattgtttgttctatttccaacttgggagaagttgctataacctttgtagtgtagcaatgttctttggaccttgatgaagcattgctctttgccctgcccataaatgccctttgaacagtaagcgcatcagatttacgatcagtttccaataatgtatagtcagactcttcagtagaaaaggatgagtcatcccttctgtgctggacatcccaccctccttcaccatccaaagacaaaacaatgtcatgaaacgcaactaaagctgggcgatgagatatcgttatgcatgatgttcccattgctcgaacctttttgcaaaagcgttcttccatatcaattgtcacagcgctagtacactcatcaaggatggcgaactttggtttatggtagaataaccttgccattcctaatctttgttgctcaccaagggacaattcatcaccccagttaacttccttatcaagaggatagcgttctagcaagtattccaagtcaacattctttagaaggtccaccatgccatcgtagctaaggggttcaatctcctgatctgctgtaagaggataaattagctgttcacgaagtgtaccaacagctgtgtatggtctttgcgggacatagaaaatttccttattaagatcagagccaacacccggtttgacaatatgaccagaaactaatggccataagcctccaaggacccgaaaaagagaactttttccgctaccattcggaccagtgatcaaaagattagaacccctttctactcggagagttaaatcatcaaccaagacattgctagcaggcgtcaccaccttaacacccgagaattcgatatggtttgcttcactgatataatttccagcagaggaattatgatttaacgatttatcacgaaccccagacagttcacgtgaaacatccagtaactcacgaatgcggtctgcatagccacagattttggtaatgttgattttggcaacaaagtgaacaagcccattatttcttagaatatttaaacgtcttgtgcttatagataggatcccaagagactgaaacagtgatatgattacgcttgtgtggtatcgaagattacttaacatttcagcccttccaagtgtggatgaatcaggtctgaggtggccagagaagaaaggttcaataatgaggacaactgctacagttgcaccaaaatacttcagaaagaaatcttgaatcatgccgaaccaccagttttcatggagtacacaattcaggtgcccaataagagcctggaaacgctgcatgatataatatgcttctctgttctcaccaccataaaatgccacactctcagcatgagttcttaatcgtgaatgaagctgacgataatctccttcgagttgctgttctgtggatttcagctttccgaaagcaggggagaaatttctaattgctccacccgcaactagtatatatcccacaatccagagcatgtattttggacttgcataagaacagagacgccaggtgtatattaatccttctgcaactgcagctagatcatcctgtacaagttcacttagttcagaacagaactttggaatatcactagcaatcctttgctctgggtttgatattcgatgatccacatgtgaaattttgtagtaaaccatattcttattaaggttgtatatcataatggaaggcgttaagtaaattatcaaaagatgggctaatttctgaaaataatcagcatggacaagatctgtcaaaattttcttgaagcgcagactcaaagaccctgttaagtattttgaggtctggtatacggcggattgaagaaagcataagattaggttttcgatgattaggcgtgtaaaggttggaacacgccgaagaaatgctgccctaaacaaatagccttggactcttgctaatctatgtcccacagcagtacgtaacaccgcagttaacgtcaagccaagaaggtagcgggtgccatttggtccaatcttcttcagtaggatggcagcaaggaaatgaagagatctgaggccaccttttcttcgctttgttccggccaatctaccatccacaccattttggcccatcctgtccccattcctggccaatgcagtggtggcatcgtcaccctctgaacgccttctccgttggccttggcttgagcgtgcatacgccaaagctcctccggcaagcagcgcgccagaaacaaccgcaagagttttcctccttgaggccaagagtccccggccacgctccgtcaactgcagcagctgcagggatggcat

SEQ ID NO: 10770 - DNA, 2736 bp, Oryza sativa
  Clone ID: PAT_MRT4530_17059C.1
aggaccggggcaacaagcgcaaatgcagacagctcacgctcacattgcgtttttacatgtgtcatcaagtctgaatcaaagaatctggaggatggctcaaacagcacaagaacaagccggatcaacttagtagatctagctggatcagaacgacaaaagttaacccatgcatttggtgatcgcctaaaagaagcaggaaatataaaccgctcactttcacaacttggaaatttgatcaacatattggcagaaatatcacagtctggaaaacaaaggcatgttccatatcgagattcaaagctgacatttctattgcaagaatcactgggtggcaatgccaaacttgcaatgatttgtgctgtttcgccttctcaaagctgtaagagtgaaacattaagcactcttagatttgctcaacgtgcaaaatctataaaaaacaatgctgttgtcaatgaacaaaaggaagaagatgtcaacatgctgcgtgagcaaatcaggcagttaaaggatgaacttcatcgaatgaagtctggaggttcagatggaagcaacggcagtttttccactggatggaatgctaggcgtagtctgcatctactcaaaatgagtttgagtcgtcctacaacattccaaactatccatgaagatagtggtgatgtggaaatggaaatcgatgagaatgatgttgagaagccctataatcaagacaatatggtaatatctcctcctggagataaagaatgtaaagaattacaggcttcattgaaaattaatggtggcacttcccttgatgtttttgatggggagaatctcatgccaacaaaaaggtcatgctctgatgacagatataagttaaatcttgctgccagtatacagagagggcttcaagtcatagaaaatcatcaaaacaatggagcttggaggagagcatcagttgggttcaatgctagaattgtggatgttcagccttgcaaggttgatgtagcgatccaaactgagccagaagaatctgaagcaagagacaaccctttggctctaatttcttctcatgtacttgggacttctgctaccgtgagcaatgatcccaatgcatgcagggatctgcaattagtacaatatgatgcaggaataacacgtgatgaaccaaaacagcaacaaattctgaaagctgtggagaaggtcttggctggagcaatcaggcgagagatggcacgtgatgaacagtgtgtaaagcaagctgctgaaatccaacagctaaatcgtttggtacaacaatacaagcacgaacgcgagtgcaatgcagttatcgcccaaacacgagaaggcaaaattgctaggctcgaaagtctgatggatggaactttaccaacagaagaatttatcaatgaggagtatctatctcttatgaatgagcacaagatactccaacagaaatatgaaaaccatcctgaacttctacgtgctgaaatcgagctaaagagacttcaggaggaactggagctgtgccggaattacattgatgagaaggaagttctacaagaagagatacaggatctaaaaagtcatttgcattttatgctttcatcatcagcatcgattcgcaggctctggcctccagtgcaattgtctcacggcgttggtccttcacctgtaacaaatgatgctgatggtgataataatgctgttgacacaccagattgggctgaagctgagagtaaatgggtaactctcacagaagaacttagagttgaacttgaagcaaataaatctcttgtaggaaggctgcggtcagaattggagtctgaaaagaagtgctcagaggaagtaaaggaggcattacaaacagcaatgcaaggacatgctagaatcttggaacagtatgctgaacttgaggagagacacattggtttgctcgcaatgcataggaagatccgtgagggtgttgaagatgtgaaggcgagagctgcaaaagctggtgtcaagggagctgaattgcggttcatcaattcccttgctgccgaaatggcagttctgagagcggaaaacaaaggccttcaggaccagctaggggatactgctgaagctgttcaagcagctggtgaattacttgtacgattgaaagaggctgaggaagcagaagcacttgcccagaggcgagcattgttggcagagcaggagacggagaaagcgtaccaggagattgataacttgaaaaagaactacgaccaggaaatcgttgccctaaaccagcgcctctcggaatcatctcatcatcaagaaactactctggccattgaagcttgcgacatggagactacaaagtatgatacggctgggagccccggtgaccagcaatggcgggaggagttcaaccagcagggcgggtcgtttgaggtctccaagagcactgatctcaactcgtggttttccgggtacgacaaatgtaacatctgatgatgatttgcacactttagttcagttctttgtacctttgtattgctagcattgcatgttgtaccaccagctggtgagcacaagagaggaagaagagagttaatcctgaagatgtgtgtactacctcttcactgtcttgtgaggagggcgcggcaagattcttcggattctcccccccaaaaaaagaggttgtattgatctgtcttgtaaattcagatggacactttacatatgacaagagcaacaacgatgttcatgttcaaaaaaaaaaaaaaaaaaaaa

SEQ ID NO: 10771 - DNA, 1909 bp, Oryza sativa
  Clone ID: PAT_MRT4530_1705C.1
atggcggaagaagccgacgagacaaccgtcgccgcacgaggcatgcatgcccgtactcgctgcttctgttcgccgccgccgtgctccagcgcctagggttttcttcgccgccggcgagtgctccagctcctagggtttcttcaccgccggcgagtgctccagctcccagccctgcgcgtcctcctcgccggacgctgccggtgacgtctgggccaagctaggtctgtagtgccctccgattccgtgttcccggaggtggagctggccgaggacgacgccgtggtgtgctcccgggtcaccccggatggcggcggggaggtggtcgcgtggtgcaagattaggcgcggcggcgacgtgtcggcggcgacgatttggaatctgagcttggatgcaattattgtcgatggaagagttatccagcaagaagcagttgacatcaaaccggggagtgaaattgttccagggccccagaaagatgggtatctgttgtacacctttgatataactggcctgaatgactaggacaaaaataatatcaagattgtgctaggtattgagaatgcaaagtgcagcatatgcttaaatttgtggcatgatgttgttactgttgcttcatgcctccacaacttctgcaatggctgcttctttgagtggttaagaaggtcttcagctaattcgcgtgataaaagtcagagtgctgcctgtccacaatgtaggacggcagtgcaatcagttggtgggaatcacttcctacataatattgaagaggctatactgcaagttttttcatcgctacagcggtctgatgaggagattgcattgttggagtcatatgccccggtcaagacaaatattgtaaggcatgcattcatcccttttccatggtcttatgctggtgcgatgattcttagatccaccatggggataaacatctctcgtggttgaaagttacatttgtcatgaatttggattatcattctattttgaagatatccttgattgataaatgcactgccatgtttcagataacattttattctcttatttcccccaattttccttccatttggcaatactcgtggtgttggtttgtctgtactgcactttgacacattatatttaatttacaagacttgccaggtgcctaggaatgtctttagtattcaactttttgacaagataatagtacatggaatgaaaatctgtttacaattagtactggcctcttaataaactaattagtaaaacaataatttccccaaatggtgggctcattccgttagtcgggtacttataattgtagaatttcctttcagtgcaggttgatctagaatcatggttctctctctaagtcctattttgcttatcgaatacttgcctcttaatcagctgaaccatgttgatgcaattacttctaggacatacgtctgcaaccaatgctacagcaagatcatcgatttcctgctctactggttccgtgtatcaatgccaagaaattctataggtcctattttgcttgtcgatgatattgttaaatgttgccatggaatgttagcatctgatacatgggcttctcatctatagacatgttgtgcttgtcattacctctaaccatatcatgttatttaatttatatcacatgattgaaaatgcattttagcatgaatgactcataacgatttagaattttctaacttacaattagcaaaccatggcagcacaatatggtatttcaaattttcatttagttgcactacttgagaatgagtttagtggtttggttggattgtctaagtgcaaatgttgctgtcatttgtgggaatcaggaaaatataaaatgccatatataatatcctctatattttagttcatagagagtatagttccattcactcccaaagaaaatatg

SEQ ID NO: 10772 - DNA, 429 bp, Oryza sativa
  Clone ID: PAT_MRT4530_17060C.1
tttggtttttttttttttttttttttttttttttttttttttttttttttttttttttttttccccggaaaatcagaggctcaaaattaatagggtttttaagcattttacaacttacaggggggggcaaatttacaagcccaacttttttaaagtaagctgtagggggaaagggacccatttttaacaacgggaaaaatttgggttttggaaggaaaccttttgaacaaattaatggggaaataaattgggggggtcgtttccgcccgatctaaaaaaaacgggccgtttgataccaaaagggggtttggcatccaattgaccgggatgacctttttggggatggggcttttgccggactcgggggggaccccaatggagaagggggccttgaggggggggggggtttccatcctccaaagggggccc

SEQ ID NO: 10773 - DNA, 169 bp, Oryza sativa
  Clone ID: PAT_MRT4530_17061C.1
tttggtgtcttttaaaggagggggagcttatatatactctcttccaagatgcatcaaccagacacactatcgtacaggtgcacatttgcgccaatattaacaacgtacatagttggcatataaaaaggagccatgctttcatgttaaggcaggtacaggccctacccat

SEQ ID NO: 10774 - DNA, 397 bp, Oryza sativa
  unsure (1)..(397): unsure at all n locations
  Clone ID: PAT_MRT4530_17062C.1
cccacgcgtccgaattatttggcttagttgaattaggcccatatatggaaacacattttggcagtaaccaaacaagaatctagctattttttaccaaaataattggtagtaactactaattcttgccattgctaaaattttggtaaggataagattagcaaagtatcaacatgccctatgatccaagcaggaacatttagtcatctactcttgtaagaagcaaatttgattctttcacccaacctctttttttttttaactatcctggatttccgtttgttaaatcaatcagattgttttattttcatttttttttctattctgaatttgtgttgcttagctaaatgggattaattggtttcttnctgatttcatttattaatgctatgctcaaact

SEQ ID NO: 10775 - DNA, 3138 bp, Oryza sativa
  Clone ID: PAT_MRT4530_17063C.1
atggcggcgccgccgccgagcgcgacggtggggctgattcccaacctggcggggcgcggggtcttgctccccgcctcggcgcctgattcgagcgcgtgccacgggttcgtggttccgacgaggaggaggaggagggtctccgtggcgccgtttggttggggtttggcgaggagaggccgggtttctgacgcgagagcggatggttttggtgctatgtgcgcggtggctggcggcgaggctggtcccggttcgtccgagttgcggcacgtcgagaaggagctgacgtttagcccgactttcaccgactatgtgaagatcatggagtcggtgaagttggacaggagcaagagtttagagagcacagaatcggatggaaggagctcgaggaggaggtttacaggcgatggcgatgcaccggttgttcggcgaggggacgagaggtcaggtgatggaaggagtacatcttttgataggcaaaagggatctcagaggaacagaggggatgtgaatgagaggagcatggcgaataatgatattcagaacaatagtattaggttagtagagaaaaaaaagccaggtgatgttgaaaagcgtcggggaagacagggaaaggtagatgaatatgtacagagaagaattgttcgaggtgagattagtgaagatgaaggtaatgttgataaaaatgagcgcaagcagtttacattgcagttgaagatgaaagatactagaggtagtatggttgctcatcaatcagagagaaacatgcatgttcagtcaaatgcacggaagggtttgcaaagacagtcgacttcgatggtaagccatatttctagcccttcaaacagcagaattatattggagaacaccaagtctttggtaaaaaggggaaaggagaactttagtagcccagcaagaagcatatatgagaacaatttcaaatatcccagagaaagaaaatttaccaactatgatgtcaatgctgatgataaatttcaaagataccagcaaacaacagaaaattcagggagaggtgttgtagtgggaaggtttggagagggtgatattgattataacaaggctactgtaagcaaaagatatggcaataggcaggcaacgtctgggcatgatggtcatccaacggtcagcttgaagcgtggaaaacctgaagcaattcgaatgcagagaggggaaaatgtccaaacagggaagtttattaggagagatgcgaaagctatagacttggacgatagagctgctttcaagacttttgaggtattcactgatgtcagaaacaggccacgggttcttcaaatggaactggaagatagaattcagaaattggctagtcggctgaatgctacagatgtaaatactccagagtggaaattctccaaaatgattcatgatgcaaaaatcaaattctctgaccactctatcctaagggtcgttcaaatactgggtcgatatggaaactggaaacgggtcttgcaagttgttgaatggcttcaatcccgtgaaagattcaagtcctacaagagcaggtatatttatacaacagtgcttgatgttcttgggaaggcaaaaagaccttttgaggcattgaatgtattttacaccatgctggatcaattgtcttcttatcctgacatggctgcttatcattgtattgctgtgactcttggccaatctggtcttgtaaaagagctatttgatgtgattgaccgcatgcgttctcctcctaagaagtttaagctaagtcctattcagaattgggatcctaggttggaaccagacctcattgtgtacaatgcggttctgaatgcctgtgtgcaacaaaagcaatgggaaggagcattctgggttctgcaacagttgaaagagaagaacatccgccctggaaatacaacatatggtcttgtaatggaggtaatgcttgtttgtggcaagtacaacttggtgtacgagttcttcaataaggtggagaaaacgtcaatacccggcactttgaactataaagttctcattaatgctctttggagagaagggaagattgatgaagcagtcatggctgtcaagggtatggaaagtcgtggaatagttggttctgccagtctttattatgaccttgctaggtgcctttgcagtggaggccggtgcaaagaggcacttctccaggtcgagaagatttgcaaggttgcaaacaaaccactggttgttacctacacaggactgatccaaacctgtatagacaatggaagcatggaaaatgctaaatacatatttgacgaaatgtgcaaatactgctcacctaataacataacatgcaacatcatgctgaagtcatacactgaacatggaatgtttgaggatgcaaaagatctattggagaatattctcagtggcaggataaggagtaaagtggaatcgagtcaaaaggcaattgcagacaagtttactttcaatattttcatggaggcctgtgctgaagcaaagaggtggaatgattttgagtatgcatttcgcaaaatgttatctagtggctaccactttgacgaacgaaggcaccttcgtatggtgcttgatgcatataggaacgggaaggagcagttattggaagatgtatgggactacatgtgccaatatggccgagttccgcctgcccccatgataatggaaagattttgcctgaaactgagacaaggggacacagtggcggcgatgtcctgcatcaatacctttcaggagagcaagatacgcaatgtttcatccatgtcctggttcaatctgctgaaccgtaatggggatcgcttgaaggaggatattattatcaagctacttcatgaactcaacaaccttgtaagctcaagtggtcactctgattctttgtatcaaaatattataagtagctgtacagaattcctttctgtttccacctctgtagaaaaggcgtcttctgatcagcagatgcttccctgttctctttggttgttccgacaaaactttgatactttcagctggtataccaaagaacacatggagaagagctacaggtgtgaaaatttctgggtcaattacacacatagatgtcctcgcataatgaatttacgcatgcagccgattgggaactctcgagcctga

SEQ ID NO: 10776 - DNA, 180 bp, Oryza sativa
  Clone ID: PAT_MRT4530_17064C.1
atggcggcgctaagatccagaaggctccaaaataccccggctggtggtctcctctatttccctaacgctgtcttataccttcccatgcatggaggaatggactaccaaacgatgctcctgtgcgaaggagggcgatggtgcaaatttaagaggtcattaacagtggtggagccaggataa

SEQ ID NO: 10777 - DNA, 475 bp, Oryza sativa
  Clone ID: PAT_MRT4530_17065C.1
tcctttttttttttttttttttttttttttttttttttttttttttttttttggaacgggaaaaattcaacatcctttaatggccccccgatacagaacaacaacaacagcatttttggggggggacccattctatgcctgggttgaaaaaacttgcaacaaacaatattaaatgagtttaccgaagggcagccattgttacttccacagggggacaaagttgccggggcccgcgaaacccaccatccctgaaatgggggatggccccaacgccggaataaaaccttaatgacccggcacgggcaggctcgggttcttaaccaggtcccaaagctccaaaaacggggaccccccaaaaacaaggaaaccggggaaccccgggggaaacacacaaaaaggaaactggtttccattaaagctaacctcaggagtccagcctcctgaggagatggaccagaccttaactaggccctga

SEQ ID NO: 10778 - DNA, 647 bp, Oryza sativa
  Clone ID: PAT_MRT4530_17066C.1
ggccccctctcgcgactcttatcatgttggtggcggcgtcggcctcggcatacttggatacgtgggggatgtcgcacgccatgagcggttgggtggcctgagctagcgccgggagcctcagaggagacctgcacgaccgggtctcccttgaggacggtctcaaaggaagcctggcacgcctgtctttggcccgaccagatcaagccgacggagccgtatatctggttgacgatgcgaccgtaagcctcgccaaagatcaagctgatgacggcagcgcggatgtggtcaggcccggtattgaccatgttgagaatcccagcgctgtctttttaacttcttgaggaagaccgtggcgcttgcctgctcctcgagggtcttgatccactgtatgctcggaaggatggtgcaccctctccctgatcccttgcccaacacccggcaccctttgggactaattccccttttcgaaatgctggtgaagacccttattcaactcttggccacgacttggtccatatccgatgcccacactatagcttccattttgcctaatacttggccttcagggcacacccttcctactcctgtgccgaattcttggcctctaaggccatattctgtatactgagtgaaattaaattccgatt

SEQ ID NO: 10779 - DNA, 1124 bp, Oryza sativa
  Clone ID: PAT_MRT4530_17067C.1
ccgggctgcaggatcggcacgagggccaactgccggcgatatggccgctacggccgcctcctccctgtccgccgccgccgccgccgctcgccggagcttcccctcccgcctccgactcctagcacgccgccgccgcctcccgttctcgtccaccgcctccttctccgccgctgcgccaccggctgccgcggcgagcttcggctgggaggacgccctccgggtcgccgccgacgaccggcggggcgacgagtccgacctctccgggtactcccggaaggtcgacacctgcaaccgaggaatggacaagaagggggagttcgtggcgttcatggtggaggatcaggttgtggggtatatccaccaaggttttgttgaacatctaagagacttccgtgatgtttttaccattgcctcgggcagcaatggaagcaataatgttgaacatgtgactctccattcatctctaaggactccagatgaacgaacaaatgctgttggaagtgtcataagaagcctaggagatctgattccagctctttccaataacatcatcttatggcatgcctgtttacttctctctggaacgtgctgctgctcccttctttggtataaaggcttatggagttcatatgaatgggtatgttgagaaggagggccagaaatttctttggattgctaagagaagtgatacgaagcagacctttccaggaatgcttgatcatcttgttgcaggtggcctgccatatggaatctcctgtgaagagaatgttatcaaggaatgtgaagaggaagcaggaatcccaagatccatttcaagcaatgctacctctgttggagcgatctcttacatggatattgaagggtttagatacaaaagggatgttctcttctgttatgaccttaaacttcctccagattttgttcctaataatgaagatggagaggttggtagcttcagattaatccctgtaccacatgctgcaaatattatccggaggacacattttttcaagccaaattgcaaccttgtgattattgacttcctcttccgtcatgggtatcacgtatataaacccagattaccatggctacctaaagctgctgcaaagcttgaggagaggtga

SEQ ID NO: 10780 - DNA, 531 bp, Oryza sativa
  Clone ID: PAT_MRT4530_17068C.1
atggcgcagcaagtgcggagatcggccaccgtcttcttcacctccggtcgccgtcgccattgtcgattccgcctcctccggcactatcgctactacaacggcctcccgaatgctacaacggcctcccgaatgcaagccatcatcgccacgatcgccatcagcatcgcggtgagcatgttccagatgttggattgcgacgtggtgcgattgctgttggttgtcgacgtcagaaatctgaccgcagatggcgtccaggcgctcaatcaccgcatcgaggcccttcttccaatcgccgagcgtatgtgtgctcgacgggagggcgaggctgtgcacctcgccgccccggagcgtgttgatgcgaaacacagcggcctggaagaggcacttagtcctcacaccgaaagtgaacgacggcagcggaaaaaggcgatcctagcggtgcttcagctccactccacaggcaaaactcaactggggtctgagccttggtcttttaacttcgtcttcagctcagaagcactatacttctga

SEQ ID NO: 10781 - DNA, 777 bp, Oryza sativa
  Clone ID: PAT_MRT4530_17069C.1
atgaacgtcgtcagattgcggcatggttcttattatgtgaattggaatgtcggggtcgggccggccgcttccttcgtgcaggccattacaaggctcgctgtcgaggcgatcagcgaggtatggggtcccttcgatcccgtgatcaaggtgcagctgatgaagccgccgccgccggaggaagcaggagaaatccatgaaagcttcgtcatgagattggaccagcagctggccgccgcggtggcagagcagctcggcctgctcaacaacgaccaagaataccgcgagcgcaaggaagcccacgaggaggcgcgctatttctcatggggctcagtggagagttacggaacacggccggattatgccgatctacggcgtcggatcaacgccatactgtccagtaacaagtacctgctggtggttgagaacctgtacgagcccatgacgccctattatttcgtatactctgtggggcttcctttccctaattactcctttacagactctcgatggctcatatccaccgtgtcccaaaaagtctgtgacaaaagcaagtcagcacgtgatcaagtgtatggtcccttcgatgatgacgacaccatggtgctcatcctctcctcactgcatcagtcggccaaggacatctccaaggctgtcgtcgggcacgacgacgatgaggagcactggcaccgtgccgcactccggtgttttcactacgccctgctgcagctgctcattccatgtgaacaagacaacaacagcaatactactagtcactga

SEQ ID NO: 10782 - DNA, 5016 bp, Oryza sativa
  Clone ID: PAT_MRT4530_1706C.1
atgtcgaacgaggtgaaccatgtagggaaggcttccatgtttaatggcacaaactactccacttggaaaattaaaatgtctactcacctcaaagctatgagcttccatatttggagtattgtggatgtaggctttgatatcaccggcacacccttgacggagagtgatcaccgtaacctccaactcaatgcccaagccatgaatgccttgttcaactctttgagccaagaggagttcgatagagtgagcaaccttgagaccgcatatgagatttggaacaagttggcggagatccatgagggtacaagtgagtacaaggatgccaagcttcatttcctcaagatccaatatgagacattctccatgttgcctcatgagagtgtgaatgacatgtatgggaggctcaatgtcattgtgaatgatctcaaggggcttggggcaaactacaccgatcttgaggttgcccaaaagatgcttagagccctaccggagaagtatgagacccttgtcaccatgctcatcaactccgacatgtcaagaatgacacccgcaagcctcttggggaagatcaacaccaatgacatgtacaagttgaagaaggagatggaggaagcctcaccctccaagaagtgcgttgctctccaagccaaagttgaagacaagagcaagagcaaggtgaatgaagtcaatgaggacttgagaaaggagagaggaaggggctccaactcaaataggagaagaaatagaagacccaacaagactctctccaacttgaggtgttttgagtgtggtgagaagggacactttgcttccaagtgcccttccaaggatgatgatggagacaagtcatccaagaagaagactggaggctacaagctcatgaagaagcttaagaaggaagggaagaagattgaggctttcatcggggaatgggactcaaatgaggagagctccgtctcatccgggtccgaggaagaaggtggtgatgatgcaagctccaagaagaagaagatggccgttgttcccatcaaggaggctccatcactcttcgctccactttgtctcatggcaaagggctcctctaaggtaacatcccttagtgatagtgagagtgatgatgattgtgatgatgtttcctatgatgagcttgtgagtatgtttgaggagctccatgcttatagtgagaaggagattgtcaagttcaaggccctaaagaaggatcatgtttctttggaggtcttgtatgaggagttaaagacctctcatgagagactcaccatttctcatgagaagcttaaggaagctcatgacaacctcctttccactactcaacatggagctcacattgatgttggcatatcttgtgatttgcttgatgatagtgctacttgccatattgctcatattgcatcatctagcatttctacctcttgggatgatcttatggatatgcctagccctagctctagctctagctcttgtgtttctatttgtgatgcctcacttattgttgagaacaatgagcttaaggagcaagtggctaagctcaacaagagtttggagagatgcttcaagggtaagaacactcttgacaagattttgagtgagcaacggtgcatccttaacaaggagggacttggattcactccaaagaagggtaagaaaccttctcaccatgccactcgttttgtcaagagcaatggtaagtattgctccaagtgttgtgaggttgggcatttggtgaactaccgcaccggtgggagccattgggtgcttgatagtggatacactcaacacatgaccggtgatagggctatgttcaccacatttgaagtaggagagaatgaacaagagaaagtgacatttggagacaatagcaaaggaaaggtaattgggttagttgcaaaaacttcattgggttggctttggcataggaggctagctcatgttggcatgaatcaattgagcaaactttcaaaacgtgatctagttgtgggcttgaaagatctgaagtttgagaaagataagctttgtagtgcttgtcaagccggcaagcaagttgcaggttctcattctactaagagtatcatgtccacatctagaccattggagctcttgcatatgaatttgtttggcccaacaacctataagagcattggtggtaatagtcattgtcttgtgattgttgatgattattctcgctatacttgggtgttctttttgcatgataagtctattgttgccgagtttttcaaaaagtttgcaaaaagggcccaaaatgaatttagttgcactcttgtgaaaattagaagtgacaatggttccgaatttaagaataccaatatcgaggactattgtgatgatcttcatatcaaacacgaactttccgctacctactcacctcaacaaaatggtgtagtggaaaggaaaaatcgtacattgattgagatggcaagaactatgctagatgaatatggtgtttccgattctttttgggcggaagccataaacaccgcttgccatgcaaccaatagactttatttgcatcgtctcttgaaaaagactttctatgagctaattgttgggaggaagccaaatgtcgcctattttcgagtttttggttgcaagtgttatatttaccgaaatggtgttagactaaccaaatttgaaagtcggtgtgatgaagggtttcttctaggttatgcctcaaatagcaaggcataccgggtctacaacaagaacaaaagtattgtggaagaaaccgacgatgttcaatttgatgagactaatggctcccaagaggggcacgagaatttggatgatgtaggtgatgaaggcttgatgagagctatgaagaacatgtctattggagatgtcaagcttattgaagtggaagacaagccatccacctccactcaagatgagccatctatttccgctacgccaagtcaagctcaagttgaagtggaggaggagaaggcacaagatccacctatgcctccaaggatacacaccgctctttccaaggatcacccgattgaccaagtgttgggtgacattaatgaagctctttgtgatccggattggatgaatgctatgcatgaagagctcaacaactttgcaagaaacaaggtgtggacttttattgaaagacctagagaccacaatgtcatagggacaaagtgggtctttaggaacaaacaagatgagaatgggttggtggtgagaaacaaggcaaggttggtggcacaagctttcacacgagttgaaggtttggacttcggtgaaacctttgcccccgtgacaagacttgaggttattcgcatccttcttgcatttgcatcatgctttgatataaaactatttcaaatggatgtgaaaagtgcatttttaaatggtgaaattgccgaacttgtctttgttgaacaacctcccggttttgaagatcctaaaaatcctaaccatatttacaaattctcaaaagctctttatggtttaaaacaagctcctagggtttgggaatttgagatatccatgattggagagttgagcttcttccttacacttcaaatcaagcaactcaaggatgggatgttcgtgagccaaaccaagtacatcaagtatctactcaagaggtttggcttggaggatgcgaagcctatcaagacacctatggcaaccaacgggcatcttgacctggatgggggaggtaaaccgggcgctgcccgatctgaccgcccatatagggccgttctgaccggcgtggccgaggcggattacgctcaaattgatgaagaggttgaggtcaatgttgaggggctagtgaggaggaaagtggagatgatgtcggtggaagtggagaggatgaggatgaaggaagatctcttcaggactattggcattgaccggattgtgactcttaagcaagactacaatgaagatttgatccggcagttttatgctacagtgtgggtggctgaggactatagtgagatggagtggatgtccgacaccctccagtgttctttctctaggaggcaattccggcggctcctcaatattctgttggactttggagatgacttgcatgaggagcacccccacaatccgctctccatagactatctctctcagttttatgaagatggagtgcggtacacacatgggaatgttgccggcttgaggaccatccctagtgtggttaacaggattgtgagagctaccatcctccctcgccttggcaacaatgatgacattaggggggtggcttggcacgtaatcgatgccatcagtcaggcccgtcaattcgacattgtgactctcatgatgcaagagattgccatctccaaggggaccttcactcagggaatctattatgccccttacatcatgaggttgattcaagacaagcttggggctactggtcagaatttgaagaagcacaagcagtacaagccccgccttcagcttggagctccccatgctcctagggcggcgccctcctctcatcctggagctagctcaagctcagcacgtcctcctcctcctgggtataatccaaatgccttctttcatcctcagtatgcctactttggaatgcaaccaaacgagtacttcaacccgagaaacaagaggggaggctcttgcggggcggcggaggacccgacggcgcccgcgggacaggcggcggcgttgcggcggcggcggcgcgcggcggtggttcggcagcgttgggcgacggctcaacggcgcgtggcagcggcggtggtgcggagtgcgcaacggcaaggtggttgcggcgtgcggcgctgggcggcagcggtggttgtggaggcaaagtggcgagcgatgcgtggcggcggtgaggagggctcgacggcatgcggaggcgaggaggaggtgggcggcggcgccgcggcctccatccccgaccggcgggggccatctccatccccgaccgccggcctccaggagctcggggtcaccggcgccaagctcgagcgacgacgacgatga

SEQ ID NO: 10783 - DNA, 344 bp, Oryza sativa
  Clone ID: PAT_MRT4530_17070C.1
cttcttacggggaattgcagcggcacaaccgtatgacagctgttattgctattgggatgtgctatactgcctgctggaactccgaggatgcaagcttcacatcccctgcaagcagacctatggctatcacactggagtcatcaaccatcaccgctgagaccaagaccatatatcctgttgattaatgagctgggcacaatggaatagtgtgtctattagacacacattagggggacaagcatctaaagtaagagcccttcgtgacgcttacataaagtgctcactctggtgttcaacaagctcaaactactgtctacatcggtgacttatgagcacacacaagg

SEQ ID NO: 10784 - DNA, 157 bp, Oryza sativa
  Clone ID: PAT_MRT4530_17071C.1
taaacatgccaagaaactaggcgtcaaaaatgaagaaatgcaatatacagtgccgtctgcaatccggactgcatggggtctaacaaagactattgtcttcatcgaagcccctgttgagctgagctgtggtgctgtttctacaggaagaaatgcataa

SEQ ID NO: 10785 - DNA, 391 bp, Oryza sativa
  Clone ID: PAT_MRT4530_17072C.1
aaatatgaaagacaactttttttctatttaaatcaaccaaagttagccggaagactgggcagatcatagcaccaaaacaatagcttgcaaccaatttattgagtaaacttatatccggacgccgacctaggaggatatggccctgttatcaacattttggcagcggttgattcggattggagagggtgcaccgaacgcaaacccagcttgatcctggggcctatgcccctcataagttaagagaagccgaatgcatggagctagaacatcatttgctgagagcacgacaaagggaactctctcctggagagagggttaccatacaattaggatcggtcttcaaagcaatgtaagcacaacctgaaattcgggccttcttaacaacgggata

SEQ ID NO: 10786 - DNA, 2295 bp, Oryza sativa
  Clone ID: PAT_MRT4530_17073C.1
tatatgtgtcgacgtttgatgtcgcaattctggtatttgtatagtatggggatcgtcggtgctagaatatatatgcgagattgtagtaaaagggacagaggcgaggatttttatacaggttcgggcccctgaattgtcaggtaataaccatacatcctgttggccgaagccggtcgttgctcttattcatcataattacaccagtataatatttgggatagcctatctaactgttgtcgacatgacggtctgtagtactgactcgtagtcgacaacagggtagccttcctcctcgaatccgcatccggtgagatcagagacagcgctatatctctcctgacggtatccgtaggcaccgtaagggactagccatgcctatctctgaagtcgatatctggcgtcttgtcttggcgcatgttggcttgtatgttgatcttgtgtcttgatctattgttccgtgtcccctcttctcctaggggccttgtatttatatccgtaggtgttctcttgtccaagtagaacttgggcaacaaatcaatcatggcctccttcagattctgaaaatgttcatcatcgatggaatagttaccatataggtgtttcaggacatctgctgcaattttcctgtggatgctgttgtacaagcctgaatcagttttaccgatacaatcaatcatattaggaccatatttctccaatatgatggtggcacagcttccaaatccgaaagatagctgcgccagctcttcacctgccagattttcaaactgggagcccttactcttgtgaagaaacatgtcgatcagggagccaatgaatctttctttgttctggtcacccataaccgaagatgtatcccagcatatttgtgcgagaacccttatagcttgtttcttgacctcttcgtcacatttgtcacagtcgataatactctccaaggagctgattgcttccaagcttgtcgatatttcgcgccatagaatgttgtttgatcttgtagtcgcagacatgaaccgttttataagtttcaccccagggtctactatatcgcgggaccatttgtcatgtttccggaggtgtagttctttgtcgtttataagtgctactatcttccagaccagatcatccgtgttgctcatgatcctcaggttgttctcgtcgtcggagagctttagaaggatttgaatgcctctaacctgcatctgtccctcttcaccgacagaaatacggtggccatactcctcaagtggctcatctggctgatgaaatggcttgagatcaagcaacgaagatatgcactggatcccttgcaggatcttgtccaagcggatgtcgattacaaagtgttccacaatcctcgcggcgcgcaacctgatctcttcgtcatatgggcttttggaatccagcatctgtaccaagttgtggagtatggagccggaggacgctgatccaattgtattggatatcagcatactttgtcctggaaatccgctcccaattgcacccgagttaaatcggatgagtgtatcaagaatccttactccagataggtacctgttaggtgatgtggactccatcagctgtgcggcgtacgtgatcatgttccgaccaccggcaaaggacgggtccttctcgcatcccaccttgatctcgtgcaagtaatccaagaccgatccacgtgacgcctcgtcgaacccgtatgcatcggccacatttcttaccagcttgttttcctcgtaagcagagatggtcagcccaaacatgtatagcaggaacagtgggcatagcacgatggtgaacaccagcacccgaacggcacccctgaacccgagctctgtgcgggtatggggcaacgcgatgaagactgaagcctcccatagccgcttgaatgaatacccaataaggcgtatatttccattcagaaaaacatcgaatatccggaacaggggtgggcactgggcacacgccccttggtgagcaccagcacctgtgccgctgtgcgtggtacgccttggctttgaaggctcaaggcatttcttctggcggttgagttgtccccgagtcctcaacggcggcagcgcccagctagctgcggcgcagcagcggctgccaatctcacgccgcgcgtccgtgcccccaggccggccgccgcgaaggccgccattgcccacgcgccgccgcccctgccctgtggcgcccgggcggcgagccaggcagtgcccgcactccgccgcccgcacctctaccctccaccagtccacctccagtccctggagctgcctcagacttagacgg

SEQ ID NO: 10787 - DNA, 440 bp, Oryza sativa
  unsure (1)..(440): unsure at all n locations
  Clone ID: PAT_MRT4530_17074C.1
gcgtgtctttgctgttgaacatgatcccatgcaccaatatctgcantataacatggtacangtatgaagaaattgttgaatggtacgctaccatcactagtaggtaaaagtagcttatttgcacgtttgaagggaganatacagatacagcaattctcaagctgtactgtgcaagcatgcaatttcccagccttaatgtgcaaaaatagggctgaaaccttagcaaaaaattgtgaagatcacacatgagaaaggatatatagtatgatgcanctgtactgcaacggaaatggtgagcatatagatcaatggagttcacangtcgcttcagcttatcactatacggtactgtangtacgnacttccaaaagaaagaaagttcagccggatttttgcatagtggtccatcccaggtaggcggtanggttttcacctaattt

SEQ ID NO: 10788 - DNA, 681 bp, Oryza sativa
  Clone ID: PAT_MRT4530_17075C.1
atgttcttgtccgggatctcgccggcggtgcaccatgacctgcagccgggcggccgtagtccgtacgacggcgacgacggcgaccgcacgctggtggtgctgctcaccttcggcatcttcttctccttcgtcatcctctacctcgtcgccggcctcatctgggccgtcgtcatcaccgccgccgccgtcgtgctgtccttcctctacctcagggtccggcggcggcgcgccgccgtgggcggcacggcggcggcggcggcgcccaacgacgtggtcttcatcgtgggggctcatcaggctgctcggagcaccggcagcagcggcggcggcggtgatgtcgccgccgcggccatcgtgtcggcgatcccggcgttcgagtacaagagggtgaacggcggcggcggcgaggacggcggcgcggcggccgggtcggggtgggcgcagtgcgtgatatgcctggggctggtgcaggtcggcgaggtggtgcggcggctgccggcgtgcaagcacatgttccacgtggagtgcatcgacgcgtggctgagctcgcactcgacttgcccgatctgccgcgccgacgtcgtcgacgagctcgccgccgccgccgccggcggccggctttctctttctccctacggaactgaactaattcatatgaaattcataacagaattcctgtag

SEQ ID NO: 10789 - DNA, 1929 bp, Oryza sativa
  Clone ID: PAT_MRT4530_17076C.1
tcagcaacaatggatggcgtcgttgttcgagtagcgcattggggcggccctgggtagcatcccagtacggagggacgacgcgtcgtctaccgccaccgcgtcgcgcggctggaggagaacgcgcacggtggcaggcgggggagcggcggcggtggcggcggcggggtgcggcggaggaggcaaggcgagcggcggcagcggaggaggaggcaaggcggcagcggcgagcggcgggggatgaagcagcgaacggcggcggggtgcggcggagggggcgaggcgaggctgcggcgacagcggaggaggcgaggggcggcgggagctcacactgctcgaggcgaggcgaggtgagcggcaacggggtgcggcggaggaggtgagcgtgacggtggaggaggcgagcgcggcagtggaggaggcgaggcggcggcggcagttggccggggggggcggtgacagacgacgacgcgcggcgcgggcggggctcctcacctccttgccccttcccaccagccactcatggaggatcagatccggcgccacttccctcctttcgtcgggctcgaacgccgagaccaccatggcctgaagctcccgtgctctagccctcatcatccgggccccttcctcctctccggcgagcagcgacgccaccgcctctgccacgcggccgcgcgtcatcatcgacggcttgccgccgccgtcgttgtcgtcgtcgaacgccatgccgaagcaccacaggcgcgccacggcgcgtgcgttcatgtgctggtcaccgaagaatggccggcacgccatgggcacgccgccggacatcgcctccaggacggctccccagccggagtgcgtcacgaacgcgcccaccgccgggtggcgcagcacggcggcctgcggcgtccacgccaccacgagcccggcggcggagtcgccggccttggtggcgcggtcgaggaactccggcgggagcagcggccacgagtcctcccggagtgaccagaggaatggcgcgccgctggcctcgagccccgcggccagctcgcggagctcgtccggcggcggcgcggcgaccgtgccgaagctgacgtacgcgacggagcccgcggggcggcgcgcgagccacgcgaggcagccgtgggggtcgtcgtcgttggcttgcgtggcggcggcgccggggaggaggtggtaggggccgatggggaggcagttggggagcgcgtcggcgagggcggcggagacgtccggcgggaagaggcccgggaacgcgttgatcgcgacggcggtggcggcgcgtggcagccgccgcgccacgcggccgaggagcatggtcatgacgcggtgcatgtcgccgccgacgccgccgccgccgaaggggaggtcgcggacgcggtagctcccgaggccagggtaggaggtgagcagctcgtcgccgcgagcaccgtggaggtcgtcgtcgtcaccgatgtcctcccggatcgcgtcgccgacgatgtgcgccaggagcgcgcacgggccacccgtccagacggcgacccagggcaccccaacctcggcggccatggacatgaacgcgtccccgaccacgcagctcaccgccaccccgccagccgcgtcgccggccgcctccatcgcccgcctgagcccgccaccctccgcagcctcgacgaacatctccatccggcgccacaccggccacgtctcctcctgatcaccatccgtgggcacctccacgaaccgcaggttgttgttcccggcggggacgacggcggtggcggggaggcgcgcgagggagtcggcggtggagaggaaggagaaggtggcggagggcgccgccgtggcgagggcgcgcgcgacggcgaggagcttgggggcgtgggagctgaaggggaaagccaccacggcgacgtgcgggtgcgatggcgacgacggcat

SEQ ID NO: 10790 - DNA, 1100 bp, Oryza sativa
  Clone ID: PAT_MRT4530_17077C.1
cattagttatattacccacacatcgccacgcattgccggccatgtctgccgccgcctgcatctcctccttccctccaccgccaatggccgccgcggcggcgccggcgccggagaccaccatcgacgtcttcgtcgtcgccaaccacacgccggtgaccgccgccgccgacaaaagcagctgcgagggggacgtcgtcgccggcggcgggaggacggtgaggaggccgcgggcggtggcgcggacgctggagtgcgagcggcgggtggtcggcgaggggttcgcggtgaggaggggcatcgggaggaaggagctcgacagcctcgatcctttcatctccctcgacgagttcgagttttctccaccagccggcttccatgatcatccccacagaggattcgagaatgttacctacatgctcgagggaggcttcagttaccatgacttttcaggccacaagggcaccatcaacacaggagatgttcagtggatgacggcggggcgcggcgtggtgcacgcggagatgcccggcggccatggcgtccagaggggcatcaacctctggatcaacctctcctccaaggacaaaatggtggagccgaggtaccaggagctggcgagccacgacatccccgccgcggagcgcgacggcgtgtccgtcaaggtgatcgccggcgaggccctgggcgcgcgctcgccgctccagacgcgcaccccggcgctctgcctcgacgtcgccatgcggcccggcgcgcgcctgcgagcgcccgtcccgcccgggtggagcgcgtgctcgtacgtcatcgacggcgaggccgtcttcggggacgaggccgcggcggcgggcgcgcacacctgcgtcgtgttcggcggcggcggcgacggcgtggccgcgcgggcgacggagcgctccgcggcgaggttcctgctggtggcggcgcggccgcacggcgaggccgtggtgaaggacgggccgttcgtgatgaacacccgggaggaggtggagcaggccagggaagactaccggaaccgccgcaacggcttcgagatggccgccggctggagctccgaccacgttgccaccgccgccgcggcgcactga

SEQ ID NO: 10791 - DNA, 411 bp, Oryza sativa
  Clone ID: PAT_MRT4530_17078C.1
atgtcacggttgattagatcgggtttgctttgtggcgaaggcgtccgtccgatttcggtgtcgacgtcgacgtcgagcgcgacgtgtgcagccgtcctcgcacagaactggttcacaatctcccatggaccacgtccccgcggctcgctcgcaccacgcggcctcccgcgcgcaggagatgccgagatgccatccagcccgttggtctcgcgcagcacggggcgcatgcatgcaacgcgcggcgcggcccgcgggttttgtccgagcggagatttcgcgggtcagaggcagccgctcgggacctcgggtgaccgtgtggtccgtgcggtgttgggggcgtgcgtggtgcgcgagtcgacgcagccggacgccaaaccgccgggcgccggcacgtcgtgtggtggcgcgtga

SEQ ID NO: 10792 - DNA, 330 bp, Oryza sativa
  Clone ID: PAT_MRT4530_17079C.1
atggcggcggcgccctcccctccgccagatctggcgggagggaggcggcaggatgggaagccccggcgacctctcgtgatggaggcacccgcaccctcccctccaccatatccggtgggagggcagatggcggacctcggcgacggggtggagaagaacgctagatgccatcgtgttgttgatgttggtcatttttattttcttgatgtttttgtgttcatgggtattgtcgatgtttacgtgttcatgtgttcattaatcttgaatgtgttctttgatcttgtcaggataaaggcaagctactcgatggatcgactcaaatcgaggtga

SEQ ID NO: 10793 - DNA, 423 bp, Oryza sativa
  Clone ID: PAT_MRT4530_1707C.1
atggcggcggaacggggaagggcggcggcttaccgacggcggcgcaaggcgaggcgacgctcggcgcggcatacgacgcggcgcggcggcaccgagggcggcggcgcgcgcggcagcggcacgggacgcaaggcggcgaagggacgatcgcgcggcgacaggacgggcgacgcgacggcgtcaggacgggcgacgcgacggcgacaacggagcagggctcgaggcgacggcaacgcgcgcggcgcggcagcggcgatggcgatgcggcgcggcagcggcgcggggcgcgaggcggcgacggtgacagcgacgacggcgatagcgacggcgaaggcgcgcggcggcacggggctcgagacggcgacggtgcggcagcggcggcacgggtctcgaagcggcgacgggacgcgatcgaacatctag

SEQ ID NO: 10794 - DNA, 691 bp, Oryza sativa
  unsure (1)..(691): unsure at all n locations
  Clone ID: PAT_MRT4530_17080C.1
tctctctctctctctctctctctctctctctcatctcatcatcatcatcatcatcatcatcatcatcatcatcatcatcaccgacggcccgaccaccgancggtagagaagcctaccagccttatcagtatcccctattactagcacggtaaaataagacgacgcnagagacatcaatacatcggtccatcagcctgtccttcctcgtcgttgaacatcagtacatcccgtctccacaattcccacacaacatcacgaatccagacaccataaagtgtaacagcctggggtgcctaatgagtgagcaaactcacataaattggctacgcctcactgcccctttttccacttcgggaaaacctggtcgtgccatcctgcattaattgaattcggccaaacaccaccagaggaaaagccggtttggccttatcgggccacctcttaccgcttacctcacttcactgactcccctcccctcgttcttccggcctgcgcaacctgtaaacctcactcaaaggccgtaatccggtaatccnnagaatccgggaatacccaggaaaaaaccttgtaaccaaaaggccaccaaagggccaaaaaccgtaaaaaaggccccttgccggccttttacccataggcctcccacccccttaacaaccttcacaaantcaaacccccaatcaaggtgccaacc

SEQ ID NO: 10795 - DNA, 417 bp, Oryza sativa
  Clone ID: PAT_MRT4530_17081C.1
atggcagcgccgacggtggcggagggaggcaggaagcggcgtggggagggaaccgggcggcaaggcggcgttgcgaggggaaaaagaaggcagagcagcggcggcaaggcgaaaatcggcgcggcggtgcggttgaggagcggcgccgtgatagactggggcaaaagcgggagggcgctcacccaagcggaaagcgacacggcaccacttgagaggaggacaccggccgtgcgagcgaggggccccaccgtcagattccgcggggccccgcatctcgatgtccacgtagcgcaagcagccgcccccggcgcgggtgttattatatgttcaccggaatctctagccacccggggtgggacccaccggtggggcccggtggaagtggacgccaggcgggtaaggaaggggagccggtga

SEQ ID NO: 10796 - DNA, 216 bp, Oryza sativa
  unsure (1)..(216): unsure at all n locations
  Clone ID: PAT_MRT4530_17082C.1
tttttttttttgttaagcaaccacttacgttagagattcagagataagcgatgttactttgtttttaccaacatttacatacaagcggtacaacacatatggctggaaaaccaagtggtttntggcaatatgtgttgtaccgcttgtatgtaaatgttggtaaaaacaaagtttcatcgcttatctctgaatctctaacgtaagtggatgcttaac

SEQ ID NO: 10797 - DNA, 579 bp, Oryza sativa
  Clone ID: PAT_MRT4530_17083C.1
aacggtattggtgatgaatggtctttcatctggaactctgacaaatacacagctaagaggttttataagctcacatactcaaatgtgcatgtgcctaggccttttgtctggatctggaaaacaaaatgtgtaatgaagattaaggtttttgcttggcttttattcagagacagacttaacacaagagacatgctggataggcgacattgtgcaaaggaaaatgatgacctcacttgtgaattatgccagaataatatcagagagacaagagagcatctttttttcttttgcccttttagtaaactttgctggcagcatttgggaattacgtggaatcctgacctagaattttttcaaatggtggttttggctcgcattcagtttaattagaaaggtttcttggaagttttcttcattgctgcttggcatatttggaagcaaaggaatgggaaaatttttcgcaatgagcttccctcgttcagttcttggagggctttattcagagctgaggttcttctgcatttgtgcagaatgaaggatccactaaaacagattgtttctgattggttacagacagtg

SEQ ID NO: 10798 - DNA, 481 bp, Oryza sativa
  unsure (1)..(481): unsure at all n locations
  Clone ID: PAT_MRT4530_17084C.1
gcggcttgcagcagtatgatccctctgaatctgcacatagtgtgtccnggcggcaaagggtgcccaanaaaaaaaacgaagaaaaggaagaacagattgaacncgtctcttctngggcntncnanggtgcccagcaaccgcatcatgaatagggtgtagaatncccccccccgaataaatnaaacatgccatctctctggcgcccncattggtgtttttgttacatntttcanctcctgttngcgataccccaaaatntttgtntacattgctngtggagaaaaaatnttgacnccccccccccctttccccccccccnccccccncttgttcantccnctttgccctnngataccaaattagtcccaaaaantanttttgggaggatatggtctctccctttcctttcccccccgttttntctnttgtgccccccgtttttncccgaaaaaangtnnanggacantgcncaatggtcccc

SEQ ID NO: 10799 - DNA, 3234 bp, Oryza sativa
  Clone ID: PAT_MRT4530_17085C.1
atggcgattccaattcttcgtcgtatcatcccactgctgatgctcctcctcacactctggccggtgccttcttcctcacttcctgacgagtacagtgacagagaagcactactgcaattcagggcggcgctgtcagtgtcagaccagttgggctcactgagctcatggaatggcagtaccggctccgacttctgccggtggggtggcgtgacatgcagccgccggcatccgggcagggtaacctctttaaatctgagttcattaggtctcgcaggaagcatctctcctgtcattggcaacctcacttttcttcagagcctcgatctcttcaacaacacactctctggagatgtgtacttcaccagtcagctacatcgcctgcactatcttgagttagcatacaacgacttcagtggtgaccttcctgttgggctctgcaactgttccaaccttgtgttcctcagtgtggaggccaatgagctccatggggcgattccgagctgtctgggatcgttgttgcagctgaaagttctttaccttggtgagaataatctcacaggaactgtccctccatcgctcggcaaccttaccatgcttctacaaatagcactctatcagaatcagctggaaggaaccataccagagggcctttccggcttgagatatctgcaatatatccaagcctcgaggaacagcctctctggcacactaccacctctgttcttcaacatatcgtctcttcaataccttggtttcagttcaaacaagctgcacggcagattgccacccgatgcaggaacacgcctaccaaaccttcaagtgctccgtttgggcggcattggcaacaacttctctggaacaatccctgcctccctctctaatgccactgaaatccaagtactgggtcttgctaggaatagctttgaagggaggatacctcctgagataggaaaactgtgcccagtaagtgttcaaatggggagtaacaagctgcaagctaatgatgctggggattgggagttcctgagatatttcacaaactgcacccgacttcaggtgatagatcttagtgacaacacccttgggggaatacttccaagttttattgctaatttatcaaggtcaatccagtggctaagcatggcaaaaaaccaaatctctgggataattcctccaggtattgggagccttaaaggaattgaggacttagaattccaaggtaataatctgtttggtgatattcctggtgatattggcagacttcggaatctgaaggtattgtggctgaacatgaataacatgtcaggaggcattccattttccattggcaatctcacacaacttctgactcttgacttgtcaaacaatcagctaaatggctccattcctaaaagccttggaagcatggagaggttaacaaacctggatttatcctctaacaggctagttgagtctatccctgatgtaatcttcagcctcccttcactgactgattcactgttgctttctgataattatctctctggtgctcttcctccaaaagttggcaacctgaggcgcgcgacaacgctgtctctgtcaagaaacaacttatcaggtaaaataccaacaacacttggcgactgtgcaagtttagtatacttagctctagacagcaaccacttcacagggagcatccctccatcacttggtaatttgagaggcttgagcatcttgaatttgacgagaaacgcactgtccggtagcatcccacaacagctgagcaacattcatggtttgcagcagctatacctggctcataacaacctatcaggaaccattccacaatttcttgagaaatcaagtgccctgatagagctagacctctcctataatcatctcagtggtgaggtgccatcacatggtttgtttgccaacatgagtgggttctcagtactaggaaattatgcgctttgtgggggcattgcagaactgaatttgcctccatgcgaggtcaagccacataagttgcaaaaacagatgctgcttaggattctgcttcttgtctctggaattgttatatgctcatctcttctgtgcgtcgcactctttctgttcaaagggagaaaacaaacggacaggaagaatgctacaagtgaccttatgttgaatgaaaagtatcctagagtttcataccacgaactatttgaagctacagatggttttgcacctgcaaatctaataggagctggaaaatatggatcagtgtacagaggaaatctgtctcttccatctgctgtgaatgttgttgtggctgtcaaagtgttcactcttcagcatgctagttcttcccgaagtttcatggcagaatgtgaggctctgaggaatgtgaaacatcggaacttgatcaagattatcacctgctgctctagtatggattccagaggcaatgacttccgagctctagtgttcgagttcatgcccaagtacagcctggacaggtggctgcacccaagaatccatgagcagacacacaagttgagcattgcccaactgttaaacatcgctgttgatgttgccgatgcaatagaccatcttcacaacaacagttgcccgacagtgattcattgtgatttgaagcctagcaacatcctccttagtgctgactggactgcttatgttgctgactttggacttgcaaagctggttggcgaatccatagaaaaatctggtttgagtgctggggacagcagcactgttgggataagaggaaccataggatatgttgctccagaatatggagcaggtgggcaagcatctgttgttggtgatgcctacagctttgggattactctgcttgagatgttcacagggaaggccccaactgataatatgttcagagaaggcttgaccctgcacttacatgctgagatgaccttgcctgaaaaaatatcagaaatcattgacccagcactgttgcacgtggaacagtatgacaccgatgcagagatactaacttgcttatcttctgtaatagaagtcggtgtctcatgttcaaaggaaaacccatcagaaagaatggacatgaaacatgctgctgctaagctgaacaggatcagagaggaaatgcgttatgacacaatcgtaagagtgctgatcccataccttgctattcctaagccttctggctcctcgttgcctcctcctcagcacagacaaaccacacaggcttccatccgcatctggatgcagtga

SEQ ID NO: 10800 - DNA, 516 bp, Oryza sativa
  Clone ID: PAT_MRT4530_17086C.1
atgaaggttgcgatgccaaaagacgcagtcatcatccgtccaaagaaattggacacgcgtgtgtcctccgccgtaccggtccggctcctcaccgccgaccgacatcaagactggccacttcgcctcaccgccagcgccttttaccagttgtcactcccccgcaacgctgagctagcttccttcgctctgccatccaccgacctcagctccgaatccggcaaaaagcccggtaatggacgatgtagcttcggcagcccaagccttcccctattgacataccgttacccccacctacctatagaacatcccatagagaacgggagatgctccacaagtcgagacgacacccgaccgacatcaagggagacgtccctgcccgccgccagcattctctaccccgccaccaacttccctatgtgttgtcttaggtctcctccactctgctacccaccagcctccttgtcgaatccggccaaggagagcccggagttgggccacgccgcttcggtgacctaa

SEQ ID NO: 10801 - DNA, 153 bp, Oryza sativa
  Clone ID: PAT_MRT4530_17087C.1
atggcgtcgccggccgcccttcaccgccgtcacattcctagtccggcgatccgccgccgtccgaaagccgccgcgcagccgtgcacagggagctccgccgccctgcctttggagttctctgctgctgggttgctctgcaaatgtgttgcttga

SEQ ID NO: 10802 - DNA, 135 bp, Oryza sativa
  Clone ID: PAT_MRT4530_17088C.1
atggcggtggaaattgactccgatgaacagtggtgggcctcaggtggagaagtaggcgatttgtgcggaaagaagcgatctagagcaagagaggtgagagccgatacagtgaaaaaagtcacacatgatctatag

SEQ ID NO: 10803 - DNA, 260 bp, Oryza sativa
  Clone ID: PAT_MRT4530_17089C.1
aatcattggggtttggtgtttttcccaaacaaaacttcaaccagatctatccttggcatgacttcataacacatgagcatcatcatgtcttaattttaaactcaatactaacaaccaatttttcatggccacagatcccaaaaaaagcacttttagattaacggttgatcccaaaaacaagaaggcccccctaaaacccgagcttggtgaaaaaccacctgttcttgccggtcttaaacctctcctcgaggcaagccttg

SEQ ID NO: 10804 - DNA, 1853 bp, Oryza sativa
  Clone ID: PAT_MRT4530_1708C.1
atgaggccctcggcggcggcgggcggcggcggcggcggcggcgggaggcggaaagcggcggcggcggcggccgcggcgagccgggagtggctggtcgtgccggcgtcggggcaggcgcgggtggaggaggccgggaagcacgcggtgatggcgcggacggggctgccggcgcgcgacctgcgggtgctggacccgctgctgtcgtacccttccacgatcctgggtcgcgagcgcgccatcgtcgtcaacctggagcgcgtcaaggccgtgatcaccgccgccgaggtgctgctcccgaactccaaggatcccgccttcgcgagcttcgtctgcgacctgcaggcccgcgtcctcgcctcgtcctccgaccaggctgcagaatttactgatatggaaggcgaatcatctgcagttacttcaccatttcctgctctgacttcaaccacaccaaatgaattggagatgactaacaagaattccaatgtggtaggcggaatgactcacagcaacagtatgcccacattgactgctgcaaaagatggaaataccaaagttttacccttcgaattccgagcacttgaagtgtgccttgagtcagcctgtagaagcctagaagaggaaacgtcgactctggagcaagaggcgtatccggcacttgatgagctgacttcaaagataagcacactaaatcttgagcgagttaggcaaattaagagccgcctggttgcaatctctggtcgtgtgcagaaggtgagggatgaacttgagcatttgttggatgatgaaatggacatggctgaaatgtatttgacagaaaagcttactcgacaagaaataagtgagacttcatctagagttgaggttgatgacccatctcaactggaggtggatagggatgaagattatagaagtgaggcagatgtaagcaatggtacctttattggctataagccacacattgaagaactggagatgcttttggaggcctactttgttcaaattgatggcacacttaataagctatctcatctgagagagtatgttgatgatacagaagattatatcaacatcatgttggatgacaagcaaaatcaacttctacagatgggggtcatgctctccactgcaactgttgtcattactgctggagtggccgttgttggtctttttgggatgaatatcggtatatcgctttatgctgatcctacaaatgaggaggagaaacgagcatcaaacatgaaattttgggaaaccactttgggaaccattgctggctgcacggttatgtacatagtagccatgggttgggggaagagaagtggactgctgcaataatgagggtgccacgatgaatcacacaagttgacgattgctagcctggtcagacaaagctctataaacaagaagacaacatagggctcgactgtatacctccttgaacatatataactgttgctctgatggcttgcatgtgcaaggaacagagatgaaaaggaagcgatctttttagcaactctgcgcggcgatgcatgatgtaactgagagatgtataacaatgtaactcggtttttgatatttcggatggttgcacgattgcttgtctgcaagccgtcgtactaatagtttgtgctgttgtcgtatgtatctgtaagcttcttggaagctgtaaatgaactattacatcatattcataaggaagtactaagagcatgtcttaaaaaaaaaaaaaaaaaaaaaaaaaaaaaaaaaaaaaaaaaaaaaaaaaaaaaaaataaaaaaaaaaagactactaaaaccaaaaaaaaaaaaaaaaaaaaatacaaataatataaaaaggggggggcctttttaag

SEQ ID NO: 10805 - DNA, 459 bp, Oryza sativa
  unsure (1)..(459): unsure at all n locations
  Clone ID: PAT_MRT4530_17090C.1
cgacaatgcatggaggagagcagtatccacgccgccacctcctccatagcaattctacgccgtcgtcgtctcttccaccgtgcagccccttgtcccaatcctccacggcggcctgcggtccgggactggagtgctgacatccaatttgcagtggcggcgaggaggagaggcgacggtcatggtgctcggtggagcagttgaatggtgcatgtttgttcgatcgcttggctttttactcactctaatctaatcttgatactatcgttgaattgatctgaatccacccgtctgcacgtacacatacgtgccctcgatcgagtgttagattgcgcaattagttggtgttttattttgctacatgatctgtctgctcgattgatctctataggctatagcttctgnctttctttggaggaagcacagctgctggtggttaagncaactaattgcagctaattt

SEQ ID NO: 10806 - DNA, 527 bp, Oryza sativa
  Clone ID: PAT_MRT4530_17091C.1
ccgggctgcaggctcctggctccatcacagctaagctaagctaagcctacgtacggtggtcatggcgtccaagaccatggtggtgctgttcgtcgtggcggcgtctctcctcctgctctcgcaggacgtggcgtttgccgccagagagctcgctgatgccagtggcgaggcgagtaagggaggcgataagaaggacgacatcagcatctccattggagtgaccgtaggcgccacgcctgtagtgaccataaacaccaagcccaaacaccatgggaagacgccgagctatggccactctcacccatgacgctctctcagctattgacactacaatgactctgttcaatacagtgatgattcgatgttaatttatatttaacagaatgtgctctacgtgaagaatatatatgtgtaaatcatcatgtctctcacgctatataaaagtttcatttagtatgtgtaaacaaaactgtttcccgtaaaaaaaaaaaaaaaagatgaacggtcagtctccatgaagacgacaa

SEQ ID NO: 10807 - DNA, 353 bp, Oryza sativa
  Clone ID: PAT_MRT4530_17092C.1
gcattttatatatgaatgggagagtaaagcgggtggggggggctgtggaaccactatgggggggaacccatcctcttttcttgaaaagctatcctggctgaacatgaggtagccgataacgggatcaattacttactgggcgagagagggtgatgccaactggttggaacatgctgtagcgtttatggcttacggttgatggtgtacttatgcaactgaggacacaccacatgtattgctctattggtagtgactaagcaaaacccatggtactgcgtgactggtagcaaatataggggacctttgctagtgtgcctgcaaagggatacatgttcgactctgcagcatatcag

SEQ ID NO: 10808 - DNA, 282 bp, Oryza sativa
  Clone ID: PAT_MRT4530_17093C.1
ccgtcattagcgcgccttccaccacatggggatcatggggcaggaggcgtggcgcccccagcgcgtcctccccgagcgctccgtcaacatcctccgctcctggctcttggaacacttactccacccgtacccgagcgatgcagataagcacctgttggcgaggcagaccgggctgtccaggaaccaggtctcgaattggttcatcaacgcccgtgttcggctatggaagcccatgatcgaggagatgtaccagcaagaatgcaaggagctcgagggttcctc

SEQ ID NO: 10809 - DNA, 485 bp, Oryza sativa
  Clone ID: PAT_MRT4530_17094C.1
gttgccatgagatggttttagcagatctgttcaaacagcacctcttcctggccttgagctgacagtaacatcactttggcttttagttctgctacttcactgccttgaggttcgattattctgctggagattcctgctggcatctcttacatttgggcatcttgtcgtggctatcgtcccaggattattctttagagcttattcggttaatccccgagagtgaaggattagaggggattgggcagagatgcttacctcatggtgttgggcagcaaatcctgatgcattactcattcagacagatgttgaactgggagaaaaatgtcaggaactgaaagatcttgcggattaactaagaagggtgatgaacagaataactgtattcccgatcaaaataccgtgtgatacacacgcatcacagaaaaaatcccacgctctatgtttttccgcttgatcattttctatagaagagtcgtcttcgatgt

SEQ ID NO: 10810 - DNA, 699 bp, Oryza sativa
  Clone ID: PAT_MRT4530_17095C.1
atgaggattaattatggtgagaaggagattacaaatggaactggagtacgatcatctgctgttttcactgcaccacatgttgagattgaaggtcgtgaccaaacgaagctctacacacttgttatggtggatcctgatgcgccaagtccaagcaaaccagaatacagggaatatttgcattgttcaagaacaccttacctagataacctgcaggattggaatgcagccctctcgaaaaggaggggggtgtttcttatccaaccatcaacagctgaagaactcttgttctatatgctattggtatttaagaaggcaccttaccaacttctcatggagaaggttggtgacagacatcccagaggcaatagatgcacgttttggtgggctggtgtttggggtgtcaaggtagaaatctacgagggtgttacatatgcaaaagaagcacgacaaacagtttatgctccaggatggcggcaaaatttcaacgtcagagatttctctgcattttacaatcttggaccacctgttgctgcattatacttcaactgccagaaggagagtggtgttggtggcagaagaaataagccttctcgcatcctttttaatgctgaacaattattctactcactatatacacttccggtttcagggaccaagttgaaggctggatgcaacatcattcaagattacaaaacataa

SEQ ID NO: 10811 - DNA, 1280 bp, Oryza sativa
  unsure (1)..(1280): unsure at all n locations
  Clone ID: PAT_MRT4530_17096C.1
cggnatgtcccgcggtcgacccacgcgtccgcatgtttaagcttagtcaagatgattcaacacaacaggaatgcactgaggctgaacttgcatatcgcaaccgggcaacgcagtatgcatgtagccttatagcgaagagccaggaactggatgaatcaagaaagatattctgggacacccttgaaacaggagaaaaagcacttgatgtattctggggggttagaagtttgcgtagtcaagctgcaaaagatgtcagtaaaagggacaaaaagaagaaaaaatcatctaaaggaccaagcacaaaaaaagcaaaaccaaccccagcaacttcctctgctgtacctgaacttcttgcccaaactaatgtgcaccagtttcaatctgcacaagatgctcagggtaacacgacaattggtagaccgttgtactatcaggctttttcatctgccccaattcaaccaaaccagatctacatgcatccgaacatgcacacaatgcctctttgtgcaccacagcaggatttctcggcatattctgcaatgcgtcccaattcgaattttggtggtgcaaagaatgtctgaaggacagtaaggaatctgctaagacgtcttttggaaaatgctgcttggacatggatgcagccaaccacctggatggattttgtcaaccttcccggaggtgtgatgttgcttttggatgttaatttctggctcgcaactgttgatgtgtgtaactattctggtctttgacgtttctgttctgttgaagtggagttctagtaatgtcaattaggtgactgtaggcttgtaagttataattggagtgtagatgctggatgaatagaggccaggaacatgttgcttccattgtcttaaggaaaaggttgtaactgggagtagtcactagctatttacaggatcagattctttgggctaaaagatgatcagctggcgcccttgttgcctcttggcccatggtgctactagttgtcaagagcagatagcatcccttctcgaaggagttgagctgcagaacaatgtgaaaaggaagctgaaatggaagctcatgcagattcagtgaagtgcaccgtctntgcatgggaggcagtagtcccaacatccccttgttatatgtttttttttgtgaagattttggatctaatttagtgtacctgtacaatctgactgctgattaagatgacacagcagtattgatctgatattgaaactgtctatgctcccccattgttcataaaaaaaaaaaaacacccccacaccccc

SEQ ID NO: 10812 - DNA, 315 bp, Oryza sativa
  Clone ID: PAT_MRT4530_17097C.1
atgacagttttagcaaaaccaacttttttccctttttgcaatggtataatatcaaatttctacaagaggcaaaatagcagccaaggttctaacttaactcgatacatgtacagaacactactcctactttcgaagggcagcaagcagatactatgcgctgcaaggcggttggcaattgggagggagtgggaggctggcaagcagtacctgataaacgaagaaggcgacgccaaagacgagccgtcgaagttggcccaggtcaagtcagcttggatcagaggaggtgtggcaccgttgtccgtcataggagatgat

SEQ ID NO: 10813 - DNA, 1653 bp, Oryza sativa
  Clone ID: PAT_MRT4530_17098C.1
atgtccaagcatggtttcctgttcttcctcctcttctttgtgcaacaccttcacaccatcatctctttgcttgattcacctggaggaagcttagcatcacttccagaatggcagcccatgccatgcaagtctgtatctgtcaaccccttatgcagctcatacctctatgtcaccccagaagggcgcaatttgtccaaagtagcctctgatttcagtgggaatgcatctcttttccagcggatcacacggctctctggttcagaggacttgctggtgaatgtgccgtgtgtgtgcgaagcgatcaatgccaccatgactggtctcttccatgacactaactacagggtgaaggatggcgatatgggtgacattatcaacagcaagactttcagtgggctcgcgttgaatgttggtgatggtcagatcctgcacaaagaagagaagttgatcattcaccttccatgtggatgctcctcgacagcgccagagggagtgttgtcttatgcagttcaggatggagataccttgggcaacatcgcaagcttgttcagatcgagttggaaagatatcttggatttgaacccaagagtcgcaaatcctgatttcataaagccaggatggatcttgtttatcccgatgggagttgctggtccttctaacaagaaaattgatccattccaaacagagaggcctgtgattttcagcttgagagcaattgaagatgctacatctaattttgatgagaagaggaagattggtgagggaggatatggaagtgtctacctcggtttcataggaacacacgaaatagcagtcaagaagatgaaagcaagcaaatcaaaggagttctttgctgagttgaaagtgctgtgcaaaatacatcacataaatgtggttgaattgattggttatgctgctggggatgatcatctttacctcgtttatgagtatgtccagaatggatcgcttagtgaacatctccatgatcctttgctgaaaggccaccaacctctatcatggactgcaagaacacagatagcaatggactctgcacgtggtattgaatacatccatgatcatacaaagacctgctatgtgcaccgtgacatcaaaaccagcaatattctgctagacaatggtctacgagctaaagttgcagatttcggcttggtcaagctcgttcagcgtagtgatgaagatgaatgtctggcaactcgtttggttggaacgccaggctaccttccaccagaatcagttcttgagcttcacatgactaccaaatccgatgtgtatgcattcggagtagttcttgcagagcttattactggtctccgtgcacttgtacgggacaacaaggaagctaacaagacaaaatctctaatctcaatcatgaggaaagcattcaaaccagaagatctggagagttccctggagacaattgtagatccctacctgaaggacaattaccccatagaagaagtttgcaagttggcaaacatttcgatgtggtgcctcagtgaggatccactgcaccgccctgaaatgagggaggttatgccgattttggctcaaattcatatggcttccatagagtgggaagcatcactcggaggcgatggtgaagtcttcagtggcgtttccaatggtagatga

SEQ ID NO: 10814 - DNA, 348 bp, Oryza sativa
  Clone ID: PAT_MRT4530_17099C.1
agactgatcgacacatgcgtccaagagatcgaacagactgatgaacaacttgctcgtggacacggtaccagagcaggaactaacaattgctggtgtcattacgataatgacacatgagaatcacatatttggtgtcgatcatgatacctgacaggctaatgatctgactcattcaggctgattgacggattggttggagtgctctctcatggcgctataaaggacatgctcgcgagatatatcctggctgattgatgacatgggcacgacagatagcatggttgattgggaacacgaataaataagggatcttgctgacagtgttacacagagcaataagagctgatg

SEQ ID NO: 10815 - DNA, 430 bp, Oryza sativa
  Clone ID: PAT_MRT4530_1709C.1
ccttatattggtttttggtcccaatttcatcgtcatcgccaactacatatacaaggggcctaaaaccttttcccatatttttatcatacgggccatatacaacctttaaaaaagcctaaaaatttttaaagaaaaagaataaaaaaaccaaaaaaaacccttttaatcctgaaacttttgcatctaacccttaaaccacacgaactgaatcatcatcattttttccatttgttattgaaatttcctccttggtttgtaaactgtccaaaataatccctgtctccataacaggaacccttcaaacaaaaccctcattttcactttccttggcctctacaattgcccatttgcaaaaccctccataatttaaatcacttcaaccgtttcttaaaattattacttgcccatcctcgattttttaccaaccttt

SEQ ID NO: 10816 - DNA, 362 bp, Oryza sativa
  Clone ID: PAT_MRT4530_170C.1
accaaaaaagaactataattcaacaaagttcgggactttgggtttactagaaacaaaaaaaacatcaaagggaggaggagttccaaacaggggagtaaaaattgaaaagacccggccaggaggttttgtaggaaaaggccccaaacaaactaattttttttttccgccggccccttttgttttcttgtaaacaacggttttgggtggttttttgaaagggcccttttttttaaaagaccctgggtgggccaacacacgggtttgaaaaaagatccaacccttctttggaaaaatttgttcttggaaaaataaatcttttttatggcctttgccactttatttgggggaaaaccttttttttt

SEQ ID NO: 10817 - DNA, 243 bp, Oryza sativa
  Clone ID: PAT_MRT4530_17100C.1
acgacacatacacacacgcacgggcgccggtaacgatcggagcatcgatcagtaagggcggggacggcaggctatataacatgagcgctgccatggactgctgcaaggagagctgagctatgtatcggatggatcatatgtacgcatacagacacaccaccgtgggtcgatgtaccgagccgatcagactctaggtccaatataacctgtatgtggggcgcatccgcaataagcagacgaggt

SEQ ID NO: 10818 - DNA, 666 bp, Oryza sativa
  Clone ID: PAT_MRT4530_17101C.1
cgaggcggtcgttcccagcggcacgggaaggggtcaccggagtagatgctcaccctctctgctttctctatgttggcgatgcaggattacacggcgaagctctcggactttgggctcgccaaggggggacccacagggcgacgcgacccacgtcacgacacgcgtcatagggacccacgggtacgcggcgccggagtacatcctgacggggcacctgacggcgaagagcgacgtgtggtgctgctcgagctgctgacggggcggcggggcgggagggagcagaatctcgtggactgagcgcggccggagcgggtgaaggaccccagcctggagggcggatactccaacaaggcggcgagcaaggccgccatggtggcgtatcactgcctccacagcgtgcccaggtcccgcccacacatgcgcgatgtcgtcgccgcgctcgaagcctgcagacgtgcggcgacgtgcccgctgggcctttcgtctacaccgtcccgtaggcgccggcgcccgcagccgcagctgccgttgttgtttcccaggacgacgagaagaaggcgtcgtccgacgaggccgacagcgcgaagcccgccgccgcggttgaggacggcgaggaggtacgtcgcgtcggcggtgcacgcggaaagcatcacatacaagtgcaaa

SEQ ID NO: 10819 - DNA, 1051 bp, Oryza sativa
  unsure (1)..(1051): unsure at all n locations
  Clone ID: PAT_MRT4530_17102C.1
aaaaccggcccccccncaaaatttcccaaaaaaaattttttaaagttttggnttttaanccccccccgtttgggaaattggnttttggggaaaaaaaanatttggaaattcctttggnttcccccaaaattnaacccaaaaaccgccccttttcccttggaaaaaagcccttgggtttatttaatttaattcccaaaattttaattaaaaattttttgggttcccaattggtttcccccncccccgaaaattttggaaanaaaattttgggggtncccccctgggccccaaaaccaatttttttttggcctttgggggggccccattcccccttgggnaaaccgcccccttggtttntttgaaaaacaaaaaaaaatcccttattccttttccccgaaaagggccattaatttatttgnaaattgnaaatttcccanncccgntttnttttggccaattttccaaggggccgtttcttggcccctggggggttttaaaaannnnnnnnnnnnnnnnnnnnnnnnnnnnaaaaaactncccnaangggggggggggggcccccggggttaccccccaaatttcccccccccccaaanaaatttgnaagttccctttantttaaccaaaattncccccctnggggncccggnccnntttttttaacaaaaccctttcccttggaactngggggnaaaaaaaccccctggggccgntttttccccccaacccttttaaattcccccccctttgggnaannnaaaaattncccccccctttttccccccccncccttnggggggtttttttttncccnaaaaaaaaaagggccccccccccccaatttttcccccccttncccccaaaaaaatttttnncccccccccccnnnaaaattgggcgnaaaaatgggngaaaaattnntttaanccccntttaaaaatttttttgnntttaaaaaaatcccccccntttnaaaattttttttnttttaaaaacccncccccccccttttttttaaanccccnannangggccccnaaaaatcccggcc

SEQ ID NO: 10820 - DNA, 1644 bp, Oryza sativa
  Clone ID: PAT_MRT4530_17103C.1
ggccgcttttttttttttttttttcttttttttttttttttttttttttttttttttttttttttttttttttggttttttttttttttttagccaaggaaggggaaaatgggatgatggaggctttgtttctgcgggtttttagcagttataatttacaaaaaaaaaaaaaaaatgcatcggtagcttttgctgttcaaagcgaaatcgccaataacaaacaagatgagatacagcaggcccctagattgttataaatcttacagctcattttatttctcggaggcaatacagatcgatcaaagcagctacccaactatatccacagattcaactccttatgcgctcttcatttgcgttttctcttcttcaatcttagccttgatataagaatagagtgcaacaccagctatggcaatgcaagtgccaattcctgtttgtgtggtgatcttgttgccgaatgcaatgattgagaagccaatgacgaagacacgttttaacacattgccaacagcatgtgttagaggggtcaccctttctaatgtgtttgtagcaacctggttataaaggtgatagaacaagcccaccacaaggagattagaaaccaactttgctaatccaactttagcaatagcatctttgaatccatgctgcactagttgaggtccttcaataataattgcaggagggatgcagacaaggagagcaattattgagatgtacgcatacaggttggtgctatccatgtcagtcatagccttcttggaataaacgctccgtaatgtgaaggagatattagaaatcatggcattaacgaaaccagtccaattgaatgaaagttcagtgagagatgccattgaaacacctatcacaaccggagcaagagataaccacagcgtcaatggaacttgctggccaaggataaactgtgaagcagccgcattgaaaaatggttcaagagctttaatggtgtgggcaaatgagacagctacagcagcaaaggacacggtgcttgttacatgaccaatagcatggcagacagcaactgggaacagtagcttcagaaccgttgagttgatcggcgcgcgctttgggagaccaaaactccagccgacaaggcagtacaagactcctaccaaaagatggctcaccgacacaaaatatggataggggaagtagtcgaagatcttcttgttaaggatgttaaatatcacgttcagaaaataccacatgaagaaaaagaaaccggtgacaagagcagggtatctctctgcaaatcccacaggctttgcttccccggtggagtccaacgaggaggaggaggaagcagccggggtgcggatgagccgcttaccccgcagggaaggcagcgcgcaagttgacgaaccgaggaggggagcagggcggagctgcatccggcggacgaggcgggcgccatccgatacggggccgctgagcgacgtcgacgaggcttccctggagcgcagccgtcgaggaacggcgacggcggcggcgccgccgacgggcaggagggccctggccgccgccatttttgggggggttttacaggggaagagagtggaggtggaggagtgtgggcaggaagcggggcttcgaggatttttgggattttgggtggtggag

SEQ ID NO: 10821 - DNA, 429 bp, Oryza sativa
  Clone ID: PAT_MRT4530_17104C.1
ctgggtaatagttggagtgaagtgttttaagtcctgttacacatgtctatttaatccaaacaaatggactgaacttgatctgttggccacttactgcctgcaggctttccaagcgatcaacgatcctgctaggaattttaagaaactcacaaagtcttgttgtttgtcaaggaagcacacattttcgagagaggcattcatgtcacaggccaggtatatagtgcgtcaaagtctttctctggatacttccatattttatttcttctagattagaaaagcatttgcctttctgccagccattatctttggcatggagaactttatccctattttcttgtcacttgtcagccattttcctaagctcagcaaaatgtctcttatgaacacatctcgaatgcaaaccatatgaaaatgtacactgtgccattt

SEQ ID NO: 10822 - DNA, 364 bp, Oryza sativa
  Clone ID: PAT_MRT4530_17105C.1
tgtcggggacgcgtccggtgtggatcatcttcactgcgcattgtcacattacaagtttgttcttgcaattgacaatactgggacagaaagctgtgtgaccgagaaattgttctatgccttttaggctgcgtcattgccaatatacttcggggcacccaatgggtgggacttcattcctgcgaattctattatagatgcctgaaaattcatctcactccgccaggtggcattatatgctaaatctggtgcaaatgagcccttatctctattcaggataccatgcatggaggaggtgttgtaccctgggtaactttggaaggtcgggtgaaaagagcctttacacactgcctttgccgactttttt

SEQ ID NO: 10823 - DNA, 3198 bp, Oryza sativa
  Clone ID: PAT_MRT4530_17106C.1
ctccatctcgcgagccagcagccgcgccgtcgtcctcgttaactgtctgaaatggacttctttaccgagtatggtgaggggaacaggtataagatagaagaggtcataggaaaagggagttacggtgtagtatgctccgcgctggatactcatactggtgagaaagttgctatcaagaagattaatgacatttttgaacatgtgtctgatgctactcggatacttcgtgaaatcaagttgctccggctactgcgacacccagatatcgtggaaataaaacatattttgcttcctccgtcgaggagagaattcaaggacatttatgttgtttttgaactcatggagtctgatttgcaccaagttataaaggccaacgacgacttgactccagaacactaccagtttttcctctatcagttgcttcgaggattgaagtacatacatacagcaaatgtgtttcaccgagatcttaaaccaaaaaatattttggcaaatgctgattgtaagctcaaaatatgtgattttggccttgcaagagttgctttcagtgatgacaccctctgcgatgcatctctgctacgagtacgtctcggctcctctctactcgataagatttgcctagatcacagctggatttcttggccgcatcctcctcttcttccaggtctcttccagctagctagcttgttcttcccttccctttctttttgccttgtgcgcgtgaggatcagtgagctgtgcgtctctcttttcttgttcttgttggactgctgctgccttaaaagatcctgcctttcttgctcactttccccggaggagagagagaggagatccacatctctgatggttcttgggatctcctaggagttgtttctacctgtgctgctgctgctgatttcttcttcgatttgctagcggctgtgtggtcggagctcgtcttcactgtactagatctacacacctaatgtgattcatttattcatcaagcaaaataatggaaacgcgtatgatgtagaaaaggtcataagaaaaggtttttaccgtgtaggttgagctgttatggacactcacaccggcgttaaaggggctattaagaaagtcaatgatatctttaggcttgggtccgattttgccgggctactaagcgggaaacctctgcttcctcggaagcaacatctggataacgtggaaattaagaaagatctacttcgtacaccttgtacagaatccatatctatgaacagaaatgagaaggcaagacgttacttgaacagtatgaggcggaaaaaacctataccatttacacagaagttcccaaatgcagatccacttgcaatgcggttgttagagagaatgttagcttttgatccaaaagatcggccaagtgctgaggaggcgcttgctgatccttatttcaagaacatagccaatgttgatagagagccttctgctcaacctatcacaaagctagagtttgagttcgagaggcggagaattactaaggaagatataagggaactcatatatagagaaattctggagtatcatccaaagatgctgcgagcaatagatatatggagtattggctgcatatttgccgagcttttaaccggaaaacctcttttccctgggaagaatgtggttcatcaacttgatataattacagatctactaggaacaccttctccagaaacaatatctaggattagaaatgagaaggcaagacgttacttgaacagtatgaggcggaaaaaacctataccatttacacagaagttcccaaatgcagatccacttgcaatgcggttgttagagagaatgttagcttttgatccaaaagatcggccaagtgctgaggaggcgcttgctgatccttatttcaagaacatagccaatgttgatagagagccttctgctcaacctatcacaaagctagagtttgagttcgagaggcggagaattactaaggaagatataagggaactcatatatagagaaattctggagtatcatccaaagatgctgagggagttccttgagggaactgagtccactggtttcatgtacccaagtgcagtagaccattttaaaaaacagtttgcataccttgaagaacattatgccaagggatcaacagcagctccacctgagagacaacataactcattaccaaggccttgtgttgtctattcagataaccggccacaaagcacagccagtgtcactgaggatctttccaggtgtttaatcagagacaacaatctaaaatcacaggattctgcttcagtcggtgcaagcagaatccctcaaggtgctgctgcaagacctggtaaagcagttggttcggtgctgcgttacggtaactgttcgacatccgctgctgagcaacaatatgagcagcgaagggttgttcggaacccagcaattgctccaaacagcagtgttcctctggggagctcataccccagaagaaaccagacctgcaagagtgaaacaggtgatgttgaaaggatcgattccagccaaaccggtccaccgaagccatatgtggcgaacaaactgcctgctaccgtcgatggtcggagtggccactggtaaatttctgcagcgcaccagcgaaaacgctagttattaccacagcatcagcatgggtttattgttctatgtagtaaattcttagacatttaaaacatgtcattctgtacagacttgtattgtttcttgggggcttttccatgataaaaacagtagaattgtactgcaagccctagtggattaggctgcctgtttcttcatttcttcatagctcaacctctgaatgatctggtacacaaacaagatctcatggaattggacatcacatgattcagttcgaagggggtatagtggaaactggaagcaacaagtggactgtaacattttcttgctgagaaaacaagggactctttactgacctgactgatgctgctattcaatttattttccaagtaaatccgaagaaggatcatgtaaacagcacaatgttggacattgctttagtatttcgttctcaggaacattgttccctttgcagagctaggagctgcaactatgtactactatctgacattgctgtaacttgtaaaacttaattgcatttcaagtattttccctcctttagcctgtaattcagctctagtatttgaactactatgtttc

SEQ ID NO: 10824 - DNA, 279 bp, Oryza sativa
  Clone ID: PAT_MRT4530_17107C.1
atggggagcgccgccatcgccctgggggaggacaaggagcagcgtcgtcttcgccacagcaatgctggcgagttgcagcctgcaatccgaactgaggacgggtttttggagttagctcaccctcgcgagatcgcgacagcagaggaggcctgctacgccaaaagcgagaaaaaccccacccctttccttttgacatcctcatgccgccggaaggttaaggaagttggtgaactgatgacagggaagccggtgaccgaagccctggtggggaggtcataa

SEQ ID NO: 10825 - DNA, 531 bp, Oryza sativa
  Clone ID: PAT_MRT4530_17108C.1
ggagagaactagtctcagttttttttttttttttttttggacactggaaatcaaattgtatttatagtgatttgatttgattacatggatgcctccattgagattaatcctaggaggggtcaacccctactaacagaactatactatcaatgtcagatcaaaactacactgctgatctgaacagacccctactaacagaactaactatactgtcactgtcagatcaaaactacactgctgatctgaacagacaagttcatagactaaataacatctaactgctctgacagagttcataggctaaacacaacatgtaacgccctccatcaacaaagcctggacccagcatcggcgacaaatccagctcgcagcccagtcagcctcgacctccatgaacaaagcctcgacctcgactacgaacagcgacctgtcgcctcaccatcatcccgtcaaataccatacatcgacctgcaaaaataaattaagcagagaaatcaaaattcttattggagaggaaatcaaacaaaaaca

SEQ ID NO: 10826 - DNA, 211 bp, Oryza sativa
  Clone ID: PAT_MRT4530_17109C.1
tttgtattttgtttgtttaataaaatatgtgcgagggactattattaaagctgtgggataatagagggattgccgctcagattcaactttgggatggtactcatgatgtttcgcgatgctctgtatgattagactttactagtttctagaggagtattgttgttcaattttttgttttttatttacttctaaatttattattaaatataga

SEQ ID NO: 10827 - DNA, 1287 bp, Oryza sativa
  Clone ID: PAT_MRT4530_1710C.1
atggctaagaagaccctttgcaagttcgttgctccctctgctggtaacatgccagatggaacccatgccagcatgggagatggtgactttgatatgaagatcagcttagtcaagatggcgcaggcttgcccgttctgtggcaagcctaaggaggatgcaaaacaatgcttctacatcaaccgtgcaacggtgaataccaggaataagcgctcaacggcattcctctcaaaattcttcccgatgggcaagaccaacgctcttcatggaagaatatccagctttcaacagatgagggatgaaaccattcttgaagcttgggaaaggctgcaggagtatgtcaccacccgtcctcatcatgggatggacgagtggctcatcctgcagaatttcttcaaaggattaaccccctcgtcctgggatcatctagatgctgttgctggagggacattcttctcaagaacaagattggacaacaatgacaaagatgccaagatgggtaccgttaaggccctgggctctcacatggcatgtgaggtctatggcaatgacggtcactctaggacggatcgtccgaaaacccgtgagaacgtcatgctcatgaacaacaacaacgggtatcgtccacaaggagaccaaggatggagcattactccatggggtagatcaagaacggaacgaacccacaagaaggtcaaagtaaaaccccaaaggacggatagcctcaacgctttcgtgatgaacttccttgagcaggaagaaacgaggaaccgtcagcaccttaggccggcatccaagaagctgggaatacaggccggtcaacttatgttcccagctacgaagaggcagctgcctgcacctaagacaaagaaggtgtggcgggttaaggagaagacacccattcctgtacctccagaactggctatgaagaaacaactttcgggcatattcaagagacgatcaagctcacggacaagccgacatggtaagccgagtacaccttcttccacggatgcatccatggaggaggcgcacattccaccaaggctgtacgacaactccgatctcgacctcgtgggcgactacgtggtgtctagattacgggatatcattatttggggttatatattgcggatgagaggtgggccgctgatggtgacagctcagtacgggtattcctccgcgccggctgtcgtaaggaacttggcaggcaggggtggcttctcgaagtaccaggagggcatcggaaagagggaatcgtgcggtaacaagacggtcatcgtgcagtaa

SEQ ID NO: 10828 - DNA, 436 bp, Oryza sativa
  Clone ID: PAT_MRT4530_17110C.1
tcgctctagggtcgcaaatctgcctatgaaatgagttcgtcattaatatcacgttaatacatcgtacataacctagtcttcgctagtcgtgaaaattggataatccgtgtgagcagctctcacgaagacataccaacccacgatagcataagagtgtgcactcctggggcggcttaatcgagtgagactaactgacattgccttgctgtttgcactgcactgccgccctcttcccgggggagaagccgtgtcgcgccttcgtgcatctacatgacatccttgcctaacgtcgactggagatgaggtcggcttcgcggctattgggcgtctcttcacgctgcctcagctcacctgtactcggctgcggcatcgcgtgcgtatcgcgctgcaagcgagcggatatcagcatgactcaaacagcgggagctacaaggcc

SEQ ID NO: 10829 - DNA, 141 bp, Oryza sativa
  Clone ID: PAT_MRT4530_17111C.1
ggaaaagaagtccagaaatcccaggctcatctaaattgccaatacatcgtacaaatttcggacgtaatctgacatgtgtgggaaacacggatttgagctgggaaacaaagcagggctccacttaccactgcatccagaact

SEQ ID NO: 10830 - DNA, 534 bp, Oryza sativa
  Clone ID: PAT_MRT4530_17112C.1
atggactccctctttggcgccctccaggccttcctgcccccgcaccttcaccgcctcgaccaatccagtaacttattcgagctcatccctgccgtctttcttgcctccccgacaatttgctacctcaacctcttcagccacctcttagggcctctccccgctgcatggctcgtgcaatgccgctccctcggcctcatcaacctatcccacaacgtccatgaggggtccatcccttgctccctcgctatactcgccaccctccgtgtcctcgacgtccctcgcaacagcctcaccgacaggatccccacacacctcatcgcctatcaaaacctcgtcgtgctcctgctcacgaacatcatcgccaaatcacagagggaacaaccaaacggtcagcgggcggagggcggcgagcggcaggcggagcggcggcggatagagcagcggtgggcgagcgcggaagtggacctgggaggccggcggctggcggcgctcttcttcaacaagcatgagaggctggcggcgggcggcggataa

SEQ ID NO: 10831 - DNA, 540 bp, Oryza sativa
  Clone ID: PAT_MRT4530_17113C.1
atggactccctctttggcgccctccaggccttcctgcccccgcaccttcaccgcctcgaccaatccagtaacttattcgagctcatccctgccgtctttcttgcctccccgacaatttgctacctcaacctcttcagccacctcttagggcctctccccgctgcatgtcggagccagtcactcacctacctccgcctctccgccgccaatgttgtcaccgtccgaaatctccagggctcgtgcaatgccgctccctcggcctcatcaacctatcccacaacgtccatgaggggaggccggcgatgggcggagcagcgacgggtgagcgcaaatgtgggtggcgggctgagcgctggcgggcctgcaaggccagcagcaggcgagcgcggcagcggtcagcgggcggagggcggcgagcggcaggcggagcggcggcggatagagcagcggtgggcgagcgcggaagtggacctgggaggccggcggctggcggcgctcttcttcaacaagcatgagaggctggcggcgggcggcggataa

SEQ ID NO: 10832 - DNA, 249 bp, Oryza sativa
  Clone ID: PAT_MRT4530_17114C.1
ggctgcacaataagccatccatgtttccccttgaactgtcagtacagaatccatgtctatcagtagcgagttaggagccacactatacctctgccactcatcaacttcttctaaaaaaaatattgttctggtcatcaagacagtagtggccttctttttagggaatcaattagtacaagtaaaatcttagaacaatgtacaagggagatggctaacctgaatatcttacttccagcaaagcaatgggaa

SEQ ID NO: 10833 - DNA, 209 bp, Oryza sativa
  unsure (1)..(209): unsure at all n locations
  Clone ID: PAT_MRT4530_17115C.1
aactaaactaggggaaataagtaggagtaatgtcatgtgattcgatataagtataacntaatataataccacctctntaatataataccacctctngctcaataataatgtcggttcgaggctaatagtaggcggtacgttacgtgcgtactacgtgacgctggtaggtagtgtaagaagtgtccaacngccgcgtctacttcttctcg

SEQ ID NO: 10834 - DNA, 570 bp, Oryza sativa
  Clone ID: PAT_MRT4530_17116C.1
atgcccctgcgagggccgccgctgccgcccccgcgccgggccacctccgccgcccccgagagggccgccgccgcctccgcccacgccgcgccagtccgctgcttcgctactgcttctgcaaggaaagaggagtggataagagcaagaaaatacgctatctttgatctcgccaagtatgtattcgaggaggaagaccctgttgtcgactacgtgttggttttccgtgccgccaactggcgcttggcgacgcatggagggcggcggctgacgcctgacggggcgaccggcgacgggaggcggccggcgaggggaggcgacaccggcatcggcgtgccgcgccggtcaagcaggcggcggcgcggcgccgcggcggggtcaggacaggaggcggggggccgggcgcggctgcgcgggccagccggccagcgcacgaggcggcgaggcagcggccggcaggaaagcgccgccgcgccgtcggggaggcggcgagccggcgacgcgcaactctgcgagcgcgagccggcgagggcgcaaggcgagcaagccgcaggcggccagcggcagcgctga

SEQ ID NO: 10835 - DNA, 321 bp, Oryza sativa
  Clone ID: PAT_MRT4530_17117C.1
atggcgaggggtgcggcgatgatgcgtcggacgacgagggggctcagcgacgaggtggccggcgtcaaggtgcacagggatgaggcagatggtgagggtgcgcagagtaactcattccccaaggcccatctgggccacccgcgggtagattatgatccccaaccccgtccccgaaaatttgcggggccccgcctctgctcacccgcgggaatagactacgacaaaaacttattgaaaaaaacggatcgtgacctcaatgctagccctaatggcattgccgtgttggtgcttacctctatgccatcatgttgctatgtctga

SEQ ID NO: 10836 - DNA, 445 bp, Oryza sativa
  Clone ID: PAT_MRT4530_17118C.1
cggcccggaccggaactgccgggccggcccatcccacccgtgcgtgtaggctcaagtccaccggcgaggagtgcaacacgagagatcctagggatcatcctgggcaagctcatcgaccccatgctcgactgacccaaggagcgaaaccgtgagccccttcggatcacctctgtcaagatcccatcgccattgtcactgccatacacgcattatcgaggaggagaggcgactaataataaaagaaaacgaaccgtttcgcgtatcttgagacaaaaaagaccctgtattttgttggttcgctgccgcttggattatagcgatctcgagttcttagtgatagctgctctgcccagcttggcagccatggtggcaaagcaaagcggctctctaagatattgtcgctaaactgcattttggggcgacagtattgctactcaattccatc

SEQ ID NO: 10837 - DNA, 107 bp, Oryza sativa
  Clone ID: PAT_MRT4530_17119C.1
accacgcgtccgggtacggtagctccaccaccttctgctgcgccgacgacgacatgaagcgcaatcctctcgtgactagctcccttcccaagtgccgggaggcgcac

SEQ ID NO: 10838 - DNA, 512 bp, Oryza sativa
  Clone ID: PAT_MRT4530_1711C.1
gagaccggtccttgtttagtttacaagaactggagctgtgcaagtgctactacactgatcatctaccaccacttggacaattgccaaacctgaagcagctcaagctgacgagcctgtggaaattgagaagcatagggcctgagttctacggcgattgcgaggccccatttcagtgtcttgagacattggtggtacagaacctggttgcatgggaggaatgggatcaccgtatcatcgtgcagcaagttagagaccatagttgggctcaggagcgctgtgaagtgactgctgggaacggtggattgcaagcaggtcagactaacgtgcttccctcccttcgaagggtaaagatcactgcttgcccttcactggaggagcctctgatatcgatgcttcgccggcagacggagatcggcttctcctactgggaacaaagccccagcacctctcccaccgacatcgctgattttggcaagactccatggaaagattctggcaaggatactttctag

SEQ ID NO: 10839 - DNA, 426 bp, Oryza sativa
  Clone ID: PAT_MRT4530_17120C.1
aaaaaagtattacttgatgtttgaaaactcaaaaaaatatgctaaatgataaggatatctctccttcagatatacacaacaattctccaccgttcattcaaggaccaatcacaagagcttgcgtgcgacaattaaatttagaggtgagctcattcctattttctttcttatatgattttgagaatagattgctacctaattattatattaaaattaggaacaatggagaggacaaggagacacttagagagggacttagaggcatggaggatcagcaaaggcgtccaagtcaagatggaggcccaagccaaatcgacttcgagtacgtctcggagtctaggactagtctgcagtaaaacgggcttctaggtcgcatacgtactcggattggggcgttctttatatggatggaaagctaagaagata

SEQ ID NO: 10840 - DNA, 105 bp, Oryza sativa
  Clone ID: PAT_MRT4530_17121C.1
tgtataccctcccgccgccggtacttaaacacagggactcttgcgagctctctggattacatcacctagcttcccatcgtactgtcggaccgactgctaatggag

SEQ ID NO: 10841 - DNA, 1242 bp, Oryza sativa
  Clone ID: PAT_MRT4530_17122C.1
gcacgcggcccgccgcgtcaccttcgggcttatccctgggcggatcgccgtgagatgggccgtgctccggcgaaacggaagccctcgtcgccgccgcctcctccgcctccgggccgttgccacttctggctccctaacaagcgccgccactgcgccaacactccgctcccaacctctcacaccgtgctcgaggagaacctggaggcgcacgtcggcaagtgccccctcaagaagcaggccgcggcgctcgcagcgcagccgttctactccaagggcatcaactccggtgggggagaaggcggtgggggtgtcacctcggccgctaagcgtgcattggtgcacaagctcaccaaggatgaattgcgcgccttgattgagaagatcaagttggcgcatgcgtcggcggccatggcaatgcgtgattcatttcttgttacagatgcttgcgacaattggatgaggaaccaggttgataggaaggtgccataccaggaaaagcatgtcacgcagcaggcatccatcattggcaatatggaggcatttggtttgctgcagaagggaggtgaggtggcggaggagaatggtgtgaaaaatgctccggcagtggtggaattcggagcagggagagggtacttgactcagatgctggcagactgctacgggattaggaatgttttcttggttgagagaagatcatacaagctcaaggctgatcgaagtttgcgacaaaatgaaggcgttactttgaagcgtttgagaattgataatatgaccatgatgtgctgccttcatgaacggtataaccaggcacatgaaaaagaatatggcaaaagcaatctatgtggccttgctttggccacctgctgccaccatctgtgccaatggaatcactatgcaaataagacattcctctcagggttagggattacagaggaagatttccataccatgacttggtttagcagctgggctgtggatggtgatcacagctccccggattcctctttagaggttgaagactcatctgtagaagacaggtgcggaaaagcagagaagtctgatgtggaggtcagcggaatcgatagactcatccgaagtataccagcaggggagagagctgccttggggtttatgtgtaaagatattattgatactggtaggctattatggcttagagagaagggtttagatgcagatcttgatgaaaaagaagcttacatgttccattttgaacctgattaa

SEQ ID NO: 10842 - DNA, 1339 bp, Oryza sativa
  Clone ID: PAT_MRT4530_17123C.1
atggcgtcctcctcctcctcctcctccctctgccgactactcatccccaggccgaccacccgccgcttctccggaggaggaggggaggggggaatggcggcggcggcgccggtgaagcgggaggtgaagcccgaggcgggggaggggtggggcgggggtgatctgggggtggtgccgccgccgccgcggccgatggaggggctcggggaggcggggccggcgccgttcgtggcgaagacgtacgagatggtggcggacgcggccaccgacgcggtggtgtcgtgggggcccggcggctcgggggcctccttcgtggtgtgggacccgcacgcgctcgccgccggcgtgctcccgcgcttcttcaagcacgccaacttctcctccttcgttcgccagctcaacacctacgggttccgaaaggtcactccagatcggtgggagtttgcaaatgaagccttcttagctggtcagaagcatttgctgaaaaacatcaagaggaggcgtgtttccaagcctctcgtggattcacaactaagaaataaagcaagtgttgtttttggacagcctgaggctcctggtgaggttgtgagcttgaagagagaccgtgcagccctcagagctgaggtcatcatgcttaagcagcagtacaacgcctgtaaatctcagctcattgccatggaggagatggtccgcaacatcgagagaaggcaacagcagaccatcggcttctttgccaaggtactcaccaacccggctttcgtgcagcaggttctactcaactatgtgaataagaatggcctaagaggcgccgcgaaaagacaacggctgatggaaaacgaagaacagcatgctgattcgccattgaacaaaggtatggaagctgcatctgtgatggaagctgatgtttctccagggagcactggctgtggcacagttgggaaagtggagaccactccaatgtgcaatttccagaatattgagaatatgtgtgatgatgtctgggaagagctggacgccttacctgaaactggaatggagcaggaagaaaaggctgggattggctccttcgatgtcgaggagttcgtcggaaggccttgtggttgggttgatgactgcccataccttgtggagccgatgcagttcgtggaacactagaggcatgagaagaatacaatctgtccttagaatagtggaacgtgtttataacgtctgaatatctgtatatcaattacccacttcgatagaagtctgtactatgaatagcataagctcctggaacagagcttaaatataggaaacgaacactctcaggtaatgcaagccaggagtttgtaggatt

SEQ ID NO: 10843 - DNA, 2174 bp, Oryza sativa
  Clone ID: PAT_MRT4530_17124C.1
atgggggaccggacgaaggtgatccccgatttctcggcgctccgcggcgccggcggcgaggggaaggccggggagtactggcaccacgaggccacgcagacgtggttcgacgacgccgaccagtacaggatgatcagtgccatgtgtcggctctcttgtagcgtctgtgatagcaacaaggaggaggaggaggagcgtactggtaaagcggccaaggcgaagcgtaagagcaagatccggagcgttgatcagctcaaggggcatctcctcgatcgccatggcttgtacatgtgtgacctttgcttggaaggcagaaaggtatttatttgtgagcagaagctttatacaatgtctcaattaaatcagcacataaaatctggtgattcggaggtggatggctcagaggttgagcgccgtggctttggagggcatccaatgtgtgagttttgcaaaagcccattttatggtgataatgaattatacacccatatgacaagagaacatttttcctgccatatatgtcaaaggtattctgcaagactgcagtcattatcttatttggtgaggcaacagcataatgctgactttgtgattgttaacaggcaacattctggacaatatgactactttaggaactatgatgacttagagaggcataatggtgtggaacacgggaagcacatgcctggtgctgttgacagtagctcgtcgtccatgcaaaatggcattgcagctgtaggccatgggttgggaggtcaaagtgattcatctcgggtgccattgcaatcattaagcatttcttctagttctgggcaatcatcagaaacaagacaaagctttgcgagaaatcgggtacttcagcaagcatgtgttcctcctctttcccgtcaggaggtccatgatgctagagtaggttctgtccttcaagaagcttcattcccttccctaccagcacaatcaaggaaggcaccagcacatagtcagagctcaaggactgcagcaaggattggggaccagcagtttcgtcctttatcagttactagtaacaggaatgttgctttagcacagcagggtacaagaacattacctgaaaacacccatgtatctgggcttgcacaatacagcaagagaactgagaacatgcaccaagctgttcagcctcagttcctaaaaaataattctttgatcccttctggctcaacaagccgccctgtgcatgtccccagttctgctggaaatgaaaggcaagacacattcagcaacagccaggtgttatccagtgtggaggacattcttgcagcaaataaagccctggttgagaaaatgcgggctgcattaggaatggatcaggatatgttcaacgcatttaaagagatcgctggggaatatcggcaaggtgttatcaattcttcagagtacctttcatatgtaaagcagtttggtctcttgcaccttgttcctgaaatggccaggttattgcctgatgctcagaagcagaaggagcttgcagatgcctactatgccaatttgcgccttacaagcctccaagaaaatggtgggggtggaaccgataactcgaaacaaggcaatcagaataagaaggggaaggggggagttcctgacgccataggaaccagtaatgctgcaacagatccgctgaaagataagttgctgaatactgccatcaagttccagtcaaattacatgccccaggaagggtgttgtggcgtgcagcgaaaagaagggagaacaacagatggatcttctcagggtctgcctttgaagggtgcttggcaaagccgtgggggccagagactcttcatgagcaaagcaaagaagtgacgaattggttttgcaggtcaagttagttagacctgccatttgagccgctacgaaatgtcaaggtttgtgtctatctggtgtgtgtctgatagttgagtacatgagtgcagcaatcatgtgtgatgcgtttgcattttgatttttttttcttttttgtctatcatgtgtggtgcgtttgcattttgatttttttttctttttgtctattttttgtgtggtgcgtgcgtttggtagaccatggaacttgagactagaacggtccacaccatactgcatagtggagttttgcaacttcacatgagtgaatttgggctaaaaaaaaaaaaaaaaaa

SEQ ID NO: 10844 - DNA, 843 bp, Oryza sativa
  Clone ID: PAT_MRT4530_17125C.1
tcgaagtttgcgacaaaatgaaggcgttactttgaagcgtttgagaattgatattgaagatttgaaccttcaaggaatagaggcattgagtggacttcattatctagcaattggaaagcatctatgtggacctgcaacagatatgaccatgatgtgctgccttcatgaacggtataaccaggcacatgaaaaagaatatggcaaaagcaatctatgtggccttgctttggccacctgctgccaccatctgtgccaatggaatcactatgcagataagacattcctctcagggttagggattacagaggaagatttccataccatgacttggtttagcagctgggctgtggatggtgatcacagctccccggattcctctttagaggttgaagactcatctgtagaagacaggtgcggaaaagcagagaagtctgatgtggaggtcagcggaatcgatagactcatccgaagtataccagcaggggagagagctgccttggggtttatgtgtaaagatattattgatactggtaggctattatggcttagagagaagggtttagatgcagatcttgtaagctacgtcccatcaaatatttctccagagaatcacttactcattgcaaaatgtacgtctttatcaggatgaaaaagaagcttacatgttccattttgaacctgattaagttcgcaaattttggttgtataatttatgacatataaaaaacatcagttcagtgaaaaattaggtgtgcaagccaaaaacatccggagagcatgctatatctccatgtgaaatttcaatatgagagcagtctccatgtgaaattccagtattgaatc

SEQ ID NO: 10845 - DNA, 445 bp, Oryza sativa
  Clone ID: PAT_MRT4530_17126C.1
ccgggccggaagacccggggcgacccacgcggccgcccctacaaatagcaatgacatggaaaccaaacggggggagtggtaaaaaccaaccgaccggggcaccccccaagggaaagcgatgggccaacgctacagcaaccacaaggcaaagggccagcacaagacaaggagatgccacaagtggcggacccggacaaagggcgaggaggccacaaaccagcacaagaacgggaggcccatggaaccccgagacaggggcaagaagccgagcacgagggaacccgccgacaagcagcggaggggcagggacaaccacgagcgccgcaagggctggagaacccagcagcggggcgagatgaaggaccgcaccggaagctccccacgctggtgtccaacacccgacagaagctcggcggcggcaactacaccaaggccagcgacgggc

SEQ ID NO: 10846 - DNA, 1560 bp, Oryza sativa
  Clone ID: PAT_MRT4530_17127C.1
catcctcccccaccttcacctccgaggctgccatcatagggcacctgcacctcatcggtggcctcctgcacgtctctcttcgtgagctcgctcatcggtacggccccgacctcatgctcctccacctcggccaagtcccgaacctcattgtctcctccccgcgcgccgcagaggctgtcttgcgcacgcacgaccttgtcttcgcgtcacggccatactccttgatcgccgacatactcctttacggcccgtctgatgtcgggctttcgccttacggcgagtagtggcggaggaggatcatcacaacgcacctgctgaccaacaagaaggtgcggtcgtaccgtgtagcacgagaagaggaggtgcataaggtaatggccaaagtccatgagttatccaccaagggtatggcagtggatatgactgagctcttcagcaccttctcaaatgacctcatatgccgccttgtgtcggggaagaacttccaaggggaaggtcgaaacaagctgttccgtcaactgttcaaagcaaattctgtactcctcgcagggtttaacctcaaggactactacccaggcttggcaaggctcaaagctgtctcaatggtgatgtgtgccaaggccaggaacacgaggaagttgtgggatgaattgctcgacgagattatcgatgagcgtatgagcaaacaacaatgtgagcatgatgaaggcaatgatcaagatgagatgaacttcgtaaatgttttgctccttcaagagcagggcatcaccagagaacaccttaaagcaattctagttgacatgtatcaagccggcacggagacgtcatcagtggtcttagtatttgccatggccgagcttatgcagaagccacatctcatggccaagttgcaagccgaactaagaacaaccatacccaagcagggacacgaattgattactgaacgtgatcttaccgacatgacctacctcaaggctgtcatcaaggagacgcttcggttgcatccaccaactcctcttctcctcccacatctcgcgatggctgactgcaatattgacggctacacggttcgctcggggactcgtgtcatcgtcaatgcatgggctattggaaggaactctgaatcttgggaagctgcagaggagtttttgcctgagaggtttgttgatgatggaagtgcggcgaacgtagacttcatagggacagacttccagttcttaccgtttggcgcagggcggcggatctgtcctggaataaactttgcttctgcgagcatggagatcatcctagcaaaccttctgtaccattttgactgggatgtttcagctgaagcagccatagataaagatggcattgatatggctgaagcattcgggttgtcagtgcagctaaaggaaaagctactgcttgtaccggtagattataaggatggcatgcaggattcggctgttatattattataggattagtttctgtcgtatttatttgggattatgtaaaatccaagttatgtataactctatttgtacgccaaaaaaaaaaaaaaacctgcagcccggg

SEQ ID NO: 10847 - DNA, 296 bp, Oryza sativa
  Clone ID: PAT_MRT4530_17128C.1
tcggacgcgtgggctcgcgatctccactcgcttcgtccagatctccgcatcaacccacaggtaaagtaagaaaaaatcaatctatgtttctttctacttgctctcgcttcgttttggaggatatttgtgcctcagatcttgttgccgtgtgtagcctagccgtgtagaataggaaagagaaaagaaagcaatctttcttgtgatcaagtctttggtgattcttgtggagttagcaatggcgtgcgatctgtttgcttgatttgatcttgctgtgagatctcgattccgttcgcttg

SEQ ID NO: 10848 - DNA, 262 bp, Oryza sativa
  Clone ID: PAT_MRT4530_17129C.1
ggtaacaataatattttgaacggagaggagaggccttttatttacaggcctaatatatcaaatggttgaaaagtacatttgaggaggttcgttttcttaattgtatcagcgaccatcaattctttttacataaacaggtttgacaaattgctttttcacaagcacaaaaaaaaggtgggcttggtgacaaatatagcataaataatcggtttaaactcaaatcaccttttaagatttctttggtcaccttttttttgacctt

SEQ ID NO: 10849 - DNA, 540 bp, Oryza sativa
  Clone ID: PAT_MRT4530_1712C.1
atggccaccgtgcgggcacacccgccggcgccaccgtctccggtgcaggcgccggcgccggcggcgccccctccggtgagcgtcgccgcgcggccgcaggcgccgtactactactactgccacggctggaaggagggcgtggcggagtcgcgctgcccgacgacggatgcggcggcggcggctgcggcggcgaacggtggcgtgatcgagctctcgtcgtcggacagcagcggcggcggcggcggcgccggccgatgggacgatgacgacgacgggtgcagcagctgcgtcgacggcgacgatggcgcggcggccggcggcggcggggcgggccggcgccgcgacgaggaggagaaagggaggagccagcagttcggcagctggtggagccgccatgacagcagcagcagcagcagcttcctctggccgccgccgccgaatgacaacggcgacgacgaggacccggcggcggcggcggcgaggcggcaggaggaggaccgcaagttctgggaggcgtgcctggcctcgggccttccatga

SEQ ID NO: 10850 - DNA, 1371 bp, Oryza sativa
  Clone ID: PAT_MRT4530_17130C.1
atgtcgtcgccgccgtcctcgggctcggagcgctcgctggcgtcgctcgtctccgcggcggcgcactccgtcaagctcaaccgcgcctacctcctcgccccggccgtcgccgcgggcctcctcgccgccgtgctcctctcctccctcctcgacttctccgctttctccgcctccccgcggccggcgttccctccgccgaccgcgggcgcgccggcgaacgcgtcggccctgtcagcgccgcctcgcgcgcccgtgcgcacggccctggacacgctcgggacgcggccgcgggagccgttcacggcgctgcgcgacgcgtacgcgcggtgggacgcggcggtggggtgcgcggccttcgcggagaagcaccggtcgcggtcgtcgccgccgcccggcccggcggcgctgcaggaccccgaggcggcgccgtgcggctcgctgcggctgccccacgtcgcgctcgccgtgaggggggtgacgtgggtgcccgacatcctcgacggcgtgtaccagtgccggtgcgggctgacctgcctctggagccgcaacgaggaggccctcgccgacacccccgacgtcgtgctctacgagatctggccccctcccgacaccaggaagcagggcgagccgctgcgcgcgttcatggacatcgagccgacgaggaagcggtcggggcacgaggacattttcatcggctaccacgccgacgacgacgtgcaggtgacctacgccggcaagttcttccgcatcacccacaactaccacgtcgccacccacaagcgcgacgacgtgctggtgtactggtcgtcgtcgcggtgcttcgagcaccggaacaagatcgcgcgggagctgttccgccacctcccggcgcactccttcggccggtgcgagaacaacgtcggcggcggcgacaaggccctggagctgtacccggactgcgcccgcgacggccacggcgcggcggagtggtgggaccacctccactgcgccatgtcgcactacaagttcgtgctcgccatcgagaacaccatcgccgacagctactccacggagaagctctactacgcgctggaggccgggtcggtgcccatctacttcggcgcgcccaacgcccgcgacctggcgcccccgggctcctacatcgacggcgccgcgttcgcgtcggcggaggagctcgcggcgtacgtgagggaggtggccggcgacccggcggcgtacgccgagttccacgcgtggcggcggtgcggcgtcctgggcggctacggccggaaccggctcgtcagcctcgacacgctcccgtgcaggctctgcgagcgcgccagccgcatgggcggccgccacgcgccggcgcccaacgccaccgtgtcgtga

SEQ ID NO: 10851 - DNA, 272 bp, Oryza sativa
  Clone ID: PAT_MRT4530_17131C.1
gaggcctatggtccggtccgaagcacgccattttggtccggcccaaacatggctcggcctaactggagtcgtgcctgtgctggcctgccccgacaaccgagccgtgcctgggctgcaccctcgctacggtgggccggcgatgggctatcgtgccttcgggtcggcccgacacgatccgagtagtattgggtcgtgcctgggccgtgttggcccgactagcctcggcccaagcacgaccgggtttgggccgtgccgtgccgggcggcccagtt

SEQ ID NO: 10852 - DNA, 350 bp, Oryza sativa
  unsure (1)..(350): unsure at all n locations
  Clone ID: PAT_MRT4530_17132C.1
ngacgcgtgcgctcctgtggcttgcgatccattcgcgtcccatcaggaggatggatgatggacgctatcaaacggaagagcaagggagagaacgataggaggagtatcgtcgtccacatccatgcatccgtgcgcgatgtcgacggcagcgaagatagggctcacatgcacaaagctgggcagccatctatttgtccagaacgacactaggatcctaactggacggactcgatgcggccggctaaacgacgatgctgtacaagctcagactgggcgagatcattactactatcgccaccatagggtctaatgccacatctgcagaaccaataacattagctgccccgttt

SEQ ID NO: 10853 - DNA, 543 bp, Oryza sativa
  Clone ID: PAT_MRT4530_17133C.1
atggcgggggagcggcggcacgatggcggcgcgcacggggaaggggcggccggccctattggcgacgcgacgggcgccacggttggcgatgatgccgacgaccgggcggcgcggcgcgggcctcggcgcgactcggcacggggctcggcgcggcgacgagacggcgaagcggcgcggcagcggaacggcgatggggacgccgcggcagcggcggcgcgcggctcggagcgacgatgggacgcgcgcggcgacgggatgggcggtgacggggcggcagcggtggcgcgcggcacgaggagggatgcgatggtgacggcgacagcgcggcagcggcggcacggggcgcaaggcgacgcgacgggcggcagcggcgacgcgacagcgggcggcacggcgcggggcgacagcggcacggcggcaggcggcgacggcgacggctcggggcgcgaggcgcgcatggcagggaaggggaaggggctaggggacacggtcgagcacgtggcggccgatgaacagtgcactttcctatttttctcattttag

SEQ ID NO: 10854 - DNA, 406 bp, Oryza sativa
  Clone ID: PAT_MRT4530_17134C.1
aaaatgttcctatttaacttaatggttcatgctttaatttttcttttttatggctgatttctatcaacaaaaataaagtatgttcaccccaaaaaaattgccccagttacaacaaatgattcattattgtaaaagacacaataggaccaaaacagcaacatataggctggataacttggttaaaactatcgcctcaaaaaacaagtaccgatagtgcaagcacctccaacgttattatcttcactcgcccaaatgataactacgaatataaacctccaactgaagacctttttttttaattagaaaaaaaaacttctggataaaaataaagaatatccaagaaaaatatcacatggggagcattcctgacacacgacacagggaagccaaagaagaacttgaatgg

SEQ ID NO: 10855 - DNA, 578 bp, Oryza sativa
  Clone ID: PAT_MRT4530_17135C.1
ttccccccggcgtttttccttttttttccacgccgcaactgtaccctctcctgggtcccggggggaaggattggacccctggaattataacccaaaacgaaaaccccccggcccacgggcaacaacctgagaaaactacttgacaggacactttaatcactataggtggatgcacaggcgactcgaatgcccccacgggacgggtataaaaggaagaacaaaggggcccagaaccaaaaatccgattccatgggacacgaatcccgtacaggaaggggaaagtttaaaaggggggtttcactggctcgggaaaaagcaaccaaggggaagcaaaccaaattacagggggggggataactggggcgggcaagcgcaagggcgcaaagaaaaaccctccaccaccaggggaaacttcgtttaaaaagaagcctggggcagagcttccaccaaaaaacgaaggctttgggggcacttcggggcctcccaaggaggccagggggtattttggttccctggaggcggccccaggaaaaaacaacctggaagggaccaaaaaaacccctccggggggcaaaacg

SEQ ID NO: 10856 - DNA, 843 bp, Oryza sativa
  Clone ID: PAT_MRT4530_17136C.1
atgacgccccgcatcatgcgagtacccctgatcccctccatctctctctctcttcgaatttgcttctgggatttttttcgtttcgtttcgatgcgttcgtgggtggagaaaaggctcatcaagggaattgcgggaggtcgttatctgtcttcaatttggtttttggttctcacacaaggactcccgttcgcgattgtgcagaggtatctgcaaggaattgtgctgagtgtctccgtagaagatggcaagggcaacaagtcttctgtgactgttcgtttgtatggcccaaatacagccttggtgattgatcggaagaaggaaatgcagaaggagcgagagtgtcacgatggtgcagagcatatcccagattggccgtatggcgagcaaatggatagatggggcccaaagccagctcgtctgctttgggtgccgtccagccagagcaacgtcggtttgctgcgcggtttgcagtaccgtgaccgctgtgcctgctcccggccgctcgcgaagaagtacacactagagttgttgttcgcatcttcgccgccgtcggtgaccgctgcggccatgaaggagtgtgtgcttgatgagtactccaccaagcacaggatctctatcgataggtttctccagctgaagatatttgtcaagattgccattcttgacagtgtgaacatgggtggtggcagagatattctccgcaaagagagatcatctaaagcatggttaaaaaacagtatacacccatggtacctcagatacatcatgttccagccgttgaaagaaagttgcattcattctggtgattcaaactttctggatcttgaatggctttcaacttga

SEQ ID NO: 10857 - DNA, 927 bp, Oryza sativa
  Clone ID: PAT_MRT4530_17137C.1
ggaagaaaaaaaaacctatgaatacatttgcagtgaatgccgttgatgagtaatttccatacattgttttacagattctgttgagaacaaaactcttacactttacaatctaaagatgaagcaccaatgcatataaaaaataaaaatcaaagttttacataatgatcagagtaatgtgtccatggtgatgatacaactatatttgatcatacaaatctaccagtcaaaagaagacattgtggcaataacattctccgctgaaaggttcacatccggagtattaattgcaatggacctttcatcgcttgagttgtctcaagttgaaagccattcaagatccagaaagtttgaatcaccagaatgaatgcaactttctttcaacggctggaacatgatgtatctgaggtaccatgggtgtataccagcaattatattgttttgtttgtgtagcaacaacatccatggtagatgcagattcctactgctcaagcacctcacgtatgcagtgacctttaagcccgatcatgcaccttgacaaatatcttcagctggagaaacctatcgatagagatcctgtgcttggtggagtactcatcaagcacacactccttcatggccgcagcggtcaccgacggcggcgaagatgcgaacaacaactctagtgtgtacttcttcgcgagcggcctgagcataggcaccatcaacgcaacgtgcgcgccattgcggagccctgaagccgtttcggacccccgggcatttgtctttacattttcgtgggcattgcagctagatttctgctcgggagcaggcacagcggtcacggtactgcaaaccgcgcagcaaaccgacgttgctctggctggacggcacccaaagcagacgagctggctttgggccccattgggagctgtaaatggcacaaaagga

SEQ ID NO: 10858 - DNA, 534 bp, Oryza sativa
  Clone ID: PAT_MRT4530_17138C.1
tcacagctgaactaaaatcatagcaaacaacacaagcatgcatcccaacgacatcagtacaagccaaactctctgtttctctagcctactgttacttgctctcatagcagccatgttagcttcattctcagctgccacaatcctcaattgtgccacttcattcattgctacccctaattctaggcactgctcttctacctttggcctcagttcttcaacacaatgttgcagctcattcttctcccttcttagcgataacacggcttcatgaagatcgttcaacagctccctcaaaaaactacttgttgcaggctcataccagtcaaaaaaatcgcagccggcgccccgattgcggcatcggtagtaccatcgaccagggttgtccacgctcccggaaatcccccgtgccgccttcgcaccacatcggcacatcaccgccggctgataatcatagggcccaactcgcgccgggatgggagcacgactgctgggatgcgacgaccccgacgaccggtcactgcaataactcgccat

SEQ ID NO: 10859 - DNA, 1667 bp, Oryza sativa
  Clone ID: PAT_MRT4530_17139C.1
cactcttctctcctctctccctctcgcagccacagcacagcgcagcactggccgcctaatctctccgcactctctcccctcgccgctccctccactgccgcttcgtctcggccgacgacctcgtcgtcgtcgtcgtcgtcgtcctcgtgttcgccggtcgccgcgccgacgcggatcgccgtgccgctgtccagtgcgagagcgcaggcaggcaggcaggcgcagtgccagcaatttgcctccctcaccaggggcacatctacatgtggagttcattcccataaaagaggatgcacatggtatacctcacccatgacctctgtaataagctgcggtgatctttatatgcttcaccaactggtgaaaaatgggctcttttctgagaaaacagcccagtttcctcttaattttgttaattttgcaccttggtgctcgtgaagcaagtgcactaagttcagatgatgaagcacatcttgccttcaagaaggcagttacaacttctgatgggatattcctcaactggcgtgaacaagatgtgtatccttgcaattggaaggttgcgtgcttcttccactctcactacaagtctgggcagtcaagcacttatcagaagaatggtctgtgtcttaaaactttccccaaccgtgctattatttgtgttgatgttttcctccgttcctctatcatcattccctatgacgagatggacattcgtctaatttatctgtaccgtgatctttttctgaaaatattctctgcaaagagagtaaaaagagtgagatcatatggcaacattctttgtgaaagcaacacatccatatctggatgtagtggttgccataatggagacaaggagctgttgaatgcagtattgcttgatgttaaaagtgggtcacaatttccagtgttggaatctaattcagtacatggcaatgaaatttcattgacctctgaaagtgaggtatcaaacttaaggtatactcccatggtacctcagatacatcatgttctaggtgttgaaactgaaagttgcattcattctggtgattcaaactttctggatcttgaatggctttcagcttcaggcaactcaagcgatgaaaggtccattgcaattagtactccagatgtgaacctttcagcggagaatgttattgccacaatgtcttcttttgactggtagatttgtatgatcaaatatagttgtaccatcaccatggacacattattccgatcattatgtaaaactttattttcattttttatatgcattggtgcttcatctttagattgtaatgtgtaagagttttgttctcagcagaatctgtacaacgatgtatgcaaaattactcatcaacagcatcccctgcaaatgtattcgtgggttttttccttacataatcattgattcagcctgttgaaactgaaagttgcattcattcaagtgattcaaacaatggatcttgaatggctttcaacttcaggcaacttaagcgatgaaaggtgtttacttttgcattgctattgtattttttttagcgttttcgactgatagaatatcatcttcatagtggcagtcaatttgatgtacacacattttctttgccttagtgtagggaaaagtgaaggataataattattgagaaaatccataaaatgccattgac

SEQ ID NO: 10860 - DNA, 3172 bp, Oryza sativa
  unsure (1)..(3172): unsure at all n locations
  Clone ID: PAT_MRT4530_1713C.1
ggaaggaatgcaacagcaatgcagcatcacggggacagtaccagaatttccatgaaattccaccggatgatgctgattttaataaccttacaatttacttgaagtcagcatcaccgcctgcaggaggtgccaagctggacagaactgtgcgccgaatcaccgcggtgttggttgatgcagatgaaagggaaatcgctgacgagactatgaagctttggatctctgagctcaagcaagtgacatgggaagctgaggggatacttgaagattacagctatgagttgctccgcagcacccccgtccaggaagagaagaatatactagacaggataagcaaggttaggaaatttcttgatgagatctgtcgtgatcgtgtagatcttgggctaattgatcaggaaggattgtgtaggaaagaatctaggattagtaggtgcaccagttctttgcttgatccattggaggtctacggccgggaggatgagaaaaaattaataatatcttctttgcttgatgggtgccttacatttaagaagagaagattgaaggaacatgaatatgaaacttgtaaagctggtgctgtaaggcttatttctatagttgccatgggtggaatggggaagacaacactagctaggctcgtctataatgacgcaagggttcaaaatcactttgatatacaagcatgggtttgggtttcagaagtattcgatgaagtcagactaaccaaagcagcaatcgagtcggtcaccgctaaaccctgtgatctgactgagctagagccactccagaggcaattgcacgaggaggtcaagggtaagaagatattgcttgtgtttgacgatgtttggaatgaggacaccatcaaatgggagacgatgaaacggccattttctgctgttgctacagggagccacatgatcatcactactcgcaacgagaatgtctccacaattgtgcaggcgaagaaggtaattcatctaggtgggttgcaaaaagatgacagttgggcgttgttctgtaaattgtcattccctgacaatgcttgtagagaaacagagttgggaccaatcgggcggaaaatagtagaaaagagtgatggagtgccactagtcctgaagactctaggtgcaatgttatctttagacacaagcttggagttctggaattatgtactgacaagtgatctctgggagctgggccctggatgggaccacatccttccaattctgaaattgagctattacagtctgcctgcaattctgaagcgatgcttcacatttcttgctgcctttccgagaggtcacaaatttgacttagaggagctggtccatatgtggtgtgctttgggtttcattcaggaggacggtgtgaaaaggatggaagaaattgggcacttgtatgtaaatgaattggttcggagatcatttcttcaaaatttgcagttggctggttcacgggagaagtttgtcatagtgcacgacctcattcatgaccttgctaaatcaattgggggtaaagagatccttgtcaaaaagtgttgtggttcatctgttggtggttgcaatactagtgccaataatcatcttcgatatttagctgttcttgttggaacaacgcccttctactcagacaataaattggtgccttttactcttccggttgctggacactttcccctaagatcactgtcttttcagagtaaatggagaacttatctcagaagctgtgttagaaataacttgaggacgttctttcaggtgcttgttcagagccagtggtggtataaccttgaaggttgtctgctgcattcaccacacctgaagtatctacgaatcctggatgtatcatcaagtgatcagatcaagctgggtaaatcggtgggggttcttcatcatctccgctaccttgggatctgtcagagagaaattccggaggctatttgcaaaatgtacaagctgcagactctacgaaacacatacccttttgacacgatatctcttcccagaaatgtgtcggcactgtccaacctgcgtcaccttgttcttccgagagagttccctgtcacaataccatcaggaatccaccggctgaccaaacttcagtcactatcaacatttgcagtggccaattcagggagcggagctgccacgctggatgaaatcaaggacattaacactcttcaagggcagctctgcatcatggatctccagaacatcacacatgacagaatttgggaaccaaggagtgcaaacctgagcaagaaaaaattaactcgcttagaactagtgtggaatcctctgccttcctacaaaagcgtaccccatgatgaggttgtactggaatccctgcagcctcacaactacatccgacaactcgtaataagtggttttagaggattgaacttctgttcatggctaggagaccggtccttgtttagtttacaagaactggagctgtgcaagtgctactacactgatcatctaccaccacttggacaattgccaaacctgaagcagctcaagctgacgagcctgtggaaattgagaagcatagggcctgagttctacggcgattgcgaggccccatttcagtgtcttgagacattggtggtacagaacctggttgcatgggaggaatggtggctacctgaaaaccatccacattgtgtcttccctctccttcgtacgatcgacatcaggggctcacacaagcttgtgcgccttccactgtcaaatctccatgcccttgcagggatcaccgtatcatcgtgcagcaagttagagaccatagttgggctcaaggagcgctgtgaagtgactgctgggaacggtggattgcaagcaggtcagactaacgtgcttccctcccttcgaagggtaaagatcactgcttgcccttcactggaggagcctctgatatcgatgcttcgccggcagacggagatcggcttctcctactgggaacaaagccccagcacctctcccaccgacatcgctgattttggcaagactccatggaaagattctggcaaggtatagtacctcatgtggatgtggatttctgtttggtaccagatgctcctcttcatggcacacaccatcctatgcatgtaatgtangaataaagtttggctggttggtcttgggtctgggtggccttttttctgttt

SEQ ID NO: 10861 - DNA, 444 bp, Oryza sativa
  Clone ID: PAT_MRT4530_17140C.1
atggcgagttattgcagtgaccggtcgtcggggtcgtcgcatcccagcagtcgtgctcccatcccggcgcgagttgggccctatgattatcagccggcgggcgccggctgcgatttttttgactggtatgagcctgcaacaagtagttttttgagggagctgttgaacgatcttcatgaagccgtgttatcgctaagaagggagaagaatgagctgcaacattgtgttgaagaactgaggccaaaggtagaagagcagtgcctagaattaggggtagcaatgaatgaagtggcacaattgaggattgtggcagctgagaatgaagctaacatggctgctatgagagcaagtaacagtaggctagagaaacagagagtttggcttgtactgatgtcgttgggatgcatgcttgtgttgtttgctatgattttagttcagctgtga

SEQ ID NO: 10862 - DNA, 708 bp, Oryza sativa
  Clone ID: PAT_MRT4530_17141C.1
tcacatctgaattgctctcatagcagccatgttagcttcattctcagctgccacaagcctcaattgtgccacttcattcattgctacccctaattctaggcaccgctcttctacctttggcctcagttcttcaacacaacgttgcagctcattcttctcccttcttagcgataacacggcttcacgaagatcgttcaacagctccctcaaaaaactgcttgttgcgggctcataccagtcaaaaaaatcgcagccggcgccctgaaaacattacatcccaaatcacccaaccatactgccagctcaaacaaaaaccaagcaagcaaacgaaatcttcatcactcacccgattgcggcatcggtagtaccatcgaccagggttgtccacgctcccggaaatccaccgtgccgccttcgcaccacatcggcacatcaccgccggctgataatcatagggcccaactcgcgccgggatgggagcacgactgctgggatgcgacgaccccgacgaccggtcactgcaataactcgccatcgcctagcctcacctcctcttgtcgcccccgccgccgccgccgccgcttccgccgccgccgccgacctaagctagggtttcagctcgagaagaggaaaatgtcgcggcaacgcctggaaacagcgaggacagagcctttaaccccgtctattaactccccaatggtggactaa

SEQ ID NO: 10863 - DNA, 237 bp, Oryza sativa
  Clone ID: PAT_MRT4530_17142C.1
atggcagtggaaaacatagttggcatatcattgcaagatctccacaggaattctatcattggtggcttcaataaatttgtcacgtcagttctcactatttcgattgaagtacagtgccaggaacaatggtttcctatttccccttcaactggaataattggccgtatgaaaagtatatttagtgcaaaagctgcctcccgccctgccccagtatgcacacataaagaaatgaaatga

SEQ ID NO: 10864 - DNA, 363 bp, Oryza sativa
  Clone ID: PAT_MRT4530_17143C.1
atgcgtggcgcgatcacccatgggcgacctgtcatcatgaccgtcccaggtggggtgcggtcggacgtagtaccgggggctgctgtcggtgatatgggcccggggccattagggctcagcacgcacgaccggtgcattcctggtagcatgagcccacaaaagtcttcaaggcttaatgagggaatgacaggggatgtcccccgtgtcagatgggagacggcgctgggacccaccacggaggtcggcgccgcgaccgtccctaaccctagccgcgccgcacccatgtcggacccgcgtcgcactgcaccatgccgctcccgtgtgccgcgtcgcgtccactccgccgcgatcccgctcccctga

SEQ ID NO: 10865 - DNA, 120 bp, Oryza sativa
  Clone ID: PAT_MRT4530_17144C.1
atgacagaactgaagtggaatggccaaagggaggttccgggcaaaagtgccaggaacttccgggcagaacttaggaatttttttgaacattcaaattgggaggtctccttgcattcttag

SEQ ID NO: 10866 - DNA, 244 bp, Oryza sativa
  Clone ID: PAT_MRT4530_17145C.1
aggccgacggcgacggtcgagcggcgcggcagcgacagggcgcggggctctactgcgtggcagcgcgaccggtattgttattgcgacgccaccgggaccgcgcgtgggacgatgggacccgagggggcacgacagctgcgtgcccaaagcgaaacgaccgggcgaggcgcgtttaaacgaccgcgacggcgacaccatggcgtgcggggggacaaggcgcaaggcagcggcacgggaaggctag

SEQ ID NO: 10867 - DNA, 659 bp, Oryza sativa
  Clone ID: PAT_MRT4530_17146C.1
gggctgcaggattgacatttccttgttctgcataacttttggaacctcgtaatagttgcccttttcagttttcacttagtcagcttctgaaaaatatgcttaaatttcaggaattagtattatcttttctgtttagtgaattattcgtcgtcatttgaatctggactaaagtgaaacatatttctagtccatatttacagttttgagataccttgagttttttgctttgagttcgacaggcatctgcctggaagaaaaatgataactttcatctatcatagctggagtagacagaacagatactaaatatttccttaaatttggaatttaccaccttttacaagtggtactcatcttagttttcatataaccgttcataaattgttaattgaaattctctccccaaattgtatccaatggtaccctggtgtttgattcaggaacaaatgttgtgagtgaaatgttgtttcctgagggaaaattccgttgtcatttacccatttggacctggattaaaacaaatcatatttgtcatctaaagattacagtttagattaccttcaaatccttgctttgtctgtgttgatagtttgtcagctggaatacggtagttaattttcatccattatagctggagtagacaggctggatactaaata

SEQ ID NO: 10868 - DNA, 752 bp, Oryza sativa
  Clone ID: PAT_MRT4530_17147C.1
gaactagccgagagttattttaagagctattttttagcataagaaaatagctctcaataaaatagccataagttgtttggataaagggttattttgataactatttagcctttaatgtatcatcccattaaaagagatagagagaaaagacactttttcagtggaccctacctgaaatagccccaattagcaccctttgggtgggatagtttttttgggtgggttatttccaaatagccctcaaatagctcacccttttaaatctttttagactatttgggctatttgagtgagggctaaaaaaaatatccctggatccaaacaagaccataaactttcaacttttccgtcacatcgtttcaatttcaactaaactttcaattttaacatgaactaaacacaacctttgaaggatctgatcgaggatgggttttgatactggacatctcgtttcgtttcgtttttcgtttgaaacctttcattttcacttcacaaaagcagctgcccaaccagttcactcacagtaggcaaagcctcttttctgttcgtatactgcgccaggcttggacaggtcaaccgtccccagattgttccagtggcatcatgccgagcatgatcataacatgatagcagcatccttgtcttcaagcaaacccaagttatactttcttggcattggcacggaaacaatcatcagatcaacctgtgcaccataccaaatcttttcgtcatttacattcctctttttgcaa

SEQ ID NO: 10869 - DNA, 1044 bp, Oryza sativa
  Clone ID: PAT_MRT4530_17148C.1
atggagctcctgcgtgacagcatccccatggtgtccctggcctcctcggctgccgcgctgtacgcgcgcgtggcgtccgccttcctgcgcccgggcctcccacgcctcgccgcgctgctccccgtggtcgcgctcctcgccgcggcgcccttggccttcacctcctcggccatgctccgcggcacctccgccttcttcctcgcgtggctcggcgccttcaaggtcgtcctcctcgcctccggcctgggcccgctcgcagtcgacggcctcccggtgctctcgttcctcttcacagccttgctccccgtgaagctccgccgaggcggcggctgtcccggcgcggccgccaaatcggtgtccctcgtttcttgcgcggccaaggtcgccgccatagccaccatcctccatctgtacgagtccaagatccagctgctgcatcgctacatacgtctcgccatgtacgggatccacatctattgcttcttggacctcctcctcccctgcatcgcggccgccggatccgcactggggatggagctggagccgccgttcgaccggccgtacctggcgtcgtcgctgcgggacttctggggccggcggtggaatctcatggtgtccgccatcctccggccgtcggtgtacgaccccgtgcgcgctcgcgccgggaaggcggcgggcgtcgtggccacgttcctcatctccgggctgatgcacgaggccatggtgtactacatgacgctgcggctgcccaccggcgagatgaccgccttcttcctgctccacggcgtgtgctgcgtggcggaggagtggtgcgcgaggcggtgggtggcgaggagatggccgcccccgccgcgtccgctggggtcgctgctcgtgatggcggtggctgcgggctcgtcgttctggctcttcttcccgccgatttgcagggaggggagcgaggagatgctgctggaggagtgggcggcggtggcggcgttcttccaggacgccggccggaagctgcgccgagcgccggggcactggggccttccaaagggttag

SEQ ID NO: 10870 - DNA, 138 bp, Oryza sativa
  Clone ID: PAT_MRT4530_17149C.1
atggtgatgtgcgagctgcgctggcaggagctcagtttgggggctcaaccagtgcatagcgttagtgccttgcgtgccgcaggccagcaggacattcaagctttggatatcacatggatactgagggcttccaggtag

SEQ ID NO: 10871 - DNA, 265 bp, Oryza sativa
  Clone ID: PAT_MRT4530_1714C.1
tctcaagacactgaacaggctcttcaagcacttcctcggcgatggattctacaggcgcatcatcaccgtggtggtcaggtggtggcgtggtgcctgccttgccgtcgccgagcgggcaggccggccgacggccgccggctggagcctggagggaagcagccaagtaggcaggaggcagccgagccaggcaggcaggagggcggcggaggctggaggcaagcaggcagcagccaagcaggcagcccgcagcggcgcagccgactag

SEQ ID NO: 10872 - DNA, 2790 bp, Oryza sativa
  Clone ID: PAT_MRT4530_17150C.1
atggccctttacttttcccctcttgtcctctctccggactctgggtcgtcgcttctctccccacaaggattttctaaatttcattgccatcaagaacacacaggcttcagtggtttggaggtatggcgtattgaaaacttcaagcctgttcccgtgccaacatcttcacacggaaaattttacatgggtgattcatatatcatcttgaagacgacagccttgaaaaatggttcatttcgccatgatctccactactggcttggaaaggatactagtcaggacgaagctggaactgctgcaattctaactgtggagcttgatgctgcccttggagggcgtgctgtccagtacagggaagtacaaggcggtgaaactgaaaagcttctctcctattttagaccatgcatcatgccacagccaggaggggtagcttctgggttcaatcatgtagaggtcaatcagcaagatcatgttacccgcttatatgtgtgccaaggaaagcatgttgttcatgttaaagaggttccttttgttcgttcatcccttaatcacgaggacatattcattttggataccgcgaacaaaattttccagttcaatggctctaactcatgcattcaagagagagcaaaagctcttgaagttgtgcaatatatcaaagatactttccatgagggcaagtgcgaagttgcagctgttgaggatggaaagttgatggccgatactgaagctggtgaattttggggtttgtttggtggttttgctcctctcccaaagaagacatcttcagaggacaatggggatgataaggaaactgtgaccaaattgctatgttttaaccaaggaacgctggagcatattagttttgaatctttggagcatgagttacttgagacaaacaaatgctacttgttggactgtggagctgaaatgtatgtttggatgggcagaggtacttctttgcaagtgagaaagggtgcaagtgaagctgctgagaaattgctcattgatgagaaccgaaaaggatcaaatgttatcaaagtgattgagggattcgaaacaatcatgttcaagtcaaaatttaacaagtggccgcctactcctgatttgaagctgtcatctgaggatggccgaggcaaagtggcagctctactcagaagtcaaggattggatgttaaaggattgatgaaggctgctcctgaagaagaagaaccccaaccttatattgattgcactggtcatttacaggtctggcgagtaaatggcgatggcaagactcttctttcatcttctgatcaatcaaaactttacaccggagattgctacatttttcaatacacatacactggagatgataaggaggaatgtcttattggaacttggtttgggaagaagagtgttgaggaggacagaacatcggcaatttcactagctagcaagatgtttcaggctgcaaaattccaggctgcccaggctcgcctctatgaagggaaagaaccgattcaatttttcgtcatatttcagagtcttcaagtttttaagggtggacttagctctggatacaagaactttattgctgtaaatggtaccgatgacgacacttacgttgaaggtgggcttgctctcttccggattcaaggctcaggatcagaaaacatgcaagcaattcaagttgatgcagtgtcttcgtcattaaattcatcctactgctacattctacacaatggaaacactgtgttcacatggactgggaaccttacaacctcactggataatgacttggttgagagacagctagatgtaattaaggtaacaggaggtaccaccatttctggtgtaaaactgggtatctctaggtataaggtcaaggaaatacaccactttactcaggatgacctgatggcagaagatattttcgttctagactgccgcaccgacttgtttgtttgggttggacaggaggtggatgccaaattgagatcacaagcgatggacatcggtgagaaatttcttctacatgatttccttatggaaaatctctcgcaagacacaccaatttttattgttacagaaggaagtgagccacagttttttactaggttcttcacttgggactcagcaaaatcgctgatgcatggcagttcataccagaggaagcttgcaatagtaaagggtggagcaactccatcgcttgataaacctaaaaggcgaacaccagcgttttcaggaaggaacgcaggacaagataaatctcagcagcgcacaagaagtatgtcccacagcccagaacgtcaccgtattcgaggaagatctccagctttcaccgcaatagcttctgcctttgagaacccaagtacccggtatctttccacccctccccctgctgtcaagaagcttttcccaagatccggagggtctgaattgccaaagacatcatccaaacaatcagctatcaatgctctcaccagtgctttcgagggtcctacgaaaagtacaatacctaagtctgtaaaagcgagccccgaggcagagaaggcaatacaggaggaaggctcaacgatcggtgaaagtgaaaacgagccagaagatgatgagaacagcacaatctacccatatgaacgtttgaccaccacatctgatgatcctgctcctgacattgatgttaccaagcgagaggtctacttatcatcagttgagttcacagagaagtttggcatgacaagggcatcattcaaaaaccttccaaaatggaagcaaaacaggctaaagtctgatctccagctcttttag

SEQ ID NO: 10873 - DNA, 813 bp, Oryza sativa
  Clone ID: PAT_MRT4530_17151C.1
atgggagggccgcaggcagcggatctggcttggctgcaggggcggatcccatcatcgccatcgccgaagcccagccgccgaggccgtccgctgccgccgccgcgccgccgagcggccgaggcgtcgtccggtcgtcgcctcacacctgaggcctcgacggcgactgccgacgctgagcagctgagggatcaagatattggtaatgcaattgaactaattaatacaaagatgcaattgcagctattgcgtgaggatgatgaagatgaatgcatcattgatagacaacttcgagagtttaatgatagatttgatgaggcggagggagcccggatccactaccgtggggcctttgtcgtcgtcgtcgtcgtcatcgcggccatcttcctctctccctcgtgcatcggtggtggaagtggtggccagccctcggcaaggctagggacggcgagcggcggaggcgactcctcctcaccctccgccggcgcgtgcctccttgacggttgtgtggcttctcctcgacctccactggtgcatgtagaggctgatagtggcggggcagtggagctcgagcggcaggggaggctcctcctcagctatctcggcaaccacatgtgcactctagcggaggccatcatgtccatcctttctgttgcatctcatcgttgcgttatgagtgttgcggctaccaaagatgagcacatgtgctggtcctcagtggccaggtttggcaacacccctgccatcgagaactcgcccaacaaatgcgacgatagctctttctatcatagcatgtcgtcccaccacggttcttaa

SEQ ID NO: 10874 - DNA, 330 bp, Oryza sativa
  Clone ID: PAT_MRT4530_17152C.1
atggagccaatagaggaacctagtggtaaattattcccccatttcatgatacccgaggcgacagctgggatcacatcctcctgcatagggcatgaaagtgttcgagtgattgcttgcttgctttgtgatgacggggtgctagaaaagcaggagattgtggcgcaaagcaacttcaacatcctgaggagcttggcgtcaggcgagaatgatgatgacgatgaggaggatgccaccttgttgtccctgctacaccagcagcttgtcatccgagagctcttcctcgacgcgcgtggccttgggcatgttggtatttgttgcaatctgaaataa

SEQ ID NO: 10875 - DNA, 702 bp, Oryza sativa
  Clone ID: PAT_MRT4530_17153C.1
tttgcccggtgacgaagtgggtgaactgtgggtgcgggggcctaatattatgaagggttacttccgccagccggaagcgacccgtgccaccctaactgaagacggctggcttaatactggcgatatcgccaagctcgatcacgatgatcagctttatatcgtcggacgcagcaaagagctaattatccgctcaggattcaatatctatccgcctgatgtggaagcggtgattaatgaacatcctgccgtcacgctaaccgccgttgtgggtcgtcaaatcgctgggaatgaagaagtagtggcgtttgtgcagtgcgagcctggcgttgaggttgatatggcggagctcaaagcgtttatcgctgagcggcttgcgccctacaaacggcccacccaaatcgtattaatggacacattaccatccaccgccagcggcaaaatactaaaagggcggctgcgggatttggcgcagcaggagagcgcttcatgagccaatcggagtcgcctcaacaagcgcttatgggctatcacgagctgctgggtatgcacgtggttgagtggcagcaagaccgtgccgtggttgaactcaccattgagtcaaaacaccttaaccgcagcggcaatgttcacggcggcgtattggcgtcgatgttggatagtgccttgagcttggcaggcctgcactgtgatgtaccgggcaaa

SEQ ID NO: 10876 - DNA, 636 bp, Oryza sativa
  Clone ID: PAT_MRT4530_17154C.1
agctccaattgcaatgactagggtactagatatatgggcaagatgtgtgcatagcaaaaggtatgcgggtgagaaatggtcaccctgaaaaactgggcagaattgcgtctaaagaaatggttatccctaaaaaatctaccaaaatgtacctaaaaatgaaggggaaaacagcatcggcattacaccagcctaacaggtctaaagctgtcagtcgtcactcactcatggaggagtgcacggtttagctacccctacttgtgaacaccatcacctgaaacgtgcatgacaacaggttgctgcctcatccgcgacaacagggcagagacctcccgcgtcgcgatatccatccgctcggtagatttggaagcttcgctcaccagagctgacaccatggactgcaatgccttcactctcccaatctcaggcgactcgtggaaataagcaccattcaaggccttggaaggtgatggccaggttctacgccatcgaggagggagataatggtccgggatctgaaagtagttgagggtcgagagcacacggaggccatgccggcagaggatccctgcagactcaaacatattgcagctgcaagaaattagctcctctctttggctccatgttacattgcaccca

SEQ ID NO: 10877 - DNA, 1578 bp, Oryza sativa
  Clone ID: PAT_MRT4530_17155C.1
ttaaaaatggtaggacccacgtgggccccacatgtcattctcaccctcctctcttcccaactcccctgtgataatgaagttgtcgcagacccccggctcggtgaggtcgttgttgtcgacctcgatgtctctcagaaatggtgagtgcttgccgagctccgccggaagctggccggagagattgttctcgaacagcttcattatcaccagcgatggaagctgagcaaggcttgctcgtatctcgccggagaagttgttcgccatcaggactaagttagttaggttcatcaaacttccaaagctctctgggatcgttccagtaagctggttctcagatatgtccagataaattaagcttgctgctccaatcttgccattgacgacgacgtcgccggtgagctggttggtgtacaagaacaagtactgcagttttggaaggttccagatcccaggaggtatgcctgacgtctgacgagcactaaaacctttgaagtctaaaatgttgtgtagtttcttgttggtgcacaattgtatgtgctcttgtttgcactctcttcttctccaacgcccattaggtaatgactcagagaacattggaacatatggtagatatgactggcaggactcatgtccgagtttgcgtatgacacggacttccttgcgatccatttcatatgccatcaaagtattgtgccatccataaacaaagaagatcaaattgcattctggatgaactgcaattacttggtagtcataatctaattggtatttctttcctccaaacagcttcattgagccaacggtatgctttaagatccaattatctgtatcatagtcttgaagaaaccaaattgacagtttgaagatatcatttggatcaacattaaaagcacacaggcgaccctgagtttgatgaattatcccaatatcaccatcaggatccggcataggaatcttcctccatttcttcccctctatgtcaaccgccacaatctcatcagcaggcgtgacagagtgcagaaaaccattgagcaaaacacttcttcgattgaccgaaaggctaatcacaacttcatcattccatccattttcatggagagtccataacccagtttcagacgaatagatctccacccctgtgaccagtgtgacgtatgaatcctcatcctcttccacatactcaagcacatggaaatgcgacgagatggctggatcgaaacacaagcaggcggtgtggttctcttcgatagcccagttggcgtccggcaacatcacccattccttggtggcaggattgcacacggcatagtggaactgaaaagtgccacgagacacgtagcagcggcagaggaggaggccattgcagcaatccaagaggtcgacgtcgtggcactggggcaggaaggagaaggtcgggctgacgagaggcatgcctttcccggtgacgttggtgaaatggcgcgccgtgtacgggcagcgctcgtggttcatgctctcgtagaagaagcccgacagcgtctgcggcagcttctttcggtgctcgttgtcggcgatgagtctgcgccagtgtgaaaccat

SEQ ID NO: 10878 - DNA, 406 bp, Oryza sativa
  Clone ID: PAT_MRT4530_17156C.1
ttttgttttttcggcaataacacggccctattatcattacgccatcacccatgtgataggcctgtgaaagtctaccaagaaacggtagaacacaactgctatccacccgccgcccaagcacggttgcaaggggcctatggtagtgcgaggtgacaccgccatcctccatcgatgttattacctattcacacctggatcctgatatacgaggtcggaaacagtaaacaccactgtgtggtcgaaaggaggttgctcgaataaagaatactagaatactatggctaggtagcacctgacatctggcgtgcttgctccccaaccaagcggctcatcaaccccgaggggaaaccatgcatccaaaacctgacggcatggtgctcagctcctagcttgcacgaggttacca

SEQ ID NO: 10879 - DNA, 345 bp, Oryza sativa
  Clone ID: PAT_MRT4530_17157C.1
atggtgctcggcacgtcgcgcggcgggttcgacctcaccaggatcgtggacgccatcgagtggcacaggttcaaccaagtgtatgacgtcggcgcggacaacatcatgcgcggtgcggtgacgatccaccatgaggtccagcagcagcggcttgccgtggtggtggcggggatccccaagacggaggccatcactgtctggcacgtggaggccgagagcgcggcaaacggcgtcggcctcattaagctcatgggctggagcgccagccacattgcgctccacaccatgctcatcagccgtcgactgttgcctcatcccggtggaggacttaacaagcttccttaa

SEQ ID NO: 10880 - DNA, 1551 bp, Oryza sativa
  Clone ID: PAT_MRT4530_17158C.1
atggccgccgccgccgcggcgacgtggcgcctctggaggccctactcctccgctctcctctctcgccgggtgaacccgaggttcctccgtactacgccgtgcgtctcctaccccggcggcgccgcggcttctgcggcgccaccctcgcctccgcttgccaccacctgctccgacgattggggcggcgggatgaggtgggagtccgcgcggaagaagagggtcgtgctccgcgtaggctacgtcggcacggagtaccgaggtcttcagaagcagcgggagctcagcgcggactcgacaattgagtcagtcttggaaacagccatcttcaaggctgggggcattcttgagagtaattatgggaagctgcaaaaagttggctgggaaaggagtagtagaactgataaaggggtacattcactggccacaatgatctctctgaaaatggaaatccctgatcgagcatgggagaatgatcctgatggcattgctctttcaaacttcattaactcaaatttgccagacaatgttagagttttcagtgttttgcctgctcaaaggagtttcgatgtgaggagggaatgcttgtatcgggaatacttgtatcttcttcctgctgaaataattggaattaaaggtggttgtagctctgaagaagtaatggaacacctgtcagaattcaatagcattctgaaaggttttgagggaaaccatccatttcataattacactgctcgtgccaagtataggaaagttctagcaggaaggcatcgtaaggtaaaaggggcaagctcagctgtaaattccatgcccactgaaatgagtttggaccaaagctcctctgatgacggaactacttcagaccatgatgaagaagacttgaactcttcgtcgataattggttctagtgtaccagaagacagttataaggataatcccgaattttctgagaagcaggttcagattcgagctaggtggcttcatgagcctgatgaaaatgatcgactgaatgcttcacatttcagagatatcctcacattctcctgtggagagctccagatttcatcaggaattcaatttgtggaattgactatatcaggagtatctttcatgctgcatcagatccggaagatggttggtacttcggtggcggttaagcgtggattactacccaaagatattatagcactgtctcttgcaaagttttctcgcattgtgttaccaattgccccttctgaagttttggtgcttagagataacagtttctgcctgaggaacaagcaagggactatagttcgccctgggatccaatcaatgaatgaatctgaagaagtcaagaagggggtaatggaattctacagggcagctcttgttccagagctagcaaacttcctggatgcatccatgcctccatggaaagaatgggtggagaacttggaccgattcacgagcataccagatccacagctggaggaagttaggagcgcttatagggtgtggaaagcggactacgaccgagtaaaaatggccagaaagagtgccagcagcgactaa

SEQ ID NO: 10881 - DNA, 291 bp, Oryza sativa
  Clone ID: PAT_MRT4530_17159C.1
atggtgctcggcacgtcgcgcggcgggttcgacctcaccaggatcgtggacgccatcgagtggcacaggttcaaccaagtgtatgacgtcggcgcggacaacatcatgcgcgcggtgaaggtgacgcaggaggccatcactgtctggcacgtggaggccgagagcgcggcaaacggcgtcggcctcattaagctcatgggctggagcgccagccacattgcgctccacaccatgctcatcagccgtcgactgttgcctcatcccggtggaggacttaacaagcttccttaa

SEQ ID NO: 10882 - DNA, 1541 bp, Oryza sativa
  Clone ID: PAT_MRT4530_1715C.1
atggatgcggggggagtggagctctctggcgtgatgcatcggtgtagggtgtgcgggaaggggttctcgtgcggccgctcgctcggtggccacatgcggtcgcatatctcgtttggggaggcggcggcggagctcggcgccaatggcggcgtggttgggtacgggctgagggagaatcccaagaagacgaggcggctgtctgagtttgatggtgatggtgatggtgaggaggtggaggtggaggagggtggcgatggcggcgagctcagggcgtgccgggagtgcggcaagctgttctcgtcgtggcgctcgctgttcgggcacatgcggcgccatgcatccggcggcggagggaggaatcacgacgacgacgacgatgacgacgtggatgtggaggatgagttcggcggcggggaggaggaggagattgtggcgccggcgccggcggcggtgactgtgatcgcggcgccgccgaggcggaggcggcggtcgatgcgcgtggcggcgcccgcgcccgcgcccgcgccgccgcggccggtgctgctgggcgggttcgagaaggaacaggaggacgtcgcgctcggcctcctgatgctctcgcgcgacaccggcgtgtggcgctcgccggtcgcgcgcgcggatagatcatatctagcgtggacgatggcgaggcatcggtggtatgtgcaggcggtggcgctgctggtggtgctgaaggcggcggcagggtctgcggcgccgccgacgacgacgaggagcaggagcagcagcacggtggtggccgggatggtgttctgcgaccagtgcaaggacggcgccagaggcctcttcgactacccgctctacggtgcgcgggtggcgatcgagtgcggcggaggggagagcccggtgacggtgcgggagtgcaacaccaactggttcgggggattctccgtccgcatggagggcacgcccgagatgaaccgctacccctcccaagaaacggctacggctacggctacaactccgacgaggattcagctctgctccagtacggcggcgacgtcgcgaagagcaggaagcgaagggctagctaccactctcccaattccatctcctcgaagaagaagcagcagccgcgcgcggcggcgccggcgaagcggacacggtacgagtgcccggggtgcggcaaggtgttcgcctcctaccaggcgcttggcggccaccgcgcgagccacaagcggatcaacactagctgcagcgcccccaaggtctcccccgccaccgccgcggcggcggcgcccgcgccggagccgagctcggagacgtacgcctcgctgagcaccctctccccctcggcgtcgccgggctcggcggccgccggcattggcgaccgcaaggccaacaacaagtcgtcagcggaggaggagaagttcggcggcgcgtgctcctccgacgagctctacgccgagctggagctggagcagcgctcgccggcggcggccgcggggtttcttgatctcaacttcccgccggcctcatcggaggttggcgtgaactga

SEQ ID NO: 10883 - DNA, 399 bp, Oryza sativa
  Clone ID: PAT_MRT4530_17160C.1
atgaggcaacagtcgacggctgatgagcatggtgtggagcgcaatgtggctggcgctccagcccatgagcttaatgaggccgacgccgtttgccgcgctctcggcctccacgtgccagacagtgatggcctcctgcgtcaccttcaccgctgtgtggaacccgaacaaccggttgataacgccaacgtgttttccaccgtcttggggatccccgccaccaccacggcaagccgctgctgctggacctcatggtggatcgtcaccgcaccgcgcatgatgttgtccgcgccgacgtcatacacttggttgaacctgtgccactcgatggcgtccacgatcctggtgaggtcgaacccgccgcgcgacgtgccgagcaccatcccgcaggccttgttctag

SEQ ID NO: 10884 - DNA, 262 bp, Oryza sativa
  Clone ID: PAT_MRT4530_17161C.1
gattaaattcatttgggtttttggttataaaaggaatatataatataacaaagaaaaatatagaaaatacgaacgcgcggggagacccgggaagacccgggcggcacccgcaggagtaccaaatctacctatagtggagcccggagaaccctaggaaataacggagaaaagtgtgaactgtgtgaaaacttaatcctttcacaattccacaaaacatacgcaaaacaggcacaacaggagaagcctggggagcctaatgagt

SEQ ID NO: 10885 - DNA, 139 bp, Oryza sativa
  Clone ID: PAT_MRT4530_17162C.1
atgggtagaagagacgattggcgggaggcggcggtgaagtcagatggattagatgaaggcgaaacagagaactcgtgcctttgggctatatatggcccgacaggccacagcctagggccttcttcttggttcttgcacg

SEQ ID NO: 10886 - DNA, 493 bp, Oryza sativa
  Clone ID: PAT_MRT4530_17163C.1
acaaggcgtactcccggagagatttattaaagacggtggtcgaccgataaatgatagaacccacactgtgcacggactcctgcgaaagatgcaccaatatactgcttcacaccaggtggttatgccacctacaaaattgaacatacccaacatggcgtctggcatgactccataagaatcgtactcaagcctgcatatgggacactgaacgtgacaggaagatacggatgctactataatatggaatagtggttccaatcataaaaataccattacagttgaattcaacctgcgaggaagatacatacttaaaatttgttcctcatatgtgcatcatcagcgggggacagactatgtgaatattgtccgatggatattggctggcttacataaggcaagcggcgtcatgaggcacgatttgaattggggtttttatcatttcaattcagtggactccatatagtagcgaacatggctgcagctgcattcaaga

SEQ ID NO: 10887 - DNA, 304 bp, Oryza sativa
  Clone ID: PAT_MRT4530_17164C.1
gtatatgcattatatattgtctccatatatcaattgctatcttacattgcaataaccaaagttacggatcgcatcaatcaccatatttagcactgacaaaacaaagctaaaaataatttagttttacataatcaatcagtcctgacatttgggttaactaaaaaaactattgatacaacacctaacaggcccgtaggatggtagttaatatgtaaacctccacaattgcagcttgagaccgatcttggcaatgaatacgcgtagaccgattggagctcggtcttcagggagtttcaacaccctt

SEQ ID NO: 10888 - DNA, 418 bp, Oryza sativa
  Clone ID: PAT_MRT4530_17165C.1
gtctcgcatacccggttcaagcatccgatctgcgaatctcacgttcatcacaaacgtacacacaaaccatccacaaccgtcaaaatgggtaaggaggagaagactcaccttaacgtcgtcgtcatcggccacgtcgactctggcaagtcgaccactaccggtcacttgatctaccagtgcggtggtatcgacaagcgaaccatcgagaagttcgagaaggaagccgccgagctcggtaagggttccttcaagtacgcctgggttcttgacaagctcaaagccgagcgtgagcgtggtatcaccattgatatcgccctctggaagttcgagactcctcgctactatgtcaccgtcattggcgctcccggtcaccgtgatttcatcaagaacatgatcactggtacttcccaggccgatt

SEQ ID NO: 10889 - DNA, 890 bp, Oryza sativa
  Clone ID: PAT_MRT4530_17166C.1
tcaactttgggcagaattcttcttctctctcgcgcggcccaagtcggcccatagcaagcgcgcgtgccgtgcacgcgcacgccgccgccaacgccttccgtcgccgctaaggaaccggccgccgccatttggtgcgccgtcgccgttgtcctgccttcgccgccaagttgcgccgccaccatcgccgtgccgtgccctccttctccgccgtccaactctgccacggccgccacgtacgcgcgccgcaaatgtcgaccaatcggaagacaaagccggcaccgtcatcctcctctccacgccactgccgccgtgctccccttctccttttcctccgaaaccgtcattagccaccgcctttagtcgtctataaatagacggcaagactcgccattcctcttcagaactcaagctctgagatctttttctctctctcctcccatggccgatcgtcgacatcgtcggtcgatctccccatccgtagctcctcctttcctctcctcgcaccaccggcttcgcctccatctggcgagtccgttttttccctttcccctcttccctacccacttcatcaagccaccacagccacttctcttgccgccggagataagctcttctactcgctgttccggccatctccctcgctccctctgcttgccaccgacctccccggatgcgcagtgagcgggaacatgcgtggccgatgacgtcgccgccctccagccaccggagcgccgccgccccgctcgccttctcctctctcttctctcggctctctctggaaccgagaaaaggaagacgagaagaaggaagaagaaggagaaaagaaaaagaaaaagagaaagaaaggctgacagagtctattttattctggatggcaacctgtggtattt

SEQ ID NO: 10890 - DNA, 467 bp, Oryza sativa
  Clone ID: PAT_MRT4530_17167C.1
tttggaagcagcaagttgtggattgttgacagtaagtactagagtcggtggtgttccagaggttttaccagatgatatggtagtacttgcagaaccagctcctgaagatatggtacgagctgtcaggaaggctatcgatatgcttcctggcatagatccccaagttatgcatcttcgaatgaaaaagctttatagttgggacgatgtggcgaaaagaacagagattgtgtatgatcgtgcaatgcagtcaccacaaacagatttgctagaacgcctatccacgatacctcagatgtggagcttgggcaggcaaactgtatagtcttgttatgatcatcaactaactactatggtgcctcctagaatatctgcagcccactgaaggtattgaagaggtcccagatatcaggccagtacatgctcgtttagaatcagtagatgatacatgtgaaactcaaggaaaagga

SEQ ID NO: 10891 - DNA, 587 bp, Oryza sativa
  Clone ID: PAT_MRT4530_17168C.1
ccacgcgtccgcacacacgccggactctacccttatctgtggctcgctcctttgttcgatctctttatacctcccgaatgatggcgccaatctgcagcgggggcccatgaatagggcaacattgaaatggcggcggagacgttcctgttccctgcgaggccgagaacgagggttagcccggacaagctgtgccaccagtggaaggacgcggtgctggacgcgtgccttgcccaggaccccgacagcaaggcggggtgcgagacgcgcaccaaaaccaacatggcgatggtggtcgaagagatcaccagcagaggcaccggacactacaataagattgtacgggacacctgccgtcggatcgtatacgtgtgcgaccacgtccgtcttgactgccagaccgttgcaaggcgctcgtcaacatttaacagtggtgcggccgacatagaacatgggggtgcacggccgactttaccaatcgccgcgaggagatcggcgcccgcgacctgggtcacatgtgcggatactgcaccgacgagacccccgagctgatgcccctcagacacgtactctccactgaactaggtgcc

SEQ ID NO: 10892 - DNA, 468 bp, Oryza sativa
  Clone ID: PAT_MRT4530_17169C.1
tttttctattgcacctcctgtgattactcatgactctggaacacctaagaatatatgaaccttaagacattctgtgtcgtctgacaaagataatgtaccttcggtattgactgcatcttctgaagaacagaatctccgtggatgcttcaatttagcagccattgtctcggttgtgagtcactttaggattgtaatagaacatttgaccaagtatggaattctctttaactgggcgacatttcaaacctacgttacgacgaaatatataattcattggaacagttttactctatatacaccctctaattgcctagacttagcaaaaattgtttattattagaggactggatttcgcagagaatttatattatactgatctattaaatataatacgatctctacttctgccttctatattcgtgtactttgcacaagcaggctttatgacgggtactgtcattcttttac

SEQ ID NO: 10893 - DNA, 4881 bp, Oryza sativa
  Clone ID: PAT_MRT4530_1716C.1
atgtcgtactacgtagatccttgtaccagcgtaccccaataccctctatatccggtctacgggtatcacccgtcgatagtggcgcgccaggtagggggacttggtactcaaggttctactactatgccatcaagcttcgtcgacaacaacgccaacaccagcttcagccaagttcttcctacttcaacaatgctggtatggactcaagtcggcgaaatcgtctacccggtttacaccacgatgccgatctcaaccggtcctccaatgactggaaacgagaatgcagtggctacgaaccaagacgtctccatgtcgaaaaatccacccgttgaaacggagaacggattatcgactacatccaaactcgtgaaggattctgatgcggccaagccttgtccttccaacataaatcgcaggccgacaaagatgacttccgaagctactaggtcttggtgtcctatccacaaaaccaagaaacatacccttcaagattgctgggtattcatcaacgtccgtgctgaaattcgcgcctgcaaagaacatggaattcagcgtacttctccaactcgggacgtctattgtcctatccataagacaaagaatcacgacctcttgagctgcaaagttctcctcggcgtcatgaaaactccgtctcctaagtcatacgtccccgtcagggataacgacaaggaacaaggagcgactccggcctcagatcgattcgttggggtaatcgatctcgatccccacgaaccatctgttttacatctcctcgaagactatgggtcatcgacatcagcaatgcgttcgaagaagccgccaccacagcacaccaaaatcgatcgccagtcggcgacgccaatggtgaaagtccggaacggagggaatcacctcgacaagctacccctccacctcgtggcactggcgatcttcgagatcaaatcaatggtcgccgagaagcacgacgcacacgagatgacgcaaaccgttcccggcgtcatgtctcctcacgacgccatgatcgaggaaatcgtccaaacgaggaccgagactacgacgatcgcgaccggcgggggccagacaacactgatcatggccgtcgccgcaacgatgacgatgaaggagatcggcgtcgagacaacagcgagagacgacgacaggattctcgagatccaggtcgtcatcctcgtaatcacagacatccacgaaggtcacgcgaccaccgacaacccaccgctcccagtgctgggtgtagggctttcggtcgttccctatatgatgtccgatggcctgagagattccgacccggagctattgaaaaacctgtggcaacagttcgtcgccaatttccaagggacatacaagcgccacgcgatcgaaaacgacttacacgcgttaacacagaactcgggggaatcattgagggaatacgttcggtgcttcaacgagtgcagaaacacaattcccgagattaccgatgcttctgtaattcacgccttcaagtccggtgtcagagatcgctacactacccaggagttggcaacaagacgcatcacaactactcgaagattattcgagatcgttgagcggtacgcccacgtggatgacgcgctaagacgcaagaacgacaagccgaagaccgggggagagaagaaaccagccgcagacgcatctgagtcaagcaagaagaaaaatcgcaaaaacaggaaaaggaaagctcaagcggaagtcctcgcagcagagtacgcgaaccctcccaagcgcccagacccacaaggcagcgatacaaagaaatcatggtgccccatacacaaaacggacagacattctctagaggattgccttgttttcaaaaagtcgctcgagaagcacatggcgtttgaaaaaggcaagcgagtacgcgttgtcgagaagaacgaggagtcacctcctcacgaatcagattctgcgtacccagactccgacctccacgtctcacacatcttcggtggctccacaacgtactcctccaagcgagaatacaagaaagtggaacgtgaagtctgttcgacgtgcttacaacgccatcatcgggagaactgcacttgcgaagttcatggccgcatcccactacgcatatcaagtgctcaagatgccgggaccgaagggaacaatcaagggaacttaaaactagcagtgcagtgcgacaagcggagcctcgacatggtcgagcaaatgcccaccccacccgccatgtctgagccaccaaagaaaccgtccgacatgccgggggtccccagggaggtgattaagcacaaactaatggtgcgacccgatgccaagccagtaaagcaaagactgcggagatttgcaccagatcgaaaacaagccatacgagaagagctcgacaaacttctcaaagccggcttcatcagagaagtacttcatccagagtggctagccaacccagtcatggtgcggaaggccaacgaaaaatggagaataccagttggtggattcaacaggcttttaagcttcctcgacgcttactccggttaccaccaaatcagtatggcgaaagaggacgaggagaaaacagcgttcatcacgccgttcggggtattttgctacgttaagatgcctttcggactgataaccgccgggaataccttccagcgcacggtccagggcgcacttagcaaccagcttggcaacaatgtcgaggcttacgtcgacgacatcgttgtcaaaaccaagacaagcaactcattgatcaatgacctgcgggaaacgttcgacaacctccgacgatatcgcctcatgctcaacccagagaagtgcacgttcagagtaccgtcgggcaagctactcggattcctcgtttctggtagaggaatagaggcaaatcctgagaagatcaaagcaatcgagaacatgaagtcgcccacaagacttaaggaggtgcagaagctaaccggatgcatggcagcattaagcagattcgtcgccaggatgggagaacgaggacagcctttcttcgccttgctgaagaaacaagacaaattcgtatggacacaggaagccgaagaggcatttattgcactcaagcgctacctatcaaacccccctgtactcgttgctccccaacctaatgaagaattattcctttatattgccgctacgccatattccgttagcaccgtcattgtcgtcgagagagagaaagtgcagcgaccattttattacgtcagcgaagctctccatgacgcaaagacaagatatccacagattcaaaaactgctctacgcagtaatcatgacatcaaggaagctacgccactactttcaagtccacagagtcacagttgtctcctccttccccgattggaccatgccagataataagtcagacaatcaaggcgaaaatgagacatggacaatggcattcgatggcgcactcaacagccaaggagcaggggcaggatttatcttaacatctccttccgaagatcaattcaagcatgcgatccacctcaacttcagggcaaccaataacaccgcagaatacgaaggactactcaccgggaaacgagctgcagccgcacttggggccaagcgactaatcgtcaaaggggactctgagctagtcgcgaaccaggtgcacaaagactacaaatgctccaaccccgagatatccaagtatctctcagaagtcagaaagctagagaggaggttcgatgggatcgaggtccggcacgtctatcgcaaggacaacgtcgagccagacgacctagcacgacgcgcatctagacgagagccgctcgagcccggcacttttctcgacgttctgacaaagccatcgttgaaagaagttagcggcgaagttggcccgagcacccccgacatcaactcggaggtcaccgaggcagaacgcgccgttgctgacatcgaaactacatacgactggcgcagcccattaatcaaattcatcagcagcgaggagttgcccgaagacgatacagaggctgagaaaataacccgcaaagcaaagatttactcccttaaagatgcatgcgacatggtccagcgatgtgaagcctgtcaattccatagcaagcacacaaagctgcctgcacaagcgctccagacaatccctctgacttggccgttctcatgctgggggctagacatactttggccattcccacgaggacagggcggctacagattcctatttgtggcgatcgacaagttcaccaagtggatcgaagcagtacccactggggaaatcaaggccgataacgccatcaagttcatcagagggatattttgcagatacggactaccgcactgcatcataaccgacaacggctctcaattcatcagcgccgatttccaggattactgcatcagcttgggagtcaaaatatgtttcgcctcggtctctcaccctcaaagcaatggacaagtcgaaagggcaaacggcatagtactacaagggataaaaacccgcgtctacgacagactcatgtcacacgacaaaaaatgggttgaagaactcccatcagtactatgggccgtgcgcactacaccgacaacgtccaataaggaaacacccttcttcctcgtgtacggttctgaagccatgctccctggcgagttacggcatcaaagcacacgagtacagaagcattccgacgagaaccaggagaatcagcgagagatcgatgtaaaccttgtcgaggagcatcgtgagcgagttgccgtccgagcagctagctatcaacaagccctccgccgttatcatgagaagtgcatccaagcacgcatactttcgattggcgactacatcctcagacgagttcaaacccaagtggggcgaaacaaactctcaccaaaatag

SEQ ID NO: 10894 - DNA, 120 bp, Oryza sativa
  Clone ID: PAT_MRT4530_17170C.1
atgggagccgggacgaggcgagaactggtggtgaaggagtgggtcgacaaggtggggagaactgactggcctgaggcaggggatgaccctgataggtgggccctacctattggcggctga

SEQ ID NO: 10895 - DNA, 1827 bp, Oryza sativa
  Clone ID: PAT_MRT4530_17171C.1
atggacgccggcgacacatccgccgccgccgctgtagcccctaccccggcgcggctgcgggaagcgctcgccgccctctccaaggcgttcgagtccggggattgctccgatggatccgccgcggcggccgtctccgacctcctcaacgccgccgccgatgcagctgatgcggaggccgacgccgaagacgaggcggcggccggggtcgtcgaggagatgctccgggaggtgcacgcgttcctctcgtccccgtcctcgaatcagttggccatagatgctctctcactagagctggtaaaacctgtggcgaagctgggggcactgatgaggaattgctgggacattgccaacgctatcattgaattcttcgtgtcaaactgcaacccgagggacatgctctccatcctatgtgaggcagtagatgcaccattggcatcaaatggctcagtgtactttgttcttctattcaaggagctagccaaagtgcttgttttgattcagaggaggcatactgagcaagtaaaagtcacacttcctgctgtccttcgagttatgaatgctgttataccagaatgtgacgaggaacatggaaagatcatcgttgatatgtacaatgcagcacttagaattggcaatgccattcaagaaatgtgcaaaaaaatggtaaaccagacgaatgaagaactctgttctgtacttagtctatactcccttcagaacatagctcttgtatcaagatgcaaacaacagcatattctctctgcttgtggttcagttgttcttcagcattcaaaaattctgacattttgtgggttcacttatttgggtcttttgactgatgaagatgcggatttgctcgagtgcttttcttttgcaatgaatggtgcaaatcttgcagttatctggacctatatggatgatgaaatctcaaaatatgctggcgctgagctggaatcagcgctgaaagatgttaagggcaaccatacgaggatgtggcaagcaattaacattcttagatatgtgttgtcttcaactcattacccatgggtaataaaatcccacagtttggacttactgctgactatagctaatgaaagtcgtattgaggaaatcaatgatcatgtagatgtttcatcttctggtcctcaaatttttgcaacactcaaggttatttcaatggtgccatcctctcagagattcaacatcttacaggctcttataaagaacagcatcttcccttcattgactgcacttctcctagatctggtgaaggattgaagttttcggagagattcgtcgagctgatcaggatattgttgaatcggatcaattacaagatggtggcgaatggccaccaccttggttttctcatgcacttgagttggtggagactgatcttgaagcctccagaaggtggccctccttgtcttcctgatcatggtgaacaggtattatcagctttgaatttgctgcgatttgttctgataatagattcaagaggatcaagatcaagaaaaatgtttggggaagagactatgaggaaggtgtactcagagtggctgatgccattaagaccaattgttgcaggaattcaatcagaaagtgaagaggatggtagcgacgttgcaaatcatatcatgtgctcgttaaatcctgttcaattagtattgtaccgctgcattgagctggcagaggaaaagatgaaaggtttctaacgttttcagttcactggtttttgtacaatatactgctgtctcgaggcaaaacatgaacaagttgtgaatattatcccaatgatttgaagttcaggaaaaaaaaaaaaaaaaa

SEQ ID NO: 10896 - DNA, 597 bp, Oryza sativa
  unsure (1)..(597): unsure at all n locations
  Clone ID: PAT_MRT4530_17172C.1
aacgtggngggcgaccgtttttctcaaaaaaaaaaaaaaaaaaaaaaaaaaaaaaaaaaaaaaaaaaaaaaaaaaaaaaaaaaaaaaaaaaaaaaaaaaaaaaaaaaaaaaaaaataaaaaaaggggcgggccttttttaaaggttcactttttttcttttctctttcttgcctagtttttagttttttttttggggtcgccttaattttttttcattggcccgtctgttttaaaacgttggggcttgggaaaatccttggctttccccactttattcgttttgggcccctttcctttttcgccggttggctttttggctagggggtccgccccgttcgcctttcccatcggttgctcggcctgattggtttttgggcctctcctttttgcggtttttttggtccggcggttgttgttttttcctcttgttttgcccgtttcttttgccttcttcttttttcttgcttttttggtttttttcctttcttttttttcccctttttctgttttttctcttcttttttttttttgttcgttttctttttttttttccttttttttgttttttgggctttttttcccttttttttttgttt

SEQ ID NO: 10897 - DNA, 1116 bp, Oryza sativa
  Clone ID: PAT_MRT4530_17173C.1
aacgatctcagcttctgaaccttttttctttcgtgccctagcattctgcttagccacacacagcctgtcgaccttttcagcattactagtttactaccttttcttatctttcccttggctccggctgtttctaaaaagggatgttgtttgcttcataagtttgagaaagagcacctggctgctacatcctactccaaactgccttcctcagaagtctctcatagttaggaccttcactgctgacaagtgaaatgagtcatgggtgctgaggagagatttgtgaaagcttcgtcccatactgtgcccttgcaaatatatggaggttccaagtgttcatgacctgtaaccgaaggggagggaaaatgcaaggcaagcagctggaacatgagttgcaagctttcagggatggctactgatttatttggccttcatagaatcctctcttcattgttggagatagagggaacaagaaccactagagagataaaaagtaaagattctattcagaaactagccaaagtattgctgaaagctaattggcaaaaggatttacaccacatcttggtagagccaatggagaaatccaaacaagacagcagggaatcagttcggagaacaatcatggagcatgatgaagtcttcagacagcaggtgcatgaactgcatcgactatatcgtgtacaaaaatcattgatggctgaactaggaggtgagaagcacaggtttcaatcaaggacaggagaaactcaagaaatgatgcaagggcccctgtcaaacctcaagaatagcccctctacatcagagacaacccaatctgctcatcttggtagcacacaacactgtgctccagagcaagttcctgagcattcaattcttcaagaatacaaaccagcaacatgcctaaacttcttcactgaagaaacctcaagaacacaagaatttagacgagaaggtggtagatcaactggaggtgaaaattggagtgcttctgacccttccgtagagaatgatcttgacctcaaactaacaattggccccagtttgcatgcaacaaaagcaccacactggctcttctcaggaagcagggaaagaaatccttctggtcagcatcgatga

SEQ ID NO: 10898 - DNA, 3117 bp, Oryza sativa
  Clone ID: PAT_MRT4530_17174C.1
ctagagagctaaatcggcattggcaacattgactgaccggtcggctggcacaacctctatcttgtcacattgccactgaatcaagcactgatgcatagtcgaaggaatacaacaattggcatgaatccaatccctcccgagcaataaactatatgaacccttcccatcaatgacaaaaaacgtggtaggaatagtcttgttgccgactgtcaactccatatttaacgcacctttggtttctgatgggttaccgccaaaatctttgagcaccatattcgtcttgatgagatctacggcattcctacccagcttcctgaacgtagcataaggcatcaaattcaccgctaccccaccatcgaccatcattttagacatcggcttcccattgacgtaaccatttacatacaatggcttgagatgccgattctccgttccctcaggcttctcgaacaccgcctgctccgatgatatgaccaacttagccgattcatcctctacttcatcgacatcggcctggctgattccaaactcggctggcagcgtaaaaaccatattgactggtgctgtaacgacactctttccttttgccaatctctttgcctcatcggctgtagtatcatcggctgcaggaacttgggtcttaacgcgccacacctcctggaaacgctccctactcctcaatctctggaccctccttttctggttcttcgtaaaaataccagaaggacaccattgattcttcctggtcaactcgtcctcttgattacgatcgtgactcattggacccaatctttgatgaacagggagtcttgtctgtctcagccgatcacccctatcatgtggtcggcttaagctcttaatgacgtcgctacatccaggacaattttcgatagatggcaacctcatcccttcattccagcagaatctgaagaattcacaatcccaatgaggatcaaaaccgttgtcattctcctcgtagcatctctcctgctgcttgttatacctcctttgatatttatcaatgattctggccgaatgtacttggaagctcttcaaacgaggtccatcggctgcttgacttgccgtatacaccatattgacaggaaaaggattcccatcgaccttcatcggcttcttggagtcatcaaatttaatctttcccccttcgatggccacctggatttgctgcctgaagaccttacaatcattggtagaatgggatccagaattatgccacttgcaatacctcttcttgcctaattcctcagccgacgggatcgtatgaccggcaggaagctgaatctgcttttctcggattagcaaatcaaagatcttgtcagccttagttatatcaaaatcatatttttgctcctttccagggttttttacccattgacacggtataaccttcttgctcctcacccactcggctgcagcgatctcaggatcatcatcttcatcatctgattcatacatatactggcagacctggttaacctttttagagcttctcctgacgtcagccgacctatgctcatgcaaggttaccttttgtattaaatgcgacaagctatcgaaatcttcggatgaaaatttctccctgatcggagggatcataccctggaaagccaaatcggctaactgggcatcggtcaaacttaagctgaagcacttattcctcatctctctgaacctctgaatatactcatgtacaggctcatcataccgctgcttgatcgctgttaagtcagacagcttcatctcgtgaaccccgctgtagaagtagctatgaaattgtttctctaaatcagcccaactattgactgacccatatggcaaagatgagaaccatgtaaaagctgatccagacaaagacaatcggaacatcctaactctcaaggcgtccacagctgacgcttctccacactgagccagatatcggctgatatgctcgtaggttgatacgccctcttgtcccgaaaacttagagaaatccgggattttaaaccgattaggaagaggaaccctctcaaaccactctagataaggctgccgatacaagcttccggtctctttaggcttgagcccgaattgttccctcattacatcggcaatcacatcggcccacggtcgttgctgagctgatccttgcggttgctgctgcatggattcgaactgaccaaactggggagcgaactgctgctgagccgatcctcctggctgatattgggcttgtatggatgaaggctggtacctatagcttaagttgcccccttggtagtcgtgcagatccggctgaatattgcgtaccaagtgctcagggaccatcggctgcagaacttgttgttgaactggttgtaccatcggctgaactggtggcacaacttgttgctgaaccgactgcactatcggctggactggcggtgcctgctgaatcggctgtacagcttgttgctggatcggttgcaccactggctgaactagcagtgcctgttgtgctggttgcaccacttgttgttgggttgattgtaccgccggttgaattggtggtgcttgctggatcggctgctgttgcaccaaattaacaacgggtggtggcaggaacatagcagcaacctgatcctgagttggctgatttgtaatctgttcggcaggctgtggatactccctcaccagtaatcttggattcatcggctgagccgccacagtagccgatgcagcaggtacagatgttgatgctgacgccgttggttgggctgttggcgcgacagatggagccgcctgcacaactggcgcgtagtcaacccgatcttgaaagttgtggaaagacacttgaagatcttgactgaaatctcctcctggtagttcttggggaatacggcttggagttccatgcacctctggaaggttatcgccttgattccctgcaaaaccaccggtagctcctttggcgctcggctgagccgagccatctggatctcgcttaatttccccatctttagatgaaccggttccagggatgtcggcgactagcttcaacttgtacttctgaacgagtgatcccttgcgggtttgcatgtatgagctcagatactgatcccgtgcttgttgcatcat

SEQ ID NO: 10899 - DNA, 405 bp, Oryza sativa
  Clone ID: PAT_MRT4530_17175C.1
atggcgtcggccaccgcctcccctcgccgccgccgctgcctccttcaccgtaccccgccatcgcctcgcctcctccgtgagcagcgtgagctcatgccaacgcctcgcctcgccgccgccgctacctcctccgctgcgctcactgcctccgccatcgccgaccacccgtccccgcgccgtcctctccgtggaacaaagagtggaacaccgcgtgtctgccccagtcgtcgccacaaactgagcaaccctagaggtggccacgagctcgtggctgatgcggcgacctcccgagcggcggcgacctcccgagagaggtggcggaccaaagtcggctcctcccaccaccttttggagcctcctccacctttcccatctgtgtctcccttcctcatcccctgcccctag

SEQ ID NO: 10900 - DNA, 927 bp, Oryza sativa
  Clone ID: PAT_MRT4530_17176C.1
ttaatctcccccaaattcgcgattctctcatctaatcctcctcctcctcccccgaaatcagcacaccgaggcttcctcgccggcggcgatggcgggggcggcggtggagcaggcgcacgagctctaccggggagggcgacaccgggacgcgctcgagctgtacacggcggcgctggcggcggcgcggggacccgcgcagcgcatcgcgctgcacagcaaccgcgccgcgtgctacctcaagctccacgacttccacaaggctgcagaagagtgcacatctgtccttgagttggatagggagcatgctggagctctcatgttacgtgcacagacacttgtcactctgaaggattaccagtcagctctatttgatgtgaacaggctgattgagataaatccgtcatctgaagtatatcggaaccttcatgcacgactgaagacacagcttgcactagctcccattccagaatctgaagaggaatcgttatatcttgaagaagataagcaagagttgcctccagagagaaatgtaaatatcgagatttgtattaccaagtctgataaacctgcaactgaaatgattctcaaaaagaaacctacaacagaacttattgtcgaaaataaacctgcaactgaactgattcttgaaaagaaacctgcaactgaacttattcttgaaaagaaacatgcaactgaacctccaaaggttgaggtgcctcccagtctgcctcaaaaaccacaagggtgggagaccatcgcaaaaccaaagggacattcaggacttgattactcaaaatgggacaaagttgaagatgactcaagtgaagatgaggatgaagaggaagaagagcttcctcagtataaattcaaagtcagaactgtcggtgtgcggtctgtgaagggtaccgagctcgaattcgccctata

SEQ ID NO: 10901 - DNA, 2640 bp, Oryza sativa
  Clone ID: PAT_MRT4530_17177C.1
gtgcagccgctgccggctgccctcgtcgcctcctcgccggccccggtcgtcgtcgtcgtcatcctctcgtcgttcccggttgtcgtggcgttcgtccgtccgtcaagccattctcgttcgtcgtcctcgttccgtcaagtgccgcagccccgtcatcgtcttcgtcctcgcctccgcgtcgccaagcattgcgccggccgcgtctcgccttcgtccaaggatcgacgccgaagtcgtcccctcgcctttcgtctccgtcattcccggccgtctccgccgcgcccgttcgtcgttgtcgttcccacgcctcgttgcatggtggtaaggatccctctccctcgctgccccgtcctcgtcctttcggtgtcgcccgtgcctgttgtgcggttgtcggccccgagctctggacagagccgagccgcccgtgctgtgccctgtgcagtcgccgcttcctccgttaaatctcgcctccccgttgctcctttttccaatttagttgaggggaaatattcctcttatcctcctctatctttacccccaaaaaatcggagctaatcgttgagtatcttatccaaatcaaactcgttttcgagtttatctccaaaaccgagtttttgatttcccggatcgatttcttgcgggaggagtccgatctcttcaatccaaggctataaataggaccccctagtcctcctctttcgtttgccccctctcccgtggtctcccgtgcctcgtagcgctgccgccacgtgctccaccccgccgtcgtcgccggccgagctccatccgcgtcgcgccgccgcctccgtcgtcgccgccggtcgccgtcaccgccgtaaggtgcgccgaggtgtggagaagcccggcctcctgtcccccttcgtcgccggccaccggagctccaccgccggcgaggtccgagccgccgccgccgttcacctcgtcgccggtcaccgtcggtcgtcgtttggctcgagggtaagtaccggtaataatttgtttagctcctggtttggagttagatctgtacagccgggtatggttgttcagaatggttgggcctgtgcaacatgggtgtgttgtttagtgttgattaaaattttggagctgaagccatcgctagatcgttattccgctgctgttttcttttcttttgtaagtatgtaacgttattattaagatggatttttatattaaattgtcagtttgtgtacctcggctgattcttggacgaggattttatgcacaaattagttcggaaattactagtgaatttccgggcgtgacaagttggtatcagagccatctcgactgtaggataagccaaatagtcaaaccttaaggactaattttccggaaacatgatttgtgaaaatttctcctttcttccttatctagaattcttcacaaatcgttttgtcgttctctcctcttttccctctttcaacttgagtagttgttaaatttgatggagaaactcgaagacgtcgatgttgtcaacttctgcaagtcaagtggatcgaggaataagaagatgatagttgaatcaaagtgttcagctgtcaagatagagtgaagtttggaacctagcttagaacctatgccgccaaagtgtctttgaagaatagttagtagggttgaacgtttgttgtttgctttgtgtgtaggtatggttgcattcccatcattggagtagttcatcaaaggaacaacaatgtcaatcctccgccgccgcagaacaagttagctgattttcttcgtgtgaggccgcctaccttctctatcactaccaacccagtggaagcaggtgattggctgcacgctgttgagaagaagttggaattgctccagtgcacggatcaggagaaagttgttttcgcttcacatcagttgcaaggacctgcatcagaatggtgggatcatttccggatgaacagagcagaaggacaaccaatcacttgggcggagttcactgaggcattcaagaagacacacatacctgcaggtgttgttgctttgaagaagcgtgagttccgggcacttaagcaaaaggatcgtaccgtgacggaatatcttcatgagttcaatcgtctagctcgctatgctccagaagatgtgcgtactgacgaggaaaggcaagagaagttcttggaaggcttaaaggatgaggtgtcagttatgttgatctctcatgactatgaggattttcaggggttggttgacaaagcaattcgactggaagacaagaagaacaggatggacaatcgtaagagaggaaggattgttttccaggagacacagggtagtagccagaggcagcgtatcaagcccaatgaagtaaacatcgagcaagctaatcagccggtgctagttcagcaggatcagtctcaggagaataacagtaatggaagggggcagcaggtatgtttcaactgttacaagccaggccactttgcaagagagtgtccgaagtcaaagcatcagcagccgcagggtcagatcaacaacattgtcgtcacaggagccaatgcgtcatcttccagctctggacagagccgagccgcccgtgctgtgccctgtgcagccgccgctttctccgtaaatctcgcctccccgttgctcctttttcatttagttgag

SEQ ID NO: 10902 - DNA, 417 bp, Oryza sativa
  Clone ID: PAT_MRT4530_17178C.1
atgatacattccaagaggcttgctcagctggcgaggaggctgcagagggtcaagacgacggccgccagggaagacgacgcctgctgcacgacttctccggttgcagacaagggccgttgcaccatgtacacggcagacgggaggcggttcaaggtgccattgccgtacctcggaacaacggtcttcggcgagctcctgaggatgtcacaagaggaattcgggttcgccggtgatgggaggatcacactgccctgtgatgcggccgtgatggagtatgtcatgtgcttgctgaggagaaatgcatcggaggatgttgagagggcgttcctgagctctgtagtgatgtcttgccaagattcaagctgtggagtgccacctgtggccttgcaccaacaattttcagtttgtagctcctga

SEQ ID NO: 10903 - DNA, 1198 bp, Oryza sativa
  Clone ID: PAT_MRT4530_17179C.1
tcatgatgacctcatcaatggccggaccaagatggcgacctcgccggagattggatggtcggctgcgactttggaggacatgaacacgtagaggacgacgagacgaacccaacggtactcaccctcgaaccaaacgacgaacgacgacggccggcgacgaggtctagcggcggcacggcttcggtcgacggcggcgacggggctccggtgaccggcgacagcggggagagagcggccgggcttctccacacctcggcgcaccttacggcggtgacggcgaccggcggcgacgacggaggcgacggcacgacgcggatggagctcggccggcgacgacggcggggtggagcacgtggcggcggcgccgatgctcccttccattactgttatcttcttgagactgatcctgctgaaatgacactgattgagtagcttgctcatcattgccttcattgcttgcattagtctctgagttaatctcaccactgatgcccaactgttgtgactgtcgattgtccatcctgttcttcttgtcttccagtcgaattgctttatcaaccaactcctgaaaatcctcatagtcatgagagatcaacataactgacagctcatcctttaagccttccaaaaacttctcctgcctttcctcgtcagtacgcacatcttctggagcatagcgagctagacgattgaactcatgaagatattccgtcactgtacgatccttttgcttaagtgcccggaactcacgcttcttcaaagaaacaactcctgtaggtatgtgcgtcttcttgaatgcttcagtgaactccgcccaagtgattggttgtccttctgctctgttcatccggaaatgatcccaccattctgaagcacgtccttgcaactgatgtgaagcgaaaacaactttctcctgatccgtacactggagcagttccaacttcttctcaacagcgtgcagccaatcacctgcttccactgggttggtagtgctagaaaaagtaggtggcttcacacgaagaaaatcagctaacttgttctgcggcggcggaggattgacattgttgttcccttgctggttctgcatttgttgcactaacatgttgatcaattgggtctgttgagccagcacttgagcaagggttgggttctcttcattgttattgtttccacttccactagtgcgagtgttcaccat

SEQ ID NO: 10904 - DNA, 1352 bp, Oryza sativa
  Clone ID: PAT_MRT4530_1717C.1
cactccgttctatcgttttaaccccatcccgagcctccccgtggtccctagccctctccccgccgccctcctctctctcccacgccgccggccgcctccagccgcctgtgccgcctcgaccgtgcaccggccggtcgcgccgtcgcctcctccagcgtcgccgccacctcctccaccccggcctgccctccgtttcgcacggtgaccgccggaggcgcgttcccgccatcgcccttctctttcctccgcgccggccgcctccagccgcctctccctcctcgccggagcgccgtccggccgcgccgtcttctccctcggcctcgcagccacctcctctccctcggtcagccctccgtttcgcgggaaagcaccggagacgcgtcctcgccggcaaaacagtggcgttgccgccactgttccacctccggccgccactgtcgcgtttcccgtgcgccggccgacgtcgccaccacctccctcggctccgcgacgccgccctcatccccggctgctcctctgtttcgccggaacaccgtcgcccgtgctggcctctccatcctcatcgtcgccgacgtcccttcggccgcccgttcatcctcgccggctcgtcgtctcgcggcgccgcctccgtcatcgtcatcgctgcggcgtgttccacgccatcctcgcattcgtgcagccgctgccggctgccctcgtcgcctcctcgccggccccggtcgtcgtcgtcgtcgtcctctcgtcattcctggtcgtcgtggcgttcgtccctccgtcgagccgttctcatccgtcgtccgcatcagtcaagcaagccgcggcagccccgtcctcgtcttcgtcctcagctccgcgtcgtcaagccttgtgccagccgcgtctcgccttcgtccaaggatcgccgccgaagtcgttccctcgcggttcgcctccgtcgtccccgagctgtctccgccgcgcccgttcgtcgttgtcgtccccacgcctcgtcgcgtggtggtaaggatccctctccctcgctgccccgtcctcgtcctttcggtgtcgcccgtgctcgttgtgcggttgtcggccccggtacccgtgtaccggtgtcggtagtcgttcacgcgtgcgggtggtgaccgtgtagtgtccgcgttagtgtgcccgctcggtagccgcgtggtttccacgtgtgcaggccgtgtggtgtctagtggagtccgtttgtcggccactcgcctcggttgacacacggggtccacttccatcgacccgtggaccgtctctgtgtacccggttttcgtcgtcccggaggttcccgaagcgtggttcgtggtcgtcgccgaaggttcggaaggccgttccct

SEQ ID NO: 10905 - DNA, 1185 bp, Oryza sativa
  Clone ID: PAT_MRT4530_17180C.1
ctactgctgctttgaaactggtggctgagctgtatcccttgagaacgcaactcttgaagacgcaactggcactgcattggctcctgtgacgacaatgttgttgacctgaccttgcggctgctgatgctttgacttcggacactctcttgcaaagtgacctggcttgtaacagttgaaacatacctgctgctcccttccactactgttattctcttgagactgatcctgctgaactggcaccggttgattagcttgctcgatgtttacttcattgctttcattagtctctgattcgatctcaccaccgatgttcaactgttgcgactgtccttgaccagcggaaaaagattcaccaatttggagtggctcgatacgctgtctctggcgactaccttgtgcctcctggaaaacagtcattttccttttacggttatccatcctgttcttcttgtcttccagtcgaattgctttgtcaaccaactcctgaaaatcctcatagtcatgagagatcaacataactgacagctcatcctttaagccttccaagaacttctcctgcctttcctcgtcagtacgcacatcttctggagcatagcgagctagacgattgaactcatgaagatattccgtcacggtacgatccttttgcttaagtgcccggaactcacgcttcttcaaagcaacaacacctgcaggtatatgtgtcttcttgaatgcttcagtgaactccgcccaagtgattggttgtccttctgctctgttcatccggaaatgatcccaccattccgaagcagatccttgcaactgatgtgaagcgaaaacaactttctcctgatccgtgcactggagcaattccaacttcttctcaacagcgtgcaaccaatcacctgcttccactgggttggtagtgctagagaaggtaggtggcttcacacgaagaaaatcaactaacttgttctggggcggcggaggattgacattgttgttcccttgctggttctgcatttgttgcactaacaggttgatcaattgggtctgttgagccagcacttgagcaaaggttgggttctcttcattgttattgtttccacttccactggcgcgagtgttcaccatcttaaccaggttaccactgatctggtgtgtgtagttcattatattgttcaagttgattaagcaagcaac

SEQ ID NO: 10906 - DNA, 1702 bp, Oryza sativa
  Clone ID: PAT_MRT4530_17181C.1
ctaatcacgaaaaacattgctcaacccgcccataaccgcgggcacggctattcgaatagttttactctggccagaggtgtaccacattcctggatcataatcacccccctcaaaaaccagaggcatggactccccagcgactcccgtgggcttatctccgccacttctcagtctggtgctcggctcacgggagagggcgacgatgacgtcggcgatgacgtcaccaccggcggcggcggctcggcggctcggacggcgcacgctcgctggcgaacggcggcgcggtgaccaaaggagcggcggaggagcaacggacggcgacggcgacgaggttgaaacggcggcggagatcgggtcgacggcggcgatggtgctccggcgatcttcggcgatggcgaagcggcggacgaggacggcgacgacttggcgatcccgacggtggccttcccgagcgacaacgacgaccggaacggcggcggcgcacggctggagcgacggcggcgacggcggcgcgaagctgaccttgcggctgctgacgcttcggcttcggacactctcttgcaaagtggcctggcttgtaacagttgaaacatacctgctgctcccttccactactgttattctcttgagactgatcctgctgaactggcaccggctgattagcttgctcgatgttaacttcattgctttcattagtctctgatttgatctcaccaccgatgttcaactgttgcgactgtccttgaccagtagaaaaagattcaccaatttggagtggcttgatacgctgcctctggctactatcctgtgcctcctggaaaacaatccttcctctcttacgattgtccatcctgttcttcttgtcttccagtcgaattgctttgtcaaccaactcctgaaaatcctcatagtcatgagagatcaacataactgacagctcatcctttaagccttccaagaacttctcctgcctttcctcgtcagtacgcacatcttctggagcatagcgagctagacgattgaactcatgaagatactctgccacggtatgatccttttgcttcaaagccctaaactcacgtttcttcaaagcaacaacacctgcaggtatgtgtgtcttcttgaatgcctcagtgaactccgcccaagtgattggttgtccttctgctctgttcatccggatgtgatcccaccattctgaagcagatccttgcaactgatgtgaagcgaaaacaactttcttctgatccgtgcactggagcaattccaacttcttctcaacagcgtgcaaccaatcacctgcttccactgggttggtagtgctagagaaggtaggcggcctcacacgaagaaaatcagctaacttgttctgcggcggcggaggattgacattgttgttcccttgctggttctgcatttgttgcactaacatgttgatcaattgggtctgttgagccagcacttgagcaagggttgggttctcttcattgttattgtttccacttccactggcgcgagtgttcaccatctctcgccggccaaccccaaccgccattgccgcccacgtcgccgcaaaatccggcgccctcccgcacccgagctcgcatccaacgacgtgggcacgatcccctccacgtcctccaccattttccccgctcgtcccacaaaaaccggcgccgaccgagccaccaccaccccccat

SEQ ID NO: 10907 - DNA, 497 bp, Oryza sativa
  Clone ID: PAT_MRT4530_17182C.1
acgcggtctccttttccgtctccggcgatggccaccaaggccgggcgtcgctccccgtcgctctcctcctcctcctcaacatcctactcgcgctcccccgcatcgccctcctcctccccgtcgcgcagccgctcccctccccgccccgcggggggggcccgctcgccttcgccgtcgccgccaccgcctcctcccaggaaagcgtctccgccccctgagtccaccgtcctccatgttgaccatctctccaggaacgtcaatgaggatcatctcaaggagatttttgaaaattatggcgaagtcgtcaatgtggagctctccatggatagggtggtcaatcttccccgtgggtatggatatgttgagttcaagaatagagctgatgcagagaaggctcttccttacttggatggtggccaaattgatggaaatgttgttaaagtcaggattcgcgccttcaccacagcaggcaagagctgctgcttctccaaaagctc

SEQ ID NO: 10908 - DNA, 576 bp, Oryza sativa
  Clone ID: PAT_MRT4530_17183C.1
ctactgctgctttgaaactggtggctgagctgtatcccttgaagacgcaaccggcactaattgagtagcttgctcgatgttaacttcagtgcttgtattagtctctgagttgatctcaccacttatgtccaattgttgtgactgttcttgacctgcagaagaagattcaccaatttggagtggcttgatacgctgcctctggctactatcctgtgcctcctggaaaacaatccttcctctcttacggttgtccatcctgttcttcttgtcttccagtcgaattgctttgtcaaccaactcctgaaaatcctcatagtcatgagagatcaacataactgacaactcatcctttaagccttccaaaaacttctcatgcctttcctcgtcagtacgcacatcttctggagcatagcgagctagacggttgaactcatgaagatattctgtcacgatacgatccttttgcttaagtgtcctgaactcacgcttcttcaaagcaacaactcctgcaaatatgtgtgtcttcttgaatgcttcagtgaactccgcccaagtgattgtcctaaattgctccat

SEQ ID NO: 10909 - DNA, 2914 bp, Oryza sativa
  Clone ID: PAT_MRT4530_17184C.1
atggcggccgagatctccgcgcccgtttcctccctctccggccgcgctctccccctcccgacgctatataatcgtcccccgagctccgctcttccgtttccgccgctcgccgctcgctctcgccgtcggattcgtgctcgcgccgtgcacctctctctccgccgtcgccgtcgacctccggttcgccgccgacgtcgctccgggcttcctcccgactcggcgtcacctccatcggcttcgccgcgttgtcgccgaccccgtccgccccttcgcttcgcccgccgaccgccggagctccgtcgtcctcgccgtcccgaaccgcgccgccgccttcctccgcttcggccgccgtttccgtcgtcgttgtagtcccggggtgagccgaggaccgccctttcgcttccctctcctctccgctctctcgggcgccgctccgccgcgccggtggtcgccggcggtgaccatcggggcgcgggcgcgccgctcccgtcggccgtgccggcgaggccgccttcgggcgggccccgcggctgccaggtgggcccggccgtcagccgcccgcgcccgcgggtgcggctgacgcgtgggacccacggcgccgaccgccgccagccgcgtgctcccggtccaccgtggacccaccccggccactataaggactaaagctcgggcctctgttgcaaagcactaccgtacttccacatgtctaatggggcaaatgaaggctacacgagctgcggcccggtagtcgagatgtcataaagcacagggttggtgccctgctgcgaggggctcagttccgtctgcctgtcccgggggttccggccgtaggcggaattgggtcgatgtacacctctgatcagagtaaatctattcgaatagccgagccctcggatatgggcaagcctagcaatgtacccaagtcagtgttataattcttaaacgtgggtgtgtcttgttgagtacggtggttgtactcagtcttgcttaattttcccaagcccagatggggagttccttgaagatgaaggctttggtgtctagctcgtgcctgccgtcaagcgcctgtggtcgtcgccctagtcttccgctgtttttcgttgtctctgagtgtgctgggccttcgtcgcccatgtaataattttatttacgcttccgcttgttaaactctgaattgtatcaacttttggtgtaccttgcctcctgggacaaggaataatacacgcacgtcaggaacgcctgttgggtgatttccggtcgtgacaccgtgtaataaatctatttacgcttccgcttgttaaactctgaattgtatcaacttttggtgtaccttgcctcctgggacaaggattaatgcacgcacgtaaggaatgcccgttgggttatttccggtcgtgacacctattaaagagagatcccgcactgccttcgagttcgatggtaagaatgaccccaaccgtgaagatccagagtctcttgagttcaagattatgaaggagaggatcgctcaacgccgctcgccccgccgacaagctggtcaggccagtggcgggccaaaaatccagtctgctgctcagccaagcatctcaaagccaactaaccaatcgggctcttggaaaaggaaattaacaacctcgcgccgtcgcccggccgaaccctagccgagtcgcgcccgagccaccgccgctgcccttccaaattccgtcgcccctctctatttccggccgcgccgccgttgcagcagccgtcgtcggtcgccgtcgccaccatcgggttcgcgaggtcgtcgccgtccccgtccaccgcttcgccgccgccgaagaccgccggagcaccgccgtcgtcgaacccaacccttgctcaagtgctggctcaacagacccaattgatcaacatgttagtgcaacaaatgcagaaccagcaagggaacaacaatgtcaatcctccgccgccgcagaacaagttagctgattttcttcgtgtgaagccgcctaccttctctagcactaccaacccagtagaagcaggtgattggctgcacactattgagaagaagttggaactgctccagtgcacggatcaggagaaagttgttttcacttcacatcagttgcaaggacctgcatcggaatggtgggatcatttccggatgaacagagcagaaggacaaccaatcacttgggcggagttcactgaagccttcaagaagacacacatacctgcaggtgttgttgctttgaagaagcgtgagttccgggcacttaagcaaaaggatcgtaccgtgacggaatatcttcatgagttcaatcgtctagctcgctatgctccagaagatgtgcgtactgacgaggaaaggcaggagaagtttttggaaggcttaaaggatgagctgacagttatgttgatctctcatgactatgaggattttcaggagctggttgataaagcaattcgactggaagacaagaagaacaggatggacaatcgtaagagaggaaggattgttttccaggaggcacaggatagtagccagaggcagcgtatcaagccactccaaattggtgaatcttcttccgctggtcaagaacagtcacaacagttgaacatcggtggtgagatcaactcagagactaatgcaagcaatgaagacaatgatgggcaagctactcaatcagtgtcatttcagcaggatcagtctcaagaagataacagtagtggaagggagcagcaggtatgtttcagctgttacaagccaggccactttgcaagagagtgtccgaagtcacagcatcagcagccgcaaggtcagatcaacaacattgtcgtcacaggagccaatgcagtgccagttgcgtcttcaagagttgtgtcttcaagtgttacaactcagccaccagtttcaaagcggcagtag

SEQ ID NO: 10910 - DNA, 599 bp, Oryza sativa
  Clone ID: PAT_MRT4530_17185C.1
gcaggtcattgttttctccggagagagagagctggcttgccggcgtgtgcgaaagagagggcttgccgatgcgcgcgcgagagaagtaggtcgccgtggtgattcagctcgccggagagttttctgctgatttctctctccttgtctcctattcgtttgcatcattagttgattttttttcaatcttattccagctaggttttgatgcttcaggtagctcttaatgttcggatctgatgtttgtttaactgttttagattttggaatcggtataggtcttggtttagtcccctgatctgttgatttctatgtcatggaacctaaacacgcggagcacctccgtcctgcccttgttttgattagtcccctgatctattgaattctatgtcatgccgatgagattgcctagctgttgattttttattttgttaagttccaggtgagtagtgctctgatctgtttatttataggtaaagctacacactatttgaaattttctaggtctgatctgtttttttgaagtatatctgctttgtgtgatttgggattagactaaatcataaccaccgaactagccatcggtggaaacgatggctgga

SEQ ID NO: 10911 - DNA, 573 bp, Oryza sativa
  Clone ID: PAT_MRT4530_17186C.1
gggacccacgcgtccgccctgtcagaggcagttaagccctgtaagttttcatcccataacggtaatggctagctgccaaagatgtgacaaaacatggatatagctagacccagtgtggtattctcacatctagcttaaaacggtaatactacattgttgtatagccactacacatgccattggaaattcaacagcacgatcctttatttttgacaaacgcgaccagggtgccagcttacttttgcgtaaatggaaaatggcaaaatcccccccccccccaaagctaggagaaaatctacctgtttcatctccaatatcataagaatagcaaaggaatcaatcacttgagatttttacaacagtacaaagcatttccaaatgattattggcttatgaatattgcattgcactatgcatgattatcgtggcacactatcacaatatgttatatgtggtcgaattcatataccatcataggaaattgattttgtttctcatgaacagttctgcatgccagctgatttttattttaaatttagatctatgtaaattggaaaataaatatttttgcaa

SEQ ID NO: 10912 - DNA, 292 bp, Oryza sativa
  Clone ID: PAT_MRT4530_17187C.1
tagaatattcttctatatacatttatggcattggaatattttccaagtatatgaatgccaaccttacattatgttcatgttatactgaatatgctgttagcttatctgggagatgctttggtgacagctcaatacgggtattcctctgcgtgtgtatataatgctaagttaattccctggggagggtattcctccgtatttagccccagttgtatggtcatgatgggctgtcgtaaggaattcggcaatcaggggtggcttctcgaagtaccaggaggtcatcggatagagg

SEQ ID NO: 10913 - DNA, 449 bp, Oryza sativa
  Clone ID: PAT_MRT4530_17188C.1
ttttgttttttttttttttttggtttttttttttttttttttttttttttttttttttttttttttttttttttttttaaacaaaaactggcaaaacagcggcgggggggggccagaaaatttaatttccacccaaaaccaaggggggggcaatccccgggggggggaaaaaaatctattcccaaggggaaaaaccccggataaaaccggggccaaaataccgggttaccccgggtccccctttttgggccccaggggggggaaaaacgccaaaaaaatgggaaagaaaaaaggggccaaccggggggtggtgggcacaaaagccccttttttggggggcccccccttttccggggatatcccctggggggggccaatttgcttttttttttttacccctgtaaaagccggctttccttttaaaacggggccccccggggccttttttt

SEQ ID NO: 10914 - DNA, 2001 bp, Oryza sativa
  Clone ID: PAT_MRT4530_17189C.1
atggcgtcgcttctcggacttgctgaacatgcgctacggtccgtcgcttcactcggtgccattaggcgagctggcggcttgctgccggacaaccaccatggacgactacgccgagcgcttcctcgacctcttggctcatgccggctctctttgaggatcatcaggcagctcgccacccctgccgcgccaagccgccggcgggggcctcttcccattgccacaggcagcacatcaacctgcgccggcctaggaactgggcgccgccgccaaggcacctgtggcaccacccgtactttgccgcgccgtgcgctggctgttgcccaaggagatggacgaacaacgtcgccagggcctctgcttcaactgcgacgagccctactcgcgcggccacaaccgtacttgccgctgcttgttcttcgtcgagatggcgggggtgcatccgacgatgactccgctgcttcccaggatgaaccacgcgagacccttcggatttccctacacgcagccacaggcgtccgtgggtctgacgccatgcacatcatggtccgcctgggcgacgccgacctctacgccctcaccgactccggctcgacgcacatgttcctctcacaagatgcagcgacgcgtgtcgatcgagctctccaacctcgcataggcctcaacgtcacggtggcaaatggcgacaaggccaccagcggtcgcgtgctttggcgtgcgcaccctcggcgctgctggactcctgttggaggaattcttcgatgtcttcgccgaaccaatgggcctgccgccatgccgccagtccgggaccgcacctaccgcatccagctgctgctcgggacgacgccgatggcggtgcgcccgtactgctaccctgcccgacacaaggatgagctcgagcgtcaatgccgcgtcatggaggaacaaggcttgatccgccgcaacaagtcggcgttctcattgccgatgctactggtgaagaaggcggatggctcgtggcgcttttgcgtcgatctatctgagcgctcggtcaagggcaaatatcccatccccgtcgtcgacgaactcttggacgaactgcacggcgccgccatcttctcgaagctcgatttacgatccggctaccaccagcaaggggtcgccatggacgccaccaagattcaacccgtggtggactggcgacgtccacggtcgcccaagaagcttcgcgggttcctcggcctggcgggcttctaccgcaagttcatccaggacctcggctcggtggcggcgcagctcacccagctcctccgcaaggagagcttagcgtgggcgccggctgccgccgcggcactccagcgactcaagctcaccctcaccacagcgccggtcctgagccttcccgacttctccgaaccgtttgtggttgagtgcgacgcgtccaacagtggcttcggcgccgtaatccaccagggcgaagggcccattgcctacttcagccgcccggtggctattcgacatcacgcactcgcggcataccatcgcgagctcattggattggtgcaagctacggaccactatagtcccaagttcctccttgatcaacgcctgtccaccatcccacaacaccattgggtaagcaaattattgggctttgattttgtggttgagtataagcctggtaaacagaacgcgacggtcgacgctctgtctcaacgcgtggcgctagatggccatgcctttgtcctctccgtgccgacatttgacttgctccacgacatccgcaagaccgccgccatcgatccagcgttgacggccctccgcgacgagaatgcctccggtgcacgcacgacgccttgggcggtgaccgacggcttcatcacctacaagcgccgcatctacattccgccggcctcgccgtgggtgccgatcgtccttgccgccgcgcatgacgatggccacaagggcatccagaagacactccattggctccgtcgtgacttccacacgctcgacgaggcgtga

SEQ ID NO: 10915 - DNA, 324 bp, Oryza sativa
  Clone ID: PAT_MRT4530_1718C.1
atgccgtcggcacacgacctcttcatcaagaatctcatgcggcggggcgccggccacgacgacgccgtgccgtggttgcattaccctgccgtggacgacgccaacgctgacacggcgccgctgcctcccgacggccctccgggcggcgagagcacgtcggcgaccatgtcggcggcgggcacctcgaccgtccccgtcgagtcgacggtggtgcagccggcgacgaaccggctaatggcgaggaggagccaagcccaacgagttcacgcgctgcttttagaaggagaaagtacattccgcacccctctgaggatgactgggtga

SEQ ID NO: 10916 - DNA, 1371 bp, Oryza sativa
  Clone ID: PAT_MRT4530_17190C.1
tttttttttttttttttttttttttttttttttttttttttttttttttttttttttttttttttttttttttttttttttttttttttttttttttttttttggtaaatgtctcctttatttattattgatattaccatccagtatgcatgtatacactccccaatttatccatgcaagttctataacaaaacacacactgacacacatgtaaggtgtatagatagtctacagcttgcaagaacatgagttatatgtgttccgatgtatctatgtcctttttcttccatcggtcggccggcttgctaggcgatgaaggctctggcgatgcggccgtcggcgccctgggggaagaacccgccggccttggcggggtcgccggagccgtacacgacgccgaggatctcctcgggcgtgcggtcgtaggcgagcgagaagcggtcgccggcgatgatgttgcccacggtctgcccctccggcccctgccccggcgccaccaccagcccctcgtccttgacccccttcctccccagcacgttccgcagctcggagatgtgcgccgtgagctccgccaccccgacgccgtagctcgccacccgcgacagcccgtgctcgtacagcagcgccctgatcaccgcgtcctgcgccgactccacgcccaacagccccgccaccagcttcctggcctgaggggtgaggagcctggggttggcgccgacgtagccggtgaggccgacgtaggggatgatgtaggaggcgacgcgggggttgaggctgttctcgtaggggttgaagggcgggtccagcgtcgtgttcatcgccgtctccacgatcttgccgaagttcgccgcgctgatgtccagcagcggccgcgggaaccccttcacgttctgcttgatctccctgaggtggccgacttcttggtagcagaattgggtggcgatgtcgcggacgaagggggtgagggcggcggtctgggcaccgacgggggcagggccgccgccggtgaggctggcatcgatgccgtcgaggccgtagcccagcgccgaccagcagaagaactccgcctccaggtactccaggttcagcgggaactccagcaggtccacgtccgactgcggcagcagaccgccgaccacgccgccgccggtgccgccgtagaaccccctgttccgcgcccactcgttgtccatgtcctgcgcccgcgcgccgccgccgccgcacagcgcgacgagcgccaccgccgcgaccacggcgaaggtgaccggtgcagccatggctgggctagagcctagagctatcttcctcagctgtccacgaaccgcgcgcgagctgcgactagcttgcacttgcacacgccgcgactctgac

SEQ ID NO: 10917 - DNA, 1727 bp, Oryza sativa
  Clone ID: PAT_MRT4530_17191C.1
atggctggagcggggggtgcggctacggctgcagcgggaggaggaggtgggggaggggtggcggcggggaggagtggaggtggtggtggtggtggcgcggcggcggcggcgggggcgggggcgccggacccgagggcggcttgctaggcgatgaaggctctgatgcggccgtcggcgccctgggggaagaacccgccggccttggcgggtcgccggagccgtacacgacgccgaggatctcctcgggcgtgcggtcgtaggcgagcgagaacggtcgccggcgatgatgttgcccacggtctgcccctccggcccctgccccggcgccaccaccagcccctcgtccttgacccccttcctccccagcacgttccgcagctcggagatgtgcgccgtgagctccgccaccccgacgccgtagctcgccacccgcgacagcccgtgctcgtacagcagcgccctgatcaccgcgtcctgcgccgactccacgcccaacagccccgccaccagcttcctggcctgaggggtgaggagcctggggttggcgccgacgtagccggtgaggccgacgtaggggatgatgtaggaggcgaggaggaagttgaggctgttctcgtaggggttgaagggcgggtccagcgtcgtgttcatcgccgtctccacgatcttgccgaagttcgccgcgctgatgtccagcagcggcgctttgccggcgcccacgcttaggtgcgcgtggagggccgtgccgcctccgcctcaactgccccgtccccgctctcgaacaagcggtcgaggagcggcggcgcggcgcctggtggcggcgtggggaggggcgggcctggaggcggggcggcggcggccgtctcgtcggctggcggcggtgcagctgggacttcgcccgcgtcgtcgctggcgctgccgcagccagggtcgctgccgtcgctgtcgtcggcgctggggctcaccgggggaacctcgctggcgtcgctgctgctcgggagcggcggctccgggggtgaccacctcgggctcttccaggccatgcagtcggtggtgtccgacgcggccgcgttcgagatgcaccagcagcatcagtcgcaggtggatcacctgctcggcctcggctacggcgccgcgggggcgcagatccaggcggccaagccgtggctgcatgacggcggcgccaccggtggcctcctcgacggcttctacgcgccgctcctgtccggctccatcgtgccggggctcgaggagctccaagtcaaggcggaggccaccaccggcgaccaccagcagaagtcatcggcggcggcggccggtgagcagagctgggacctgccgacgccgtcgtcgtccaacgtcgaggcgagcatcatcgcgtcggacgcgctcatggccgccgcggccgcgtcgatgaacccggcggtcagcgccgccgccgcctccacggcgccgtccgcgcagtcgctcctctactggggcaacggcggcattggcgccgccgccgcggcatggccggacctcgccaactgcggatcctccatagcgacgctcttctagctagcccagcctgccgcgcgcgccgcctacacgccgccgactgtgctagctagctagctagctcgtcgccgttcgccgtcgtcgctaactctattttttttccaccttaattttccctgagttaatttcccgatccttgataaaaataacatgtattgggggaaaaa

SEQ ID NO: 10918 - DNA, 333 bp, Oryza sativa
  Clone ID: PAT_MRT4530_17192C.1
cccacgcgtccgcccacgcgtccgcccacgcgtccgcccacgcgtccgcccacgcgtccgtggaagttgggctgatttgtatttgtgatgagttttattttacatgtccatctggaagttgggctgatttacttctttaaggtgcatgttagaacacgtgtgcaaaatcaaagctaagccatctactagtaaaatcaacgtaaggaggatgcgacctcacaagtgagcaagatgagaggtaaggtgaaaagaagggaaataataaattctgggaaggcagcctccaaggcccaaacaggcttccaagagggaggcatgttcttctgttcttcc

SEQ ID NO: 10919 - DNA, 662 bp, Oryza sativa
  Clone ID: PAT_MRT4530_17193C.1
cataatctggatagtagtagattgaaccagatgcggcaggcggggtgggatctcatcgtgcacccgggcgtcccgctgtgccacgccggcgatgccaagttcacgctcgagtcgttcatcacgctcaatatgttcgttggcttccaccagtgggacttcggcctgagcgccctccacgaccggagctcctatgaccggcgacggttcttcgacgagttcgcggagcttaaggcggcaccagcggcagagttcctcgacgcgcggagctcgcggtggggcgcgctcgacgagttcccgtgcgacgggtacctgtccgtggtgcataagcggatggaggcggtgttcttcgggagcacggcgcagcgcggcgccgtggcgagcgctggggcgcgttctccgacacgccatggttcgtcgagttcgccaagatggcgcgccacgtctggttactgcattgcctcttcctcacgttcgatggcggtgtgagcaccatcttccaggcggctgccggggggcgatatggacgccaacggtgacagtgacacagcgctgggggcggcagcggtgaccgcgctgtcgggttcaccgtcgtgctggggttcaaagttggctggatggtgatgcaatgccgtgtatacctctcacgcccggtgcgacaacca

SEQ ID NO: 10920 - DNA, 205 bp, Oryza sativa
  Clone ID: PAT_MRT4530_17194C.1
cggcacagtgagagtgtcacgagagccaccggacacacttcgccgcccggcgagtgcaccctacctcttattagtgccacccattgaaaaccacccatatgagtggtgggtttgtggtggtggtggctgattattggctgaattaaaacccgtggtggtgtgatcgattgaattaagcacgctgggtcgcttgtcggcgactata

SEQ ID NO: 10921 - DNA, 264 bp, Oryza sativa
  Clone ID: PAT_MRT4530_17195C.1
atggcaaagcacgccaagagggcgaggcagcggcaacgggccatggctgtacgcgggcggcgagaggtcaaggtgacggcggcgggtctcaagggggatgatggcgaagcatgccgagagggcgaagcggcggcgacgggccatggttgtgcgcgggcggcgagagggcggggagagcgtaaggctgcgccggttagtggggcgagggcaaggcggctcggttgtgcagggaaggcggtgctcggcctcgatgcgcgatggtga

SEQ ID NO: 10922 - DNA, 1474 bp, Oryza sativa
  Clone ID: PAT_MRT4530_17196C.1
caccttccttccttcttctctctttctcagtctccgccccgtccttcctgctcccctcggtcgcaggctcggagcccatggcccccgccccgggcgccccggccgccgcgcccgcgggccggcgctcggcacccaccaccaccaccttccttccttcttctctctttctcagtctcagatcagaattatcagatcccgagggagggaggaagggaggccatggccaccgcctttgactccccgaccgcctcgcccgccgcctctcccttcgacgacgactccttcctccgcttcgacgccgccgcgcccgctcccgcgccagcggacgccttcccgccatcaccggagccctacgccttccgccccgacgcgccctcccccttcggtatgcccgaggccaacggctccctccacgacgaccccttcgccgcccccgacaacgacaacggacccgtgctccctccgcccaaccagatgggcgctgacgagggcttcctgctgcgcgagtggcgccgtcaaaatgcaatccttctggaggaaaaggagaagaaggaaaaggagatgaggaatcaaatcatccttgatgccgaagaattcaagaaggcatttgttgagaagcgaaagctgaacattgagacaagcaaggatcaaaaccgagaaagggagaagctttacctggccaatcaggagaagttccatgctggcgcagacaagcagtactggaaggcgatatcagaactgatcccacatgagattgcaaacattgagaagagaggagcaaagaaagataaggataaggagaaaaagcctgggattgttgtgatccagggcccaaagcctgggaagcccactgacatgtcacggatgcgtcagatattgctgaagctgaagcacactccccctccacatatgaagccacctccccctcccgctgcagccaccggtaaggatggtgctgcaggaaaggatggagccaaggtagctgcggcagctagcaaggacgcctctgccaatggcagtgttccagagatggagaaggccgctgctgcagcagcacctgcagcagcagcaactgaacccattgctgctgcctgagtgataacggcttggctcagctgctaatggtttcctgtaggacacagaggagaaggcagagtgtctggcacggatgtgcgccacgtatggtgtagcgttgtttttgttaagaaagtgttgtgttgtgttgggaccttgattcgttgctacatatattgttattgcattttgtagagaaaagatgagaggggatatatcctggcaataataagttaaatctgttgtattaggatgtgcgtgattgtgtgatgttgtgacggtggttgtactattttccaggttgtcggattttggtaaactcaactgtgtattttatttgcatatattattattattattattattattaaaaaaaaaaaaaaaaaaaaaaaaaaaaaaa

SEQ ID NO: 10923 - DNA, 3217 bp, Oryza sativa
  Clone ID: PAT_MRT4530_17197C.1
atggctactgagaggtttagaattaacgcaatctcttctctcattgattctgttggaaaccaagtttctgatcatgaggggaaagctgccattctttggaatgcttttagggaaagaatgggtgtttctatgaaacctaaaatggtttttgatctgagtgaacttattgaggataaatgtgaccttatgtcccattgtttacaaatcactaccaaagaaatagatgaagtggtgaaaaggatccctggtgatgaagctcctagaccagatggctttaatggatgcttttacaagtccagttggggactaattgctcaagatttctatcggctttgtgcagacttttgtgggaactcagctgatctttctgcaatcaactattcctatatcacatgggttccaaagaaaatggctcctcagcctcctaatgattttaggccaatttccttaatgaatttctcagtgaaaattatgtgcaaagttcttgctgatagaattcaatcaatcctgacaaagctggtccatcaaaaccagtatggatttattaaaggaaactctattgaggactacttagcatgggctttcgaatacatccatcaatgtaagctgtctaagagggagatagttcttctaaagcttgattttgaaaaagcttttgatacaattgatcatgatgctattctgaatgaaatgacagctatgggtttccctccccaatggaatgaatggatcacgagtatgttctcgtctacctcaacagttgttctattaaatggtgttcctgctttacttgcagcacttcaacaagcctttatccccagcctctttgaagacaatctccgagctagtggagaagggtggatgcaaagccatccgcttgaaggctgcaaagaagaaggcggtcgtggcacccctgagacgaaactttctgctatctccaatcaaattattctcaacactttgggtcaccagtttgtacagcaacatgcttttctgccggcagatggtactaggggcggcatacttctagcatgtgatgaaaatttcttttcaatctccgaagtggttcttggtcagtactccctctctgctacggtgtccatgcgagaagaaggactaaattggtctatcactgtggtgtatggaccacaacttgatgctgacaaaataaacttcttagctgaacttgaaaatattcaagtctctttgaaacctgcttggttaattattggggatttcaatcttatttacaaagcctgtgataaaaacaatagccgccttaacagagcgatgatgcaacatttccgcagactcttagacaagatccagctagctcgagaatccaggtcactatctgatcaagagaacctactcctctccaatctcaaatcaagatttctaggtctctcaacccttaataaaattaaaattaggcagcgctcgaggctcacttggctcaaagagggggatgttgattcaaaacttttccatatcaaagcaaactctaggagaagaaaaaattacatccaatcacttcaaactccctcaggagtggcaatatcggcacaagacaaggaagacgagctgttccgttttttcaaatccagacctgggacaaataaccaaagatcattgggtctaaactgggctgctttagggctccagtccttggatctttcggaactagaggaggatttctcggaggaggaaataaaagcgacgatcttctcattacctcccgaaaaggctccgggtccggatggttttattggatcctttttcaaagtctcctgggagattatcaaggatgatatcatggtggcaatcaattcgttcatgaaccttaacacatctcaactggaaaaactgaattcggcctttatatgtttcattccaaagaaagatgacgcttctggcgctgaccattaccgacctattagtctggtccatagttttgcaaggaaaatcactaaaactttggcgaatagactagctccaagacttaatgagttggtttcccagaaccaaagtgcatttgttcggaagagagcgttacatgacaattttctttatgttcaaaacatgatacagctgcttcatagatcaaaaaagcaaagcttattcatcaaggtcctgctaaatggttcgccaggtcacttgatcaacaatgctagaggactccgccaaggtgaccctttgtcccctatgctcttcattttagccatggaacctttccatcgaattcttaaagcggctgaagatgctactattcttcaaccggcggcaaccacaatctcggtggagaacggcactaaaactagtttttggcatgataattggctgcacaagaggtgcccaaaagagttagcccccttctatttctctttagcaaaaagaaagaatagaagggttcagttcgagttgacgaacaataactggctttcatccttcagacaaattacctcagtcgaagaattacatgagctggtgcaattggggggcctgctccaacaggttcaactcactcaaaatgtctatgacatagtctggaattggactgaatctcgaacttatacaaccaagagtgcctacttataccaatttgctggttcatacactacaagcgattttacctcactctggaaagcccgggctgagcctaaaattgaatttttcgggtggcttgtcctccatcaaagaactttgacggctcaaaacttgctcataagacattggccgtgtgattggatttgctgcttgtgtacctccgccttcgaagacaccaatcatctgttcgcggaatgcccgtttatgagacaagtatggtctacagtacattcgtggcaaaacctgcccccggttttcaattcccttccatcctgtgtctctacctgctgctgggatgagcttaaggatgcaggaacagaagataaaaaattactcgctcgaggaacaatggaggggacaaggagacacttggagaaggacttagagccatggaggatcatcgagtacgaccaagtcaaggtggaggcccaaaccaagtcgacgccgggtgcaattcggagtccaggaccagtctgcactaaaatgggcgcccaggtcgcatacgtgctcggattggggcattctttatatggatggaaagctaacaagatatcctttccaatggttttggtcccatgtccaaattctttttcgggtcaatgtaaattga

SEQ ID NO: 10924 - DNA, 788 bp, Oryza sativa
  Clone ID: PAT_MRT4530_17198C.1
cttccatcgtccgtcaaaaaaaaacggtgagtaaaaaaatgtgcgaaaaaaaaccgggaaaaaaaaccaactttgtccgataaaaagaacgggcgaaacaaacagaaaaaaaaaattcaccggcgaaaaaaagccgtgcgaaaaaaaaaccagtccgatccaaaaaaagcgcgaaaaaaaccggcccaaaaaaggaaaaaaaacagtccgatccaaaaaagcgcgaaaaaaaggcaaaaaaaagaaaaaaaaatccgatccaaaaaataggggcgaaaaaaacaagaaaaaaaagaaacgaatccgactccgtctacgcagtaaaaaatagcgaaaaaatctaaacgaatccgactccatcgacgcggtaaagaaaagggcgaaaaaaaataaaaaactatataagtccgattccaaagaaaatcgaatcctatcatatttgacacggcgtggtaaaaaatacttaaaaaataagaggtacttccatcatccgtaaaaaaccatgggcaaaaaaactgtgcgaaaaaaaaccgggcgaaaaaatgaaaaaaaaacaactctgtccgataaaaaagagggcgaaacagaaaaaattcgtcagcgaaaacaagccgtgcaaaaaaaggacgaaaaaaaaaccaaaacctgtccaatccaaaaaataaagggcaaaaaaaaccggccgaaaaaaagaaaaaaaaattatgtctgatccaaaaaaaataggggtgaaaaaaacagaaaaaaatagaaacgaatcgatatggcttatgggttatagttttcgt

SEQ ID NO: 10925 - DNA, 460 bp, Oryza sativa
  Clone ID: PAT_MRT4530_17199C.1
tggttttggagatgattggattcacaggtgatcgtaggattctatcattttatgtgaccggtcaaaccgggctgtgtatgcctgtcagaccggcggtgatcgagcggtcggatcggccagcccacggtctgaccggccgacgctgtgtcggtttcggtttcgggttgtttatttggatatccgtgattatttcatgattatgacttctagatggatactatacagttcttcgatttgtgtttcaccgagtttcggcggtctaaccggcaactcaccggcggtcagaccggcggcatacgggcggtcagaccggcggcagcgacaagcgcggcaggcgacttcggtggtcagaccgaagattcaacaccggtcagaccggcggcatccactcggtcagacctgcagatcaatctcggtcagaccgacttccgtcgattttaaaactattcgaatagccgta

SEQ ID NO: 10926 - DNA, 954 bp, Oryza sativa
  Clone ID: PAT_MRT4530_1719C.1
atggatgacgatggctgcggcctccagcaatggctgtggtggcggcgcaaaacggtagcggcaaccatgtcaacagtggaggcaacaagagcgcaggacagcaggagcgtgcggctagggtttcaggtcggtttgaatctgatggtgaggctggacatatctgaaatccgggagtattccgatgtgttcccagatgatttgcctgccaatgagttggcagaagtcaagcggcaagtagatgatttgcttcagaaaggatacatcagaccaagttcatctccatggggagctccgcttaaaggtgccactgttttctccaagataaatcttcgatcagggtatcaccagttgagaatcaaagaggaagatatacctaagacagcttttaccactagcgccctagcgccgtgtgccctagcgccgccgtcgccgccgtcgctccagccgtgcgccgccgccgttccagacgtcgccgtcgctcgggaagaccgccgtcgtggtcgccgtcgcgtcgccgtcctcgtccgccccttcgccgtcgccgaagatcgccggagcaccatcgccgccgtcgacccgaagaccgccgccgtttcttcgtcgttgccgtcgccgtccgttggtcttccgccgctcctttggtcaccgccgtgcgccgccgccgttccggtcgtcgccgtcgctcgggaaggccaccgtcgggatcgccaagtcgtcgccgtcctcgtccgcctcttcgtagccgccgaagaccgccggagcatcgccgtcaccgtcgacccgaagaatgccgccgcttcaacctcgccgccggtgccgtccgttcctcttccgccgtcgctttggtcgccgtcgacacgcgacaacctgggcctgatagagtcgtggcctgatgacgttctggttggttacggattccacattacaaggatcaacggcaactcctccggctga

SEQ ID NO: 10927 - DNA, 382 bp, Oryza sativa
  unsure (1)..(382): unsure at all n locations
  Clone ID: PAT_MRT4530_171C.1
cttccgatgaggaattagttagctctcgaacagtagtacgagatttgtgcaagttgtggtcctgtcgtcatcctgtggagttgtggtgagtgtttgacgaattttttttttttttggcggctcgattgcaacccgcggcccgcaacaaatccgacgccaaatcggacacggccggcgactccggcgacccaccaccacacaccaatcctcctcctcctcatcgccgcctgcgacggcgaaggcggcgagcgatggattccctgggcgtgctgctggtggcgccgttgaacgcctacctgggagcaggagctgggaccggcgggtgccgcctctttccgctctnggagttccccagccgaccgccgcgacgactaacttcggg

SEQ ID NO: 10928 - DNA, 114 bp, Oryza sativa
  Clone ID: PAT_MRT4530_17200C.1
atggatgacgacggtctgccagtcgtgcacggccttaggcttggtcggttcaacggttatcgggagcttcggttgcgaggatgcccggcgtcccatcgctggcccttgggcgtg

SEQ ID NO: 10929 - DNA, 222 bp, Oryza sativa
  Clone ID: PAT_MRT4530_17201C.1
atgatcgacgacgtggaggacggtggcgcgcggccgtggcatcgtgggcgcacgcgatgtgcctcgcacgtagcgaggaggagagatacgacgacgacgacgacgaggagtgatcagccgacgactagatgtgccagctttcagctctcgagcgaagtggcaatggtgtcggagctacgcggctctggatttccggcgaaggagacggcgcggctgacgtag

SEQ ID NO: 10930 - DNA, 1272 bp, Oryza sativa
  Clone ID: PAT_MRT4530_17202C.1
taagactggagcataatttgatcttgatctttacaccgtaattcttggataagatcgagcattcaagaccctccctttcctctgggtccccgcgcctgcactggtccctcaccgagttgttccctccctctccgcctattgctccaactatatggctaccactcttcacaaagcgatagccggaggaagaagaagaagcaacagcagcagtcaagccaacccgtccggcgagcaagaagcaaccgaggcagcaaaaggaggaggagggaggactccactgttcgcttgtatcgtcttatgggggaagaggatatcagcaacgacagcaagagcagctgcggctgcgaggacggcacggtggaggctccggcggctgcggcgccgaaggagaacggccgagccgcggacccgcgcctccaggccatctccgacgccatccgcgtcgtcccgcacttccccaagccagggatcatgttcaacgacatcacggcgctgctgctccggcccgccgcgttcaaggacgccgtggacatgttcgtcgagcgctaccgcggcatgcgcatcgcggccgtcgcaggtattgaagccagaggattcatatttggcccagcgatcgcactagcaattggagcaaaattcataccgttgcgcaaacctaagaaactcccaggtgaggtaatttctgagacctatatacttgagataccgttgcgcaaacctaagaaactcccaggtgaggtaatttctgagacctatatacttgagtatgggacggattgtttggagatgcatgttggagctactgaacctggtgagcgcgtagtggtcgttgatgatttagttgcaaccggtggaacactttgtgctgcaataaaacttcttgaacgagctggagctgacgtagttgagtgtgcatgcctcattggccttcctaagtataagaaagattcacagcttcattcctttgcaagagcacgttggaggaattggatcggtattggttggcaggaatatctgtctcctgttctacgatccccagacaagggcgttgtgagatatgggagaggagacagtcgcagggagacttgcctgcatgtttggcgatcgctgctttctcgcgccccctcgattccgcctggttccaagggacggccgcttctgcggttctgcctgcccctgcagttttattactgctgcccgtacagggtcagattggcatcggtttacctgaagcaatcacacatcaacagtgcacaccattcgttaagataa

SEQ ID NO: 10931 - DNA, 246 bp, Oryza sativa
  Clone ID: PAT_MRT4530_17203C.1
atggttcgatccaatagccagttgaatgtttcgatcggccggcgagtgtgctgtaacagtgaaaaatcggaatctcgtcgagtgatccatccgttgggtttgtacggtggaagtaagagctacagctctagctacatgtacatcaccagtacccctgagctggaactgggaggaacaaactacggcaagtggcagcagcggcaagtacccaacccagttcaaaacacacgacatgccaaacagttg

SEQ ID NO: 10932 - DNA, 243 bp, Oryza sativa
  Clone ID: PAT_MRT4530_17204C.1
atgcagattgaagaggaaaagagattaaaattggattgtttgaagaattatacaggtgtcacagaggacagaatcaaagaaggcaacaatagaatgaaatcacagagatcaaattcatgtgtcacagaagacagaattaaagagaggaacattacaatgaaacacatggatcaaattcagtgttacgttaaatcaagagaaagcacgtctaaaataccaacgatcatgtacgagcaagtctga

SEQ ID NO: 10933 - DNA, 246 bp, Oryza sativa
  Clone ID: PAT_MRT4530_17205C.1
atggcagaggcgaaaggcataggggatagctggagctgctttcccaaggccaaattcggcatttccccaaacaaatctgatgatagtgaggctgtccacgattgcagaggtgacgatggcatagactgcgttggtgcaagtggtcattggccgacgaggcactggcgtatgtgccagcccaggggaacatgcccgctagagaggtcgcaaggagaggctgcacagagaggtggggctttcgcctag

SEQ ID NO: 10934 - DNA, 432 bp, Oryza sativa
  Clone ID: PAT_MRT4530_17206C.1
atggtgtttccaggagtcattatcgctggccacgccgccaaattccttgtgggaggttcaatctcctttggctcccagaccttcatcacctaccagactggctgcctcgctcggaaaacttcaagcgccgctcccttgtacctcaagaacgtgactaccaactccaccgattgcctcgccggtctaggcaggagggtcacccttcacccgaggaatactcgggagaccccatgttgctgcactcgggtgccgcaagaactcggcccttgctgtgttgggttcattgacaagttcgtcaagctcttggacttggagttggagagtttcgatttcgccatcgtcgagcggtccgacggctggcgcttcgcgcaccaccaaaccactgtgttggagcttgagcggagcaagcagcagctgagtcgaagctcctga

SEQ ID NO: 10935 - DNA, 420 bp, Oryza sativa
  Clone ID: PAT_MRT4530_17207C.1
atgcctctctccaagcgctcctctaggcgaaagccccacctctctgtgcagcctctccttgcgacctctctagcgggcatgttccctgctagctaccttgagccccgcctgaccaccgtcatcctaatatgtgacaaagtcacctacacaacgcaccctgggctggcacatacgccagtgcctcgtcggccaatgaccacttgcaccaacgcagtctatgccatcgtcacctctgcaatcgtggacagcctcactatcatcagatttgtttggggaaatgccgaatttggccttgggaaagcagctccagctatcccctatgcctttcgcctctgccatggctaccttcattgcgagctagccatccgacgcacactgccgtctctatcccgctgtaacgatgccgtcatctccatctag

SEQ ID NO: 10936 - DNA, 116 bp, Oryza sativa
  Clone ID: PAT_MRT4530_17208C.1
gccagtctggctctctgtctggccgagctgtgtactcctactgcgcgagacagagcgtgaatctacctcaatctcaaggacatgggctagcccaagcactcggcttgtgatgctcc

SEQ ID NO: 10937 - DNA, 174 bp, Oryza sativa
  Clone ID: PAT_MRT4530_17209C.1
atgacggtcccgtggcctgaaagtgcgataccgcggtacccaccaagacggtctggtctcgctgctcaaaaatgcggcaccaacatgcatggtcctgcttctccgttccgcggcaccgaggcagggacggtcccacaacccgataacatggcaccgtgttggcctacgtcttga

SEQ ID NO: 10938 - DNA, 987 bp, Oryza sativa
  Clone ID: PAT_MRT4530_1720C.1
atggctgacaatgagaaaggcaataaggtcagaagtcaggacattggtacctcaagctcccgagtgaatgaagcaccagacaccagttgtgtggcagtggtccaacacctgattaaccagaaccaattgcttatagagatactacagcagcatcggatgccaattttgaacccgagtcagatgcaacctcaagtgcagttggaggcagtccaagcactcacaccacaagtcagcgcaccgccaacatcccagaaggcccctcatgccatgccacatgttgacccaaaagaagcaagtatcatctgttttatgtgtgatgagcaagggcactacgcaaggaactgtcctcagcagaaaagaaaagcaccaatgcgaaccgaagatgaagtccgtaagatgatcattaccagcacagaatggcctccaccaggaatgacagaacatcagagaagaaattccttccgaggtgcacaacagttgacagagcatcttttagctaatggaggtagagtgtctgatagtgaagattcagatcaagtctcctcagatgatgaaggaatgggtcatttcgccgacaagtgcccaaaaccgagaaacgtagctgccagcacgtcagtccacgcaaacccccgcaatcagaagcttgctcctcaacgaattgtcatccatgcatcccgaagcagtcctataacccgcgttgcaacagctccaattccaatgagtgcactaccacaaggtgtcaatgctcaatttcagccccagccaccagctgacaagacagaggccagtatctgcgttgtacctttggaagttccaatacagcagctgagaaatcaagtacaagatgaagaacccgagttgaagaagggcattactccaaaaactgtccccaaccaaggcaaaatcgacctccacattaccgccaatttacacgaagcagacattccaatcgtattgtggtcactggagcaaacgccgtacccgtaa

SEQ ID NO: 10939 - DNA, 195 bp, Oryza sativa
  Clone ID: PAT_MRT4530_17210C.1
ctaggctccgtcgcagtacagcatctccaccaccgccaatcaccgaagcgcgccaccgctcatccaggattgattggcgtgagagagcgtacataccgtagcgggaacaccgatcctctccaactccggctgctcttcggggacgagccgccgccgccgccgccgagccagaggcggttagggtttggcaaagat

SEQ ID NO: 10940 - DNA, 663 bp, Oryza sativa
  unsure (1)..(663): unsure at all n locations
  Clone ID: PAT_MRT4530_17211C.1
aggtgtanttggaccnggtaaattagttcgttgnagtgggggatggggggatacatttaaacngaacagttgacntgataagcnagttgaataacctcattaagggaccaaagtggagntccaccgcggtggcgccgtttagaattagtgaatccccngggctgcaggaattcggcaccacacacagtgtactgatcaacacttctggaagtggagcaaggttgagttacctgtgagacagtaatgaagaggaacaccatccttgctctcttcatctgggccatggctatggtgatcttcgccacggcaatgccggccaaggcaaggatggaggggatccatcctcaaggatgcagatgctgctatttcagacttaggccgatgatccagtgtgccaaggcttgctgtggctctgacgatgagaactgctgccttgtgaacaactagttcatctcgggaataaataaaccgagtcggtcttggacctttgcttaatttccttgtgtttcaacgatctcgctgaagaatgcagttatatatatgaaataaaatccagctcttgctgttcatacctaaaaaaaaaaaaaaaaaaactcggggggccgccccgggcccaattcgccctatagtgagtcgtattacaattncnnnnnnnncnnnnng

SEQ ID NO: 10941 - DNA, 2142 bp, Oryza sativa
  Clone ID: PAT_MRT4530_17212C.1
atggctaatattgttctgacgatcctccacttgatctccacaactgtaggagggttgttccgtcatgacagcaccactggtgcagccagtgtcgagttctgggtggcggcggcgacaacgctgctgctgatcaagttcgccgtcgattccatcggcccccgcttctcctcccagaagtacatcaaccctgctgtccagctcctgcggatactgaaccattatgctgtgagctacaccctggggctcatgccgccgtcgtcctcccatcaaggtaccgtggcgaacgccttcttcaaggtgtgggccgtcctcatcgtcaccatgcaggacagcatccgcatcggccggccgtaccagcccaaggagatgaccctcgtcgacatgctcacctcgctgtggtcggccaaccagcttcgggcgaagacggcgatacacctcagggtgcctctctggctcatgtggtccatccacgcctcgcgcatcgtctggtactacatcacctccagcgcggctgccagagctagagatgatgacatgaagcttgtcagtgactacatggcgatgccgacgcagcacacgtccaacgatgccaacccggccaccatggcggggtacaagtacatcgttctcggggaggagaagctgaagcagcagataaaggtcgaaccacccagcttcacacagacgcaacttgcgcaggaggaggtcatcactgtggagaaggtctggagccaagggagcagcgatgccctgctcggtgaggccggcgacagcagcaaccggttcaaggacgtgtgcctctccttcgccctgtacaagctgctgcgccgtcggttcttcaacttccccatacatgaggccagccatgcaggcacccggcagctcgttgtggacgccatcctagatgacaagaagggctacgagagggcgttccgtgtgacggaggtagagctgtccttcctccaggacttcttctacagcaagcacgctgatgtcttcgccagtggcttcccttgcgtgaggttgctgctatcgcttctgatgacagcagctgcctcatacctggcctacgcagtgcatgatatgcctagtgttagcacaggcctcactgccaagggccgcctcgctaggatcagccatggagtgttcgtcacccactgcatcatcgccatacttgtcattagagagctctgggagattatcgtgcacgtcttctcgcagtggaccaatgtcttgatcatctgcagctacatcaggttgcgaggacgtcaaggctgctggatccaggggctgcggctttggatgatggagaaggtggcgaggatcatgttctggctcatcgggaggggacgaagccgacgggaccgcaatattcgccagtgcaacctagtgatgtcggctcggactggaagcatagcccgcgttacaagagttatctttaggacgaggagttcaccagaggagttggcgcagaaaaagaacgagctattgcggtcttaccttgggaatgccttcgccgacatcgaacaccttgtcagtcagatcgagcatatccaaagagagatcaagggcgagggcgagacccacaagattctagcctggcacatcgccaccagcctctgccagatcaaactactggaacaacaagccaccggtcgctggcgagacgacctgtataacctcactctgcccgagggcggtggtgatggtgaactcgcagatgtgtggccgcattatgtcaccgccgtcaccctgtccaactaccgtgcgtacctggtcaggcaggcactggtgccggacaatggcctcgtcgcctacaaggtcctccatgaagtgaggagggaggccgcacaatccatgcgcgggtgcaacgcgatgcaagggcttccgcatcagctcatcctaaactccaacaggccgcggtgcaatggggacgacggtgagagggcatcattgacattggcgcgctgctatcggaggagctcgtggcggcgttcggtggcggcgccgaggtcgagctatggaagaggctgggcaagttctgggcgggtttcctgctgcacctgtcggcatcgacgagggcggcgaagcatcagccatggcgatcaaatgctcgacccggctgacctcaccaactcctaa

SEQ ID NO: 10942 - DNA, 378 bp, Oryza sativa
  Clone ID: PAT_MRT4530_17213C.1
atgacgacggcgacgacgcggcagaggactccgctccagctgcaccagccggcatgtgtggaggcaattccagcgacctcaatgccggacgcgcttcgatgccgccgctgggttgttgacgtgcggcaccgagtcgacaaccatgggcaggccggcggtgactacggggctcgggtggtgcaccgtaatgtggagttggtgaggaggcggaggtggcgacggcggcggtggcaagggcgggtgctgatgaatccccgtccctggggagccgaagaagacgagctgcctcgccggcacagcggggttgatgttgcggaagtcgaagccctggcgaaagcggtgatgctcgtagagcgtggcggcggcgcggcggcatga

SEQ ID NO: 10943 - DNA, 377 bp, Oryza sativa
  Clone ID: PAT_MRT4530_17214C.1
gcggcgcgccagccaatgaccataaacccgtcccagtcccagcgatggatcagcgcaagggcagtggaagcgacgccaacggcggactggcggaggcgacggagtataggctgatgttctagtactattgctagggtttggatgatgacctaccctggtgttaagtcgcattacaatgaagccgtagaccgaccgctgggttaattccttgtgaccaatactggcattattgtccttgctgagggtagttttatgaatcttgggtgcgctactggtcaccccaggtttgtcatgttttgcttatttactaaccaggttattgcttagcttgagcttgtgaaggagaagagtactgctaagtaccttaagaaggtgta

SEQ ID NO: 10944 - DNA, 1443 bp, Oryza sativa
  Clone ID: PAT_MRT4530_17215C.1
atggagcaggagcaggatgaagaggaggaggaggcggaggcctcgccccgcgagatccccttcatgacgtcggcggcggcggcggccaccgcctcatcgtcctccccgacatcggtctccccttccgccaccgcttccgcggcggcgtccacgtcggcgtcgggctctcccttccggtcgagcgacggtgcgggagcgtcggggagtggcggcggcggtggcggcgaggacgtggaggtgatcgagaaggagcacatgttcgacaaggtggtgacgccgagcgacgtggggaagctgaaccggctggtgatcccgaagcagcacgccgagaagtacttcccgctggactcggcggcgaacgagaagggccttctcctcagcttcgaggaccgaaccggcaagctatggcgcttccgctactcctactggaacagcagccagagctacgtcatgaccaagggttggagccgcttcgtcaaggagaagcgcctcgacgccggggacaccgtctccttctgccgcggcgccgccgaggccacccgcgaccgcctcttcatcgactggaagcgccgcgccgacgtccgcgacccgcaccgcttccagcgcctaccgctccccatgacctcgccctacggcccgtggggcgcggcgcgggggcgttcttcatgccggcccgccacgctcttcgagcatcaccgctttcgccagggcttcgacttccgcaacatcaaccccgctgtgccggcgaggcagctcgtcttcttcggctccccagggacggggattcatcagcacccgcccttgccaccgccgccgtcgccacctccgcctcctcaccaactccacattacggtgcaccacccgagccccgtagtcaccgccggcctgcccatggttgtcgactcggtgccgcacgtcaacaacccagcggcggcatcgaagcgcgtccggctgttcggagtcaacctcgataacccacatccggacggcggccagtcgtcgagcggccacgacgccaatgcattgtcgctacggatgcccgggtggcaaaggcctgcaccattgaggtcgctggaattgcctccacacatgccggctggtgcagctggagcggagtcctctgccgcgtcgtcgccgtcgtcatcgtcgtcatccaagagagaggcgcactcctcgttggatctcgatctgtgaaggagggatcaggccacctcgatcgatcgggagcgtaccaaaggaaagttcaaaaaatccatcttccgtctgctgccttcttctacttctccaccttttgcaattctccatcataactttgatcatagagttagcataacttttggtttccttttttgtttttggccattcacattcttatgtttgtttgagaatatatagagaaaaattaggcgaattaatgaattattaatgtttttatttgggttt

SEQ ID NO: 10945 - DNA, 688 bp, Oryza sativa
  unsure (1)..(688): unsure at all n locations
  Clone ID: PAT_MRT4530_17216C.1
tttgccgcctgtgcgcggcgccttgggaacgatgnacagggggggtatgtcactcctcataaggcnttcctgggtatacggtgcagatctgccacacgcctcaggcgtgtncncggcacccacatctgagccnctncatgggtggccagacacacggtctttttcgtgatgacacggtaactacgcccnctgacaccgcgtgtggatagagtgtcgtgagtctgtcagacacgtcacacnggtgctctgcncggggtctgagcgctcagacacgtgtcagagtggtgctccgggtcggagtgctctgtgttttcgtgtcacactggtccaaatgtgcgagatttcgaagnccgaancgcccacagtgagaaggagaaaaatttggggactctgccccgatggtgggaaatngctgngtgtctggngatgtctgaaaattgtctggaaaaactgtgtgccccacgacccacggttntctgatacacacggccanttagtgactgtgagcgtggtggacgtggcactgcgtgtccacgaatggtgtgtttggtggctttttttctttgtgtttaaactggaaccgattccggggaaaatgttacggacaacactgtctaaatgtatttggttttgggaaatttacggataccgcnatggtgttctcccccaaaaaaaaaaaaaaaaaaaa

SEQ ID NO: 10946 - DNA, 672 bp, Oryza sativa
  Clone ID: PAT_MRT4530_17217C.1
atgcgcgtgcccgaaggcccgtacatcgaagcaccacagtcgacgagggaagaaaagaaagagggaggggaattagacttcgcgggcggcttgagcgcggcccgagaggtgttggcgcggcccggccttgccattgggccggccggcctgagggacggcccaagggggctcgcggggaggggaggagagagggagccggtgggccgggtccaccttgcgtggtcccggggtggtcaagggagcgagctagcactcggcggtcgcggccaaatcggcgacagggggggtgacgccggcgatgggaggaaaaagaagaaaggaagagggaaagggggcttgcctccttgcttctttgggaaaagaaggagggagagagagcgacgcggcagagggaggaggggctctgcctccgtcccttggaagctagcgcgcggtggtggcgaggccaggttgatgacgacggcgatgacggcggaccgacgcagggcaggcgcggcaggtgctgacgacggcggcgactggccggtcggccaccacggtgtgcgcgcgcgggaagcaacgggcggcgcggcgatttgggcggcgtcggcgggaagcggtagcgagggcggagggcactcggctcgcgcggctcacgcgcacgcgcgcgcggcgcatgggcagagcgaggga

SEQ ID NO: 10947 - DNA, 287 bp, Oryza sativa
  Clone ID: PAT_MRT4530_17218C.1
tcgccactcggtcggtgacaggagagaggcatgctggacgctctgtgcctcaattggcgccagctataacgaggcaccatgatgtctctggagacatgctgagcaatataaagggctctatggcaggaaatgctctgaacgaagatggacacgagcacctgggcatagatcaaacatacgtggaccaaggggttgatttgtgatcaaacatacaggctgctgcatgtttactgtgactacaagacctttgcgcatactatgtgcacagtgtgataagattcttgaca

SEQ ID NO: 10948 - DNA, 412 bp, Oryza sativa
  Clone ID: PAT_MRT4530_17219C.1
acaacagtttaacgaaatcatgtacactctagcgtgcatgacatatcgatcatcatcggctagataggctgtcttcttggcctcggagctagaagcggccatggacagccatgatgctcgcgcatatgggcaaggccagcatgaggcgcatgtggcagccaatcatcaaacctcagcgcagagacaggccaggtaacacttcaccccgggtagtctaccttgagagcaccgacccagactacatctaaccaattgtcaggcgatgcggcacgcttgctctgaggatacaatgctgacagcagatcaatgtcatgagcaggctgtgcgcaccatgctgcattctatcatgcatgaggagctactagaagatcattccgatgccgatccagcaggtcaggcccaggcccaggtg

SEQ ID NO: 10949 - DNA, 5115 bp, Oryza sativa
  Clone ID: PAT_MRT4530_1721C.1
atggaccaataccgaccactggtcgaagatctcaaactgctgtggaagaaagaaggcgtcctccccgtgtgggatgaggacaaacaggggatgctggtagcggcgagcgtcagcctcgtggacatcgagcaacctctgagtttcgatggcgtggggacgacgcgcatcgagggcttggtggaggcggcgggctcggcgagggaggttgatggtggcgaaagaggagttggcggtggaagcgggctcggtggagagtgtcgccggtcggtggagacgccggtcgggcaggtggcgtcgggcgtcggagaggaggaagcgacgacaacgaggaaggacgttaccgggctcgcggcgccgggctcggtggaggcggcggcctcgggctcagcgaggaaggcggcggcgccgggctcggtggagggcgtcgccggggacccccggtgtctcctctacccgccgccaccctcgctttcgcctctcgtcgtcggaaacgccctagcgccgtgtgccctagcgccgccgtcgccgccgtcgctccagccgtccttcgccgccgttccggtcgtcgccgtcgctcgggaagaccgtcgtcgtggtcgccaagtcgtcgccgtcctcgtccgccccttcgccgtcgctgtagaccgccggagcaccgtcgccgtcgtcaagccgaagagcgccgccgcttcttcttcgttgccgtcgccgtccgttcctcttccgccgctcttttggtcaccgcgctgccgttcgccggcgagcgtgcgccgtccgagccgccgagccgccgccgccggtggtgacgtcaccgctgacgtcatcgtcgccctctcccggggtgattatgatccaggaaaggtgcgctgcagtggattgtgttatgcaaggggtattgtcacaactcctttccgaggtaccgtggtgatgccgcgctacaagcctgagtacttgtttggtgttgagggttttgtccaggagttgagtacgatgtcctttgtcattggatttgggactgcccctttttatgctcagattcctcatgatcgtcatgaagagaagtgccgagtcaaagtcactttgaacagtaatagtgaagatatcccctcagtgatgttcgaagctggaggaagaaactacatccatgcatgtcaggaggtggcaaggatcgccataggagagctccgtgatcgctacagtgatcagttggccgacactgagtatcgctaccatcctcgccaaccacagggaagtgaccgtggcagctaccttgagactgaaggaattgagaatgatgctaccacaaggcatttggtcgagatgctgtgggctatggatgaaagtcgtgcggagactgtgttagcggctcaagatcgtgaagaccggaatcgtggtaagatttgcaagttagaagacaaggtggatcgtttggagagggaactagctgcattgaagggagaagcaccgccgcagaaggctaggattcgtctcaccgcaaggaagagagctctatttgtccctcgctatcaattggcgccaaaggttcgtgtggtggagaaagaagttgccccaaccctagcagatcctccggtcatcatcataagtgatgatgaagaagaagaatccaagcgcaaccattccaagattgagtgggaagctactcaagatgatgaagacgagccgaacgagccttcaatcgacctccgatgctcggaagaactagacaacgggaatggccccaacaacaacaataacaataacaatgaagggaacccaacccttgctcaagttcttgctcaacagactcagttaatgaacatgatgatgcagcaacttcagaatcagcagaaccaaggaaataaccatgcacctccccagaacaagttagcagaatttcttcgtgtgaggccgcctattttctctagtacctctaatcctgttgaagctggtgattggttgcatgccatagagaagaagttggatttgcttcagtgcactgatcaggagaaggtctcatttgcatcacatcagctgcatggccctgcttctgaatggtgggatcacttccgcctgaaccggactactgctgaacctatcacttggcttgaattcaccgctgctttccggaagacgcatataccatcgggagtggtgtctctcaagaagaaggagttcaggtcgctcacccagggatctcgctctgttacggagtatttgcacgagttcaatcgtctggctcgttatgctccggaagatgtgcgcaatgatgaagagcgtcaagagaagttcttggaaggacttaatgatgagctttcttacccactcatgactggagattattctgatttccagaagttggtggataaggctattcgtcaggaggacaaaaacaaccgcatggagcagaagaaacgccggattgctcaattcaagacacaacaggggaataatcagaagccgcgtcttactttaggaccccagaccatgccacatggaggttcttcatctgttgtacgtccgcagcgtcagttcttcaacaacaatgctggcaacaacatctgcaatcaagctccacgtcctgttgcagctccaacacagcaacaaccttccaagagggagcaaggcagcaaacccgtggtgtgtttcaactgtggagacctaggacattacgctgacaagtgtccgaagccccgacgtgtgaaggttgtccctacccagagcaactctaccgtaccagcgtcaaaggctcgtgtcaatcatgtcgctgctgcagaagctcaagatgctccagatgtgattttggtccgggagtatcccgatgtgttcccagatgatttacctgccaatgaattggcagaagtcaagaggcaagtagatgatttgcttcagaaaggatacatcagaccaagtttgtcaccatggggagctccggttatttttgtggaaaagaaagaccatacccagagaatgtgtgtggactatcgtgcactaaatgatgtgactatcaagaataagtatccactacccagaattgatgatttgtttgatcagcttaaaggtgccactgttttctccaagatagatcttcgatcaggatatcaccaattgagaatcaaagaggaagatatacctaagacagcttttaccactaggtatgggttgttcgaatgtactgttatgtcttttggacttaccaatgcccctgctttcttcatgaacttgatgaataaggtgtttatggaatacctagacaagttcgtggtggtctttattgatgatattcttatctactctcgaaccaaagaagagcatgaagaacatcttcgccttgcattggagaagttacgagaacatcaactatatgctaagtttagcaagtgtgaattctggttgtctgaagtgaagttccttggtcacgtcatctcagccggtggagttgccgttgatcctagtaatgtggaatccgtaaccaactggaaacaaccaaagacagtttcagagattcgcagtttcctaggcctcgcaggatattaccggaggtttatagagaatttttccaagattgctaagcccatgacacggctgcttcagaaagatgtgaagtacaagtggtcggaagaatgtgagcagagttttcaagagttgaagaatcgcttgatatcagctcctattttgattttgcctgatccaaagaagggtttccaggtgtattgtgatgcatccaaacttgggttaagttgtgttctgatgcaagatgggaagccgtccttcgccgccgttccggtcgtcgccgtcgctcgggaagaccgtcgtcgtggtcgccaagtcgtcgccgtcctcgtccgccccttcgccgtcactgtagaccgccggagcaccgtcgccgtcgtcaagccgaagagcgccgccgcttcttcttcgttgccgtcgccgtccgttcctcttccgccgctcttttggtcaccgcgctgccgttcgccggcgagcgtgcaccgtccgagccgccgagccgccgccgccggtggtgacgtcaccgctgacgtcatcgtcgccctctcccgtgagccggcgggcccgcccgccgccctcgctgacgggtgggtcccacctgtcatctccctcctcgcgccgcgccgccgcccgcccgtgccccccgcgattccctctcccgtttcccccgttttcccctctctctctccctcggattcgtccggattcatcccgcaatcgtcgccggcgtcttcaatggcggccgagatctccgcgccggtttccttcctctccggccgcgctctccccctctcggcgctatatatttgctccccgtgcttcgctcttccgtttccgccgctcgccgctcgctctccccgtcggattcgtgctcgcgccgtcttcctctctctccgccgtcgccgacgagctccggttcgccgccgacgtcgctccgcgcttcctcccgactcggcgccacctccgtcggcttcgccgcgtcgccgccgaccccgtccacccctccgcttcgctcgccgaccgccggagcaccgtcgccctcgccgtcccgaaccgcgccgccgcgttcctccgctccgttcgtcgtctccgccgtcctcgtgtctcggggtgagccgtggaccgtccctttcgcttccctctcctctccgctctctcgggcgccgctccgccgcgccggtggtcgccggcggtgaccatcggggcgcggtcgtgccgcctcccgtcggccgtgccggcgaggccgccttcgggcgcgccctcgcggctgccaagtgggcccggccgtcagccgcccgcgcccgcgggtgcggctgacgcgtgggacccacggcgccgaccgccgccagccgcgtgctcccggtccaccgtggaccgagaggctgacgcgtgggccccactcccgtggacccggtccgcgcgccctctccctcggctccacttctgccggaggcaggcgcgtcgtgggaacgtggctgtcgcctcggccctcggggccggggcaggagtcacccgaccccccctcggggaaatcaggaggagggcggacacctcaccctcgggcccgacgtccccgaaggtgccaggccacgtgggcgattgtgt

SEQ ID NO: 10950 - DNA, 222 bp, Oryza sativa
  Clone ID: PAT_MRT4530_17220C.1
gctgaccaccaggtgttgcaaatccaggcaacacattcattgagccttgctgctgaatcggctgaacgacctactgtctcaacggcgtctgctgaatcggctgtaaagccagtcgccttgctggcgtctgctgaactgccgacgacggcgctgcaggtgctggagctgatgctggtgccatcggctgagctgatgatgcaacaggaggaattccctgagtaa

SEQ ID NO: 10951 - DNA, 402 bp, Oryza sativa
  Clone ID: PAT_MRT4530_17221C.1
atggctggccggcggcgagcgaggacgacgtcgatcggacggttgatgagaggatcttgcaagatctcgatcgcgagattgatggctgtcagtgtgtggattgtgtactgccgtaagaagcggctagtggtgaattttggtggtgtcatctctggtgggattgttgctttgtttcggccatggacaatgcgccacgctggcgagtaccttcgtaggatccacgtagcccgtggaggagagagggccgtgtcttcgcgcggggtgctcatgccttctatgagacacgagtgccctgctttggaagatgcccaggcgcatgacaccatgggggattggcgatggccctcctcgatcgtcccggcatgcttcaccctcgacacctcgcactatctgtcgcgctga

SEQ ID NO: 10952 - DNA, 258 bp, Oryza sativa
  Clone ID: PAT_MRT4530_17222C.1
atggagctcctcttcaccgcgctagatctggtgggctgcgtcatccccaggtcattgccgcrtctctctccctccgtccctcaccgtccaccaagccagcaacctgatcaggtaggctgcgccgtccccaggtcaccgccacctctctctctccctccacctgtcaccgtcctattgagttgtgatccaaattcatttgcacttaataaaggtgcttatgccatagtggagcggaggctgaagctggcccattgggcc

SEQ ID NO: 10953 - DNA, 1128 bp, Oryza sativa
  Clone ID: PAT_MRT4530_17223C.1
ccgcggggcgcgcccgaaagcggcctcgccggcacagtcgacgggaggtggcgcgcccgcgcccctatggtcgctggcggcggccataggcacggcggagcggcggccgagagaggggagggaagggggaaacgaaatgggcggtccacggctcaccccgggtcgacggcgacgacgggaacggcgaccggaacggaggaaggcagcggcgcggcacgggttgacggggacggcggcgttccgacggtcggcgggcgaaacggaggggtggacgaggtcggcgaggttgcggcgaacccgaagaaggcaacgtcgaagcgggagaaggtcccggggcgacgacagcgggttgggagggggagagagcggccggatgtgggggaatcggccgcggaagatccggccgccattgatgcgccggcgaggtttagggggaaaccggcggcggcgctagggcacaggcgaggcggcgggagcggcgggaggaaggggatgacgggacgtgacaaaccaccactgtcaccgtcgtcggccagcctgagtaatgttaaggaaaagatccagaagctcggtttgactgacgtccatgaaggaaacgttgtgcccattgatccagagaagttcactcccgaacagaaggaagacttcaatgcaatgatgcaacaagcacaagatcaatttttaagttcattcatgcagactcgcaagggcacatttgttcagaagtacaaggtgaaggtggttcttgaggatcctgggatcggttcttctaaagagggagaaaagaaacaagttccagacggatcagcccagccgagtgacaaaggcgttacagatgggtcgacccaggagaaccagggtgactacttccatggagtacatggagttcaagccgatggcaccagcatcagctccagcacctgcagcgccgtcgtcggctccaggccaattaatcaatcgtcaattattgctcagcagcagccgattcagcaaacaccgcccaggcaacaggttgtgcagcctattcaacaaacatctccaatccagcaggtcgtgcaaccagttcagcagacgccagcaaggcgactggctttacagccgattcagcagacgccgttgagacagtag

SEQ ID NO: 10954 - DNA, 672 bp, Oryza sativa
  Clone ID: PAT_MRT4530_17224C.1
atgaatttatcaggacgtgacaaaccaccactgtcaccgtcgtcggccagcctgagtaatgttaaggaaaagatccagaagctcggtttgactgacgtccatgaaggaaacgttgtgcccattgatccagagaagttcactcccgaacagaaggaagacttcaatgcaatgatgcaacaagcacaagatcaatttttaagttcattcatgcagactcgcaagggcacatttgttcagaagtacaaggtgaaggtggttcttgaggatcctgggatcggttcttctaaagagggagaaaagaaacaagttccagacggatcagcccagccgagtgacaaaggcgttacagatgggtcgacccaggagaaccagggtgactacttccatggagtacatggagttcaagggaattcctcctgttgcatcatcagctcagccgatggcaccagcatcagctccagcacctgcagcgccgtcgtcggctccaggccaattaatcaatcgtcaattattgctcagcagcagccgattcagcaaacaccgcccaggcaacaggttgtgcagcctattcaacaaacatctccaatccagcaggtcgtgcaaccagttcagcagacgccagcaaggcgactggctttacagccgattcagcagacgccgttgagacagtag

SEQ ID NO: 10955 - DNA, 558 bp, Oryza sativa
  Clone ID: PAT_MRT4530_17225C.1
caaggtcatattggtgtccatgtctgccaaagttcttgggtacaaggactgccacagttctgttcctggctgctacgacagggatgatgcagtttctgttaagatgcactcttatatccaaatatatgcatctggagatgattagccagagtttcaagaagattcgtatatatatccctgaagaatgttttctggtgagaactgatgaacgacaaaaggtttaatttgctgatgacttaatgagactaataacaaggattatcatggatgaattagctctaactgcaaaagggatgaagaaatatatgcataaaacattctataagcctctgttgccatttgcctcacgagatccaaataatcccatatgtagggcccgatttattcgagttgtgcgctgagatcgatccatgcttgctactagtagttgtgaacccaacatcaattattttgacgtgacaaatcccttttaatgtttttcatgtctcaagtcatgtttactttcataaacagagtaacaataattcaagtgtgcctgtacatgaacacatgcgcttc

SEQ ID NO: 10956 - DNA, 228 bp, Oryza sativa
  Clone ID: PAT_MRT4530_17226C.1
atggcgagagttctggcggggaagacgaagtggcgcttggatcacgttatcgcgatcggcgattcgaaggcgacgacggcgcgacccatcggctattcgaaggtcacggcgtctgctgatgcccatgctacgatcaagacgacgctgagcgtcgtccggaactggaacatcgactatgctgcaggcaagtccttccttcttccgattttcttgatttgctttttctag

SEQ ID NO: 10957 - DNA, 798 bp, Oryza sativa
  Clone ID: PAT_MRT4530_17227C.1
atgtcaaattatcagatggatgtggaacaaaacctcgatatagatatcacgaatagagggtggctggcagacgcacacggcggcggcctactgctgctgctggccaacgccgccggcgacgttattcctgggtcgcttcctccggggcgcggaggcggaggagttgtcgttctcgggcgaggaggaggagctcccggcggcggcgccgacgttgccgtagaggccggccatgtcgcggtcggtgaaggcggcgggcacggcggagagcgcgtggagggagtcgccgcggaggacggtgtcggcggcggcctggcagaggtcccagtttcccgtccacatgagctcgatggcgccgctcagcgacggggatggcgccggccggggcgcccacgcggccgccgcgcactcatcttcctccgcgtcagcctcctgctctagctcggcctcgtcggccgcggacgccgccgcacgcctctccttctctagttcctccagcgcgacctcgctccgtctcccctcggccacaagctcgtcttcctccgcgtcggcctcctgctcgagctcggccgcccgccggcaactcctccccccaccgccgccgcgtcgcccgtagccgccatcaccgccgacgccgccgaggcaccgcgggcctttggtgtactttttccttctcttccccaggaccacattctcagaaggcctatggaccgcagcctgaggcctgccaagttcacgagggaagtagtcagctagcatagctgcgataccaagcaggctcctggctggggaagacgccat

SEQ ID NO: 10958 - DNA, 282 bp, Oryza sativa
  Clone ID: PAT_MRT4530_17228C.1
atgccactgctacttgttcctaatcttagtgcttgctccgccaccgtgccgctcactccgccgctgtccccaccactcctgatgctgctcgcgctgccgccgcgccgctcctgctgcagccgccacttgctgccgctgcgctgttgctgttgccgctgccgccgccgctgcgctgctgctgctgctaccacagccgccgccgccgctgctacagctgccgccaccgagccgtgtcgcgccgtcgctgatgcggccaccgccgccgccgacgcgccgcgctga

SEQ ID NO: 10959 - DNA, 1551 bp, Oryza sativa
  Clone ID: PAT_MRT4530_17229C.1
atggcgcacgcggcgttcgacgccgaggccggcgcggccgccaagccgcccgccgccgacgccggcgccgccttcgtgctcgagtccaaaggtaggtcacacccctccaccccccgcccgccttccgcgcgcaatgcgagggctgattctgctgtgatctgtggttgggtcccgtcgcggggcgaccttgcagggacgtggtggcacgccgggttccacctgacgacggcgatcgtggggccgacggtgctgacgctgccgtacgcgctgcgcgggatggggtgggcgctgggactcaccgtgctcaccgccgtcggcgccgtcaccttctacgagtactccctcatgtcccgcgtcctcgagcactgcgaggcccgcggccgccgccacatccgcttccgcgagctcgccgccgacgtcctcggtattactattaactcccctgatccattcctttccactgcaccccatcaccacacgcacatgacattcccgtgtattgccccatggtccgggtggatgttttacttcgtggtcatcgtgcagacggccatcaacaccggcgttagcatcggcaccatcctgctcgccgccgattgcctcgagatcatgtatacgagcctttctcccaatggtcccctgaaactgtaccacttcatcatcatagtagctgtggcgctggccttcctctcccagctaccatcattccattccctgcggcacattaactttgcctctctgctcttgagcttgggctacaccatccttgtatctgctgcttgcattggtgcaggtctgtcaaaagatgctccggggaaggattacacgcttagctcgtccaaatcagaacagaccttcaatgccttcctctctatttctatcctggcttctgtttacggcaacggcatactgcctgaaatccaggccacgttggcgccaccggcggccgggaagatgatgaaggcgcttgtgctgtgctactccgtcatagccttcgccttctacatcccttcgatcaccggctactgggcgttcggcagccacgtccagtccaacgtcctcaagagcctcatgccggacaccggcccggccctcgccccgacgtggctgctcggcctcgccgtcctcttcgtcctcctccagctcctcgccatcggcctcgtctactcccaggtggcgtacgagatcatggagaagagctccgcggacgcgacgcgggggaagttctcgcggcggaacgtggtgccccggctgctcctgcggacgctctacctcgccttctgcgcgttcatggcggccatgctgcccttcttcggcgacatcgtcggcgtggtcggcgccgtggggttcatcccgctcgacttcgtcctccccgtcgtcatgtacaacatcgcgctcgcgccgcccaggcggtcgccgatgttcctcgccaacacggccatcatggtcgtcttctccggcgtcggggccatcggcgcattcgcctccatacggaagctcgtgctcgacgctggacagtttaagctcttcagcaacaacgtcgtggactaa

SEQ ID NO: 10960 - DNA, 300 bp, Oryza sativa
  unsure (1)..(300): unsure at all n locations
  Clone ID: PAT_MRT4530_1722C.1
atggcggccgagatctccgcgccgtcgcagacgagttccgggtcgccgnccgcggtcgctcagnacttcctcccctctcggggtcgcctccttgggtttcgccgagtagtcgtcgacacagtccgctcctccgtttcgctcgccgaccgtcggagcgccgtcgtccttgtcgtcccgaaccgcaccgccgccttcctccgcttcggccgccgttcccgtagtctccgtcgaccgggtcttgctcaatttttcccaagcccagaagaggagctccttgaagatgaaggctttggtgtctag

SEQ ID NO: 10961 - DNA, 349 bp, Oryza sativa
  Clone ID: PAT_MRT4530_17230C.1
caaatgccatagccattgattttcacggggaatcgagtagtaacacagggggatggatggatggatgatggtgaagtaaaatgcgccagctactgtaccagtacaacaccattgcgacatggcactctgcatctgcacaagcagaagcagaagcagagccaagctgcaaggtgacacgacaatcttaggacactcagctcactgatcagctcagctgagatcattacagcaacacaaagaagaagaagaaaaaaggagtaaaaaaaagttacacaaaaagggtaaaaaaacacttgactttcacttggagaggaagaagttgcaggatcattagtccctaacttaaaaa

SEQ ID NO: 10962 - DNA, 279 bp, Oryza sativa
  Clone ID: PAT_MRT4530_17231C.1
aaaattaaccaaactttgatttttaacaacaaaaacaatggccggcgaatggccggggatcgatggccggcgctgctacgggcggatggagtaggggagatgacccccccgcgcgctcgatcgatcgatggatcgatcgatctcacacatgccccttgggtgccacgccggcggccccggtgagagacccggcaacgttggcgggggttccaattccagccccaactccagccccgggggtgccgggggctatggccccaaccccaggggggccctttt

SEQ ID NO: 10963 - DNA, 150 bp, Oryza sativa
  Clone ID: PAT_MRT4530_17232C.1
atgcgtgttgaggaggtcgccggagagagaaaggacgggatctgtttaagcggtgaaaacggaaatcacgacgtgaagattctttggggcaacggtgaagatcagattgaagtgggatccaaaatgaagatcgttgcggaaacagagtaa

SEQ ID NO: 10964 - DNA, 1362 bp, Oryza sativa
  Clone ID: PAT_MRT4530_17233C.1
atgggcactgggcttcttctgtggtgtctgcattgtgtacctgtttggtgttgctctcccacctatccaaatcctgatgatccgatcggtggagctacagaaacagatgacttatctgttttacaagaaaagatagaaatagccaccaatagcaaggacatcaatgaagctgataaaatgcatttgtataatgcttggagcactttactggatacgaccagtgatgaagttatgaaaagttcagacgtgccgcggccgcctcatctggagaattgcaggcttaaatgggaaagaaataagaaatttgacagttatagcgacaacggcgtatttcctccttggacattatggaaagggtcacttggtcttgagttattcaaccagaactattcagattcagaagagtggaggcaaatgtttttcagtgatccaagcttgaggtttctctatgcagactgggagaggctaccgggatttggtataggtgcgcaactcgctggaatgtcgggacttcttgctattgctataaaagagagaaggattctagttgcaggatactacaaccgtgctgatcacaatggttgtaaaggcctagcaagatctagctggtcatgctactttttacctgaaacatctgcagactgccagaaacgtgctttagatctcatgcaaagcaaagattctagggaaaatggaattataaaagttaaggaaaactatacctccaagcaaatatgggctgggcatatacctaggatatgggggagaccatggaaatatatgcaaccgacaacagagatagatgggagattggttaaaaatcattgtaaaatggatcggagatggtggattgcacaggccctgagatacctaatgaggttccagtcagagtacatgtgcagattactgaatgtggctagacattcagcatttggcatgcaggcagcaaagatggttcttgaaaatgtcccagatccaccaaagcctagcattagcagaacagaatctgacattgagcgacttgtgtggtcggagcataaaccatatatacccgggcctcttatcagtatgcatgaagttatcgacgaaacaaaattatatcccaaatggaatttctatttcacaaatgtgacgcgccaagatgtcaatgtgagcatggcaatgtatgaggccagcctgggccgtgtgaccagcacaaactatccccttgtcaatttcatcatggccactgaagcagatttcttcattggagccctgggatcaacctggtgctacctcatcgacggcatgcggaacaccgcaggaaaggtgatgtctggctatctgtcggtgaacaaggaccggttctgctcctctgaatag

SEQ ID NO: 10965 - DNA, 2857 bp, Oryza sativa
  Clone ID: PAT_MRT4530_17234C.1
ctctaacttcaactcattctccctcaatgcagttaaccgacactgaagacttgaaacatttggttatatgtagtctgtaaatgtcatctagagtatgtactaatcatcataaaaatcccaaagcagaaaaaagaatgatgatgagagaagctcaaaaacatttttctcacgcctggatggatgggtggatttggatgttctaaaacggggataatcaccagtcttggtgaccactgtttgcaacccaatgtctcttgtgtgactggcatgtatcattaaaaacgggtcagtcatcttattgcggtggttcaggggcgtcgtcgtcgaactcgttcatgtggtccaagagatagtttgcggccaacagctcatccttgttgcacgcgaagaatacctccaggaccagatcgcgatcaaaccccatttgttccagacgttgtatggcttcgttctcctcaggtgtgacagccactgtttgaggcattcccgcagcaaactggtctagcaagttcccttcagctccctctgcaggttcgttgattaagcgcaggaactcagcctggttttcctgaatcagttgcaaaatctgtggattttgtttccccaactcttgaagcaaaggctgcagaatttgagggttagcctgcaccaaagaaagcaagccacggaactgtgaattgtttcgcagaacatcaagatttccaccaccagcatttgcagaagcatttggaaggacctgaggaaacaggtccaatggattggcattgggtccagatgatggaattgaaagttgagctgattggggagcctggcttgggtcaactggttgaactgcagcagggacaggaaatgcttgaactgcagcagggacagaaagtgcttgaactacggcagaggcctcagcttgcccaggaagcccagtatacaaatactccacagcccgttctggattgttgtatgcagctcccagagcacgcataacagtgtcacggtcccaagctcctccacccatttcaagaattgactgaacagtcccttctaaattgcttccagcaacaaggttcgacgcagctagaccatagatatctgcttcggtgagcatggcagtggtaggccaccaatatccagttgctccacggccattctgaaggcttgttataaattgtgttttcatataatgttccaaagcaaaattttccttgcttttgccatctaatgcattctggtctggcagccttagtgccttgccttgcatggtcacctgacttaaaatcaggtgcttgcagttgttgttgcaagtagttatctgaagattgcaaggtgagactgacaatggtggccagcaagcagctccactcgcagcgatgtggcggccactgccagctctgatattccatatgattcctttcatttttttctttttggtatttttccctggtttccttttgttcaccctaggagtgaccttgacaattgcaaggtttcctttcttgtttttctttttaccctcaccagattgtgaatgtaacaataaagattctgcccaatccagttcagaattgttgctttcacagtctgtttcatcaagaaagttaaataaatcatcctgaaagttgtcatctccttttttattttcaattggttcatcttttcctaccttttgttgttctttcaagaagagtttcactctagcctcctctaggtcatttatcaatttcatatttgtatccaccgcctcaattgaacatccaagactaactcctattagattagctagatcttccttaatggacctcatttgctggttttgtcccacttttatcataggtaaggattcatccttactttcaacagccataatttccttattagaactctctcctcttgtctccaagcctcttttgagcaccttgtgttgttccttctcttccttctcttgaattgccatggctatctccctgtcttgcatgatctgtattgctttctttttgtcctccttagctaacaactcaatcttagcaggggtgtagtactgaatctgggaactttcccccctgcccttgtccttccctaaacttgcctctgcttcctgtgtctcttttccttccatctgtttgcctttgagccacccaacctccaccaccttctctagagtaaagattgcctcatacagtaaagcctcaggagtagatagcatcaatctgagaggtaattgctttaaatccatcatgccaattttcattctgacaacatccttggaagtgatagttggcatatccacttccatcaccactcctagattagaacccacctcaaacaaggcttgatatcctttcatctcatctggtattccttcttcttctaactgggtttcagatatgtcacctccataaatcaccttaaccattgccataggattcatatgttccttaggtgggatagtcttaacattctctctccttgcatctaagacaaacaagcctttgattctgaaacattccagggggattctgatttggatttggagctggtgcttgaatcccttttggctgttctggagtccccctttccttcttctgttcttgctccttttccttggttgcactgggcgatactgttgagtttgtttctcagtgaccccttgctgacccccttttgaaccttcccccactgtgtcttccatacctcgagcttgttgcttccatggcggttgttgattctgactttgttgctgttgttgcatctgaagattttgccgttgaaatcccttatccccttcccatctccttccaccaccaccaaatccccccactgtgggttgcggagatctggtcgctgcagatttctccccctccat

SEQ ID NO: 10966 - DNA, 989 bp, Oryza sativa
  Clone ID: PAT_MRT4530_17235C.1
tatgcattctggggataaaaaatatatctcaagaatttaagctagataacatttctcaagtaccagaagaccctttgtacaataaatgatttcttcatgtgcattagatatgctcagcagcagccagcaagctatagaaagaaaatctcagtgttcacacttctttgaagggcataactacggtatttgtaacagacggtagatgttccactcactaaatcaacactacgtagaatcaaaaaacatagcttactaactaccttgcttttgccatctaatgcattctggtctggcagccttagtgccttgccttgcctgacaacaatcaattagtttgctactgctactcattcggactgaaaataaaagtagtttcaggtcactcacatggtcacctgacttaaaatcaggtgcttgcagttgttgttgcaagtagttatctgaagattgcaaggtgagactgacaatggtggccagcaagcagctccactcgcagcgatgtggcggccactgccagctgcaccaccaccggccggaggagatcgccggcgccgagagcaacgagagggacgggtcgagcggctgcggcggtgctggtccaaatggtcgtgctgatcctcgggtccggcgcggcgtcggaggctgaagatgacggcggcggccgctggcgctgctgctgcggctgttcctgtggtgccggcggaggggcagacgctggcgacggtctcctcccgatctgtgggccctctttttgggatctgggcaccgctgtctcctcccgatctgctcttccccgacctcgtggcgtcggatcgctgccgtcgtcatcgccacctccgcctcaaaccttgggatgctccggcgacgcggccacgccacagccggacgccgctgccgcctagccgccgcagccgcgcgcccgacgcgccgcctgaccgcctcgccgccgcttagaggctgctgatggttgcctcagcccggggatccac

SEQ ID NO: 10967 - DNA, 180 bp, Oryza sativa
  Clone ID: PAT_MRT4530_17236C.1
acctagagaacaagagactctagtgtagaaccacagaaaagaggttagtaagacacctatatatatagagtgtacctacactagaccagttataggacagtagttagataagagtataattagaacgtatactaacttgttacgatagagtagcacagttgacgttctgtctcgtacgac

SEQ ID NO: 10968 - DNA, 402 bp, Oryza sativa
  Clone ID: PAT_MRT4530_17237C.1
ggcggcgctctaaactagtggatccccgggctgcaggcacagataccagatcccttcaccttcgccttcgcctcaccaccaaaccctagagaagcgagagagagggagagatctccacgagattcgccgccatgaacgacctcatgaccaagtcgttcatgagctacgtcgacctgaagaaggcggcgatgaaggacctggaggcgggcggggatggcgtggagctccccgaggtgggcgtcaccgacgagcgcctcgaggggttcttccaggagacggaggcggtggaggaggagatggccgccatccgcgacgcgctggcgaggctcaacgccggcaacgaggagggcaagtcgctgcaccagcccgacgccctccgcgcgctccgcggccgcgtcaacg

SEQ ID NO: 10969 - DNA, 124 bp, Oryza sativa
  Clone ID: PAT_MRT4530_17238C.1
atgaggttgagatctgccctgctaagacagagctgcaaggggatgggccgcgtgataaagatgatggctgggaaggactggacaaagcttgctgtataccactcagctttgagcgcagacaccg

SEQ ID NO: 10970 - DNA, 1602 bp, Oryza sativa
  Clone ID: PAT_MRT4530_17239C.1
tttttttttttttttgctaattatagattatgtattgacttgtaagtaggaaaatttcagacggagtttgtaaggaattacacaacactctcttggtcctatgtactcccatatccccagtccactgaagaatcacatttcagaagcaattgaagtgcacgacaaggaacattatcatctgattttatacagacatgtctcaggtcgtaagacagcttgaaggcgatcgcggtgactaagtaacaaaaatgagattcttttttttttttttttttgatgtacgataagaacattcgtgtatccattggtcttcagttaatgccggacagacaagggcgaaggacagacatttggtatgcaacttcttgtccagcaatttaccacttccacaagaatatgaacgacatatatgcctaaatctcaaacctattccagtaataccgaataaatcgagttatgtagttctaaaataaggctgaaatatcacccgctgatgttgcctagccagaagagcatgggaaattgcacaaccgcgaggaaaagaagaaagtagtgattccggctggggtgtctctcatagctccttggtgcgcccagaagaaccctcttcatcgtcttgacaaggaaaactccggtgcagattgagaaccatggcagtacaaaataatatgacgggctccagaagacgcggacaagcattgcaagtgatgtaccagcaaatccatacccagcataggccacaatgtccagcaatggcgcttcaccacttcccagcgtgtacagtagaactctgatcaggattacttgcagaaaccagccaagtaatccttttgtgaactgtagagtgagtgcctctggggtaaacctcccaagaacacccaaagcatatccagcaattacaacatacgtcccaaaagccatcagaggaatgtaaagatctggagcattgatatcttgaattggaggtttgtatgacaaccttcctcccaccggttcagttatccttgtccagtgcccccggtgcaggaaagggaacaagatcaccttcaacttgtttctcacatactgactgttgacttgaaagtagtactgaggattggacagatactgagtgatattgctttgcataaactcagagcttgaacctaaaaacttctcgccgtatgctcctaacccacttcggatgagtccaggtccagctccatataaagcactttcaaaaggattagcttgtgaagtagcaggtctgcctcccagtcctcccagatcattgttcatcgctgccatgctaactgcggcggcgcaccggcgccgtcgcggcgccgctggggttcgggggcggcatggattaggggaggcagcgggcacaataatgcttgcctcttggggttgggaatgtaatgggaaaaatccaaaaaaacaaaagcaggaagaactattcccgttgcaattcgctccctctccaaatgatccttccatttgagctgtaagatcaatcactgcatccccaaccattctgagaccttcctgcgctttcctcacggcccaagattccgaccaaaacatctggaactcgctcaccgaccagatctgggaccgcat

SEQ ID NO: 10971 - DNA, 563 bp, Oryza sativa
  unsure (1)..(563): unsure at all n locations
  Clone ID: PAT_MRT4530_1723C.1
ctccctcttcccgatcgccccgtctgtcggccatccctgtgctcgcttcatctcccctccggcggcgccggcgtcggctccggcgaggcccccccggcacagatgcccccgggctggggtgccgccggcttctctgcggcggagcgagccctgcgtccgccgccgcggcgtcggcgccgggggggggggggtgcgcgctactcctcctccgcggcgggcgcggcggggccctgctcgcccgcccccgtcgctgccgcggcccgtctccaggatccgggcttccatccgcttgcctgcgacgtcatagcccttctctggtggctcctgcacccagtcccctggtcgctgcgttacgccagcccggccggggaccccgcggccctccccgccttcctcgccgtgccggacatccgcgtttcgacacttgccgtcgggctgcgtgggcccgcggcgttctcgcttgcctccggctgcgcctccggngtggtgtgtgtcgccccccctgtcgcgtcccattcagcgggctgggtgtggggggtgcgctccgtggggccgctgctgtt

SEQ ID NO: 10972 - DNA, 452 bp, Oryza sativa
  unsure (1)..(452): unsure at all n locations
  Clone ID: PAT_MRT4530_17240C.1
gtttggttggttttcactttccagcagttgtgcactcaaaaggatttgtcagttccagatcttgttgccggtaacattttcatgggcttcctgatcattacaccataagattttaaatcagtgttaacagctcctgaatctcagacatcagataggtatcacagttggtgcaggtttcattatatgagttctatagaaaaagaatgtgtaacaatctgttgctaactgcacaacacttgattcttgccaattcttcccaatagaccaatattatccagtaagttggtgtttatgttggattgattcaataaccttgatgattataaggattnnnnnttcagatgactaatttaatgaccaattcttcncaatattatatccagtcagttggtgtttatgttgcntacaacggttcaaagttgatttacttgactatgannnngagttggagc

SEQ ID NO: 10973 - DNA, 470 bp, Oryza sativa
  Clone ID: PAT_MRT4530_17241C.1
atgagcgaaacaaaaaaaaataaatatggaggggcccacgtgggccccacatgtcattccctctcggctctccctcttcttccctccgccgaccccgacctcttcttcgccatcctcggcggcgtcggccagttcggcgtcatcacccgcggccgcgcccgcatccctctctctccctgcgccccgacctcagaaaaccccacgcagaaccctgtcgcgctgttgcagctctgcgtcgaccgcaggtgcctcatcttcccgttcctccacaccgactacgtcccgggctccctccgccgcttcatcaccggcgccgcggactgcttcgtcggccttggcgtggacaaggaggccgagcggctgagcgacgaccacggcctccccgtggggaacaccgccgaccttcgccccctcgcggcgtagaggctgggccgcccggagttcagacaggcctacctagattagattta

SEQ ID NO: 10974 - DNA, 1887 bp, Oryza sativa
  Clone ID: PAT_MRT4530_17242C.1
agctttactcccacacgcagcttccagctcatcaccccccacaaccacctcctccccctcccatggcggcggcggcgccggacaaggcggtggagcggctgtcccagaagctggtgcacccgtcgtcccccacgccgtcggccccgctccgcctctcctggctcgaccgctaccccacccagatggcgctcatcgagtcgctccacgtcttcaagcccgacccggcgagggacgccgcggggcaggggctcgcccccgcgcgcgccatcgagacggccctcgcgagagccctcgtcgagtactacccgctcgccgggaggctcgccgtctcccgggactccggcgagctccaggtggattgctgcggcggcgccggcggccatggcggggtgtggttcatcgaggcggctgtcccgtgccggctcgaggacgtggattacctcgagtaccctctcgccatctccaaggacgagctgctcccccacccgcgcccccgccccacccgcgacgaggaagacaagctcatcctgctcgtccaggtgacgacgttcgcgtgcggcgggttcgtggtggggttcaggttcagccacgcggtggcggacggcccgggggcggcgcagttcatgggcgcggtcggcgagctcgcccgcggcggcgagcgcatcacggtggccccgtcgtgggggcgcgacgcggtgcccgacccggccggcgccatggtcggcgccctcccggagccggccggcgcgtcccgcctcgagtacctcgccatcgacatctccgccgactacatcaaccacttcaagtcccagttcgcggcggccaccggcggcgcccgctgctccgccttcgaggtgctcatcgccaaggcatggcagagccgcacccgcgccgccgcgttcgacccctcgacgccgatcaacctctccttcgccatgaacgcccggccgctcctcctcccgcgcggcggcgccgggttctacggcaactgctactacatcatgcgggtggcctccaccgccgggagggtggcgacggcgagcgtcaccgacgtggtgaggatgatccgggaggggaagaagcggctcccgtcggagttcgcgcggtgggccgccggagagatggccggagtcgacccgtaccagatcacctccgactaccggacgctgctggtctccgactggacgcggctgggcttcgccgaggtggactacgggtggggcccaccgggccacgtcgtgccgctcacgaacctggactacatcgccacgtgtatcctcgtcaagccctgggcccacaaaccaggggcacggctcatcacccagtgcgtcacacccgaccgcgtcaccgccttccacgacgccatggtggacatcaactaatttattattataattataattattattattattattattcccttttctttttattttattttttttaccacgccacctttttcactttgtttttttaccactacttccttataattaattaattaattaattagatattaataatgaagaattaagggtaaaaaaaggagaggataaagaaaggtgaaaagtacatattgatattgagggtacaggtagatggtagtagttgttggcattattagtgggattggtattggattcctttggtgttgtttggtcaagtgtatactggagaacagctactacatgctgggtattccttttatttttttttcttttttttgggatcaaaagctggaattggtgggaagccaccaactaaccagtatgtcccccttgataagtgtaccatatattgtattcaatttttatcttattttcagaatggtatatataagctggcaaggtgtacagcctctttagttgtacttggatcaattct

SEQ ID NO: 10975 - DNA, 354 bp, Oryza sativa
  Clone ID: PAT_MRT4530_17243C.1
gcgagagtgaggccgagcagcgaccgcggcggcgctctcccccctcccgccgcctccacccaccccgtgctcgccggcggggcgaagcctccggtgacaatccccgatccgatcgccgcgctcctctcctctacccccacccccttctccttcgacgccttcgcccgcccgctgtcgtacccgttcctaccggaaagcgcatctgatccgatggatctttcggattgctctcttcaaattttagctgcaccttgtaaggttccaattatctttggcctgcattgtctgttctatcttataaccaaagctcatggcctaacctgctaatgcttcatcccttttcactatggtccc

SEQ ID NO: 10976 - DNA, 251 bp, Oryza sativa
  Clone ID: PAT_MRT4530_17244C.1
gtaacctggtttgtatttaagcacctagttaggttttttctgttgttcacaacttttttttttttgccttcatttaacactgttcaaattaatcagggggaaagaaggtcataaacaaagccggtcggatggatagtggctgaggccaacccaggagaatcggcccgtaccccggcggggcccaaggttgccctaacaagggggtataaaaatctgggaccaaaaaggggtaagctgagatcccgggggaa

SEQ ID NO: 10977 - DNA, 292 bp, Oryza sativa
  unsure (1)..(292): unsure at all n locations
  Clone ID: PAT_MRT4530_17245C.1
aaaaaggggccgaccgacgcgtccgcccacgcgttcggtaatctgtttgtttgtaaagatatattgacggtggcctatttgggcacgtgacatatccatcttaaaatataacccntatattttccatattgactcaagcatacaatcaagaaatgttgcagctgcttctggtgggttttcaatgtttgtatattttgctaattcatccaactttaacacttctacacccaacacaatttgttttgtcttttaccgctatcaatgatacaaagcatgatatctccccataatc

SEQ ID NO: 10978 - DNA, 243 bp, Oryza sativa
  Clone ID: PAT_MRT4530_17246C.1
ggccaaatatccgggcttaacgggagaaactttgctttttatgactgtttggggagatggaaatcctgtggctttaaccggtagagactatcacttactgagcatccactgtttagggctgacaccaaactgtttgcgaaacgccgcggagaagcggcctaagtggctataacccaccttgttatggactctcgggacagggctatcgccctgtgatagcagatcccaagggatccgcgctcg

SEQ ID NO: 10979 - DNA, 544 bp, Oryza sativa
  Clone ID: PAT_MRT4530_17247C.1
atccaaacagctgtcaatctcgttgtgtaactgatggttttctgacaacaaaatatactttccaccgacacaaaaatgatgaacaatcaatgtgcaactaagaacaaagaatttgaatttagcctgtgtatgcccttattgacaggacaaaacaagggggtcaaaaaaattcaacaatagaaaagaattaacctgcatcgatgaggcgcaaggtaccaatttgaataaaggtgccacagcccaccaccgatcgatcgttctgtcccgtactctagaaggtgagagtgatgctccctttacctgaagcctcactaacactcatcatcattgtctactgcattatccttcagcttaagactaatttctctaactgtagaaaaaccatccatcaagctcactaattcaatgaacagatggtgctggatctactctgtcaaaattgatggctaataactgctttcctggccccatttttcctcaatggaagtgctcgtcccctctaggtatataatacagcagcagacgtagcaatctaccgtcagat

SEQ ID NO: 10980 - DNA, 103 bp, Oryza sativa
  Clone ID: PAT_MRT4530_17248C.1
ctataagaataggcatagcttctcctggacttatgttactatgccaacactgttgttcttgatatgattctcttgtatacaaaggatgaaaagcttttcatgg

SEQ ID NO: 10981 - DNA, 946 bp, Oryza sativa
  Clone ID: PAT_MRT4530_17249C.1
cagggatttttatacaggttcgagcctcttatcttacaggtaatagccctacatcctatgggggaagcaatatccctgaaacggaggagcaagctagcagtcctcctctgaaccaagatacagatgttggacctgaagccagcacttttgacaaggtggaaggacctgctcggccaccgcctataattatcagcccaatggttggtgacgaagaagaaattcttcgtactaaatcagctgaagactcctagccgcctatcctggtcaaatggtgggatgatgaaatgcaaccgcaaggcattgtgataaattggcagaaggaagaagatgaagtagttctgctagcaaagactctcaatcaggctactcgtcttgtaaatagaatccaccttcagaacgaggctaaaaccgctacccttgagaagctggttcctcatcttggcactttggaagaaaccagagcaaaactctatgaaaccaaagaataagccaggaagacagaacatgaactcaggaatcggattgtcgagttccaggataccaacttcgaattgagcggctcctccaaagaagttgccaaaattgaagatttggagagacgaattaaagccttagagaatgacaaagctgctctgtccaaggaaagagatcttgttgtcaaggaatttgatcatatggggaaaacaaaggcgcaattcgacttgttgataaacaaagttgaaattgctgagaaggctagagacgaagttgctaatattgccactcctataatccaagccatgtatcattgcaacagcggcacaagctccttggacgccatggaaatctttgataagctggcaatatgggagcaagcatggccttggcaatgataaagtctttttccaacacgatacacggcccaagggcccaaatacggtgacgcagcaccaagacagattccgga

SEQ ID NO: 10982 - DNA, 210 bp, Oryza sativa
  Clone ID: PAT_MRT4530_1724C.1
atggtcgccggttcggcttgcgccgtgcccgcgcgccccggccgcgagctcccaccgccgtccgatctacccttgggtagatcggggccgtcggcaagggtgggcgtgatggagcggggcgggccctgcgacggcctctgtcgcttccggattcacctaggcacgagaggggactgcccgttgcccgctggggacgggggtgaaacctga

SEQ ID NO: 10983 - DNA, 4473 bp, Oryza sativa
  Clone ID: PAT_MRT4530_17250C.1
ttaatccgcgcgcttctcttcctcgttcactcctccccgcgtcctcgcaggagcgactccccgctgccgccgttcctccgcgtcctcgccggagccaccgtggccgtcctcctcgctcgctcctcctactccccgctgccaccggtacgccgcggccgtcctccttcttccccaccgccacgccccgctgccggcgctacgccgcgtcctcgccggagacgcggccagatcgtgcttctcccactcggatccgccaccggagccgacttcggtcccttctgcatcgccgtccgcctcctcccatcgcggcgcagtcgccccgtcacgtccttgtgatcctgccttccactggctccctgccacgcctcttgtggccgcgacagttaaggggtagagtgttatcccgaccatgacatctctcccgtccttcggaaacagctcgtcctcgagctgaaatgccggataccgtcgccggaactccgcctcattctcccacgacgcttccgatgctgccttcccttcccaatgtatgagcacttcccagacgccacgcgcgattctgccacggactgccttcacaggaacaggcaggacgcgcccataggccattgccggcaacgctggcacaatctccggcggctctccatggaatttcttgagaacaccaacatggaacacatcgtggatgcgtgttcctgctggcaattgcagcctgcacgctacttctccaattcgttccatcaccttgtatggcccatagtaacggggcgacagcttgcctttggagaagcctggaagtgatgctgcttggcgttgcaacagtcgaacccagacccagtcaccaacaccatacgccacatcccggtgtttgtcatcataaaagagtttggcgtagtcctatgcttgcagcaatcgttcgcgaacctcgttcaggaacgtgtcgcgttccgtgagtgcttgctcaacggcgtgcacccgtgctgtcccacgatcataagcgcgcaaggcgggcggcggccagccataaaccacctgaaacggcgtcgtgcggagggatgattgaaacgccgtgttgaagcaatattcctcccacggtagccatcgcagccattagcgagggcgatcgcccgtcaggcagcgcaggtacatgccgatcacccggttggccgcctccgattggccgtccctctgagggtgaaacgccgagctcatggtgagcttgaccccggcaaggcgaaacagttccgtccagaacgcgctggtgaagacggggtctctgtcgctgacgatggagagcggtatgccgtggaggcgaaccacctcgttgaagaagacgtgagcgacggacgttgccgtatacgggtggcccaacggaaggaagtgcgcgtacttggactggcggtcgacgacggtgaggatcaccgacttgccgttgacgcgcggcagcccctcctcaaaatccatggagatatcttcccacacccgcgtcggcaccggtagaggttgaagcagaccggccagatgaaggtgttcgaccttatttctttgacagatcgtgcatgcatgcacgtggtcctggacgacttgcttggtgttgggcacggtgaagtcggcacacaggcggtgcagagtgcgttccacgccctcgtgccctgtgtgagccacgtccagcagtgccggcaaggatggcgatctcgcggcaacgaacacgcggccctgtttggtgaggaggccgtccgtgaatgcccagggcgcgcccagctcgccggcggcaattttgtcccgaagcgcgacgagggatgagtcggtcgcgacctcgcgacgcaaatcgtcgaacacagagaacgccggtcctgtgagtgccatgagtgtgggtgccatgtcctcgtcgcggcgcgacaaggcgtcagccaccacgttgttccggcccgggcggaattcgacggtgaagtcgaagcccatcaacttgctaacccaacggtgctgaggaatagtggacaggcgctggtcgaggaggtacttgaggctataatgatccgtacgaacgacgaactgtcgtccctacaggtacgcacgccagtggcgcacggcttgaaccaacccaatgagttcccgttcgtaggcagtgaggctggcgtgtcgcggcgcgagtggccgggtgaagaaggtcagtgcgccggcgccttggtggagcactgcaccgatgcccgagccagaggcgtcgcactccacggtgaatgtcctggcgaagtctggaagttgcaagaccggggcagaggagagcgccgccttgagcgccgcgaaagctgcgtccgcttctagcgaccaccggaaggcctcccgcttgagaagggccgtcagtggggcggcgatggtgccgtaattcttgatgaacttgcggtagtagccggtgtgccccagaaagctgcggacggctcggacggagcgcggcgtcggccacgcaccaatggcctggaccttgagttcatccatggctactccttcggcggagacggtgtgccccaagtattagacttggcgctcgccgaaacggcacttggagtgtttgagcaccagcttgttgttgtggatggcgcgaaggacagcttgcacgtgttgcagatgttcggcccatgtcgcactgtagatcaaaatgtcgtcaaaaaatacgaggacgaatcgacgcaagaagggagcgagcaccgagttcatcagggcctggaatgtcgccggcgtgttcgtgagtccgaacggcataaccaagaattcgaagtggccttgatgagtgcggaacgccgtcttgtggatgtcggcgtcgtgcatgcggacctggtgatagcccgagcgaaggtccagcttggtgaagaatcgagcaccacggagttcgtcgaggagttcgtcgacgatgggtattgggaacttgtccttggcggtggcggcgtttagagcacggtagtcgacgcaaaatctctaggaggcgtcctgcttgcggaccaacagtaccggcgaggagaatggcgaggtactaggacggatgatcccctggcgtaacattgccacgcactatttctccagctcgtccttctgcagctgcgggtagcggtacggccggaccgccaccggcgatgcatccggcttcaagtggatgcggtgatcgatcggccgcgcgggaggcagtccctgcggctccgcgaagatgtcggcgaagtcgtcaagtaggcggggtaggaggtcctctgtttccagcatctcacaatggggcggccggcggttggcgaggccgtgaagggtgacctcgcgcgtactgcgccaaattgacatgcgcatattccggaagtcccacaaaattggccccaacgtgctgagccactcggtgccgaggatgatgtcgacggtggagatgtcgagtgcgaagcaatcgactgtgaacagcttcccttcaatgcgaagacggaggttggcgcaccggcctggactgaccagacgatcgccgttcgccacgacgacatagagatcatggcgcactggagacagatggaggcacaggtgacgcgccagctcggtatggatgaagttgtgtgtcgacccagagtccacgagtgcgaccacgcgttcgccggcaatctcaacgggcaggcgcatcgtgttggccccgtccaacccggcgagaacgttgagcgacacacgcggctcgtcgggggccggctccatgtccccttcgacgttgtcgtcatattcgatgtagaacagacgagcgcatttgtgcccgcgcacaaatttctcgtcacagttgtagcacagcccttggcaccgacgttccgcgagttccgccggtgagaggcgacgaaattgtcggggcgcttgctcctgtgagccctcggtggtcgcggctggcgctgttggcagattggcagcagccggtccgctccggaacggtgcgcggagtgccggacgcgtgccgctggccagccgtgacgccttccgttcgtaggccctggcaagccccatggcttcctgcaggtcatccggctgatgcaactcgacgtcgatggccaattcctcgcgtaggccagctgtgaagagttgtatttgctgcgaatccatgagtggctccgtcgtccggctagccaatgccagaaacttcgtctgatatgctgccaccgaagatgtctgggacagccgcttcaactcacccagagaattacggtgaattggtggcccgaactgagcatggcacaggtccttgaaagcggaccaatcgaggtccgtgatgttgctcgtagtgaaaataccactcttgagcgtcgccggttagatggtaggtggccaaccatacgcgatcaccatctagcgtcttctgtccccgaaaaaattgttcacaatggttgaaccaattgaggggatcttccttgctatcatatttaggaaattccagcttataaaagcgaggaacacccgtgcctgcattggtgt

SEQ ID NO: 10984 - DNA, 588 bp, Oryza sativa
  Clone ID: PAT_MRT4530_17251C.1
ccggccgggtttcttgatagacagtgtatatgattcaatgataattggtggtgatggtgccggcattcatccagacttcatctgttcttttgaccttgaggtggaggaatggagggaagatatccagggaccaattagcaggaactttgtatatgacatggacttcccagatgagtatatagcaatttgggatcagcttagtttggctgagctgaaaggctacttagttctagtataccaccagagttaccgatcctcgaccatagacctgtggtatttaatagactatgagacccgcacctggattaaacaatatagcattcaaattgaatcattcgttcctgttagggagtgcaaggtaaagccactgctggtattggatgatgggaggatagtcgtatggctaggatcgaccggactgctactcatatatgatccaagaaccagcacttttgcagaagtggagatgagacgtctttctgaagttggtctgtacacaggaagcgtactgagtttataaaatggtgatgtggtgtagtattggactccataatgttttggtactctcttccaatgccagttaatcag

SEQ ID NO: 10985 - DNA, 243 bp, Oryza sativa
  Clone ID: PAT_MRT4530_17252C.1
atgccggcggtagggttcggccgggatgggacaggcggcaactggaggaagacgacgtggccagctgggccgagcgaggaggggaggagctggaccgaggcggcccaagggagagagggaaggagggtgggccggcttgaggaaaaggatgggccggaggagaggaggtcggcccgagagagagaagaagacttcgcccacgggctgagggagacaaggactttgggccaaaaatggccctaa

SEQ ID NO: 10986 - DNA, 107 bp, Oryza sativa
  Clone ID: PAT_MRT4530_17253C.1
tatgtttttagggacataacacacaaagggaagggagattagttttacgtggcacgtgcgtttctttagaatgtacaataagttgcattaggcgatgcacatctaac

SEQ ID NO: 10987 - DNA, 1577 bp, Oryza sativa
  Clone ID: PAT_MRT4530_17254C.1
atggcactgatctcattggtgatcatctttttgttcgttggcactgtcatatcaatgctacgtagacgccacgtcaatcgaaactgtcgttcagaccaccttgagatcttatttgcactaggtttggaaattgaggccgaccggcagcgaacacggtggcaccggtggtgctgcagggggcacacggcggaggtgggcggcgctggtgccgaggaggaggaggaggaggtcgtggcgctgtcgtcatcatcgtcctcggcgccggggaagaaggtgggcgcggcggcggcggcggcggaggctagggggtttgccgcggctggtgcgtttttgtacagcaggcaggcgtcggtggcggcgcccaagagcgggcagctcccggggtgcggcgcccggggttgctggcacatgcggtgcggcgctgccgtcgacctcgccctcgacacgctcgccgccgcgcgccccttggggctctggccggccgccctgccgctccagccgcggcaaccccctagcctctgctcgactccgaaggagcgcgcggcggcgagcaggtcgacggcggcaccgcaccgcgtgtgccagcaaccccgggcgcggcaccccgggagcggcctgctcttgggcgccgccaccgacacctgcccgctgtacagaaactgcagcacgagcaccagcacctcataccgaaccagccgcggcaaccccctagcctcctccaccgccgcgcccaacttcttccccggcgccgaggacaacgacgacgacaacgccacgacctcctcctcctcctcctcctcggcaccagcgccgcccacctccactgcgtgtcccccagcaagctccaccatgttcgctgccggccggctcgccgccgccgtggacatctccttcatcgccgtgaagtgttcgagcagcttggccctgtccgggaggcacgccttgatcctgtcgtcggcggcgtactccttcgcccagcggcagaggtcggggaactcgtcgccggtgaccaggctcaccccggcgacctcctctagcacctccagccagtaggcgtacccactggcggccaggtcgaggtagccgatggcgtcgcctccgaagaatcgcctccccttgagctgcgcctcgaggagcttcaggttctccttgatctccgccgcgaagccctcccgcacctcgccgtcgtccgtcgaccacagcgccagccagaacggcttcgtgcacttgtcgtcgatgaatcgggcccagaagcgggcggcggcgcggaggccggggtcggcggggaggaggaggagcggggccgggaacgcctcgtcgacgtactcgacgatgacaagggactcgcagacggcggcgcggtggtcgtcgtcgccgtggaggaggacggggaccttcttgtggatggggttgtgggtgagcagcaggtcgctcttgttgcggaggtcctccaggatgagctcgtatggcacgcccttgagccgcagggcggcctccgcgcgttggctgtacgggctgtcgaaggtgccgatcaccttcaccggcgccggcgccggcgacgccatggtggctgctca

SEQ ID NO: 10988 - DNA, 284 bp, Oryza sativa
  Clone ID: PAT_MRT4530_17255C.1
ggggggagaaacaacaacacgcgcccaatacgcaaagcccccctgcgaggtcgcaggcaagcgccgcccgggagagccggagagcaaaatagaggcaaaatcaacaacaggagcagctgcgacacagcaacaaggggggggggggcagagaggccgcaggcaccaccacagcagagggcaacccacagcgggcaaccagctaccagacaagggaaaaacaaacaagacaagcagcagtgacagagccaaacagggaggctggaagcacaacaaggggacaacca

SEQ ID NO: 10989 - DNA, 1440 bp, Oryza sativa
  Clone ID: PAT_MRT4530_17256C.1
atggccggtcagaccgtcgacccaccgccgatcagaccgcaggcagaggagcagtcaaaccggcctgggggctcatcttcgggttcgtcgggtgctaataatagaggacctccagaagtttctacttcgtcaaatcatgatgcagaacacgaaatttcattagatgtttctgctccacttcatattcaacgacgacatcctccagaacacataataggtaacattagagaatggaccacaaggtctaaggtaacaactcgtgatactcatgtaaattctgcatttgttgctacttttgaacccaaagatgttactcatgccttaactgatgaatcatggatcaatgccatgcatgaagaactagagaattttgaaagaaacaaagtttggtttttagttgaacctcttgttggtcataatattaatggaactaaatgggttttcaaaaacaaacaaaatgaggatggtttgattgtgagaaataaggctaggcttgttgctcagggttttactcaaatggaggggttggattatgatgaaacttttgctcctgttgctagaattgaggcaattaaatttttgttggctcttgctgcttcaaaaggttttaaattgtttcaaatggatgtgaaaagtgcttttcttaatggttataatggttatataaaggaggaagtttatataaaacaaccacccggttttgaaaatcctgattttcccaaccatgtttttcgtttgtcaaaagctttgtatggtctaaaacaagctccgagggcatgggaattcgaaatgagtatgatgggagagttgacttactttttgggacttcaaatcaagcaaatgaagcaaggtacgtttgtgcatcaaacgaagtacaccaaggatcttttaaggcgcttcaagatggcggattgcaagccaatttctacaccgatgggatcaactgctgtgttggatccggatgaagatggtgaagttgtggatcaaaaggagtataggagcatgattggatctttactctatctcactgcttcgagactagacattcaatttgttgtgtgtttctatgctcgttttcaagcttctccacgtgcttcacatcgtcaagatgttaaacgcatcatgagttgttgttctcagattctttggcttatttcaactttgagagattatggtcttacttttgaggaagttcctcttctttgtgacaacactagtgctattaatattgctaagaatcctgtacaacactcacgcacgaagcacactggtattcgctatcactttttgagggatcatgttgagaagggagatgttgaattggcttttgttgatactcaattgcaattggcaggtattttcacaaaaccgttggattctcctcaatttgcttttcttcgaggcgagttgggaattgttcatccttttggcatcaattga

SEQ ID NO: 10990 - DNA, 999 bp, Oryza sativa
  Clone ID: PAT_MRT4530_17257C.1
atggaggaggagagcacaagctccctgtctactcgcaacggtgaggaaaaaaaggagcaaaaacgaggagtcgaacaaatcactctcatgaatgaatcaatagtttactcttttaccagtttatcagtgagtgaccttggtccttaccagaagcatattagtcggagtcacccaccggaccggcaacacaaccactccggccttggtaccaccactctccacgcccttccatgtgtgctctacttcacgctagttgccgcatctagggatccacacgcactgccgctggccgtctcacatgccgccgccgtcaccggccgcctaatccgaacaaagaggttcaccggctccgatcgtttcaacctcatatccaacgcaaaaatacagttttacccttccacctctatctcctttggccggtaccacctacaaactgaatggtacctggagacactttggtctatggagaagccgaatagggaagaggaagaggaagaagatcgatcacggcggaaggggctggcgacaacggctcgcgtcccgtccaaggtgaggaggacagtattcacggaggcgagctctaaccgcacgaacggagccccgatcgaccaggcgcaggcgcggccggaggataaacccgtgctcgacgtcgccgaagcccgaagttacaagcgacacccccggctagccatgctcggcgccacggcgccgtggttcatcgcccgcaaggtcctctcacgatcaaccagaggccagagccggctgcagctctccatcgtcgtcaagggcaaggacatggccccgcgcctgctcatcaccaagaccggccttgacggaagccgagaaggccctcgtcaacgtacaagcgcggccgggagcccgggagtactcgctgaggttcaggtactcagcggcaacgccaccagctaccagctcatccgaagctgggtgaagttcctgagagagaatgaattactcatcggcgccacgcggctataa

SEQ ID NO: 10991 - DNA, 1908 bp, Oryza sativa
  Clone ID: PAT_MRT4530_17258C.1
atggttgcttcttcacatactcctattatttctgtgatgacggatgcaccgagacagctattacatatggacactgttggtccagctagagtgcaatctgttggaggaaagtggtatgtgttggttattgttgacgatttctctcgatattcttgggtttactttatggctactaaggatgagatttcacatttgcgtatttttgggtgcaagtgctttgtgttgaaatcaggaaatttggacaaatttgagccacattccaccgatgggcttatgcttggttactctgcacattctcgaggttaccgtgtacttgttttagacactaacaaaattgttgagacttgcaaagtcactttggatgaggctagtcctggagctagacccgaaatttcaggtacattatcacaggttcagggggaggatattttcgtagaggaaagtgacgacgaggaagacgatgaaccgacgaccggtcagaccggggccatggccggtcagaccgtcgacccaccgccggtcagaccgcaggcagaggagcggtcagaccggccagggcgctcatctccgagttcgttgggtgctgataatagaggacctccagaagtttctagttcgtcaaatcatgatgcagaacacgaaatttcatcagatgttactgctccacttcatattcaacgactacatcctccagaacagataataggtaacattggagaatgtaccacaaggtctaaggaggaagtttatgtaaaacaaccacccaattttgaaaatcctgattttcccaaccatgtttttcgtttgtcaaaagctttgtatggtttgaaacaagctccaagggcatggtatgatagattgaaaaactttttgcttgctaaagattttacaatgggaaaagtggataaaactctttttattcacaagcatggtgatgatcaacattttgttcagatttatgtggatgatatcatctttggttgttcatctcaccctttagttgtggagtttgctgagactatgcgcagggaatttgaaatgagtatgatgggagagttgacttactttttgggacttcaaatcaaacaaatgaagcaaggtacatttgtgcatcaaatgaagtacaccaagtatcttttaaggcgcttcaagatggtggattgtaaaccaatttctacaccaatgggatcaactgctgtgttggatccggatgaagatgttgaagttgtggatcaaaagaagtataggagcatgattggatctttgctctatctcactgcttcgaaaccggacattcaatttgttgtgtgtttgtgtgctcgttttcaagcttctccacgtgcttcacatcgtcaagctgttaaatgcatcatgaggtatttgcaacatactctagaatttggaatttggtattctacatcatcttctatatgcttgagtggttattcggatgtggattttggtgggtgtaaaattgataggaaaagtaccagtggaacatgtcattttcttggtacttctttgatggcttggtcttctacgaaacaatctaatgttgctcaatcaactgctgagtctgaatatgttgctgctactagttgttgttctcagattctttggcttatttcaactttgagagattatggtcttacttttgagaaagttcctctcttttgtgataatactagtgctattaatattgctaagaatcctgttcaacattcacgcacaaagcacattgatattcgctttcactttttgagggatcatgttgagaagggagatattgaattgacatttttggatacaaagttgcaacttgctgatattttcactaaactattaaattctaatcgctttgcttttcttcatggtgaattgggaattattcatccttttggcatggtg

SEQ ID NO: 10992 - DNA, 1329 bp, Oryza sativa
  Clone ID: PAT_MRT4530_17259C.1
atggagaccggtcccacctgtcaccaggctttaggagtggcgtcacgcccgaccgcttcccttgagaagggcgatcgccctggcataacgccgggggctactgtcgcgcagtgcagcacgttcctttatccggtctgtgaccagtcacagaccggtcagatcaacggccgcgatctttccacatacagagagagcctgagatctcaccctgagcccccggccgaaccggcaaaggggggcctgcgcggtctcccgaggtttgaagagctcgcggttggaaagataatggatccgaactttccataccagtcgccgtcgttcaccttgggtgatttcgaccccaactacatgtcggggtttgacggtcacctcaagcgccatgcggagtcgtgtgccaagaagcaaggaatacaactccggcagcagcaacttatggtaaacccagacggctggtggcctgccttcacgggccgccgtgccccgaacggcccgtgggccgcgggcgtgccgtgccggcacgggcacggcccggccatccacgggccgtgcttgggccggcggctcggcacgtgggccggcacggcacggcccgtttcatcagccgtgcctaacgggccgtgcctaaacgggccgtgccggacccgtgcccgtgccgggccgggccgtgccgcccgtttggacacctatactctccccccatcgtacgcaacgaaacccgattgccgcgccgctccccgtggagcccaagtggcggcgagggtttccgccgcctctcgtccgcctcgccgacctcggaccccggcctccatcctcctcgccgacgagagcccaagtgtgccgctccccgtggagcccaagtggcggcgagggtttccgccgcctctgctccgctcgccggcgacagccccacgttctcgaccgccgtccccaggtccgcttccggaatctcatcctttgcgggctgatactgcttcgcgcgtcaagccatcaccagctgctccctccgtctccggaacaacaatattctctccgactgctcacgacgggagagcggcgcttcggcgacggcgatcccgaaggattgtcaaggtcaaaggttctaagagaaaggagttcgttcttacccctgaaggccctgatgtttttaccattgctttcactgatgacggacacatttttgagtttaatgatgaacacggcaatgaagggaaggatgctaatctggatgacaagactgatgaaatgaataatcagttcaatggtaatgacaaaacaagagatgaggaggtgaaggatgaggaagaggctataaaggaccaaaaactgaag

SEQ ID NO: 10993 - DNA, 3729 bp, Oryza sativa
  Clone ID: PAT_MRT4530_1725C.1
atggcgcgccaggtaggggcacttggtactcaaggttctactactatgtcatccagctttgtcgacaacagcgtcaacaccaacctcaaccacgggtttcctgcttcaacaatgttagtgtggactcaagtcggcaaaatcgtcttcccggtctacaccatgatactgatctcagccggtccatcaatgaccggaaatgagaacgcaatggctgcaacccaagatgactccgtatcgaaggatcctcccgccgaagcgaagaacggaacatcgacaacatccaagctcgagaaggattctaatgcggccgaaccttgttgttccgacaagaaccacgagccgacgagaacaacttccgaagcgacaaggtcctggtgtcctatccacaaaaccaggaaacacactttgcaagcctgctgggtttttctcaacgtccgcgccgaaattcgcgcttgcaaagagcgtgaaattcagcgtatttgtccaactcgtgatgtttactgtcctatccacaagacaaagaatcacgacctcttaagctgtaaggtctttctcagcgccacgaagacgtcatctcctaaggaccaacagtcaggcatatcccttagagatgaagacaaggaacaacgaacgctggtctcagatcgattcgtcggcgtaatcgacatcaattcccacgaaccatcagtcctacatctactcgaagactacggctcatcaccaacgagtacgccacgcgaggagttggcgacaagacgcatcacgactactcggagactattcgagatcgtcgagcgatgcgcccacgtagacgatgcgctgagacgcaagaacgacaagccgaagaccgggggagaaaagaagccagtcacggacgcacctgagtcaagcaagaagaaaagtcgcaagagtgggaaaaggaaagctcaagcggaagttctcgcagcagaatacgcgaacccatccaagcgcccagacccacagagtagcgacgcaaagaaagcatggtgccccatacacaagacggacagacattctttggaagattgcctcgttttcaagaagtcgctcgagaaacatatggcgttggaaaaaggcaagcgaggggctgcacccaagatgaagtggtctgaacagaagatagaattctcgcaagaagaccatccccagactgccgtcatcccaggacgctatccgatcatggtcgagcccactattcggaacatcaaggtccccaccttggacgcgatgggaatcccacgaagcgagttgacacctaccgatcaacccttccatggaattactccccagtcctcgtccaaaccattgggcaaaattacgttgtctgtgactttcggccaagtaaacaacttccgaacggagcagattacctttgatgtcgctgaatttgacacagcgtataacgccatcatcgggagaactgcacttgtgaagtttatggccgcatctcactacgcgtatcaagtgctcaagatgccgggaccgaaaggaacaatcactattcaaaggaacgccaagctagcggtacaatgcgacaagcggagcctcgacatggtcgagcaaacgcccagcccacccgccacaactgagcctcccaagaaaccgtccgacatgccggggatccctagggaggtgattgagcacaaactcatggtgcgacccgatgccaagccagtaaagcaaagactgcggcgatttgcaccagaccgaaaacaagccatccgagaagagctcgacaaacttctcaaagctggctttatcagagaggtgctccatccagagtggctagccaatccagtcatggtgcggaaggccaacggaaaatggagaatgtgcgtcgatttcaccgacctcaacaaggcgtgtcccaaggatcacttccctcttcctcgaatagatcaactggtggactcaacagccgactgtgagctgttgagcttcctcgacgcttactctggctaccaccaaatcagcatggcgaaagaggacaaagagaagacagcattcatcacgccgttcggggtattttgctatgttaagatgcctttcggactgataaccgcagggaatactttccagcgcacggtccagggcgcactcagcaaccagctcggcaacaacgtcgaggcatacgtcgacgacatcgttgtcaagaccaagacaagtgactcattgattgacgatctacgggaaacgttcgacaacctccgacgatatcgcctcatgctcaatccagagaagtgcacgttcggagaagccgaagaggcatttcttgcactcaagcgctacctatcaaacccccctgtacctgttgctccccaacctaatgaagaattatttctctacattgccgtcacgccgtattccgttagcaccgtcattgtcatcgagagagagaaagtacaacgaccagtctactacgtcagcgaagctctccacgacgtaaaggtgctcgccgacttcgtagctgactggactatacctgataacaaatcagacaaccaaatcaataacgaaacgtggataatggcgtttgatggtgcactcaacagccaaggagcaggggcaggattcatcttaacatctccttccggagatcaattcaagcacgcaatccacctcaacttcagggcaaccaacaacacagccaagtacgaaagactactcgccgagataagagttgtagccgcacttgaagtcaaacgactgatcgtgaaaggggactccgaactagtcgcgaaccaggtccgacacgtataccgcaaggacaacatcgagccagacgatctagcacggcacgcgtccagacgagaaccactcgaacccggcacttttctggacgtcctgacaaagccatcagtaaaagaggtcagcggcgaagttaacctagacgcccccgacagcagctcggaggccacaaaggcagaacgcgccgttgccgatatcaaaaccacagacgattggcgcaccccactgatcaaattcatcaacagcgacgagttgcccgaggacgacgcagatgctgagaaaataacccgtaaagcaaaaatctattgcataatcggcaacaatctatacaagaaagcgccaaatgggactatccctcttacttggccgttctcgtgctgggggctaaatatactcgggccattcccacgaggacagggcggctacaggttcctattcgtggcgatcgacaaattcacaaaatggagcgaggcgatacccacgggggaaatcaaggccgacaacgccatcaaatttatcaaagggatattttgcagatacggactaccacatcgcatcatcaccgacaacggctcccagttcatcagcgccgatttccaagattactgcatcgggctgggagtcaagatatgcttcgcttcggtctctcatcctcaaagcaacggacaagtcgagagggcaaacagcatagtgctacaagggatcaagacccgtgtctacgacaggctcatgtcacacgacaagaaatgggtcgaagaactcccatcagtactatgggccgtacgcaccacaccgacaacgtctaacaaggaaacacccttcttcctcgtgtacggctccgaggccatgctccccagcgagctacgacatcaaagtacacgagtacagaagtattccgatgaggatcaggaggaacagcgaaacgacaatgtgaatctactcgaggaacatcgcaaatga

SEQ ID NO: 10994 - DNA, 273 bp, Oryza sativa
  Clone ID: PAT_MRT4530_17260C.1
atggcggagagcgacggcgagaattttgtcactgagatagcgaattcctttattccgtgccactccgtcgccgatccgtccgtccgtccccaacgccagcttttccgtcgtcttctccacctcgtcacgctcgtcaccggcgccggcgtgggctgcgctctagaggggctcgagctcagattccggtgtggatacgtcgcggccgccctccacaccgcagaatcgttgggcaactcggagaagaaatttccagcgtcttccacctcgacgtag

SEQ ID NO: 10995 - DNA, 316 bp, Oryza sativa
  Clone ID: PAT_MRT4530_17261C.1
atggatgcaaatatcaagacgctgctgaagctgacgatctgggcatccggcatatcaagctgcagcggaaccggcggcatgctgatcgatagccatcgactccaggaagttctgatcagccgcaccagaggcttgcgttgtgaagagggcgccgccgtcaccgctcgcggggaggagggcaccgccgccgctcagggaagggcagcgtcgccgccgccgccgctcgccgtgggggaaggcggcgccgccgccacaccctgccgcaccctaccgtcgctgttgccgcgctgtgccggcgagaagggagggatcgccg

SEQ ID NO: 10996 - DNA, 857 bp, Oryza sativa
  Clone ID: PAT_MRT4530_17262C.1
atggatccgaactttccataccagtcgccgtcgttcaccttgggtgatttcgaccccaactacatgtcggggtttgacggcggagacagcttcggaaggattttccggaaccgcgagcggaagtgtttcgacacacaccggctcgaagagatcgagaacctccgttcgtcggctacaagtggagacgcctcttcgcatgttgtggccgaagagttgtccggttatttggacagcgacgccatccaccacgaagcacaagatttcaacgtcctcgggtggtggaatgaccacaagataacatatcctgtgctttcaaaactagcacgggatgtgttgacggtgtccgtgtcgacggtgtcctccgaatcggccttcagtctatgcggccgaatcatcgaagaccggaggacgactctgcgcagcgaccacgtcgaaatgctactaagcgttaaagactgggagcttgctcgacaacatgcccaatacactgcggacaaccaagaattggccgcccacttcgagcaactctacctggatccagaccaaccccactgctggtacaaccgcaccacccagatccaccgctgccacggctgccgcggcagatccaccgcccaccgttgtcgtcgccctttagtcgccgcctccgtcggtggatccgggtgggggagggccgccgccgtcgcccacgtccacccccaccttggccctcgcccaccgccgccgctggagtccgcgttgccggaggtcgtcattgtcgccaaggtcgttgttgtcagcgaggtcgtcatcgtcaccggggaggcgcctccgtcggttcctcgtggggggagagctgctgtacccatcttcacacg

SEQ ID NO: 10997 - DNA, 2459 bp, Oryza sativa
  Clone ID: PAT_MRT4530_17263C.1
ttctcttcttcctccttatctcctcttctctccctgttccttctccttctgttcgatcaatcggggtgatcatcgagatcgtgttgagggatagatagtttaatctaacaatggcgaagatcctgctccatgggacgatgcacgtcaccatcttcgaggcggaatcgctctccaaccctagcaggccaagctcccaagcgccccagttcctccgcaagctggtggaggggatcgaggacacggtgggcgtgggcaaggggacgagcaaggtgtacgccaccatcggcctcgacaaggcccgcgtcggccgcacccgcacgctcgccgacgacaccgccgcgccgcgctggtacgagtccttccacgtttactgcgcccacctcgccacccacgtcgccttcaccctcaaggccaagaaccccatcggcgcctccctcctcggcgtcggctacctccccgtccgggacgtcctcgccggcgacgaggtcgaccgctggctccccctctgcgacgacaccgacgcgcgcaccccatcggcgacggcggcggcaagcggcaagtaccccggcgtgccctacaccttcttctcgcagcggcaaggatgcaaggtgacgttgtaccaggacgcccatgtccccgacgggttcatcccccggatcccgctcgacggcggccggagctacgagccgcaccggtgctgggaggacattttcgacgcccatcaagggcgcgaggcattttatctatatcactggttggtcggtgtacacggagatcgcgctgatcagggacgccgaccgccgaagcccggcggcggcgtgacgctcggcgagctgctgaagaagaaggccggcgagggcgtgagggtgctgatgctggtgtgggacgaccggacgtcggtggggatgctcaagaaggacgggctcatggcgacgcacgacgaggagacgatgaactacttccagggcacggaggtgaactgcgtgctgtgcccgcgcaacccggacgactccggcagcatcgtgcaggacctgcagatctccaccatgttcacgcaccaccagaagatcgtcgtcgtcgaccacgacatgccgtcgtcgcgccacggcggcggcaatggcggcgggcggcggagggtggtgagcttcgtcggcgggctggacctctgcgacgggaggtacgacacgccgttccactcgctgttccggacgctggggacggcgcaccacgacgacttccaccagccgaacttcgcgacggcgacggtggccaagggcgggccgcgcgagccgtggcacgacatccactgccgcctcgagggccccgtggcgtgggacgtgctctacaacttcgagcagcggtggcgcaagcagggcggcaaggacctcctcgtccagctccgggacctcgccgagacggtcatcccgccgtcgccggcgatgttcccggaggacgccgagtcgtggaacgacgccgcccgcgccggcctcgtcagcggcaaggaccagatcatcgaccggagcatccaggacgcctacatcgccgccattaggagggcgcggagcttcatctacatcgagaaccagtacttcctcgggagctcctactgctggaagcccaacgacggcgtcaagccggaagatgtcggcgcgctccacctcatccccaaggagctctccatgaaggtggtgagcaagatcgaggccggcgagcgcttcaccgtctacgtcgtcgtgccgatgtggccggagggcatcccggagagcggctccgtccaggccatccttgactggcagcgccgcactatggagatgatgtacaccgacatcgcccacgccatccaggccaagggcatcgacgccgaccccaaggactacctcaccttcttctgcctcggcaaccgcgaggccaagtccgccggcgagtacgagccaccggagcaggccgagcccgacaccggctacttccacgcgcagcagaatcgccgcttcatgatctacgtccacaccaagatgatgatcgtggacgacgagtacatcatcgtcgggtcggcgaacatcaaccagaggtcgatggacggggcgagggactcggagatcgccatgggagcgtaccagccgcaccacctggcggcggcggggcggccggcgagggggcaggtgcacgggttcaggatggcgctgtggtacgagcacctcggtaccgtcgacgaggcgttccagcggccggagagcctcgactgcgtgcgcaaggtgaacgccatggcggacaggtgctgggacctctacgccggcgacgggccggagcgcgacctccccggccacctgctcacctaccccgtcggcgtcgccggcgacggcaccatcacgcagctccccggcgtggagttcttcccggacacccaggcgcggatccttggcgccaaatccgactacctcccgccaattttgaccacttaa

SEQ ID NO: 10998 - DNA, 546 bp, Oryza sativa
  Clone ID: PAT_MRT4530_17264C.1
atgccctccgcctcttcaatgttgtcctccgccacctccgccgagcccccctttacccactctccccatcaaaatatttcccttcccaacatcgctgccttcaatgtcgcgctcagcgcttgcgccgacactagagattgcctctgtttccgacacctctgcgaccagatgcctaattggaacgcgccgcctgtcgtgctcacctacaatgttctcatcaagattggcgcgcgccggctgcaaggacctcatcgcacgcgtcctcaaccggatcctctcctccagtttcaccccctgtgccatcacgctctactccttcatcggtgccgtatgcgatggatcgccgtgcccggatacacccctctggacctaaaggatgtcacctggaacatggccaagatgcgggtgacatcggttgccgggacaagcatccaccggagatcatccgacgggacgagatggcccatgccgtcaatggtggtatcactccgcaccgtgacaaagagcactgcgggcttcaatggcggctcaaggttttggcggtga

SEQ ID NO: 10999 - DNA, 188 bp, Oryza sativa
  Clone ID: PAT_MRT4530_17265C.1
tgatccagtcaaagtaaatgcttataccagatacgcactcctttcaccattttggaacatcaacgctcacagcgtcgtgtatattactcaaggccgttgcccgggttcaagttgtcaacaaacaatggaataagaaccaagttgtttcaacggccgaggctttccgtcccgccgggacaagcctgcct

SEQ ID NO: 11000 - DNA, 1874 bp, Oryza sativa
  Clone ID: PAT_MRT4530_17266C.1
tggatccccgggctgcaggcacatacccaacccccgcgaggggggaaaggaaggagaaagcctcccgcccccctcgccgccggcgaacgcgacggcgggcgcgtcaccacatgccgatatcctccggcatactcgcgccgacgcggggggcctcctcgtcgtcgtccgcggtggggaggaagctcctcctcctcggggctcgtcatcctccctcgtccgtggcggtggcgggtcgtggcgtctggcgaagggggcttgccggggtcggggtggcggcggcggcggcgtcgtcgtcttcgcccgacgagcttcacgcgcgcgggaggcccctccgcggcggcgcctacgaggagagatctgccctttggaacttgataaaagacatagaacctttggatctaagcataatccaaaaagatgttccttctgaaactgtggatgcaatgaagaggactgtttcaggcatgttgggccttcttccatccgatcagttccatgtggtcatagagtccctttggaatcctttcttcaagctgttggcatcttcaataatgacagggtatactttattcaatgctcagtacagactctcccttgaaagaacgctggagttttctgaagaagaaactgaatgcaagaaaagagatagctgtgaagaaattcacagtgttggaaggccttctatgtttctcagcttaccagaagatgtaggcttgacaatcgaatcagaaatggcagatgaaaaattatgtggaaatatggatggactaggtagcttaagtattgaagcaaaaaaactcattctcggtatgcaatctcgcttggattccatggaaaaggagctacatgaacttaagaagaaaaattcttcccaacaaatgcagcaatttgctggagaagagaaaaacgagctgctgtattacttgagatcgctgtcacctgagaaggttgttgaactctcggagtcttcctgccctggtgtggaagaagctgtttactccgtggtacatggtctgctagcaactctctcccccaaaatgcatacgaatcgctctccgacctcagagaacatggcgggtggagctgtaaattttgggatggaggaggacgatgaattcactgagctcgtggaggacgtgtccctcccatttcagcccctgatatctattcctcgcgaccgtcttgcccgtctattattctggtgcatgatgctgggccattacatccgaggtcaggagtgccggcttgagctgatgcacctcctggcagtctccagtgatgcacattcatgatctcccctagtctggtagcaacagcaaatgctctgcaaagcttctgtcagctgaacgaactacttctgcatgacaaagacggaaacaggaaactctcaagcatcatgcgaatcgatccaatttggatgctgcaacattagtatggggatacataggagagggagaagaggagcaaacccatggatggccaaggtagaggtcaggtcatggtccctgcagtagctcgaaccaggttgggttgctcagtagcgtcagatttccatataggattaaccatttcatcatggttaaatgtgcttttcaccttcttgttagtttgtgttgtgctatgtgtacaaatcctggagttagtatacagtatttcctcaccgatgtactggtattttggttgtagcaacgttggtgttgcatcctgtatatataacattatactagtagtatgtatgtaaaactcttatatttccttgtgtaaaaagatctcttaatttttccattctatttccttttgtaaaagaatctctttttttttcctttgtaaaagttgagttcgtctacctcagaaaaaaaaaaaaaaaaaaaaaa

SEQ ID NO: 11001 - DNA, 538 bp, Oryza sativa
  Clone ID: PAT_MRT4530_17267C.1
cttcacctaccacggcgcctagaacctgcagagcaccatcaacacagtgtcgtcagtacgccagtccgccaccgcccgcgccgacgtttgtccgtcgccggcatcgtccatcctcgtcggcgtcgtcgtcgtccacggcgtggcgtgggcgcggagggaggcaagtgctaacagcaaggcaagcgcggacgtgagcacaagctcgagcactgccgcgagtccgccaccgcctgctgcccatcctcgccatctacagccgccgcattcgccccattccgcctcgccccgccatccacaaggggcttctccctaccccttccccaccgcagcaaccgccctattccgccttgccccgctgctagcactcgcctccctccgcgcccactacatgccgtggacgatgccgccgccgatgaggatggacgatgccggcgacggacggacgccggcgcggcggtggcggactgacaacagcgctacggatggaagagactgagtggcacggaacgaaaaaaattcgtactccgatggcgtattc

SEQ ID NO: 11002 - DNA, 156 bp, Oryza sativa
  unsure (1)..(156): unsure at all n locations
  Clone ID: PAT_MRT4530_17268C.1
aactncccaggggcctttcagccaaacagctccagcgggtgcctcccaacaaacaaangtgtctaacagcctcagttatgacagccgtgccagacactcaacgagggtccaacaccgtgcacccttgagacaccctcagtgcacgtatcgtctccc

SEQ ID NO: 11003 - DNA, 1107 bp, Oryza sativa
  Clone ID: PAT_MRT4530_17269C.1
atgccgatatcctccggcatactcgcgccgacgcggggggcctcctcgtcgtcgtccgcggtggggaggaagctcctcctcctcggggctcgtcatcctccctcgtccgtggcggtggcgggtcgtggcgtctggcgaagggggcttgccggggtcggggtggcggcggcggcggcgtcgtcgtcttcgcccgacgagcttcacgcgcgcgggaggcccctccgcggcggcgcctacgaggaggcatgttgggccttcgttccatccggatcagttccatgtggtcatagagtccctttggaatcctttcttcaagctgttggcatcttcaataatgacaggattgaattgctaaccttcttcctcacaaaaaagtatactttattcaatgctcagtacagactctcccttgaaagaacgctggagttttctgaagaagaaactgaatgcaagaaaagagatagctgtgaagaaattcacagtgttggaaggccttctatgtttctcagcttaccagaagatgtaggcttgacaatcgaatcagaaatggcagatgaaaaattatgtggaaatatggatggactaggtagcttaagtattgaagcaaaaaaactcattctcggtatgcaatctcgcttggattccatggaaaaggagctacatgaacttaagaagaaaaattcttcccaacaaatgcagcaatttgctggagaagagaaaaacgagctgctgtattacttgagatcgctgtcacctgagaaggttgttgaactctcggagtcttcctgccctggtgtggaagaagctgtttactccgtggtacatggtctgctagcaactctctcccccaaaatgcatacgaatcgctctccgacctcagagaacatggcgggtggagctgtaaattttgggatggaggaggacgatgaattcactgagctcgtggaggacgtgtccctcccatttcagcccctgatatctattcctcgcgaccgtcttgcccgtctattattctggtgcatgatgctgggccattacatccgaggtcaggagtgccggcttgagctgatgcacctcctggcagtctccagtgatgcacattcatga

SEQ ID NO: 11004 - DNA, 606 bp, Oryza sativa
  Clone ID: PAT_MRT4530_1726C.1
ctccatcacgcccacccttgcctggatgcgtcgactagaggagagctacactacaagcccagcccgctgacgtcatcaaaggggaggggcggcgccggcaagcgggccccaccggtcagcggcacaagggcgccggtccaccgtggaccgggaccaccgaggcgatccaccgccggtccacgggaaccgacggcccggatcggcccaaagccgatcggatggccacgaggcggcgcggctggggcacgggcacggcatgaaaccggctcggccgagccgtggtgctgggcagcgtgcggcctccggaggcagcagccggcggcgccgaacggcggcgagcagccggaagacggcggcgctcacgggcagtggcgatgcacgcgaaagggaaggggagcgggaggaggggctcaccgagcgtgcgggccgacgaggcagagcgggaggtcgccggcggcgggaagaggcggcggcgctcctcggggaggcaacgacgacggcggttcggcggcgttccgtgagcaggaaccggcggccgatggtcggagggaccgggaggcacggggagatgagtccggcgacgaccggcgaacacggagggattgc

SEQ ID NO: 11005 - DNA, 1239 bp, Oryza sativa
  Clone ID: PAT_MRT4530_17270C.1
atggtggaggtgggccggaaagcacaccgccagcacgtctcggagcttgaggcccgtaaagcggtgttggcggaaattgccaatgaagtggaggaggagcggcaggctgctctcatcgccaccaccgcgatgaacgagacgcaggacgccctccgacttcaacacgggaactgggaggcggagcttaggaagaagctcgacgccgcccagggggtgcttgacgctgctgctgtccgagaacaacgggtggcagagaccgaagcggcgtcccgacggcgtgaggaaacccttgaggcgcgcgccatggtgctggaggagcgcgcctccgtggtggagagggatctggcggaacgcgaggccgccgccattattcgggaggcaacgctggcggcgcacgagtctgcctgcgccgaagaggagtccgcactccgcctccgtgaggacgcgctcaccgagcgggagcgagctctcgaggaggcagaggccgcggcgcaccggctggcggacagcctgtccctccgcgaggcggcgcaggaggagcaggcgcgccgcaatttggaatgtgtccgcgccgagagggccgcactggaccagcgggccgccgacctcgaggcgcgggagaaggagctggacgcgagggcgcgcggcggcggggcggctgcgggcgaaagtgacttagccacccgcctcgcagctaccgaactcaccatcgccgacatgcagagggcactagactcgtccgccggggaagtcgaggctctccgcctggcgggcgagatagggcccggcatgctttgggacgccgtctcccgtctggatcgcgcaggtcagcaggtgggcctctggagaggtcagtcgattaagtactcgaccaaccagggaggcctcgctcagcacctctcgaagatggtcggggctctccaacgtctccccgaggaactcgagaagactattaagtcctcctcgagggacctcgcccaaggagcggtggaactcgtactagcgagttaccaggccagggaccccaacttttccccatggatggcgttggatgagttccctcccgggaccgaggacagcgcgcgcgcgctggttcgggatgccgccgaccatatcgtccagagcttcgagggctcagcccctcggctcgcgtttgctcccaactccgacgagaagggcgatgccgatggtgcagacgatagtgacgacgaggccggcgccccaggagcatcggattga

SEQ ID NO: 11006 - DNA, 680 bp, Oryza sativa
  unsure (1)..(680): unsure at all n locations
  Clone ID: PAT_MRT4530_17271C.1
ggagaaagcctcccgcccccctcgccgccggcgaacgcgacggcgggcgcgtcaccacatgccgatatcctccggcatactcgcgccgacgcggggggcctcctcgtcgtcgtccgcggtggggaggaagctcctcctcctcggggctcgtcatcctccctcgtccgtggcggtggcgggtcgtggcgtctggcgaagggggcttgccggggtcggggtggcggcggcggcggcgtcgtcgtcttcgcccgacgagcttcacgcgcgcgggaggcccctccgcggcggcgcctacgaggaggtgagcgagcgagcacagccgagggggttaaactccatgttcctcctccatgttatacgaaacagaagaatcgaggcgaaaagatctgccctttggaacttgataaaagacataganacctttggatctaagcataatccaaaaagatgttccttctgaaactgtggatgcaatgaagaggactgtttcaggcatgttgggccttcttcatccgatcagtccatgtggtcatagagtccctttggaatcctttcttcaagctgttggcatcttcaatatgacagggtatactttattcatggctcagtacagactctcccttgaaagacgcctgggagtttttctggaagaagaaactgaatgcaagaaagagatagct

SEQ ID NO: 11007 - DNA, 2253 bp, Oryza sativa
  Clone ID: PAT_MRT4530_17272C.1
atgggtaatggagatggaatgaatgtagaaggaggaagtatggaaattattactagagtggaacttgagcttgcatttgcctctgagaaattactaaatctagagatgttggtgatggagatagctcgcaaggctactgattttgagcctcctacattggaagacgaatctgtttcttctgaaactgccgagagtgcttttgaattggacatcctatatggttttctagatgcagaagtaggggagttagatgacatgatcagtactcttgagactgatattcaaaatgttgagcatatggtttgtcaagatgaatctggaggcaagattaaagctaggctagatgctgctatggtgtctttaaagcagatgaaggaattagtttctgatatcagaaaagagtcagccaagtttgagaaagccatagagtttccccatgacaaagaaggcattactggagacgctgggtatgaaaatggtattgtgtcatcccacactagcatgaggacagaggatcaacgaagaaatgttttgcagatgttagaacaatcgatagcaagtgagctggatcttgaaaagaagctctctgaatcaagatgtattatagaagaactcaaactaaagctccatcatcatgatcaggaaaaatatttcctggaggaatctatcgaatcattatgtgggaaaacatttgcagcagaaaacgcttctgaggtactcttgggaacttcaaaggaacttgtggacaaagttagtaccgtagagtgccatctaagtgcatcaagatgtaggaagggtgatctggagtcgaagttaggagaaagcttgatgggattatcttcactgcaagtcaacgcagagaatattcaagaagggagtcaacatagtggaggcacagaaactcatccaagtcctgaattgccatccttgcaggataaggttaaggagctagaaaaacagttgagggaatctgattcacagttgcagttggcaaaggcatcagcagaaacttttcaggaggagcagaatgtgctgcatgccgagataagcacattagaaaacattattaagagtctcaaagaagatgtctcaagagcagaaagtagagcacaaaatgctgagttaaggtgcatgcagctaactgaagctaacatagaacttaatggggagctaaactctcttaaaagtcatggttcagaaaagactagccttttggagaggaaacttaaggagtcacatacccaattagagcatgcaaaggcatctcttgatgccactgttgaacagcagagtatgctgagatctacaatgtcggacatggaacatatgattgatgatctgaagggaaaggttttaaaagctgaaaccagagcagagaatgctgaatctaagtgtacattgttaacagacactaacttagaacttagtgaggagctatcgtttctgaggggtcgagcagaaagtctagagaactcattacatgaagccaaccatgttaagatgtctaccgtcaaggatattggaatcagaacaaaaataattactgatttggtcacaaaacttgcattggaaagagaacgacttcatcaacagatttcgttgttgacaaagaaaaacaagatattggctcagaagtgcaaaggaagtgttaaggatgacactcaattgagcaaaaatgttactggcaaagatgttgagcttcattctactaaattagcggaggaaatagttcctgatttttcttcatcacagactaaggctgagaaacctgtagaccctagcaatgaggaagagaagacgaggtcttcagaggatgatgactctggcggggagggcactgctgaggcagtccggaccatacagccgtcagtgctgaactggaagtacatcaccgtggcattcctgatcttgttagtcgctgtcttcatatacttgccactcccagaagaaagcagctccgtttgaagaggccaatgcaatgatggctaatgtagtctgtagtgtgtacactatttacatccctgtttttttttttctttgtttgtttcaccccctttctgctcatagaataagcaatttttggtgctgtagactgtgatatgtagtgttcagatctggcctgaactcggtagtgatgcactgatgctcctggatgagtgattgtaaactcttagtttggctgccattgcccagtcttttggcctctaagacaatggttatgacttgtgactagtaattccttctgatgattct

SEQ ID NO: 11008 - DNA, 445 bp, Oryza sativa
  Clone ID: PAT_MRT4530_17273C.1
tgcttctgagggtctgaagctttgagtctttgaggtttgcctagctgatcgggggggtgttgaggatcaagcttacaggaaaatcaggctccgtgctgaagatgtgcagggcaggaatgtgctcacaaacttttggggtatgaattttaccactgataaattgagatccctagtgaagaagtggcagacattaatcgaagcccatgttgatgtcaagacaaccgacaactacatgttgcgtctgttctgcatcggcttcaccaagaggcgcccaaaccaggtcaagagaacctgctatgctcaggcatcccagatccgtcagatccgccgtaagatggttgagattatgatcaaccaggcttctacatgtgacctgaaagaacttgtttcgaagttcattccagaagttattggtaaggagattgagaagtttaccttcagcatt

SEQ ID NO: 11009 - DNA, 283 bp, Oryza sativa
  Clone ID: PAT_MRT4530_17274C.1
aagaatcatttagaggtgatctggatatacggggagtgcattgatatcaacacatgagccaaaggggatgaactgaaggctactcggccaaacataacgagcaactcagttcaaatgatatgtttagaagaagcgaatcaagaaaaaggataaggataaacgaacaacgtaactatacatttgttggaaaacgcacgaagaccggttaaaacccaccgtttcaatactaaacatgatggcggaccccaaatgcatgacgtcgtcggtaagctaaacacaaaag

SEQ ID NO: 11010 - DNA, 3508 bp, Oryza sativa
  Clone ID: PAT_MRT4530_17275C.1
atggatccgaactttccataccagtcgccgtcgttcaccttgggtgatttcgaccccaactacatgtcggggtttgacggtacctccggatcggctccaactccaccatctgtggaggaggtaccggttcatacggctgtcgttgaggaggtaccggttcaggcggcgacagcttcggaaggattttccggaaccgcgagcggaagtgtttcgacacacaccggctcgaagagatcgagaacctccgttgtgtggcaaaacttcgacgagataaaggaaacatgccccgacggaagggaggtatcgaaagcccgttgtagaatatgtaggcaaattttatctgctcgttcttctggtggtacaggtcacctcaagcgccatgcggagtcgtgtgccaagaagcaaggaatacaactccggcagcagcaacttatggtaaacccagacggtacggtacgcagttgggagtacgatcccatggttgctcgggaatctcttgtccggttaatcgccaggcaagatttacccctgaactttggggagtcccctgcttttgaacattacattcagcaatctcataaccctaggtttaaagctgtgagtaggcaaacatcaactagagatttagagaatgtttatcacaaggaagcaactgcacttaaggaactgtttagtacatgtactttctctgtttgtgttacttcagatatatggagtagtagagctagagaggattatcttagcgtagttgttcattttgttgatgatgattggcaattacaaaagagagttttagggcttaggttaatagatgtctcacatacaggagaaaacatagctgaaagaattagggaagtaattaatgaatttaatcttgctgataaaatatttgctgtcaccctagataatgcatctgctaattctagggctattgaaatattgcaacctttattttgtgtgtatgctcaatcttttctactccatcagcgttgtgcatgtcatataattaatttgattgttaagactggcatgaagagggtaggtgaccacatcgatgctgttcgtcaagcaatcgcgtggttaactgcttctaacccgcggattgctgcatggaagaggttttgcattgcggccggtgtggaagctcatcctaggtgtaaattaaggggattgtctgctattttatcacttgttggagatactataggtgtagattatagttctttttatactgaggttagacgtaaattatatgaggtttttggaagatatgaagtaaagtttcaggaagttcgccagcggagaccccctcctatccccactacaggtaagaagaagatacagtggggtaggatttggggtggatcgtcttcaagttcaatccaaggtggtggcagttcgtcggctacaagtggagacgcctcttcgcatgttgtggccgaagagttgtccggttatttggacagcgacgccatccaccacgaagcacaagatttcaacgtcctcgggtggtggaatgaccacaagataacatatcctgtgctttcaaaactagcacgggatgtgttgacggtgcccgtgtcgacggtgtcctccgaatcggccttcagtctatgcggccgaatcatcgaagaccggaggacgactctgcgcagcgaccacgtcgaaatgctactaagcgttaaagactgggagcttgctcgacaacatgcccaatacactgcggacaaccaagaattggccgcccagttcgagcaactctacctggatccagaccaaccccagtagaattttgttagaagtagttctgacctttgagctgtactcttttctttgtcatggttttctcattttcccctatgagtttttacatgacaaagtttttaacgaggcagcatgtatcattgtatcctgtaatgatataaacatcaataaaggtcatcttccaagaggttgcacctctgccagtgttcctgcacaagcgattgatctgctaagagacgctctgctccagatggagatgtgcagcagagaggagattatggatttgtgcccccaaaacatgtgctgtgtaattccccaagttttgcctaagcagctatgccttcctccctgttcaacaaaggaggaacttcggacgatactgaccgaaactacggctcgcgaattttcagacctgccacatgatatcctgatggatatcattgccatgttggagatccctgatgccctgcgtgcggcttcagtctgctcctcgtggcgctccgtgcatatcaaactgcacaaccttggaaagtacaaacgacctcagacgccgtgtttcctctacacttctcaatctattggtgaaaacatcgcttgcctctacagccttgcagagaagaggacctacaagttaactctgcccgagccacccatcagtaggaggtatctgcttgggtcttcagatggctggctggttaccgctgatgagaggtctgagatgcacattcttaatacgatcaccggtgaacagatcgctcttccgtcagtgataaccatcaaccaggtgacgcccattttcaaccgcaaaggcgagctctgcaaatatcgttactcacggcacacagcggagggtgttactgagtcacccatgacgcttcctcttgacaaactacggtacttcttccattgcaaggcctttgtattctacgataaattcgtacgaagctatattgtggtgctcattcatgatccacataaacagatctcatttgctagattagaacatgacaagtggacatggctgccaccacacttgggaattcatgactgcgcctacaaggatggcctactgtatgcagtgacgtcatttggggaaatcttctcgtttgatctcgacgccactgtgatcacagcaaaggtaattatgggcaggacaaaggagtatgcgtgtgagagaatttatattgttcatgctccatgtggtgatctgctgcaagtttggaaaccacaggaggggaatggtaattgggttgatgaaatcactggctttccagctcttgtgagcaacactcagaacacaagaatatttagagttgacactgtggctaaaaagctggtgcaaatatttagcttggatgaccatgtgttgtttattgggaataaccagtcatcttgtcttggtgtttgtgagtacccacagctgaaggcaaatcatgtgtattttacagatgatttcgagtgcttgtcctccaagagcatgtggggtctccgccttgatattggagtccttaacctggaagataagagcatcgatgaaattgtagcacctcggcttttcctcaagtgtcgagctcctgtgtttctcgtaccgaatcctagcatgatgaattcaactctccacggttagacaaaaggtcccaatatgtttgtgtgtgtttagtagagtgcccgtgcgttgcaacgggaaatgtaaagacaagaaaattaaggaaaaggttaaaaaaattacattatgttaattaat

SEQ ID NO: 11011 - DNA, 841 bp, Oryza sativa
  Clone ID: PAT_MRT4530_17276C.1
ccttcttcttgaccaacttcgcaacgcgccagacaaagataccgttctccatttaacggagaaggtgttcatcctggatgatgaacaaccactagtggcctttgttgatctctggcggggcatcgtcatctgcaacgtgctcgacaacagcacaccagtgggaggcagctacatgccgctgccaccggagctcatcgatgcccgcaggacctacaattcatctgtttgccgtaacattgctatcgtcaatggtcgtctcaccgttgtcagactgagtctttacctcctcgattcagatgatgacgattcggacgatgacgattactgcacttgggatctgaccacatggagcaagccagtcagttcttgtttggacgatgaatggcgtgaggacttcatgatcgagtccagtgacgtctcgattgacaacagcactcggaacgcctgcctcctgcccaagctggatgatggttgcccgacaacggatacgctccagttagctcatccaacactcagcttgatggacgcccacattgtttacatcatgggcaaggttgacgtctccgatgagaaggcactggtgctcaccgttgacatggcaaacaagaggctacaagaggtatctgtgtatgacgccgaaagaattgtcaacgattttgattacgcctacacgcactctaccatttcccaatatttcactacagcagctgcaggtttaaagcgaaacctgaagcgacctttgaagttccatatacaatatcctcacaagcggcagggtggacctggttcgaaaattagagatgaaactgaagatgggaataatcctatggagttggattaa

SEQ ID NO: 11012 - DNA, 4157 bp, Oryza sativa
  Clone ID: PAT_MRT4530_17277C.1
atggatccgaactttccataccagtcgccgtcgttcaccttgggtgatttcgaccccaactacatgtcggggtttgacggtacctccggatcggctccaactccaccatctgtggaggaggtaccggttcatacggctgtcgttgaggaggtaccggttcaggcggagacagcttcggaaggattttccggaaccgcgagcggaagtgtttcgacacacaccggctcgaagagatcgagaacctccggtgtgtggcaaagcttcgacgagataaaggaaacatgccccgacggaagggaggtatcgaaagcccgttgtagaatatgtaggcaaattttatctgctcgttcttctggtggtacaggtcacctcaagcgccatgcggagtcgtgtgccaagaagcaaggaatacaactccggcagcagcaacttatggtaaacccagacggtacggtacgcagttgggagtacgatcccatggttgctcgggaatctcttgtccggttaatcgccaggcaagatttacccctgaactttggggagtcccctgcttttgaacattacattcagcaatctcataaccctaggtttaaagctgtgagtaggcaaacatcaactagagatttagagaatgtttatcacaaggaagcaactgcacttaaggaactgtttagtacatgtactttctctgttagtgttacttcagatatatggagtagtagagctagagaggattatcttagcgtagttgttcattttgttgatgatgattggcaattacaaaagagagttttagggcttaggttaatagatgtctcacatacaggagaaaacatagctgaaagaattagggaagtaattaatgaatttaatcttgctgataaaatatttgctgtcaccctagataatgcatctgctaattctagggctattgaaatattgcaacatttattttgtgtgtatgctcaatcttttctactccatcagcgttgtgcatgtcatataattaatttgattgttaagactggcatgaagagggtaggtgaccacatcgatgctgttcgtcaagcaatcgcgtggttaactgcttctaacccgcggattgctacatggaagaggttttgcaatgcggccggtgtgaaagctcatcctaggtgtaaattaaggggattgtctgctattttatcacttgttggagatactataggtgtagattatagttctttttatactgaggttagacgtaaattatatgaggtttttggaagatatgaagtaaagtttcaggaagttcgccagcagagaccccctcctatccccactacaggtaagaagaagatacagtggggtaggatttggggtggatcgtcttcaagttcaatccaaggtggtggcagttcgtcggctacaagtggagacgcctcttcgcatgttgtggccgaagagttgtccggttatttggacagcgacgccatccaccacgaagcacaagatttcaacgtcctcgggtggtggaatgaccacaagataacatatcctgtgctttcaaaactagcacgggatgtgttgacgctggtggaggggatcgaggacacggtgggcgtgggcaaggggacgagcaaggtgtacgccaccatcggcctcgacaaggcccgcgtcggccgcacccgcacgctcgccgacgacaccgccgcgccgcgctggtacgagtccttccacgtctactgcgcccacctcgccacccacgtcgccttcaccctcaaggccaagaaccccatcggcgcctccctcctcggcgtcggctacctccccgtccgggacgtcctcgccggcgacgaggtcgaccgctggctccccctctgcgacgacaccgacgcgcgcacccccatcggcgacggcggcggcaaggtccacgtcaagctccagtacttcgacatctccaaggatcggagctggggccgcggcgtccgcagcggcaagtaccccggcgtgccctacaccttcttctcgcagcggcaaggatgcaaggtgacgttgtaccaggacgcccatgtccccgacgggttcatcccccggatcccgctcgacggcggccggagctacgagccgcaccggtgctgggaggacatcttcgacgccatcaatggcgcgaggcattttatctatatcactggttggtcggtgtacacggagatcgcgctgatcagggacgccgaccggccgaagcccggcggcggcgtgacgctcggcgagctgctgaagaagaaggccggcgagggcgtgagggtgctgatgctggtgtgggacgaccggacgtcggtggggatgctcaagaaggacgggctcatggcgacgcacgacgaggagacgatgaactacttccagggcacggaggtgaactgcgtgctgtgcccgcgcaacccggacgactccggcagcatcgtgcaggacctgcagatctccaccatgttcacgcaccaccagaagatcgtcgtcgtcgaccacgacatgccgtcgtcgcgccacggcggcggcaatggcggcgggcggcggagggtggtgagcttcgtcggcgggctggacctctgcgacgggaggtacgacacgccgttccactcgctgttccggacgctggggacggcgcaccacgacgacttccaccagccgaacttcgcgacggcgacggtggccaagggcgggccgcgcgagccgtggcacgacatccactgccgcctcgagggccccgtggcgtgggacgtgctctacaacttcgagcagcggtggcgcaagcagggcggcaaggacctcctcgtccagctccgggacctcgccgagacggtcatcccgccgtcgccggcgatgttcccggaggacgccgagtcgtggaacgtgcagctgttccgctccatcgacggcggcgccgcgttcggcttcccggacacccccgaggacgccgcccgcgccggcctcgtcagcggcaaggaccagatcatcgaccggagcatccaggacgcctacatcgccgccattaggagggcgcggagcttcatctacatcgagaaccagtacttcctcgggagctcctactgctggaagcccaacgacggcgtcaagccggaagatgtcggcgcgctccacctcatccccaaggagctctccatgaaggtggtgagcaagatcgaggccggcgagcgcttcaccgtctacgtcgtcgtgccgatgtggccggagggcatcccggagagcggctccgtccaggccatccttgactggcagcgccgcactatggagatgatgtacaccgacatcgcccacgccatccaggccaagggcatcgacgccgaccccaaggactacctcaccttcttctgcctcggcaaccgcgaggccaagtccgccggcgagtacgagccaccggagcaggccgagcccgacaccggctacttccacgcgcagcagaatcgccgcttcatgatctacgtccacaccaagatgatgatcgtggacgacgagtacatcatcgtcgggtcggcgaacatcaaccagaggtcgatggacggggcgagggactcggagatcgccatgggagcgtaccagccgcaccacctggcggcggcggggcggccggcgagggggcaggtgcacgggttcaggatggcgctgtggtacgagcacctcggtaccgtcgacgaggcgttccagcggccggagagcctcgactgcgtgcgcaaggtgaacgccatggcggacaggtgctgggacctctacgccggcgacgggccggagcgcgacctccccggccacctgctcacctaccccgtcggcgtcgccggcgacggcaccatcacgcagctccccggcgtggagttcttcccggacacccaggcgcggatccttggcgccaaatccgactacctcccgccaattttgaccacttaaagaagagctaaattaacctctctgtgcgctttatcgtcaatgagaagagatttattttggttttttttttacttttgaataagaacaccacactagtttatggcttctgtatttattttggacaataacaactgcattaatgcagtgaaacatcatgatgagttgctatttgttatgacagatttgctagtttcacactatggatttgaaccctgttg

SEQ ID NO: 11013 - DNA, 880 bp, Oryza sativa
  Clone ID: PAT_MRT4530_17278C.1
tggcacgagggcacatatagcacagcaaaacgtgtgcgtgtgcgtgtgcatgtgcgagtgcatgacgtgctagctactagctaagtactagctagccagtcagctccgacgatgagcagctgcttcaacggcggcgccggctggccggagccggtggtgcgcgtgcaggccgtgtcggactcgtgcggcgcgacgatccccgagcggtacgtcaaggcgccgtccgagcggccgtcgtcgctggacggcggcggcggcctgaacaatatcccggtggtggacatgtcaatggcggacggggaggagaccgcccgcgccgtggcggcggcttgccgggagtggggtttcttccaggcggtgaaccacggcgtgctgccccgagctgctgcgccgggcgcgcgcggctgtggcgcgggttcttcgcgcggcccgcggaggcccgcgaggcgtacgccaactcgccggcgacgtacgaggggtacggcagccgcctcggcacggccaaggtgcgggcccctcgactggggcgactactacttcctccacctcctcccggcggcgctcaagagccacgacaagtggccgacgtcgtccgtccccgcgggcggcggcggcctgcgggaggcgacggaggagtacgcggaggaggtggtgcggctgtgcaggagggtgatgaggctgctgtcgagggggctcgggctggacgacgggaggctgcaggcggcgttcggcggggtcggcggcgagggcgcgtgcttgagggtcaacttctacccgcgccgcccgcagccggagctgacgctcggcgtcgcgtcccactccgaccccggcggcatgaccatgctgctcgtcgacgaccacgtcaggggcctccaggtga

SEQ ID NO: 11014 - DNA, 467 bp, Oryza sativa
  Clone ID: PAT_MRT4530_17279C.1
gctaaccaactccttaggcctccgaaaagcataaagtacgggggaaaccacaatcagttgaatcaaattcttgaaaaatatggaccttcctactgcaatcaccttacccagtgttttattggatacaaaacgctgcctcctaaagggacacgcactgtcacaacctccatgacggacggacccaattgtctgccatactccgatcgatctaacaaacgaacgcggtcttatttgggcttcccatgaataaaatccttacctaccgactgatcaaaacgaactcaactaccttggccgtgcaaagcagccccccgttcctggaatccacacggggaggattttacagctctgtttgtccccctgacaccctttccaacagaatatatcgaaagccgtcttagcatcccacattatccttgacgccatgaaaggccctttactctcagcaggttttgtaaaccatgcag

SEQ ID NO: 11015 - DNA, 1672 bp, Oryza sativa
  Clone ID: PAT_MRT4530_1727C.1
atggagccgagatctccgcgcccgtttcctctctctccggccgcactctctccctcccgttgctatataattgctccccgagctccgctcttccgtttccgccgctcgccgctcgctctcgccgtcggatccgtgctcgcgccgtgctcctctctctccgccgtcgccgccgacctccgtttcgccgccgtcgtcgctccggtcctcctcccgactcggcgccacctccatcggcttcgccgagtggttgccgaccccgtccgccgctccgcttcgcccgccgaccgccggagcaccgtcgtcatcgtcatcccgagccgcgccgccgtcttcctccgctccggccgccattctcgtcgtcgtcgttgtcccggggtgagccgaagaccgccgttcgtttcccccttccctcctctctctcgggtgccactccgccgcgccgttggtcgccggcggcgaccatcggggcgcgggtgcgcgccgctcccgtcggccgcgccggcgaggccgccctcgggcgcgccctcgcggctgccaagtgggcccggccgtcagccgcccgcgcccgtgggtgcggctgacgcgcgggacccacggcgccgaccgccgccagccgcgtgcgcccgggcaaatgaaggctacacgagctgcggcccggtagtcgagatgtcatacggcggagggttggtgcccaatgctaggggctcagttctgcctgcctgtcccgggtatcccggccgtagtcttgctcaatttttcccaagtccagaagaggagctccttgaagatgaaggctttggtgtctagctcgtgcctgccgtcaagcgcctgtggtcgtcgccctagtcttccgctgtttctcatggccggcagcgtcacccgtcatggtttggacatgactggcttcgtcttggagttgcgaggcatgtgcgtggtcttggggtatccacacggagtggactaccaggccaggccgcttccggatcaggagggagacgacgcggagccccacgctgggtgggaggtcaccgcagtgatcctcgccggctcttctgagcgggcttcgttggcagtcaccgcgggtggagactccttccccgccgcttgccagagcgccgctctcctcgccatcggcacccttcaccagcgctacccggacgagttgcagcactcgccctaccgctaccaccctcgtcgcggaggagcccgcgactacgccaccttccgggatgctagctcggaggatgacgctaccatcgtgcacctggcacgcatggtggaggcgtacgacgcggctcgtatcgacttccatcagatggtacgccgcgggatggtcgagaacaacatgaagatcctggagctgcgccaggagaacctgcagctcaagaaggacctcgacgcggtggaggcgcagctgcatcagctcaagatcgcccagggagaggtctgccgccccaagcgtcgccgcgtctgccgcagccagaagatcaccgcccgcaagagcacctccaggcctgagcttgttcgtcagtccctggcgtggacctgcttcgtcgagacccctcgtgccgagcccgcgcccgtggttccccaggagggggaagcctccggcgttggtagcacggaggatgcgctgttgctcaccttccgccctggcccgtcgcagcagtag

SEQ ID NO: 11016 - DNA, 536 bp, Oryza sativa
  Clone ID: PAT_MRT4530_17280C.1
atggctgcgcgcacgggggagccgccattcttcaatccgtcctcgtctcgtcgtcatgccagcgaagccgccgctcgccgtcccggcctccgccacaccttcatcgccgttccccatggctctcctagccgtacactccctaacggggtgccggggaatggcgtcggggctcggccggtttccgactccgatgaggatcgggagccgtcggcctaatccggccggccaaccgccggcggacggaggggcggccgaggcggcggtggatggtggatggcgatggcgatgggcggcagatggtggatgcaggagatggcggcgtgtggcggcggtggaaatggaggcggcggcggcgacgcatcttgatgcggcggcggcgcgtcccgcgtcgaagctgcacagggaaatggcgacgacggacggcgcagcgacggcaggggaagggcacggtggacaggcgacagcggctccgacggcggcatcggcaacggaaaggcgacggcggcggcggcggcggcagaaatcccgcgaggggg

SEQ ID NO: 11017 - DNA, 321 bp, Oryza sativa
  unsure (1)..(321): unsure at all n locations
  Clone ID: PAT_MRT4530_17281C.1
cattattcattatttgttgtgatcactatttcgttgcatgcaacacagcaacggtgtgatcctactagctatgaggcaagccagctaagcctagtactgggcgcggcgaaatgctgactgctgggctaacccgccatcgacgagtgcccggtctgctgcctgtagctaccggtatccggtgtgtgtgtcgctatacctctcacaccctgcgatacctgtcacacacctgcgcgagatcgaacaacacagctgtcaggatcgatgttctgagtctacatcgcgtgggggagngactgngtactctgagtgtgcagatgatcg

SEQ ID NO: 11018 - DNA, 429 bp, Oryza sativa
  Clone ID: PAT_MRT4530_17282C.1
atggccaggggccaactaggaaaaagtgaggccgtcgggaagaatgttgaccgcagtgagcgcctcggcctcctccttctagacgcgttgtcgatgatgatggaaggctctgataacaccttcctctccaactccggcaacactgacaaagggatggctgtgggaggcggcggccttgcggtgggcgatggtcacggtggtggatctggcggtagggagctgtcgaagacggggaagacggctgggcgaagcacttgcacgtcggtttgggcatcgcacgcgcacaagatcacaagcggtggctgtggtgctgagaatgatatgatgagggatgagggggttctgggcatagatcccctggagttgccttccaactccacccggtggatttggaccgatctgaccccttactttgtttctacaggctag

SEQ ID NO: 11019 - DNA, 120 bp, Oryza sativa
  Clone ID: PAT_MRT4530_17283C.1
atggttgatgatgtaggcgtaggagcgaacatcatcacagatggcaaccctgtgaacagcgaaatggtctcattcaatcgactggacctcctcactttccccgagctcctcgccctctaa

SEQ ID NO: 11020 - DNA, 306 bp, Oryza sativa
  Clone ID: PAT_MRT4530_17284C.1
ctagttctagatcgcgagcggcccctttttttttttttttttttttttttttttttttttttggttgggtttttttttgtttgtgttttttttttggaaaagaaaagggaaccttcctttgctgctggggaagttccaaatccccagccaataaaaatcaatggggtcctttgtcccccccaaatttttcccttcccaatttcccattccgggagaagaaaaatccttcaatcggaggaaggaggaggcctgggtggcttgtcctggtcttgggactgggactgggactggaaaggcgggaggagc

SEQ ID NO: 11021 - DNA, 540 bp, Oryza sativa
  Clone ID: PAT_MRT4530_17285C.1
acagatcaaaccgatcgagaaacattacataaatatgacaacccacaaccacaataaacatgaagctttgtgtcgatcaataacagagagaaacataaagatactaaaaattcaatccagtgttacataatgcattataaaataatactttaagagcactagaatctaaccctgttcacaaccataacatagagtcacaagttacaagttttatgacccattaatttcatcaaaactaataatcactaaattatacatcgtcatctgaatcatccaaaactctatttggaaactcatcatcagactcactcaaccagaaataaggacatgctgtatcatcaccgatgtacatatagggaaacattgtatcgttgtcacctctatcaaatgcacctatcacaggatgtttcaggtcatccatcccttgattcttgcatgcattgcaatgaccgttttcattcggctccaagggccagaagaaataaactttctgactgaacattgttttatcctcagaaaaatacaactccgagtgccaat

SEQ ID NO: 11022 - DNA, 2204 bp, Oryza sativa
  Clone ID: PAT_MRT4530_17286C.1
gcattagcaaatcaaaggtcgtctaatataatgtacatacattcccaaagataaaaaaaacaaaaaggaaaattttagtactttattacaaaagtgagagaggagaaaagaaaagaaaacaaaagcccaatagctagatgatcatacgtacgtactactaccctgaactaacactcgttgattagctaaccgattaatcaaccatccatgcttaattagctccttaattaatcaccatagctagcaaattctctctcacacagccaagctatcacaggtcgtcgtcgtcttcttcgcggcggcgccgctgctgatccactgcttgttgccgccggcgcaccatttggggcacttggggctgaagtaggtggcctgcaccctgccgtcgagcagctcgacgacggggcccgggcgcacgcagcgcggcgccttgtactggttgatggacgcgccgcggctgagcgcgtagtccatgagcttgtcgaacgtgccgtccgccacgacgcggatctccagcggcccgatcgaccggtcggcggcgcggcactggcggtacacgctgttgagcccttcctcgacggcgaggcagcagtcctcgaacaccgacgccggcaccggcgtcccgcccgccggcgacctgagctcccagaacagcacgtagtggcccgggatggtggtcgccgtgtcggcgtagctcgtgtactccaccagcgacgccccgaacggcgccaggtgctgcaccgcctcggtcaccgccgcgtgcagctccgcctcgtccgtcttgtcggagtcgatgctgagggccacgttcttccgccgcacgaaggcgaacatgggcgccgcgttcttgaacccggccacgcgcagcacgtcgcccacgcggtagcggtacaggccggagtaggtggtgacgacgagctcgtactcgtgtccgagcttgacgtcgacgaggtcgacgaggccgcggtggtcgggctccggggcggcgacgtcgttggcgccggagttgacggggaggaactcgaagtagcacattgttgggatgagggtgtaggcgacctcgctgggcttgcacatggggttgaggttgaggccgaagtagcactcggaggaggcgtacatggtgcaggcgagcggcagcccgccgccgtagaactccagtgtcgggatgtactgcgccatggcgccggtgacgatgacgtcgatgtacttggtgctgggccacaccctccggatgatgccctgccacgacggcctcgcgcactccgcctcgatcgcgtcggcgagcgccgggtcggcgccgcggagcaccctcccgacggcgccgcgcacggcggggtcggtgaccccgccgtcgagctcccccgcgcggatgtcgcggcacaggctcggccagtgcttctccaggaagcggatcgcgcggaggaagcccgacgcgaacaccgcgccgacgcggagcacgtcggcgcggtggacgaggccgcagatgagctgcgcgtacatgctctggtacgcgtcctcgcacagcaccgcctcgtcggggctcgtgtaaaatgtgtagggggcgtgaggccgctcgaggaagtagcggctccggtagaagctcgtcagcacgggcctcgccggcagcccgcccggcgtgcgccactccgacttgacgaagtagaggtacatggccttgcccttgtccagcccgggcacctgccggctcatcaccggcatcagcaagctgtacagccccgaccgccgctccatctcctcctctatcgtcggcatcagcttcctctccccacccgacgtgccggagctggtgaggaactcgctgacgggcttgccggagaggatgggcgaggtgtcgccgttggcgatgcggaggacgtcggggaggatgtcctcgtacgtgacgagcggcgccagacggcggaacgcctcgtcggcgcccggcgcgtcgcccggcacgccgaggcggcgcaggtactcggcctgcgcgttctgcgccaggatctcctccagcacgcggcgctgctcctgccccgcgttcctcgtcacgcgctcgatgtgctcgagcttctcccggtgctccgcgcacatcgccgtcgccgccgccgccgccggcgacaccgcggccgctaccgcctccggcatggcacgcgtgtcgtgtagtagtagctagggagtgcttggcttagctgagcttggatcag

SEQ ID NO: 11023 - DNA, 352 bp, Oryza sativa
  Clone ID: PAT_MRT4530_17287C.1
cccacgcgtccgagctcgtggagtgtgcgtagcttgattgcacttgcgcagcgaggttaatcagctgcaacggcggcgaggtcgtcgtcgcggaggagaggacggcgtctgtttcggtggttggtgcttccgccatgctgcagggggaggagaagaaggccgggaaggtgaagaaagggtggctggcggtgagggtcggggtggagggctcctcttgtttttactgctttttttttttagtttattctcattccttttttatcttttttttccttttttatttttcttctatcttctttattcttttgtgtaaggtactttttgttttttctttattattttcttttatttt

SEQ ID NO: 11024 - DNA, 1183 bp, Oryza sativa
  Clone ID: PAT_MRT4530_17288C.1
gtggcggcgacgccggagctccagaacgacctgaaggggccggaggacaagctgttcggccgttggctgcggtggggtggcagggggaggaacgtgttcggcgcggagccgcggatgtacgactacgccgaccccgccgcctcactgttgccgccgtcaaccccgccgcctcgccgttgccgccaccgacctcgcacctcgccgccgctgacccggcgcctcgccgtcgccggtttccgccgcccccgtcgtctgtcgttgagggattagaaaaaattgatgtgttgtggtgtctatttatatccatgtcaattttcgcaggtggaccacttaagcggtccgcctgcaaaaataataaagggtatttttgtaggcatgccgcttaagcggtcacaacgagtttcaaccgggtttgtatttttgtaggtggccatttggctccaatgatcatatccacaatattccggactttgctcagtatgttggatttgaaggaaatcaaacgggcgaggaggaaatagctgctgatggtaacgacgttgcggatgatcttggtcagatgttgcaggacgccagggaggactgcgaaagtgaaaaggaggcctataaattggacaagatgttggaggaccacagaacttcgttgtacccaggttgcgagcaggggcacaaaaagaacaaggggaatgcttgtcacgcccagaaattcccgaatagaattccaagcagaatgtgcattaaaatccccgtccaggaccagccggggtacacaaacgacaatgttgacatacagatccaccgggaacaccactccacaggcatcctcgacggcacggacgaagcctactcctcagagaaaccttcatctgacccgaactcgaactctggggttgggaaaaggctgacgtcagcacggagggggtgcggcgccgacatgcggggcccaccggtcagcggctcgggagagggaggaaggggcgccggcaagcgggacccgcatggcagtgactcgggagagggcggtccacggcggatcgggtccacggaccggggaggagcggcgcaccacgtggcggccgaaccgatggccccgatctacccaaggcggcgcaagacggcggccggcggcgaaggcgacagcgcaaaaggcgacgcgaaggcggctgcgctaagcggcggctag

SEQ ID NO: 11025 - DNA, 573 bp, Oryza sativa
  Clone ID: PAT_MRT4530_17289C.1
atgggccatcaaccttgcctaacaaaggtgcgtacggaatcgggacgcctcttgccgcctcccatccgatacgcaccaggggctactattacacaagtccatgtcgacctcgatcggtcgacctgcaactgcaacttagctaaaaaagaaaaaaaaaagaagaggaccacgagattgaatgaccgattattggttgcatgccgaccacggaattatgagaaaacgacgggagcggaatttaaagtggcggagcttactggttgtctagtggcggagcttcaacaagagccaggagaggcttcagcttatgctgaatccgaatggctttggatacgatttgcggaaggcgcaatatcagcaactagcaagtggtttgcttccagggagatggacagcaaaggacagtacggctgcacgaattatctctcagcaaaagaaatgaaaaataaaaggaagcccattcttaagatgcaacattgcaaccctagtgaaggcctaggcccaattgaacgagactcagacaagccctttatcagccatggcagagtgtgggccaggtgtcagtgggctata

SEQ ID NO: 11026 - DNA, 583 bp, Oryza sativa
  Clone ID: PAT_MRT4530_1728C.1
ctagcatttcttcgtccccgccacagcatccacaagctggacatcgaaggtggccgccggcgacgacatggcttggccggagaccctcccgcggctgcctgagccgccgctcctccggctgcagcgtccgacagtcagcgatttgccgcagttcaccgccttcggcagcagcatcctcaccatgggccagcacaccgagtatggtttcgtgccggttgccaaccccacatgggtgtcggatttggcaaccggcacgcgcagagcagccagccctggtgcctacgtgggatttcaatttgaaagggctaggacttggatttcgatttggatggaaagggaggagactttggtcgagatggtgacgagtgtggataaggacaccgtctccaccgtgagaatggccgccaatactgccccgctcaccgccgacgcagccgacatcggatccaccacgggaacggctgccgctgacgtcggatccaccacggaaaccactgctgccgccggatcccaggccgccatatcgccggatgcggctccgcccaccatcatcttagtcgaggggggaggagagggaatgtga

SEQ ID NO: 11027 - DNA, 608 bp, Oryza sativa
  unsure (1)..(608): unsure at all n locations
  Clone ID: PAT_MRT4530_17290C.1
taaaaaccnttttgtggnaatggggcnnnncttccnagttcaggatnattntntanattgttntgggatccngagttttttggcnanattggncggcctttaaaacnncnagtgctcntggtttgttntgcaanctntcgagngngctnacgaaaaccnaaanccccnttttttttaaaattntnggaaacccgntcctnaatntnttncnaaaatgaangntntntntaaaaaactttatttngaggccgtttttnntnnattcnananggnnagnttccattaactnnttnccgncntngaagcncctccnaacaaaacngttcnnaatgtntttaaatccntccngcccnagattttccaaaggccnaantnaancttagctcntgganaaactgtttcntgtttgcttggnaactaaantcgtgggggcnaanaactggtnactanaatcntgggggctgttcccnnangntgngngtantatggntntgttngngccntgtantncancgngntnctccnttaaataatnaancntggngcnntttttgngngngnngnnaaaaaaaaaaaaaaaaaaaaaaaaaaaaaaaaaaaaaaaaaaa

SEQ ID NO: 11028 - DNA, 279 bp, Oryza sativa
  unsure (1)..(279): unsure at all n locations
  Clone ID: PAT_MRT4530_17291C.1
ctcactaaaactcttgctccacagaagagaaacaaaatcacgccgcccgccgggtgtcgaacacctggtgagcggggctgtgccgccgccgcaggcttctnggccggtgtgggtggcggggtgtggagaggagtnctcgcntttctgttctgctgttgggagantcggagccgctgacgaggagtnccgacgtcgacacctgcgancgtcgcaaccgctagtcgccctgtttcggcgaccggccggcaccaccgnactccgcgntcgcatctgtgattc

SEQ ID NO: 11029 - DNA, 482 bp, Oryza sativa
  Clone ID: PAT_MRT4530_17292C.1
atgatatttgcaagcctgaagtacaagccgcccctaacgatctcccccccatatgtactgcagctaacttgtactactaccagtgcaccatggccggggtacaaatatgccacccttcaccaatggatgcatcagcagcagccacagcaaaatttggtttgggataggctgttctgtggaagtttgcagagtttatattatgggtttaatcgtccatggcatcagcatcagcagcggtatgtcatgacaatgcggccgtgcgagctccatgagctcgaatgccattgcagtggattcaggacaacgaaatggacactgtttttcgttggaaatttgggcgtatgccgttgtaaaattcatgtttcagagaaatgccgctacaaaatgtatctaagcttgaagttatctcaaaagctatcagtaacacattaatttggtcaattgttcagatcggggattagatgcgaaagaactacagagcg

SEQ ID NO: 11030 - DNA, 773 bp, Oryza sativa
  Clone ID: PAT_MRT4530_17293C.1
ggaaaaaaggtaaagctttattctaagatcaactaagcatgtcgacagattaaaccaagaacaccaaagatggactgaacaaattgtttcaagcctcactccttattgccaagccaaccggcttatcatctacagagctttcttggcccatgtccaagaagccgcaaacgaagcttgagcgatgcaagcaagcaagcatatgcattatgcatccactcacttaccctctccatcccttcccgcgccgacggcgtctgcggcaatgtcattgcccacggctatcaacctctccttctcctcctccgcagtcgccgaggcggccggcgcatcagacttctgcgacccggttaacctcgcgagtagcacgaaggacatgccacccagcacgttgtttatgcaccggagagcaacgacggacaccttgaacaccgacggcggcgcggcgttggcgagcaggtactcgacgccgttcagcgtctggtaccgcaggttgctgctgacccccatgtggatcgcccaggtagcggcgttgagcagcgtgggcggcgccttgttcggggtctcgaacgccgggtccatgcgtttccgcagcgagatgaggccgttggagatcgcggtgccggcgagccccgcggcgaaccccacggcggcgaacgtggcgcccttggatagcagcgtcgcgacgcgggagcccaggagtaggcgccggccctcgacatgtggctggggagccccgagcggcggcggacgcggcggccgaagccccggcggtg

SEQ ID NO: 11031 - DNA, 2055 bp, Oryza sativa
  Clone ID: PAT_MRT4530_17294C.1
aacagaaaaaaggtaaagctttattctaagatcaactaagcatgtcgacagattaaaccaagaacaccaaagatggactgaacaaattgtttcaagcctcactccttattgccaagccaaccggcttatcatctacagagctttttttttttttttttttgaaagtaaaacagattgcaccatttttttcccattacctccaaatcctacatacatttcactcctacctttaccgttgacagatgcttagcagagcaaaactaggcgatgctattgaagtgtgccaggtttggttcatcaatgtatcgcaacttcacaagaacaccgtatgaagatatatatctttttcatgtgagcaaaaagtgaagataagatcggtcacaaggccaatgcatgcacatcaatgactctcaggtaattgcttggtaatatccgagtcaccaggatcgacgacactgagacagcacactcggtagtacttgccgcaggcagtgccaagatcaacattgtttccattgaagtgatacacactaacttttcccagcatagcatagtactcaatttcagacttcctaagtggagggcagttgtttgcaacgataactagcttccctttggagttgcggagggtcttgaggacggtcttgtagccgagggtgtacttgccgctcttcatcaccagctgcagcttgttgttgatcccctccgcgttcttcttcgtcttcttaacgggagccatgggatcgtcggcgacggcgtcggtggcggcggcggcgggaatgggaaacttgccccatgtccaagaagcagcaaacgaagcttgagcgatgcaagcaagcaagcatatgcattatgcatccactcacttaccctctccatcccttcccgcgccgacggcgtctgcggcaatgtcattgcccacggctatcaacctctccttctcctcctccgcagtcgccgaggcggccggcgcatcagacttctgcgacccggttaacctcgcgagtagcacgaaggacatgccacccagcacgttgtttatgcaccggagagcaacgacggacaccttgaacaccgacggcggcgcggcgttggcgagcaggtactcgacgccgttcagcgtctggtaccgcaggttgctgctgacccccatgtggatcgcccaggtagcggcgttgagcagcgtgggcggcgccttgttcggggtctcgaacgccgggtccatgcgtttccgcagcgagatgaggccgttggagatcgcggtgccggcgagccccgcggcgaaccccacggcggcgaacgtggcgcccttggatagcagcgtcgcgacgcgggagcccaaggagtaggcgccggcctcgaacatgtggctggggagccccgacgcggcggcggacgcggcggccgaggcgccggcggtgggcgcgaggaggtacatgaggacgaagttgaggatggatccgacgacgagggtggagaagacgaagtcgagctcgttgagcccgaagttcgggcgggacgccatgtcgccgagcacgcaggcgctgacgccgacgagctcctccatgagcaccttgaacgggaactgcggatccgcggcgacgcgtgccgcccacccggcgaggaagatgccgaggatgccgccgctgctgcccccggaatccgcggcgtcgccagatccgccgccgccgccgtaggagcgcggcggcgggggcagcctgccacctggcccagacggaccagacggggacggggatcggaggcggaggaggagggcggacgacgacgaggagagcggggagaaggagaggctaccggcgcggggcggggagaggcgcggggaggagtcgaggtgcgtgggcgccgtggcggggaggaacttggcggcggtgaacgccatggaggccatggcgatcgggaggggagggcgccgcgcaggcttggcggcggcggcggggaggagagtgagatggactttcgatgggggaagaagggttttggtggttggttggtgtagtgcaggctgtgctgtgcaggagtggtagtcccggccgg

SEQ ID NO: 11032 - DNA, 609 bp, Oryza sativa
  unsure (1)..(609): unsure at all n locations
  Clone ID: PAT_MRT4530_17295C.1
caaaaatatgtgatatattactaggagggcatagaccaaaagtataagcttactccttttggaaggtttgattgggattagatatagagacagaatattacatggtggtataaaagcaagagtacttcggataattcttggctcaaatatactaactattattaagctgcgaggcctgaagatgaatatatatatgttcatggagtttaccatggtgcaaggttttaattaggtcttgctgttgaaggacaggatagcgtagacagtttggatgacagtagcaatgagcaggacagtagcagcgacgagggagatgaacacccaagggttactgaagtaggtgtgtaggaggatggccctccacctgttccgccgcatcttgcagtaggcatccacttccgacatcacgtcgttgaggctgctgtcttcgtccatcaccgagcctttcgtcagcgtgttgttgatcagattcgccaccgcctcgtcgctttccaagccgctctcgatgatctccttggccctcagcagccgcacgtncttggccgtgttgatgaggtcgtccatgaatgacacgaacgcggtcacttcgttcccagcgcccgggcgcag

SEQ ID NO: 11033 - DNA, 421 bp, Oryza sativa
  Clone ID: PAT_MRT4530_17296C.1
ggtggcaaaacaatataaatatccgggcccacagggtaacaaatataaaagggggtttttttatggcccatactccataccggggtttttattattggggctgggggcatactaagcgggggcaaaagttttttcattccatagggaaaaaactattattttccttcatccgtttaaggatataaaactttttagtttggcccattttcatatagattttaaggaatctgggctgggttaccctgatccgggtgcatagccatgtttccgaatgggatccggaaagggaaacagatcccctccgaaacgtatcccggacgtatcccacatatttgggatttccaaaaaaataaataaatcagggtcccccagggataccccacgacctttctccgtttttgctcgcaccagggataccccc

SEQ ID NO: 11034 - DNA, 704 bp, Oryza sativa
  Clone ID: PAT_MRT4530_17297C.1
tttttttttgtgcaactgcaatgcttctagaaagattatcagtttattcatgggtgttgactaaagcagtaacagaatttacaaagtgaaaaatagggtgttaattctacaccgagatatatggagaaaatatcaagaatctacaggatctcctacaaataaaataaactgtaaagaaagcactagctaaaactcaaaaacaaatggtaaaactgtttagagatttcatacatggtgaatgatgatcctggtgtagaattgttgatgcttgcagggagaccttgctgtcacagggtggatatgaacaggagttccataattttatcccctgatgcatgatcacatagtcattctgcaaatggtccccactggaacaagtccaaaccactgctggtcccaattcacggcattaatgtgcacatgccaataacctgcatgtcgatgcaccgttaaaagattcagacgtgatctagtatcagtggacccaagatcaaaccagtgctctaaccatacgaaagcctccgtaatgtatgctgttgccagtgtgtcacagacaccatcatgagctcaattcaacatgacatgttttctgcatgtgacaacaattcaaacgatgcatacgggcatgaacctgcgctgagccaacttgtgaccggggtgctaagatcaagaacagctccagatggtccctagcaatcctcaac

SEQ ID NO: 11035 - DNA, 586 bp, Oryza sativa
  unsure (1)..(586): unsure at all n locations
  Clone ID: PAT_MRT4530_17298C.1
attgaacccaatacccctactcggcggtgactagtacaccttatctcttcgaaaccctagctaagagccgtcgctttatctcttttctcttcttcttcttcccttgtactcctccgatccccaatctcatctatcaccacctgacctgatctttccctgcagatctcattgagaaagagaagagaagagatattcttttttccaaagaagaaaatcttggccgcgcgcgcgagatctttgcgcaaaagatgatatatgatgcctgatcgatcttctcgtttcggatcttattattgctcggctaattagtattattaacgctgctagccagggcctttgatccgcgtggtcgtggtcgtcggtgaggcagccgggcaggccgactcccatgcatggaagctcgcttcagggtcaagtcaactgattatgtttttcattaatttgttggtaattaatttttttatatgtacgtacatatatatatagctcggatggtttggtatttctttctcagatctatatatattgcaaggggatcggagtgtcgttagttacacgggtattattatagagttnttgggataga

SEQ ID NO: 11036 - DNA, 534 bp, Oryza sativa
  Clone ID: PAT_MRT4530_17299C.1
atggccatgctcgtgtgcaacccggccacccaggagctcgttgtgctgccgcccagcagtggcagcggcccatgcccacggtctacagaatcaacggcggcgattggcttcgaccgcatggcggaacagtcccacaacgatccgccggtctacaacatcggacacgagatcttcacgctcgacacaggtgccggcgatggatggcagcgcatgcaagaccagtcgcgtgccatcagtcccggcgggaggagacccgctgcctgcacgcgtgggggtttcttctactggttcatcaacgactctcagccatgcgcgctgttgtggttcagcctgcgagacgaggcgttcgacgcggtcccgtcctctctgggctgcacggcctgcgacaacaacgaccgtctcgcggacctcaccggtgagctgtgctacgtgcatcgcgtccgcacaagcgtggccacccacgaagtttggatggcagcggcagttgatgacgatgaccaggagtggtggcagcgataccgagtggacctgtga

SEQ ID NO: 11037 - DNA, 1626 bp, Oryza sativa
  Clone ID: PAT_MRT4530_1729C.1
atggctagccgcccccgtcgcactgctcgtgcaccaaaccgtttcggttttgaggaagttagagttgagccagaggcagatcatgaggaagactccatcattaacatgttggtagctgatttggaagcccatgagcaagctgtactgccaacacagataataaattctgagcatccttgtaagtttctgcatgtccatgtgaggagaggtgtccgtgtgtttaggaatgtacctctcaagttcattcctgagcatcacgcagtgtatagtggtaggatagttacgctcaacaagtctggcgttgttggacacaggccggcaccaccaccggtcctccaagaagctcagatcttagatgttgatgatctcaccaacctggcactcctaccaccttctccggagccatccttaggtccgcgcagaaggggcaagagaatcatgactcccagctactcttcaggtggcaacagcaaggggaccaggagggactccaccggagatgcatttaataggctggctgacctgagggttcagtccaatgaaagtaaggccaggagggaggagcagaagcaagcgaagagcgctagagcatgcatggagatgctcaaggctgatgggattagcatgcaggatcccatctaccacacaatcctgaggatgtttcgtgatgggtacctgtgtgagttcttcattgaggactgcaccacaccagagggtcgcatgtacttcatccagctgcatggtgcaccagacctcactcctgaccccctgttgtttgctccaccgccaccaccaacctgctcaggccatgttgagggctggtacaagaggttcagtcctcatgacgatgatggtagcgacggtgctaatggtggtgctgatggtgcagcaatgaacatgagcacttctgaaagatcatatggttctaaggatggctactacagtgaggaggaggactcctttctggacatgttggttgcggctttgaaggcaaagctatgtgtgagggcagcacgttgggtatcgcaacaatctggaatggaatgggtgatggagacaatggaaaacccatctcaatgccaagcaattttccgtctgatgccagatcaaatccatgctctgtttgggttacttactaatcgatacaatcttcatggatcaattgaggtatgcccaatggaagcacttggaatatttttgtacatcatggcggggggcaattcaaatagggccactaataataggatggtaagatctgggtctactgtctctaagtacatccatagagtgcttaatgcggtttatgctgctgacataaataagccggtagatcctaactttgcaagagttcattatcgtgtccagaatgatgaagaattccagccatttgctgggaaatatttccttgtggactcgggatatgctagccggtatagattcctaccaccttacccacatgtttggtaccacttggatgaatttgcggaacccattgtacaatggataccccatcgtttcagatgctccaccctacgtggctggaacgatgtacctaacagagcggcggcaatgaatacactccgtgataccattgcagatgaagtttacaacaggtttgaaacatag

SEQ ID NO: 11038 - DNA, 2511 bp, Oryza sativa
  Clone ID: PAT_MRT4530_172C.1
atggcgaaggcgcaggcgcagctcgtctccctctccttcccacctaccgcgccacccttcgcccgcccccgccacgcgccgccgttccttaatgcggcggcgctgcgcaccggcgtgccgccctactccgccggcgtcctcgtctccctgctccgggactgcgccgacctccacggggatgacaccgaccaccgggtcgcgcgccgcctggccccgcagctgcactcgctggcggtcaggaccggcctctcgcgggacccccgggtgacgtgcgcgctcgtcgaccttctcgcgcgcctcggccggggtccctcctgcgcgcgcctgctccacgaggcggcggaggacggcgccaaggacgccgtgctgtggaacaagcacgtcgccatgctggccgaggcggaggagtgggacgaggcgatcgccgtcttcagggagatgcaggcgcgcggggtgcccgccgacgggtacacctgcgcgcgggtgctccacgcgtgcggccgcgcgggggcgctccgcgaggggagggccgtccacgcgtacgccctcaagctcgccctggacgcgcacccgctcgtgcccggattcctcgccggcatgtacgccgagaacgccgacgttgcggcggccactagggtgctcgacgcgatgggggcgggcagcgtcgtgccgtggaacgcggtcgtcgcgtgctgcgcgcggctcggactcgtggacgacgccctggagctcgcggcgcgcatgtccaggtcggggccggagcccaacgtcgcgacgtggaacaccgtgctgtccggctgctcccggcacggccgcgaccgggaagcgctcggcgttgtcgccagcatgctgaagcaagggctgcgaccggacgccaccaccgtgtcgagcctcctcaaatcagtggccaacacggggctgcttcgccatggcatggaaatccactgcttcttcctgaggaaccagctcgagccggacgtctacacggggacggctctcgtcgacatgtatgccaagtgcggccgcctcgattgcgcccagaaggtgctcgacgcgctggagcacaggaacctgaccacctggaactcgctggtcgcagggtacgccaacgccgggcggttcgacatagcgctggagctcgtggaattgatgaagaagaacaggcttgatccggatataaccacttggaatggtctgatcactggttactccatgaacggccagagctcgcaggcggtgctgctgctccggcagatcaaggcagctggtgtgacgcccaatgtggtctcatggacgtcattgatctcgggtagctgccacaatggggagtatgaagattcattctacttttgtcatgagatgcagaaggatggtgtccagcccagcttggttaccatgtcagtgttgctccgggcttgcgctggattagctctgcaaaagaagggcaaggagctgcattgcttcgcgctgcgaagagcatatgactgtgacatggttgtgagcacagcgttaattgacatgtactcgaagggtggaagcttggttagtgcaaaagtgatatttgaaagcattcagcagaagaatttggtgctctgcaatgcaatgctaactggtctggcagtccatgggcaaggtcgcgaagcaatagaactgttccatgatatgtggaactcaggattgaagccggactccataaccttcactgcacttctaactgcctgtagatcgatgggcttggttacagaagggtgggagtacttcgacagtatggagactaagtatggtgtaaagccaacgacagagaattatgcctgcatggttgacctcttggcaaggtgtggttatcttgatgaggcaatggatttcattgagaggtcaccgattgatccaggagcaagccactggggggcacttctcacaggatgctcaatacatgggaatcttgctcttgcagaggtggctgcgaggaatttgttcatactggagccttacaattcagccaactatttgttgatgatgaatttgtatgagtatgaacggatgtatgatgaagctgagagcctgaaatatgcaatgaaagcaagaggagtggatagtagacctgggtggagttggatacagattgagcaaggtatccatgtctttgaggtcgatgggaagccgcatcctgaaactgcagagatatatgaagagcttattcgtctggtgtttcaaataaaaaaggcaggatatgtgccagacaccagctgcatagcgtataatgttcaggaagaagagaaagagaagcttctccttggccatactgagaagcttgctatcacttatgggctgatccgctcagatgcaagtagagcgcctgtcagggtgatgaagaacaccaggatgtgcaacgactgccatgaggtggcaaagcatatctcttctctatgtgatcgacaaattattcttcgtgatgctgttaggtttcaccattttgtggatgggaaatgttcttgcaatgattactggtga

SEQ ID NO: 11039 - DNA, 1209 bp, Oryza sativa
  Clone ID: PAT_MRT4530_17300C.1
atggcgcgcgtcgaccgcgacacgcgcacgcgggggacgggacgggacgggatgggacagtgctgcgcgccatggtgccgcgcaaccggatcggtccagcgcatcggcgccgtgcgaccgcctcagcaccacgtgcagccatcctccacctcgctgccgctctcccgggctgcgggagcgagcggtgccgcacggacgtgctgcgcgaccgccggtcccgcagaatggaagcgcgacaacgcctcggtcccgcattcccattatacggaggagccttttgcccctgtcagagatagatgccggtgggaccggtggtcccacccgtcagctcctcctcctatctctcaccggccaaccccaaccgccattgccgcccacgtcgccgcaaaatccgaagccctcccgcacccgagctggcatccaacgacgtgggcacaaaaaccggcgccggccgagccgccaccaccccacgtcggcccccacttccccggtggttgccgccccgacttcgcctctcccgggctcgccgctcccaccaccgccgttccgcgcgaccgccaccagcggcttcgccgcatcgtgctgcaccccggcatccgctccatttccccttcccgcctccgaagcaccgtcaccacgcgcactacctccttccaccgccgccgccgactccagccgccgcttggcgcccctcctagccaccccaagtcgcgctgtcgccgccgctcgcttcgcagcgccgaggagcacctcggccgccgcttttcacggctgggattccgccagaacacggttccccttgcgccggtccttctagccgccgtccgccaattcccgttcgcggaacgccgtcgggccgccgttccgcctttgtcccggggagcgccaacgccgagctcccccgcctttccccgcccctcgtcgccgccctcggtgagcactcctccccccttccctctttctccccagggccggccgcctcccgtgcttgcgcacgctgtgccgccgacgccggtggccgcccgacccgtgtgccgccgtcgctttggtcccggccgccgccgctgccagccttgtgtgcgcgctggccaggccgcgccgcccggccatccccagccgtccaatcggccactcgtctcgctgacgtgtggggcctgcctgtcggcgccggcgccccttgctgacgtctgcgaatgccttttcctttga

SEQ ID NO: 11040 - DNA, 1617 bp, Oryza sativa
  unsure (1)..(1617): unsure at all n locations
  Clone ID: PAT_MRT4530_17301C.1
atggtccacacgtggcctcgggtgcgcgtccaccacgtggatggcccagatcggccagggccgatcggacgactggggacggccgagcggcgcggcctggccagcgcgcacacaaggctggcggcggcggcggcagggaccaaagcgacggcggcacacgggctgggcggccaccggcggcggcggcacggcgcgcgcaagcacgggaggcggccagccaagggaagaaagagggaagaggggaggagtgctcaccgagggcggcgacaaggggcggggaaaggcgggggagctcggcgtcggcgctcctcgggacgaaggcggaacggcggcccggcggcgttccgcgaacgggaaccggcggacggcggccggaaggacctggggaggatgggggagaggttaggagggggagagggctcccagcggcatgaatcgctggtcgnaggtgagaacggccggcgnatgcgcaccggcgcaaggggaaccatgttccggagcggcgccaagcggcggctggagtcggcggcggcggtggcagaaggtggtgcgcgtggtgacggtgcttcggaggcggggaggggaaatggagcggacgccggggtgcggcacgacgcggagaagccgctggtggcggtcgcgcggaacgacggtggtgggagcggctgtggcaaccggctggagggtcgttggcgagcggcggcggaaggggagggaaggccggatcgagcccgggagaggcggagtcgggcggccaaccgccggggaagtggggcgccgacgtggggtggtggcggctcggccggcgccggtttttgtgggacgagcggggaaaatggtggaggacgtggagtggatcgtgcccacgtcgtgggatgcgagctcgggtgtgggagggtgccggattttgcggcgacgtggacggcaatggcggttggggttggccggcgagaggctataaatgaattagagctattagtgggctataccattaaacttgctcagagggagaggaatgagcaacctcgctcaaaaagtcgggcgtgggccccacacggcgaggagatgcgacgtcgccaaggaccgtcgccgagggcgccgccgccgccgtcggtgaggaggacggcgaggacgctccagatccgcgccgccgccgccgtcctcctctcctcatcggcggcggcggaaagtggagacaaagcgaggaggacgacgaccacgagcggctccgtctcctcgtcgccggccgagagaggaagagcccagatccatgccgccgccgccgtcccgcgcctccaccgtcctccgcgctctagatccacgccgccactgccgtcttcgagggcgccgccgcagctcggccccaaggacaacgctgccgcttcttcgagggcgacgcccggagtagagaagagccggcgccggcggagggaggagggaaccccccccccggaggagaggagagccggcgccgacaccggcggagggaggaggggagccggcgccggcggagggagaaggggagagccggcggggatgagtggatttggggattgcatgacgagggaggaggagccggtgaggagttgggacttgggagtttgtgggtcccactag

SEQ ID NO: 11041 - DNA, 534 bp, Oryza sativa
  Clone ID: PAT_MRT4530_17302C.1
atggctcgcgtcaccccgccggccacctccatccagatcccgccatggagggtgaaggtagagagagggagaagatgcgccggtggccaccttcgctggccgctcccgccatcggccacctgcacccgccccttgcgccgctcctccacccctccgcctcttgcgccgctcctccgcccctccacctcttgcgccgcccgcactgctcctctaacctcgcccctcctcccggtgactcctccgcccgcgccgctcctccgcccggccgctcctctgatcgccgccacccctccgcctggcgactcctctgcccaagccgccccgccgatgagctgctggggatgctctaaggtcgacgaaggaagaaagccgttagggccgctagggaacagtggtgtacaccgcaaccacccaaagaggaagcccaccgttgatcaagttcctggcaatttcgtcgacgtcaacgagaaggggaccaaccaattctattgccctcgcatgaagcctcccactgcttcatctccaaacaaatag

SEQ ID NO: 11042 - DNA, 1152 bp, Oryza sativa
  Clone ID: PAT_MRT4530_17303C.1
atggtggcggtggaggaagagacggtgagcttgaatcaacgggtgcttgatctcaccagcaacatcaacaacatcctgggtcgctgcactggaggccaagccgccggtggagccagcagcggcgacaccaacacccgtagggcacagccaggatcagcgtcactaggggaaaaggcattcgctgacgtcagcaaggggcgctggcgccgacaggcgggccccatacgtcagcgagacgaggtggtggtccaccatggaccgggaccacaaggacggtccaccgccggtccatgggttcgacgacccagatcggccaaggccgatcggacggctggggacggccgggcggcgcggcctggccagcgcgcacacaaggctggcggcggcggcggtagggaccaaagcgacagcggcacatgggctgggcggccaccggcggcggcggcacggcgcgcgcaagcacgggaggcggccggccaaggggagaaagagggaaggggggaggagtgctcaccgagggcggcgacgaggggcggggaaaggcgggggagctcggcgtcggcgctcctcgggacgaaggcggaacggcggcccggcggcgttccgcgaacgggaaccggcggacggcggccggaaggacctggggaggatgggggagaggttaggagggggagagagggctcccagcggcatgaatcgctggtcggaggtgagaacgggcagcggatgcgcaccggcgcaaggggaaccgtgttccggcggaatcctggccgtgaaaagtggcgaccgaggagtggcgccaagcagcggctggagtcggcggcggcggtggaaggaggtagtgcgcgtggcgacggtgcttcggaggcggggaggggaaatggagcggatgccggggtgcgagacgacgtggcgaagcagctagtggcggtcgcgcggaacggcggtggtgggagcggctgtggtgaccggctggagggtcgtcggcgagcggcggcgggaggtgcgacggtggcggggggaggggaggccggaccgagcccaggagaggcggagtcggggcggcaaccgctggggaagtggggcgccgacgtggggtgggggcggctcggctggcgccggtttttgtgggacgagcgggggaaatggtag

SEQ ID NO: 11043 - DNA, 1055 bp, Oryza sativa
  Clone ID: PAT_MRT4530_17304C.1
atggtggctgctgtcattggcgagtctctcaagaggaggaggaggtgcgcactgtcgacaggtgatacccgtagactagatatagagggtattggggttacaaaaggaatgatggaacttttcggatccagcgagatcgtagtcgagtggattcgactagctctcgatgacttggctcctcgcagactccggcttcgtgcgaggaccgtggagatgaagtatagtcgagcacaccgtttgaagcccaacggtcacgatccgcaaactccgtcaaacacacaccggctgttagcgctcctcgccttctccgctaccgcaaagaaccctagcttcgccaacttaggtccgttttccggcgatcttcaagcagcaatggatcttggcaagtcagcttccaccagcgcgaccttgaagaagcttcaggaggatggcgcccttcctggccgtgaaaacgcggagaggggagcaggagtgtccctcttcccgcacaaatggcggaacatgtggttttatcttgaaatcaaggactcaaatccggtcctcgttgttcccgaggatcaaccggacaagattccggtctggaccgccaagccccccttgaccccctctcttcaatcgtttatcgacatcatcgatgatctccgagaacggagcttatcggggtatgaagtcgttgcagacttcgtcggtctgagcagcgaagccgtggagcggcgcgtcgatcaagtgatgatcagcggtccgaccacggcgagcgacatccctgcgcccctttgtgaaaggggggcgacggaacgtgatgaagcgatcaatgcccttcctttgactgatgtcgtcggaccgctcgcagatcatcaggtggcgacatctctaaaggagaaggtcgtcaaggaggcgtctgtcgctgcgaccaccactagtggtggcaaagttccgaccaaggcgaggaaattctcgtctgtgctcggacatcgtcgcaaggcattgactccctcggcttcagacgcgtctcctccacctccacgacgacagcgtattgtgacgaacagcgagaa

SEQ ID NO: 11044 - DNA, 2586 bp, Oryza sativa
  Clone ID: PAT_MRT4530_17305C.1
atggcaccgtcgtcctttgcacaagccaccgcgtccaccctctcccgaagctccccatggctaggacaggatctggccataggaggggaggagctccacgaaggtgggttttttcagccggctgggaagaagagacgcctccgccgccacccgcttccccgtgcacaggccagagagaggcagcagctgatgcacggtccacaagccgcagccaccgtcgtgcaggtcctcgtgctgcgatcgctgccgcctccgcgcggccctcatgacgccgccgccgccgccgtgcggccctcgcgcccgccgcctccgcggccgacccacgcatctagcacagatccgaccaaggaagggccggatccgaactcgatggcgccggatctggccatcgtcaccgggctgcgcctctcgaaaaggactgccgctgacgtcagcaagagagggggccggcgccgacaggcggggcccgcatgtcagcgagacgaggtggcggtccaccgtggaccgggaccacaaggacggtccaccgccggtccacgggttggacggcccagatcggccaaggccgatcggacggctggggacggccgggcagcgcgcagatggccagacaaccggcggcggcggcgcaacgcggcgctggcacgggaggcggccggcgaagaggaaaaggaggagggaggcggctcaccgagaggcgcggcgacggagggagaggccgcggagggaggcggtggcgctccacggggcgaagacgacggcggcgattcggcggtctccaacgaaggtggaggagcggccggggtacgggggagcgcggcgaacgcagtagaggcggtggtgtggcgcgaggtggcaaggaacagcggtaagaggcggccgaaggcggcaaacgcggcgacgtcctcggcttcgcggtggagatggtgttgctgcggtggaacgggaaaacgaagcagaggccggggtgctacgcgatgcggcgaagccgacggtggcggtggcgtggcttggtggtggctagggcggcggtggcgcgctgccggagtcggcaaagtgacggtggagctcgggttcacggtggaatcggtgcccgggtggtttattgcggaagcggagcggtggacgggatgcggcaaagcgcggcgaggccggcgatgcaagcggcgcggcacggggacggcggtagcggcggcagcggccggctggagtccgccagcgagcggcggcgcttgggctcacggggaggagggggttccgggcatgggggagcttgggagagaggggaaaatggaggaggggagcacgagggtgctttatatagggctcggggatggagatcgtggccgggagaggcgggatcggccggtgacgtggggaggtgaggtggagctcgtggggaggagggcgccggattttgcggcgacgtgggcggcaatggcggttggggttggccggcgagagcaaggggcggccggcgccgacacgcgggccccacacgtcagcgagtcaaaggggaagggcgcacggtggacatggtccacacgtggcctcgggtgcgcgtccaccacgtggacggcccagatcggccagggccgatcggacggctggggacggccgagcggcgcggcctggccaacgcgcacacaaggctggtggcggtggcggcagggaccaaagcgatggcggcacacgggctgggcggccaccggcggcggcggcacggcgcgcgcaagcacgggaggcggccggccaagggaagaaagagggaagaggggaggagtgctcaccgagggcggcgacgaggggcggggaaaggcgggggagctcggcgtcggcgctcctcgggacgaaggcggaacggcggcccggcggcgttccgcgaacgggaaccggcggacggcggccggaaggacctggggaggatgggggagagcggccgaggtgctcctcggcgctgcgaagcgagcggcggcgacagcacgacttggggtggctaggagcggcgccaagcggcggctggagtcggcggcggcggtggcaggaggtggtgcgcgtggtgacagtgcttcggaggcggggaggggaaatggagcggacgccggggtgcggcacgacgcggaggagccgctggtggcggtcgcgcggaacgacggtggtgggagcggctgtggcgaccggctggagggtcgtcggcgagcggcggcgggaggtgcgacggtggcggggggaggggaggccggatcgagcctgggagaggcggagtcggggcggcaaccgcccggggaagtggggcgccgacgtggggtggtggcggctcggccggcgccggtttttgtgggacgagcggggaaaatggtggaggacgtggaggggatcgtgcccacgtcgttggatgcgagctcgggcgttgtcatcctcgacaacgacggcttccacagcggcggcggcggcgccaagctcttcaccaccacccacgtcggaggaatcgcaagagccgaacaaaaacgggagaaagggcgaccgttgctgccaagcccggacaggcatgggaaggaggcgaccagcatggcagcaccaccatag

SEQ ID NO: 11045 - DNA, 485 bp, Oryza sativa
  Clone ID: PAT_MRT4530_17306C.1
ctccttgcttcggctctcaccaaccaaaccaacaacctcgctccgatggccgcgccaacgtcgtcgcagccggtggcgcgcttcctcccccgcggcggcggcggcgggttccgcgcctttccggagtccgccccggcttccctccgcttctccgtcggccgacgccgcgccgctcgactaggtccgcctattggaatcgtttcgcccccccttgtctgggtccgttcggtggaattcgggtagagtttgcttcctgcgcggctacggggcagttgggaattgcttggctggcctctctcggctttgagttttgtctggtcatctactcgtgggtgaagagggttgccactcgttgtctggctaagaaagaatcttaccatttttttagcattgttttatgccatgattgtgtctattgtatagggtaatttgaaaggagagaaaaacggctgcttcgttctatcctagcattaagagtttgttta

SEQ ID NO: 11046 - DNA, 1276 bp, Oryza sativa
  Clone ID: PAT_MRT4530_17307C.1
accgctcgtgtttgtgtgtgccaggcggagaggagggcgatttctgtcgtcatcgctggattccactcgccgtctccgtcgccctgattccactcactcgccaccgcactttttctggagccacttcgtccatttgagcgaggcttgtaggttttctgccattattgagcttttcatggccactgcaaacaatccaggtccccttgacttggttccaggtttttcacctgaagacatggacaaccccattcataatgctgccttatcctacgtgtcatatgatagatatgtgttagatacctctgaagtgtattttgatgattgcatcccattggagtcttatctgaatattagaccaatggtgacttctgattcgtatcagtttcgttcatttggggaaactaatccaagtgtgacttatctggttgcaacagagtcatgtaagaaaattatcaggaatctctttctatctgaagacggaagtgtgcctgaagatatacagcacctgctaaacttgatccttcatgagtttgacaagagagagatatttcattttcatgggtcattggtatccctagctaatgtgtcactgtttttcaagtcaatgtatgaccatatcagatttgtgatgccaccagatgatcttagggctatcctaacaaaccttccatatgccgatgtttgggagagtaaagtcaagaccaaccgtatcctcaaaaagccttatgatttcaaccctgacggccgtattgtaccagctgacaaaccatctcagacatgcctcaacaaacgtcagagggaattcttacatgcactgggtctaactcctattcgaggacagaaatcgcttacccctgatcagatcgccttaattgaaactctgttcttctttgattttctgagaaataggacatctcacaggatggatccatggaggagcctgattttgggctataatgctgtggactcagaagaactgcctccatcgcgcgcgggcgatggcggccaggaacaaggaggaagtcttcttcgatcccgtgtgagggtagtgaggtcctcaagaaggaggcctctctgggtgtcgaggaatgtcccggggtccatggagtgctggttggaggagtctgggaagaaggtggtcaagtacaagatgcctaatgttgttatcaaacaaatgatgagctacccctacacctacccggagtacgcctacaccgaggaggagctggcccaacgttctgcctcaaactcagaaagttcatcgatgaaaagatga

SEQ ID NO: 11047 - DNA, 382 bp, Oryza sativa
  Clone ID: PAT_MRT4530_17308C.1
atggacatcaacatcggcggaggtggagtcggcgcgcagcggcggcggtggcggtggaggtggaggtggcgcgcggcggcggtggaagtggagtcggcgcgcggcggcggcggcggcggtggaggtggagtcggcgcgtggcggcagtggtgttggcgcgcggcggcggcggcggccggcggtggagtcggcgacgacgatggcggcgaggcaacgctgccggtggcgttcgcaagggcggatgagcgcggcgagcatgacgatgatgacggcggaggcggcggtgacgtctggggcggtaatggcgcgggaggaagaagatcgatcgtggagaagtctaagtgtggcgcggggaagccgatgcagtggatatttatacccg

SEQ ID NO: 11048 - DNA, 257 bp, Oryza sativa
  Clone ID: PAT_MRT4530_17309C.1
attgttcacgtgagctaagagggggaggcgttgtttatacactgagatatatccgcgtagtgcaaggctgatgggtgcactaagatcattccattgaaaaaacgtaatgttcaaaacttgaatagcggagaatatggtggctcttggcacggcagaatcagctataactactatgaattatggagacagtatattcaggtatgctcatccattggattattaaagtgcgggattggtagctacctgccaccagtcac

SEQ ID NO: 11049 - DNA, 684 bp, Oryza sativa
  Clone ID: PAT_MRT4530_1730C.1
atggggatccggttcgtgctgttcgtgaacaagcaggggcagacgcggctggcccagtactacgagcacctctccatcgacgagcgccgcgccctcgagggcgagatcgtccgcaagtgcctcgcccgcaccgaccagcaggttttggttaaccccccaattcccgatcccccctccgattcctcctcgttttcttggatccaatattgcccagcgcggaaacttgggctccggattggtgggtgggggagcggggaaaggaagcctcctgttcttggatctggatctgtgcagtgttcgttcgtggagcaccggaactacaaggtggtgtaccggcggtacgcttccctcttcttcctcgtcggcgtcgacaacgacgagaatgagctagctattctcgaattcattcatctttttgtggaaactatggaccgccacttcggaaatgtggtatttttcagtaatcccaacaattatttttcttgtgactgtaaatacgctcacatatatcacatgggacaagctgatggtaattatccttttggccagtgtgaactcgacatcatgttccatctagagaaggtgcacttcatgctggaagagatggtgatgaatggctgcatagtagagacaagtaaacagaacatcttagcaccaatccagcttatggagaaaacttcttag

SEQ ID NO: 11050 - DNA, 477 bp, Oryza sativa
  Clone ID: PAT_MRT4530_17310C.1
gttgtcttttgagctttaatccccgcccccagcctctggcccgtggactcgcagcagcacacggcatccgaagccgagggcggagcagggatcgactagcggtgaggaggcgggcgagcggctggccgccatggaccgtggtctgagcacgttactgggagcttgcgtagctcgagcccaagctgttgcaggcttgccagcatgcgcatagtttggcgtatttaagggtatactccgtcggtcgaggacgacttcgtgtacgcacatggtttatggacactttgctttcggctcccgaacctgtttgactggaatccgctctacgtcgtgagcgcgcttcgttctggagccccgtcgtcggacgtcgtcgttgcgcagcatcgtggaggcgctcgcgcactgacaccgtcgcggggttgtccaccgcgacgtcaagcccgacaacattcttcttgacgttgtcgacgacgggatcga

SEQ ID NO: 11051 - DNA, 469 bp, Oryza sativa
  unsure (1)..(469): unsure at all n locations
  Clone ID: PAT_MRT4530_17311C.1
acagccacgaagcggggcgcaaccaccaccgtggntacggcgaggtggtggccgcgggcgcggcgccgctgcgtttggacagggcgagccggccgggccagacggaggtcgacgccgtggtggagtacagggagcggaggagccgccacgagaggcacggcgggcacgggcaccgcgacggccactactccccgtctgtgtaagggatggctctgacagtctgacgcatctagtgtacgtgggattgacatttgagtattcaccagcgatctcgtggtggacttttcagtcagttcttgacattgacgtttgccttgtactaaagccaacgtggacttttaataccctccgttttttaatagatgacgcagttgacttttttcatatgtttgaccattcgttttatttaaaaattttatgcagatgtataagatataaaaaaaaaaaaaaaaaaaaaaaaaaaaaaaaa

SEQ ID NO: 11052 - DNA, 1090 bp, Oryza sativa
  Clone ID: PAT_MRT4530_17312C.1
tgtgtttctcgccctcctctgctcatcccctccccagatctccagccccaggagctccggagggttcccaatggcggtgaaggtctatgtcgtgtactactctatgtatggacatgttgctaaactagctgaagagatcaagaagggtgcttcatctattgaaggtgttgaggctaaaatatggcaggttcctgaaactctccatgaggaagtacttggaaagatgggcgcgcctcctaagccagatgtgccaacgatcacaccacaagaacttactgaggctgatggaatcctgtttgggttccctacaaggtttggcatgatggctgcgcagatgaaagcattctttgatgcaaccggtggcctgtggagtgagcagagccttgcaggcaagcccgccggcatcttcttcagcactggtacccagggcggtggtcaggagactacaccgttgacagcaataactcagttgactcaccacggcatggtgttcgtcccggtcgggtacaccttcggtgccaagatgtttaacatgggagaagttcaggggggcagcccgtacggcgccggcacctttgccgccgacggctcgaggtggccgacggaaatggagctggagcacgccttccaccaggggaagtacttcgcaggcatcgcgaagaagctcaaggggtccgcttgagatctccattgggcaaattcaattgggcgtgtgcgtgtccctacgcacaacatcgtgaggcatttcatacagctccaaaccataccgacatacagtcaatagcttggtctcttcttttgtggtgtttctcgatgctatgtggcttctccctggaacttctcattgccgtacgcatgatatgattctgttctacgctttggtcagctggttgtaatttggagtaagttctgttattgtattattggttcccccatgatatatattgattattgtacggggagatctcttggttgccattccgtcattcctgccttttcttttgcgaagctaattgcagcatctgccgctctggaataggagtgagtaactgactaccatgatgaaaaggataagtctattttgccaccc

SEQ ID NO: 11053 - DNA, 219 bp, Oryza sativa
  Clone ID: PAT_MRT4530_17313C.1
gtagcctctccccgttgctccaatccacccctactgcttgaatacgctgccaccttcaccatagctcgccaccttaccatccgcaccgccctcaacgcagctcactgccgccaccaagaactagctagggttcaagaggagaggagaggagataaggggatccacaacaaagaccacaaactttcagtgtcatgtggcaaattttgcctagcaaaacga

SEQ ID NO: 11054 - DNA, 349 bp, Oryza sativa
  Clone ID: PAT_MRT4530_17314C.1
cccacgcgtacgtggacgcgtgggccgacgcgtgggttttcctcaaaatctcttcttgggaggggccagcatttaagcttgactgaccttccaacacccatttaatttatcctgaacactgaaattgtcaaagctgatgatgaatctaaccatgaaagatacccgcccgctgacccacgtacaacatcgtttgcatactctgtgccgagtggcggaaggtctatttatgcttcgattctgccctcactcgttttgaaattagatctaaccatgtctgctaacaaggattgttttgatctaccttacgttgatgttcatctctataatagtgaacctggctcctctttta

SEQ ID NO: 11055 - DNA, 1453 bp, Oryza sativa
  Clone ID: PAT_MRT4530_17315C.1
tgagagctcagaatcgcatgaagcagtatgctgatgagaaacgttccttccgacagcgagcccagggacacggcgagctcgatgatgtgaagctcgccggccaactggtcgtagaagaactccttcagctcaatcacggcgagcacctcggcaacgccgacgagcacgtgctgcggcaccagccaccaaacatccatcggcaccgtcacgtccggctggtccattaggccggtgtcgcgagccacgcggagccgtctcgcctcgacgagcgccgccacgaccgtggcgaggcaggccgtcgccatgccagcgccgacgcgctagagcatcgtgatgccgtcgcggccaccgccagcgaggcgcctggcgagcggcacagccatacagtcgtacaccggcagcagcgcgatgtaggtgaagctgacgaggcactgcagccccgccgacggcacgacgaggccaccgccgccgacgcgccgctccattaattgtgctgctctgcttggtgattggtgaacggagtggacacctgcgagacgacgacgacgaacactatgctggtcaaccagatcggaagcagcaaccattgtcgtcgccatggccatccacctcctcaacttgtgccattctcgtcgacgtagctgagcaaggtggtggagatgacgtagccccagtatatggagaagtggtaccaattgaagcaggagctccgggacgcacgccgcacgccaccgccgtcgatgatgactccgctgtctcttttaaactggtccgcgccgaacgccacgtcgcactcgcatggcgtgtggaagccctccgccgtctgcaagttccggcgccacatcctcaccgacccgagcttcgtcgcgcaccaccacgcgttccacccgagggcggcggcggcgaccagggtactcggcgtcttccacaacccggtcaaccgcgagctggatcgcttcatcccgaccgccgccacgagctcgctgctattcggcgtggagaaggacactgctgccgcggtcaaccttaccaccggcgcggtcgggaacgagggcaggaggaggcatcgccgccgggtgcggtgcagcgcgcagagaaagcgaccgcggagtgcgcacgctttatgcggagctcggcaagatggtggcacggcgtcaccagcggctatcgcgctcccttcaggcgctcactgtcctcgccgaccaccttatccttgccgctgtcgaggatcgtcatgccggccctgccccaaccgcatcaatcccctttcacccggctgccattggtccccagcgactccaagagctccacgatgtcgcccatggcgtgcgcgtggtcgtcggggatggacatgaaccggagccgcggcgagtcggcggtcagagtggccgcggcaccaccaaggcaccaaggcgcgcggaggctgtggtctgtgtggaggaaagtgacatga

SEQ ID NO: 11056 - DNA, 1233 bp, Oryza sativa
  Clone ID: PAT_MRT4530_17316C.1
atgcccagcgatggcaacctccgcatcgtcctcttcccgttcccggcgcagggccacttctccgccttcctctccctcgctgcccacctccacgacgcccagcccacggccgacatctccatcgtctccaccccgcgcaacgtggaaggcctccgccgccggtccagctcccagacgcggtacctccggttccacgccctgccgttcgtgcctgctgagcacggcctgcccggagacgccgagtcgaccgatgccgtgccgcccctccacttcatcacgctgttcgaggccaccgagtcgcgctcgctacaggacagcttcgacggcttcgtccgtgacttgatcgccgacgccggagcagacgctgccagggtctgcgtcatcgccgaccccttcctcgcgtggacgaccgacatcgcccgccggcgtggcgtcgcgcacgccatcttcgtgtcctgcggcgcgttcggcagcgtggtgtaccactcgctgtggaaccacctgccgcacctgcgtgcgcccggtgacgatgcgttctgcctcccggaccacccggaggttactgtccaccggtcgaagcttccgccgtacctactccacgccgacggcacggaccggtggtcggcccaccaccgccggcagacatcagccgggtacgacaccgacgcgattctcatcagcatgatggaggagttggagacgaccgggctgcgcatgctccggagaacgatgggcgtcccggtctatcccatcggccctctagtgcgtcgccggacggagcactccgatcacaccggtgaccataacgacgattacgtcaagaggtggctcgatacccaagaagagaggcttgaccagatggttgacctcgccgtggcactggagctcaccggccggccgttcatttgggctatctgtccgccgttcgggtttgacatcgagcccaccaacggtggccagttcagcgccgagtggttgccggaagggttcgaggagaggatgcatgccaagaacattgggcttctcatccacgggttggctccgcagagcatggcgcacggcgtgccaatcatcgcgtggccgctcacggcggaccagttcttcaacgcccagatgctggaggagtggggcgcgtgcgtggaggtgtcccgcgggagctggccggactccccggcgctggagcgtgagagggtggtcgaggtcgtggatatggcgatggggattacggcgtag

SEQ ID NO: 11057 - DNA, 459 bp, Oryza sativa
  Clone ID: PAT_MRT4530_17317C.1
cccacgcgtacgccctgatcgtagagtacgctccatcaccagaagaggaaattacgtcctctctgtcaccacagttaggaggagtgccatcacatgaatataatggctatttcactccagctagaagaaaacaatcttcgtccatacacagcccagcaagagcggcatcatcacaatccttttcagaatttttggatgattttttcgagaactcttataggaaactatcagtttccataggaaagaagaaatttagaaaacggaccttaatgaagttaagttttcctgagttggagaatgctacacatcactttacaacaagaattggacagggtggttctgccattatttacaaggtttgcccctatgctttcctttgtttgctcagttttcgagtgtccattttgaaatggtgatgtagtcacctgatgttgtcgattttctgtaaatgtacaagtt

SEQ ID NO: 11058 - DNA, 1620 bp, Oryza sativa
  Clone ID: PAT_MRT4530_17318C.1
ggctgcaggaattcggcacgagggccattgccacacacacaccgaccggtgctgtcgtgcttcctctcctttcagacaagagcaaaaatttaatttccttccagtggagaagcctcgaagtcaaagaacaacgtgttcaccatgcccagcgatggcagcttccgcatcgtcctcttcccgttcccggcgcagggccacttctccgccttcctctccctcgccgcccacctccacgacgcccagcccacggccgacatcaccatcgtctccaccccgcgcaacgtggaagacctccgccgccggtcgagctcccagacgcggtacctccggttccacgccctgccgttcgcgccagccgagcacggcctgcccggagacatcgagtcgaccgacgccgtgccgctcctccacttcatcacgctgttcgaggccaccgagtcgcgctcgctacaggacagcttcgacagcttcgtccgtgacttgatcaccgacgccggagcggacggtgccagggtctgcgtcatcgccgaccccttcctcgcgtggacgacagacgtcgcccgccggcgtggcgccgcgcacgccatcttcgtctcctgcggcgcgttcggcagcgtggtgttccactcgctgtggaaccacttgccgcacctgcgtgcgcccggtgacgacgcgttctgcctcccggaccacccggaggttactgtccaccggtcgcagcttccgccttacctactccacgccgacggcacggaccggtggtcggcccaccaccgccggcagacatcggccgggtacgacaccgacgcgattctcatcagcacgatggaggagttggagacgaccgggctgcgcatgctccggaaaacgatgggcgtcccggtctatcccatcggccctctagtgcgtcgccggacggagcactccgatcacatcggtgaccataacgacgatgacgtcaagcggtggctcgacacccgagaagagaggtcagtgctgtacatctcattcgggtctaataactcgctaaggcctgaccagatggttgacctcgccatggcactggagctcaccggcaggccgttcatttgggctatccgtccgccgttcgggtttgacatcgagaccaccaacggccgcgagttcagcgccgagtggttgccggaagggttcgaggagaggatgcgtgccaagaacattgggcttctcatccacgggtgggctccgcaggtgagcatcctcgcgcacgcgtccaccggcgcgttcctgagccactgcggctggaactctgtgctggagagcatggcgcacggcgtgccaatcatcgcgtggccgctcacggcggaccagttcttcaacgcccagatgctggaggagtggggcgcgtgcgtggaggtgtcccgcgggaactggccggactccccggcgctggagcgtgagagggtggtcgaggtcgtggagatggtgatggggattacggcgaaggcggacaagatacgacagagtgtgaagcagattcaggggatgattggtcgaactctggaggacggtggttcgtccaagacagcattggaggaattcttgaagctgcatggtcacattatgctcatgaaatgctga

SEQ ID NO: 11059 - DNA, 384 bp, Oryza sativa
  Clone ID: PAT_MRT4530_17319C.1
ccgggctgcaggaattcggcacgagagagatctcccagaggaatttcagagtcgtggcctccaccccaagccacccacttaaagtcctcatctcctcctccctcgtctcctctttcattgcctcctctcttctctcctctcctctcctctattggagcgagagtgagagtgacccttcttccatgtactactactacactagctagcttcctcctcccctactacactgcacacaaatccctctcaaatgtgcagcagcagcagcagccaagtgacaaaaagaaaaggaaaaaggagaagagttccccaccttcacttgattgctggtggtagtagtagtagtagtactataggctcttcttggagatagcggacgagctggag

SEQ ID NO: 11060 - DNA, 6711 bp, Oryza sativa
  Clone ID: PAT_MRT4530_1731C.1
tcactcttgtagaggaggaggacgcgccgaagtggaaggatgaggagcatcacgacgacgatgatacacaaatgcttgggagctctccaacatttggactcgagaatccaatgtacccactctagtgtgcaatctccccacagaagcattcaagtctccaacatctgtgcgcaatccacgaacattctcatgcaaagcttcatgcccggtggacaagcgttgaatgctttcacttagggtattaatagccccaagtaccgggttaaagtattcgtttggttgcattccaaagtaggcatactgaggatagaaaaaagcatttggatcatacccatgaggaggaggaggtgctgagcttgagctagctccaggatgagaggagggtgccgccctaggagcacggggagctccaagctgaaggcggggcttgtactgcttgtgcttctttaaattttgcccaacagccccaagcttgtcttgaatcaacctcatgatgtaaggggcataatagattccctgagtgaatgtagccttagagatggcaatctcttgcatcataagagacacaatgtcgaattgatggccctgaatgatggcatcgatgacgtgccaagccacccccctaatgtcatcattgttaccaaggcgagggaggatggtaactctcacaatcctgttaaccacacaggggatggtcctcaagccggcaaccttcccatgtgtgtaccacactccgtcttcgtaaaactgagagacgtagtctatggagagcggattgtgagtgtgctcctcatgcaagtcatctccaaagtccaagcgaatactgaggagccgccagaattgcctcctagagatagaacactgaagggtgtcggacatccacttcatctcactatagtctccagccacccacatcttttggaaagcggtgtgaaaacggggattccgggtgtcccgaggcctcaaaaactgatcatggtgcctcaaaatggtatactgcgatggattcctcatgttcacaacaaactggatggagggatcaatgtgcatatcatcacttccttcatcctcatcctctccacttccactgacatcatctccactttcctcctcactagccccctcaacattggcctcaacctcttcatcactttgagcgtactcatctccgcttgactcctcactcacgggatcgggcgtgggctcacgacgactatgacgagtgcggggaggcatttgcggtggataacggccggtcagaccgccgtccacatgtcggtcagaccgtcggccgagctcggtcagaccgtcgaccgctgaccgagctcgatcagaccacctcaactttgttttgaaacttttctcaaattctctctcaatctcattttggaggaaaatctcattttggccaaaaataagaatatagtttccgccgaaacatattccgcctcggcggtagagggctacggagttttgtttcttggatgaccatgacacaagggatctaccaagcatttggcaactaccgaatgtgctctttctatccactttgcaaccggcataatccgaatcggaatagccaacaagtttaaacttagcaccttttaagtaccacaagccaatagtagaggaatgctttaaatatcttagaatccttttcacggccactaagtgacactccttaggagcggcttgaaaccgtgcacacatgcaaacactaaacatgatatccggcctagatgcagtaaggtaaagcaagctaccaatcatagaacgataaagctttaaatctaccggtttacctccctcatcaaggtcgagatgcccgttggttgccataggtgtcttgatgggcttcgcatcctccaagccaaacctcttgagtagatccttgatgtacttggtttggctcacgaacgtcccatccttgagttgcttgatttgaagtccaaggaagaagctcaattcttcaatcatggacatctcaaattccctagacatcatatcaccaaatcccttgcaaaataccttattagtagaaccgaaaatgaaatcatcaacataaatttgacacacaaagaaatcatcaccaatgatttttgtgaaaagggtggtgtcaacttttccaattttgaaatcctttgacaaaagaaaatctctcaatctttcataccaagccctaggagcttgttttaaaccataaagagcttttgagagtttataaacatggttaggatttttaggatcttcaaaaccgggaggttgttcaacaaagacaagttcggcaatttcaccatttagaaaagcacttttcacatccatttgaaatagttttatatcaaagcataatgcaaatgcaagaaggatgcgaatagcctcaagtcttgccacgggggcaaaagtttcaccgaagtccaaaccttcaacttgtgtgaaaccttgtgccaccaaccttgccttgtttctcaccaccaacccgttctcatcttgtttgttcctaaagacccactttgtccctatgacattgtggtctctaagtctttcaaccaaagtccacacattatttcttgcaaagttgttgagctcttcatgcatagcattcatccaatccggatcacaaagagcttcatctacatgttttggctcaagacaagaaacaaacgagtaatgttcacaaattgaagcgacacgagatcgagtttgaacacccttactaatgtcactcaacacttggtcaattgggtgatccttggaaagagcggtgtgtatccttggtggcataggtggatcttgtgccttctcctcctccacttcaacttgagcttgacttggcgtagcggaagtagatggctcatcttgagtggaggtggatggcttgtcttccacttcagtaggcttgacatctccaattgacatgttcttcatagctctcatcaagccttcatcacctacatcatccagattcttgtgcccctcttgggagccattagtctcatcaaattgaacatcggcggtttcttccacaatacctttgttcttgttgtagacccggtatgccttgctatttgaggcataacctagaagaaacccttcatcacaacgactttcaaatttggttagtctaacacccttttgataaatataacacttgcaaccaaaaactcgaaaataggcaacatttggcttcctcccaataattcgctcatagaaagtctttttcatgagacgatgcaaataaagccaattggttgcatggcaagcggtgtttatggcttccgcccaaaaggaatcagaaacaccatattcatcaagcatagtcattgccatctcaatcaatgtacgatttttcctctccacaccaatgctcttataggttgttgggccaaacaaatccatatgcaagagctccaatggtctagatgtggacatgatactcttagtaggatgagaacatgcaacttgcttgccagcttgacaagcactacaaagcttatctttctcaaacttcacatctttcaagcccacaactagatcacgttttgaaagtttgctcaattgattcacgcaaacatgggctagcctcctatgccaaagccaacccattgaagtttttgcaactaacccaattacctttcctttgctattgtctccaaatgtcactttctcttgttctttccctcctacttcaaatatggtgaacatagccctatcaccagtcatgtgttgagtgcatccactatcaagcacacaatggctcccaccggtgcggtagttcaccacggagtataggggaacccacatatctagcaataatgctaccatcatgagccttcccttgaagcacatctccaaactcttgttgagcttaaccacttgctccttaagctcattgttctcaacaacaagtgaggcatcacaaatagaaacacaagtgctagagctagagctaggcatatccacaagatcatcacaagaggtagaaatgctagatgatacaacatgagcaatatggcaaatagcactatcatcaagcaaatcacaagatatgccaacatcaatgagaactccatgttgagtagtggaaaggaggttgtcatgagcttccttaagcttctcatgagaaatggtgagtctctcatgagaggtctttagctcctcatacaagacctccaaagaagcatgatccttctttcgggccttgaacttgacaatctccttctcactataagcatagagctccttaaacatactcacaagctcatcataggaaacatcatcacaatcatcatcactctcactatcactaagaaatgctaccttagaggagtcctttgccatgagacaaagtggagcgaagagtgatggagcctccttgatggcaacaacggccatcttcttcttcttggagcttgcatcatcaccaccttcttcttcggacccggatgaggcggagctctcctcatttgagtcccattccccgataaaggcctcaatattcttgccttccttcttgagcttcttcatgagcttgtagcctccactcttcttcttggatgacttgtctccatcatcatccttggaagggcacttggaagcaaagtgtcccttctcaccacactcaaagcaccttctagcaagaagggcaatctcttcctttcctttactattgtctctaaatgtcactttctcttgttcttttcctcctacttcaaatatggtgaacatagccctatcaccggtcatgtgttgaatgcatccactattaagcacccaatggctcccaccgatgcggtagttcacccaaacttgtttgggtccttggaggttagagaccaaagctttgggcacccaaatggcattctttttaccaccaagtataggggaacccacatatctagcaacaatactaccatcatgagccttcttaagcatataatgagaatcaaacatgcatgtcttggaaggcttactaccggggcaatcattcaccaaatgcccaacctcatgacacttggagcaatacttaccgttgctcttgacaaaacgagtgacacggtgagaaggtttcttacccttctttggaatgtatccaagtcccttattgttaaggatgcaccgttgctcactgaaaatcttgtcaagagtgttcttacccttgaagcacctctccaaactcttgttgagcttggccacttgctccttaagctcattgttctcaacaacaagtgaggcatcacaaatagaaacacaagagctatagctagagctaggcatatccataagatcatcacaagaggtagaaatgctagatgatgcaacatgaggaatatgactagaagcactatcatcaagcaagtcacaagatatgccaacatcaatgtgagctccatgttgagtagtggaaaggaggttatcatgagcttccttaatcttctcataagaaatggtgagtctctcatgagaagtctttagctcctcatacaagacctccaaagaagcatgatccttctctagggccttaaacttgacaatctccttttcactatacgcatggagcttctcaaacatactcacaagctcatcataggaaacatcatcacaatcatcgtcactctcactatcactaagagatgctaccttagaagagcccttagccatgagacaaagtggagcgaagagtgatggagcctccttgatggctacaacggccatcttcttcttcttggagcttgcatcatcaccaccttcttcttcggacccggatgaggcggagctctcctcatttgagttccattccccgatgaaggcctcaatcttcttcccttccttcttgagcttcttcatgagcttgtaacctccactcttctttttggatgacttgtctccatcattatccttggaagggcacttggaagcaaagtatcccttctcaccacactcaaagcacctcaagttagagagagtcttgttgggtcttttatttcttctcttattggagttggagccccttcctctctcctttcttcttcctaagagattattgaaccttctagcaagaagggcaatctcttcctccaagtcatcattgacttcattcaccttgctcttgcccttgtcttcaacttcggcttggaaggtgaggcttcctccatctccttcttcttcaacttgtacatgtcattggtgttgattttccccaagaggcttgcgggtgtcatccttgacatgtcggagttgatgagcatggtgacaagggtctcatacttctccggtagagccctaagcatcttttgggcaacctcaagatcggtgtagtttgccccaagccccttgagatcattcacaatgacattgagcctcccatacatgtcattcacactcttatgaggcaacatggggaatgtctcatattggatcttgaggaaatgaagcttggcatccttgtactcgcttgtgacctcatggatctccgccaacttgttccaaatctcatatgcggttctcaaggttgctcactctatcgaactccttttggctcaaagagttgaacaaagcattcatggcttgggcattgagttggaggttgcggtgatcaatctcagtcaagggcgtgccggtgatagcaaagcaattagcgcttgtcattaattaccaaaattaacaacgtgggcctagatgcttcacacgagtacttgatgtaaagctctcaga

SEQ ID NO: 11061 - DNA, 483 bp, Oryza sativa
  Clone ID: PAT_MRT4530_17320C.1
atggactccccagcgacccccacggacttctcgccgcttcacagcgacgacctcgccggcgctaggaggctcggccgggcctttggtgggtacctacgcgtagagggaaacgatacgatctcaaaggtgctcaccgaagcgacaaacgacgacggacggcgcccggcgacgaggtggtgcggcggcggcggctcggtcgacgacggcggcggcgctacggcgaccggagacgacggagagggggcggccgggattctactccctcacgcgcacctaacggcggcgacggcatgcggcggcgacgacgcaagcggcggcgcgacgcgacccgaggtcggccggcgacggcaagcggctagggcgacgcggcggcgactctacggagcactagagagctcgggaaagggggcaaacgaaagaggacgactagggggtcctatttatagccttggattggagagatcggactcccacctcgagtaa

SEQ ID NO: 11062 - DNA, 303 bp, Oryza sativa
  Clone ID: PAT_MRT4530_17321C.1
ggtcaatgaatcaattaatcattttttttcgtggtatatctagttagtggtttcgttttaaattaattgttttttatgaattcattttattatttaacagtgcgagcaaaaccactaactaaatgccttgcaagcccacactctttccaaatatgaacccatacaatacccctttcactccaaattaaactacatgagctgataaacaatccaaaaaatcgcaaaaataaacaaagttcacattttactttacacacagactctttttttatgccaaacccaaaccaccataggtaaattctt

SEQ ID NO: 11063 - DNA, 189 bp, Oryza sativa
  Clone ID: PAT_MRT4530_17322C.1
atgatggccgggcagccactactcgagcgcgagcttcgctttgcccgacgttacgcgcgtacgcagacgagatcgacgaggcaaccaggccggcaaatctcaccgattctttacgcgacggccacgctcgatcgctcgctgatcatggccgcgcgcgccgtacgtgcgtgcaacgtgcacgtcgcgtga

SEQ ID NO: 11064 - DNA, 2007 bp, Oryza sativa
  Clone ID: PAT_MRT4530_17323C.1
atgcggcgcctcctgctcctcccgctcctggtgctcgccggggcggcggtcggcgggggcgtcgtccccgtcgcggcgcggtcggcgttcgcgtgcgcggcgggcgggccggcggcgacgctgccgttctgcaggcggtcgctgccggcgcgggcgcgggcgcgcgacctggtggcgcggctgacgcgcgccgagaaggtgcggctgctggtgaacaacgccgccggcgtgccgcggctgggcgtcgccgggtacgagtggtggtcggaggcgctccacggcgtgtccgacacggggcccggggtgaggttcggcggcgcgttccccggcgccaccgcgttcccgcaggtcatcggcaccgccgcgtcgttcaacgccaccctctgggagctcatcgggcagtttagaagttcattatcatcaatggacaaaactttaggacccaagagtgatgcacaccttgctagtgtgtccaagtccaaaaaggaaggacataatggaattcctagtgtcctatatagtgtgctggccaatgaggaattcgatcacgagcgtgaatgtgagcacaagcacacggttgagaattcacgtgcgaatgcagtgttgcatagtaacttggttgagtacacgataggctgtatacgtatatctgtcttcatgtacgtgtacgtatgcgcacaggcggtgtccgacgagggtcgcgcgatgtacaacggcggtcaggcggggctgacgttctggagccccaacgtgaacatcttccgcgacccgcggtggggccgcggccaggagacccccggcgaggaccccgccgtcgccgcccgctacgccgccgcctacgtccgcggcctccagcagcagcaaccctcctccggccgcctcaagctcgccgcctgctgcaagcacttcaccgcctacgacctcgacaactggtccggcaccgaccgcttccacttcaacgccgtcgtgacgcgccaggacctcgaggacaccttcaatgtccccttccgctcctgcgtcgtcgacggccgcgccgccagcgtcatgtgctcctacaaccaggtcaacggcgtgcccacctgcgccgacgcggcgttcctccggggaaccatccgccgccggtgggggctcgcaggctacatcgtctccgactgcgattcggttgatgtgttctacagcgaccagcactacacgcggaccagggaggacgccgtcgcggcgacgctccgggcggggctcgacctcgactgcggcccgttcttggcgcagtacaccgagggcgccgtcgcgcaggggaaggtcggcgatggcgacattgatgccgcggtgacgaacaccgtcacggtgcagatgcggctcgggatgttcgacggcgacccggcggcgcagccgttcgggcacctgggcccgcagcacgtgtgcacggcggcgcaccaggagctcgcggtggaggcggcgcggcaggggatcgtcctcctcaagaacgacgggcgggcgctgccgctgtcgccggcgacggcgcgccgcgccgtcgccgtcgtgggcccgcacgccgaggcaacggtggcgatgatcgggaactacgccgggaagccgtgcaggtacacaacgccgctgcagggcgtcgcccggtacgccgcgcgggccgcgcaccagccgggatgcaccgacgtggcgtgcgcgggaagcggccagccgatcgcggcggccgtcgacgccgctcgccgcgccgacgcgaccatcgtcgtcgccggcctcgaccagaagatcgaggccgaggggctggaccgcgcgagcctcctcctccctggccggcaagcggagctcatctcgtcggtggcgaaggcgtcgaaagggccggtgatcctggtgctcatgtccggtggccccatcgccattgggtcgcgcagaacgacccgaagatcgccggaatcctgtgggctgggtaccccggccaggccggcgggcaggccattgctgacgtcatcttcggccaccacaacccag

SEQ ID NO: 11065 - DNA, 1011 bp, Oryza sativa
  Clone ID: PAT_MRT4530_17324C.1
atggagcacttcaacgactgggacctgcaggccgtcgtgcggagctgcagcttcccgcaatcggagcctcctcgcgtcggcgtcggcgtccccgcggcgccgggagcgggcggggctccggtggtggtggcgccgcccgcgcgcgcaccggatggtccggatcagatggcgcgggcgtcggcgtcggcgctgtacgacctcgagtacctggatttggatcataagccgttcttgctgcccgggtcgtcgtcttcgtcgtcgtcgtcccgagcggtggcgcgggcgcgaggggaggatgacggcaaaggcagacacgaggtgatgatctctttccccgcggcggcggcggcctccacgtccggtgcgcagccgcggtcgccgtccggtcggaagccgggcatacgcaccccgcggcctaagagaaggagcagcaagaagagccagctgaagaaggtggtgtacgaggtgccggtggcggacggcggcgtctcctccgacctgtgggcgtggcgcaagtacggccaaaagcccatcaagggctcgccttatccacggggatactacaagtgcagcagcatgaaggggtgcatggccaggaagatggtggagcgcagcccggccaagcccgggatgctcgtcgtcacctacatggccgagcactgccaccccgtgccgacccagctcaacgcgctcgccggcaccacccgccacaagtccgcccctaccggcgacgacgacaagccgacgtcgccgggccctgcagccggcagagcggccgccggcgagggagtggtcaagtgcgaggacgtcgacggcaacgagctgtcggcgatggccgcggatggcggcgcagaggacacggcggcggcggcggatgacgacggtgagttgtggccggaggggatggggctggagctggacgagttcttgggtcccatggatgacgacgtgttcgagttcgaccatgtcttggaggacgacggcgtgctggggcgacggctctcgctatag

SEQ ID NO: 11066 - DNA, 414 bp, Oryza sativa
  Clone ID: PAT_MRT4530_17325C.1
tttgttttttttttttttccctccacagtcgttaactcactgccaggctacagccagtactgaaccccgggcaatgcgatgcggcatggaatgtcagctgcaccatccattgtttaggggcactgcatggctttgccactggccagaccggctgactcaacaacagacagtgctaggcaaactcagctgtccaacccttccatgtaccaggctgctgtagcagccgtcatgtcatcatcacactctgtccctagcgcacagtacgtcccagctgccactcactctactgctctccgctctattgctgttcctcatcagcagctgccttctgggctgggtacttggctgccacatcggcccagctgactgtgccgtccaccagctgcctgatgactgccgcaatgtctggcaccg

SEQ ID NO: 11067 - DNA, 327 bp, Oryza sativa
  Clone ID: PAT_MRT4530_17326C.1
gtggatgctgcgggcatggtgctgagaccacatttcaccgttgccggtgccggtggggcggtggcggcggcggatttatccggcggcgatggtggtggtgatgcggcggcggaggcggcgaggtggaggtttgcgagctcgaggatgcgggacgcgtacgtggtgctgcagacgtggaggcgggaggccatcttctccgaccccaacaacctcaccaccgattgggtgggccccgacatgtgcaactactccagcttgttctgtgcgccgctgccgtgagatcgtcaggtggtcaccgtcgctggtgtcccggggattacaggagat

SEQ ID NO: 11068 - DNA, 1612 bp, Oryza sativa
  Clone ID: PAT_MRT4530_17327C.1
gaagcatctcatgaccaatgccgtgcagatgcaggcgcacagagcaatggcttcgagaacgctgcctcacccatcatccatgtccagccgaaggagcttgcattggcatccaccacgcagacgcctcttggatcaaatcggccagttgagatgatggcgaaggggcctagatcaggcacggttccctttcgtcagaacgctggagctggtctcttgggtgcatgccctgtggctacggtcacgtcctctacgccagatcagagcacaccggttagccattctggagcttcaatttccacaccccggactgctcagagattggctaaatcaggagcacaaggatgaagagaaatatgccttttctctctaaaacaaggatgaaaaaagaaatatcgaagatgactcctccaaattctcgaagttgttttctttctatcaaatgagagggattacctgcaagataatctcgtgctgatcgacttgtgcttcaactttgatgtaatctctgtttgtttgggcggccgccccgtcgcgtgccagctcgcgtcgctcggccccacctcccccgaccgcaagctcttcgtggacaacgtgcccgcgcgcgccgcccacgacgagctgaggaggctcttctccaggttcggggagatcgaggcggggcctctcggcgccgaccgcgccaccggccagttccgcggctacgccatcttcttctacaagtaccccgaggggcttacgaaggctctcgaggagcgcaaggtggtgttcgacgggtgcgagctccattgccggcgcgctcacagagtgaacaaggagaagcatctcatgaccatgcctgcagatgcaggggcacagagcaatggcttcgagaacgctgcctcacccatcatccatgtccagccgaaggagcttgcattggcatccaccacgcagacgcctcttggatcaaatcggccagttgagatgatggcgaaggggcctagatcaggcacggttccctttcgtcagaacgctggagctggtctcttgggtgcatgccctgtggctacggtcacgtcctctacgccagatcagagcacaccggttagccattctggagcttcaatttccacaccccggactgctcagagattggctaaatcaggaacatggcacatcaacatgaaaggttcagttacttttctttttggttcagacatgattccgtcctgttcaggcattataatcagagttgttttcagccaatggatcaatttgagttttgtttccctatgctgcacatcccattgccccgacaggtctctaagccctcttgttggccatgcagcgcagcttgtgaagcagggcattgtgatcgtgccatggacagcactttcacattggtataacaccaggatggtggttgtcgtgctggatgaggtgggacaaggaggatgtcagtagtgaaccttgtgatctgatgtcctggttctcggtaatgtgtggcttgctggtggagtttatcacatcatgtcaaaagcagatgcgcttgagtgcttcctttagcgaatggctccagtttcttgggcataaattctgttttcatataagcacctgatcccccgctgtgcct

SEQ ID NO: 11069 - DNA, 318 bp, Oryza sativa
  Clone ID: PAT_MRT4530_17328C.1
atgccgcgcgcccgcgcccctgactcccaggttcccccgccggcgccgcaactccgcttggactggaagccgtcgccccgtcacgcgactcgtgctcgtctgccgccgccacacgcgaacacgaacagaaggaggccaagagcgacgcctctctctacgctggagatcgccggcgacttgtttgccggagtcgtcggtggaatcaccttgtatggtgctggtgcatcttggtgtctgtgtccatcccacgggtgcaagcactacaacctgctcttaaagaaggtgttggtctctgggaggaaggaggagacggcgtga

SEQ ID NO: 11070 - DNA, 399 bp, Oryza sativa
  Clone ID: PAT_MRT4530_17329C.1
atgccgcgcgcccgcgcccctgactcccaggttcccccgccggcgccgcaactccgcttggactggaagccgtcgccccgtcacgcgactcgtgctcgtctgccgccgccacacgcgaacacgaacagaaggaggccaagagcgacgcctctctctacgctggaggaagcagactctccgcggcgtgatgacttagggtacaaccgggcggacatcctgcatgacatccagctgctgctgtggccaatcgccggcgacttgtttgccggagtcgtcggtggaatcaccttgtatggtgctggtgcatcttggtgtctgtgtccatcccacgggtgcaagcactacaacctgctcttaaagaaggtgttggtctctgggaggaaggaggagacggcgtga

SEQ ID NO: 11071 - DNA, 474 bp, Oryza sativa
  Clone ID: PAT_MRT4530_1732C.1
cccacgcgtccgaaagctagcagacttgatgatcaagcatgtcctagttccagctatcagcaacatatctgtggcagtttctgtggaagaacttgagaaaagtggtcctcaataccctatatcaatcttgtgtgtaaccccaacagaggaactacagggctacaaagatggttcagctctttactcaagaataatagatataatcaagtttgtatgtgagaccatttgtggagaaaatatcacatggatgcagtctttttcaaagttaacttggtcaagaatatctgacctggttatcaaacattttatctccaaggctgttcctcatgaggcatccaagctaattgagttccaagatgttgtgagaagtacaactgaatttgagaatactcttaggaatatgatgttcatttcacatgaaaaaagggatggcaagttgacccaatttgttgatgatgttgaagtccatttcgc

SEQ ID NO: 11072 - DNA, 238 bp, Oryza sativa
  Clone ID: PAT_MRT4530_17330C.1
gtgcgcacacgtgtgcccatgcgtgtgctgactcgactgtccacacactcggttatgagaacggacttcactgtgcatatactagtagctggaatggcactaagtatggccttgtatactactggtactacatcgaacgatcgtcaaatattacaataatcctaaattgtacatgctttaaccacaaacagctgcttgaaggatacatatatggcgatcaagagctacattgcataac

SEQ ID NO: 11073 - DNA, 450 bp, Oryza sativa
  Clone ID: PAT_MRT4530_17331C.1
gagaaggtagtgcaggattgatggatctgggtagatggatgtggtggctccggtgatgggcattggaagtgaggagatggcagtagggatgcggatgaggaggcgattcactcccatcgtttgggatccgagaggatctcgccactggacattgggaggaggagattctagcggcgcattgcatgggaggaagatggtccagtggtggcgctcggtatggggaggaggacgacccgatggtggcagcaaggtggagggaggtggcggcagatgcggagtccatgaggtgacaggcaggagaggcgcttggcttggcttggggtccctgcctcccacggacatggaaggattctttttacaaagaaggttcttgaagtaccgggaagagatttctctgattaaaggatccgatggctcttgacattctgagcaaaaaattggacggtccat

SEQ ID NO: 11074 - DNA, 390 bp, Oryza sativa
  Clone ID: PAT_MRT4530_17332C.1
tttttgtttttttattttttttttttttttttttttttattttattttttgtttgaaaaaactttagggaacccaaagcgacaacgactaattacaaataaaaccagaactgacctgaaggggcactcaaatttattcacaagagacaaagaggggccagcgggcaaacataaacaatgcaattattaaatgagatgaccactcccgagcaccccaacactataagagcaaaacaccggtacaggaacctaactataaaagaagaccacagctccaaggacgggtgacccgtaacaagaaagagcctcgaaaccatgggaagaaaattacggaggaaagaacataggcaaggccgccgggatgaaagtcagaccgggaagggacaccagg

SEQ ID NO: 11075 - DNA, 185 bp, Oryza sativa
  Clone ID: PAT_MRT4530_17333C.1
atgggcatggaggaggacggggcgggcattccggttggtgcagttcaccgccgcggcatcggaggagatttgccgaggggacgcgatgcgagccccgccggcggcaacgacccaacggtggcccaggacgtggtcaccctgcacgcactcgacaaacagttctacaagaacgtgctccacgccga

SEQ ID NO: 11076 - DNA, 1654 bp, Oryza sativa
  Clone ID: PAT_MRT4530_17334C.1
cccacgcgtccgcccacgcgtccgcccacgcgtgcgcccacgcgaaagcaaacccaacccctcctccgccgcggcccgaaaccccaccggatcggcggcggcggcggcggcaggaggccggcgggcggaggagatgtcgctgacggaggtcaggatcggggaggaggtgtggctcacctgcctctcccacgccctcaccaccgagacggaggaggtcatgggcctcctcttcggcgacatcaagcattcgagcaggggcggggtgactgctctgatatggggggcgtcgccgcagatgaggtgcgagcggaagaaggacagggtggaggtcaaccccgagctgctcgcggcggcgacggcgcaggccgagagcttgtcggccaccatcggcgagaaaacgagggtgattggatggtaccactcgcacccgcatatcaccgttctgccttcccatgtagatgttcggacccaggcaatgtttcagttgatggagccaggttttgtgggtctgatattctcttgttttagcgaagatgctcaaaaggttggaaaaatccaagtgattgcttttcagtcacttggtggaaatcagcaatctgttgttcctgttaatgatccagtcattaaccttgaatcatcttggagttcgttggatgatacctcacatccggcattgattgaaggcattgaacaagacacgggggattctaaatcttcaagaaatagcaaggtgtgggcaaaatcttctgatgtggatttctatcctcattttgacgccaatcactcagcaaaacatcaatccaaagaaaatgctatagttgcatacgatcccaataatgcacctgagacccctgttgatctagatgaatcagatatgaccccaagcatccaggaggcgttgcacagtggtgcagaatatgtaagaaaggaggtgccactttatgtatttccgaccaggcatctgctaaagctggacaccacattaacttcttactgtgatatgcaacatgtcgttttcgaagaggaaaaatcagcatataatcaagccatgcatcaaaatattcgtgatgggaagatccacccacttacatctattcaccatgcatctacatacaactcatctctctgcaaattaatggaatattgtttgagccctgctataactgtacttcaggatcgtctgaaggaaaatgaacttcggttatctatgctaatggaggaggctaaacaacttgaggcagagaaccagagcatgagaaatgattctcctcgtcgcttgatgtatcatgggactagtggcaccagttctctgatggcacaggataagcaaatgagccccagaagtcctagcggcaccggccggagaaaggcttcctgatttcaatcttgttcacttgacatggtgaatatcgtgagctgcggttccaccccttgctatctgcaatccccatttttccggtgtatgaaggtgtgtacagtggctttgtacatacctcaactcctcagcaccagtgctgttgtaaaagttactgcggcctcccttggctttgtactgctgttcctcgcgctgctgcttaatttgcgccaaatccctttcccttccgagggcttaaaaaaaaaaaaaaaaaaaaaaaaaaaaaaaaaaaaacaaacc

SEQ ID NO: 11077 - DNA, 510 bp, Oryza sativa
  Clone ID: PAT_MRT4530_17335C.1
ctccaccttatccctttcgcacgaccgcatctcccgcacacgcgcacgcacgctcgcacgcagggatccggccgcttcccccgttgccgctctcttgtactaccagtgcctgttgcctcgcctagctagctgctggcctggccggcgtcgcgttccttcatggcctcgctcctacccagtccggtgttccccgccgccgccgccgcggcgtccacatcctcgtcctcgaggtgccggtgtcgcatcacaacgtcatcttcggcgcgcggttggtcctactgtcagggctggagactccatcaccgggtttgggccgcccaggctgctgatcagcagcagcaacaacaagaagaaaatgaagacggtgtagtcgacagcaacgtgctcccctactgtagcatcaaccggaaggagaagaagactattggggagatggagcaggagtttctccaggcgctgcaggccttttattacgacaagaaggccgtaatgtcgaacgaggagttcgat

SEQ ID NO: 11078 - DNA, 1763 bp, Oryza sativa
  Clone ID: PAT_MRT4530_17336C.1
ccccgcgggagcttcttactgtgatgggcaacatgtcgccgtccttcagggaggcgcagcgccgcggcaagccaaatcgaagaggcaaaccaaaccaaacccaacccctcctccgccgcggcccgaaaccccaccggatcggcggcggcggcggcggcaggaggccggcgggcggaggagatgtcgctgacggaggtcaggatcggggaggaggtgtggctcacctgcctctcccacgccctcaccaccgagacggaggaggtcatgggcctcctcttcggcgacatcaaggtcacctgcttctcctctctccccgttctcctgctcctcctccagcgcgaatgcgtggcgcttgctgcattcgagcaggggcggggtgactgctctgatatggggggcgtcgccgcagatgaggtgcgagcggaagaaggacagggtggagatggtaccactcgcacccgcatatcaccgttctgccttcccatgtagatgttcggacccaggcaatgtttcagttgatggagccaggttttgtgggtctgatattctcttgttttagcgaagatgctcaaaaggttggaaaaatccaagtgattgcttttcagtcacttggtggaaatcagcaatctgttgttcctgttaatgatccagtcattaaccttgaatcatcttggagttcgttggatgatacctcacatccggcattgattgaaggcattgaacaagacacgggggattctaaatcttcaagaaatagcaaggtgtgggcaaaatcttctgatgtggatttctatcctcattttgacgccaatcactcagcaaaacatcaatccaaagaaaatgctatagttgcatacgatcccaataatgcacctgagacccctgttgatctagatgaatcagatatgaccccaagcatccaggaggcgttgcacaggtcaaacatggacattagtgatgggaagatccacccacttacatctattcaccatgcatctacatacaactcatctctctgcaaattaatggaatattgccctctgctaacttatcttgcattctgctattctagtttgagccctgctataactgtacttcaggatcgtctgaaggaaaatgaacttcggttatctatgctaatggaggaggctaaacaacttgaggcagagaaccagagcatgagaaatgattctcctcgtcgcttgatgtatcatgggactagtggcaccagttctctgatggcacaggataagcaaatgagccccagaagtcctagcggcaccggccggagaaaggcttcctgatttcaatcttgttcacttgacatggtgaatatcgtgagctgcggttccaccccttgctatctgcaatccccatttttccggtgtatgaaggtgtgtacagtggctttgtacatacctcaactcctcagcaccagtgctgttgtaaaagttactgcggcctcccttggctttgtactgctgttcctcgcgctgctgcttaatttgcgccaaatccctttcccttccgagggcttattccatgagcttgtagtttgtgctggggtggttgctttctttgagctattgctaattaagatgcaatgcatttcccgtgcaggcaaagacgaagcttgtttttgctttgctgttggaacagatcatgtactattaccaatccaaaagctgaaatgctcaggcacacttgctgccaaaaaaaaaaaaaaaaaaaaaaaaaaaaatagtgacgattcctgcagcccg

SEQ ID NO: 11079 - DNA, 461 bp, Oryza sativa
  Clone ID: PAT_MRT4530_17337C.1
cccacgcgtccgtaaaaaaccaacaaaaaaaatgaaaaatgagtgagaaaatgagatgacacggcgaggagaagaacaaaaataaaaaatctgggagttgggagaggaagaaccggaccaaaaatccaatctttgtgggagaaaaaatggcgctttcaggggcgggtgcagtttcttagcatgtgagtaatggcagctgctgaaacaagggctgcttggcagcgtgctgctaaccgctgccgggttcaagaggacgcaaagagagctccgaaactcggttgctgcccgccatctgggcaacagcatgagaccaacaatggaaatcaaacaaatccgcaagactgccatatccccaactttatgcctttaaactggaatgcaatgaactccaatctgccaaaagatacccaatggtggcttcagttgcagcccaattttgggtgccagaatgtgcttgctag

SEQ ID NO: 11080 - DNA, 2602 bp, Oryza sativa
  Clone ID: PAT_MRT4530_17338C.1
tgggcggacgcgtgggcggacgcgtgggcgggacggcacggatctttgccccctttcctggacaacctctccccctaaaaaaccaacaaaaaaaatgaaaaatgagtgagaaaatgagatgacacggcgaggagaagaacaaaaataaaaaatctgggagttgggagaggaagaaccggaccaaaaatccaatctttgtgggagaaaaaatggcgctttcaggggcggtgagcagcgcagaaacggcagcttaattggtctttcttgccaatttataaaaagttttgattttgggagtaattgaaatctttattactactattattattgctggatggattgtttcttctggtaggattgctgcttgctttgccttcacgtcattatccggagaggagcaaagatcccttctttattagctcctctcccttggcttcctctcttctccgtgttcttcttgtccgctttaggggttcgcttttctagattcagtctgtcagcggcgacggcgagggagctgcgagatccggccgtgagatggtggtgatccgaaggagtcatcgtcatcgtcgtcgggttggagcctcttcgtccaagaacctgccttgatcttgcagccttgttcaagcttccgagtcttttgctgatccagggtgcagtttcttagcatgtgagtaatggcagctgctgaaacaagggctgcttggcagcgtgctgctaaccgctgccgggttcaagaggacgcaaagagagctccgaaactcggttgctgcccgccatctgggcaacagcatgagaccaacaatggaaatcaaacaaatccgcaagactgccatatccccaactttatgcctttaaactggaatgcaatgaactccaatctgccaaaagatacccaatggtggcttcagttgcagcccaattttgggtgccagaatgtgcttgctagcgaggacctgaattatatgtgtggggaagttgatgtaaagaaagtcgaaagtttcgcaccagtgtccaaacttgaggacatcaatcctaagaaaacagctgatccttttgagcccccatggatagtttcaacagcttttatgaaacaaacatatgagacaggttttgaagagctcaagagtcttcctgcctattctgaaatgaccctcaaatgcaggggaagtgccacctatcttcatgaggacaaagaacatatggacttcaaaacttttgatcctttgtatccaaagaaaccacagacggcatgctatgagatggatgcaccttggcaagaaaacaggaagtctcggccatggtggcaggtagctgaagcggatggtttggcttccgtagttgcagaaagtgaaatgcacaacgtaggcaaaaatgagctgccaagacccacccaacgtgctcatggttcaaaattgaacaaccatgaaaacaaggatgattatggaccttatactggcaaagaatcacctccagtgcagtatgacactatgctgtgcagctatagcatttcaagcaccaatgagacaaattcatctgatggtggaggctggcaacatcaaagaaatgatgcacgtgggggtacacaggattcttgtagttctgatgatcgcacaccaggcagcaagccgacatatcggagtgccgctgagaggacccagttgctggatgcactccgccattcacaaacacgcgcgagggaggctgagatggctgccaagaaagcttatgatgagaaagaccatgtcatcaagctattattccgtcaggcctctcatctctttgcgtgcaagcaatggctgaaaatgctgcagctggagaacatatgcctccagctcaggttgaaggaacaccagatagcagccatgttccctgaactcccctggatcatgctcaaagaaaaggtgacgccagggcaagaaaggaaggatggaacaaggaagaaaggaaggaagcagaacaaggacagccacttgcgcaaggctgtcgtgtttgcggtcggtgtaggcatcgttggtgctggactgcttctcggctggactctcgggtggctcttgcccaggttgtaagttccattatcatctaccaccatggctagattaacgcctagcgcgcacttcgatcgaataggtgatagataaagcttcaggtatgtgcttcatgatgttagaagaatgaagatcatattcttggagctcattcatatctgttctgttgttggtttggaagccttgctgatgatattttcatatcttcatgtacatataggatgaatttgctgtatatattttcagaaactgggtgcttctgtatgttgcatgcgtttgcccgaatgttgtacatatatggggtcagtggtggtggaactagggaaaaaaatccgtcgacatcaacaatgtattaagtataaaacttgtattttcagttgctggagtagccagctcttgtttgtataataaaaacttgtatttttagttgctggtttagacagctcttgtttgtattataaaggcctaggcacgcttgtgacactatgaatttccatttgccaaattggtcttttttcttgtcaaaaaaaaaaaaaaaaaaaaaaaaaaaaaaa

SEQ ID NO: 11081 - DNA, 318 bp, Oryza sativa
  Clone ID: PAT_MRT4530_17339C.1
atggggcagatcaagccgatgacgcccctcccctcactgcttcaggcaccatcgccccttcatctcccctccggtttcctcgctcagcgcccttactcctctcccctctccggcgcggatcgaagcaggtgggaggcgtgggcaaacgaggtccccggcgagggcaccttcgttgggatgaccactttttctgatcgagaactgctgcaagagtgggaggttctagtgaccaactatggtcacgcgaagccggattttctcaacgtccttatcaatgatgaaagggccaactttgtcaaatttttgggaggtatgtga

SEQ ID NO: 11082 - DNA, 580 bp, Oryza sativa
  Clone ID: PAT_MRT4530_1733C.1
ctcgaatatgccatccgcccctccgggcagcagtccgtgtccctccatcatgtgagtgccccatgctgctgccaccatagatctcaccacccttctcctccactttcttacagtcctgaatcacatcgacattctcctccgttaccccacaatcttgaatcccaccacccttctcctccactttactgcactcttcaatcctaccacccttctcctccgcttccccacaatcctggaattcagtctcgggcacaaactcctggtcccccatctccgtcgtcaccgccacaacccaatctcttgcgtaagcctccgccaccgccagaaactccaaaacccaaccctccgccaccatcatcgctgccgctgccgccgccgccataacccaaccctaggtcgctgtcatcgccgcggccacaacctagccctccgtcgcccctcctaggcttgctactgccgctgcccctagggcctccgccaccaccgcccctggggcctccgcctccgccgctcctggggcctccgccgccgcagcccctggggcctccgccgccgccgcccctagggtttccgccgccgc

SEQ ID NO: 11083 - DNA, 261 bp, Oryza sativa
  Clone ID: PAT_MRT4530_17340C.1
atgattggtacaatcaagatcaaaacaaaatttctggagcaactggaggacctccaagtttgcctccagatagacccttcttttttgtcaactgttgctgacctctcctgtgcactgcactgcgtggcgtgggctgtggctctcgaggcagtggaatatcctcctccccatcaccgccaagatctacatacaggacaccagctcaggtctcgtggtgggggtggtaatgcacctcttgacccattcaaaaccatcacctaa

SEQ ID NO: 11084 - DNA, 204 bp, Oryza sativa
  Clone ID: PAT_MRT4530_17341C.1
gcagcctcgtctctagttttctccgtctcctcctacaaacccaaacccaaacccaccctgattagaaaccctacacctccgcctgctcctcctcgccgacgaacgcgcccgcctacgccgtcggagtccggaccagggccgcagcgacctccctacctttgaggagcgctccaccgacgcgggcctcccgggggcaagcacggc

SEQ ID NO: 11085 - DNA, 852 bp, Oryza sativa
  Clone ID: PAT_MRT4530_17342C.1
atggagttcgaagaccgctgccacaaggtccaggagcccaaattcgactgcctgctgtttgacctcgatgacactctgtacccactgagctcggggatcgcgtcccatgtcaagaagaacattggagattacatggttgagaagctgggtattgaggagagcaagattgagaaccttggcaatctgctgtacaagaactacggcacgacgatggccggactcagggcaataggctacagcttcgattacgatgagtaccacagttttgtccatggaagactgccctacgagaacatcaagccggaccctgtcctgaagcacattctcaagaacctgcgcatccgcaaactcatattcaccaacggcgacaaggaccacgccgtgagagccctcaagaggctggggctggaggactgcttcgaggggatcatctgcttcgagaccctcaacccgccgtgcccgtcgccgccgtgcgacggggaggccagcatcttcgacatcgccggacacttctccatgcccggcgccgccgccgacgagcttcccaggacacccgtcctctgcaagcccaacgtcgacgccatggaggaggccctcaggatcgccaacgtgaaccctcacaaggcgattttcttcgacgacagcgtgaggaacatccaggcggggaagaggatcgggctccacacggtgctggtgggcacgccgcagcgggtgaagggcgcggaccacgcgctggagagcatccacaacatcagggaggcgctgccggagctgtgggaggaggccgagaaggcggaggacgtgctcatctactccgaccgcgtcgccatcgagacatcggtgaccgcgtag

SEQ ID NO: 11086 - DNA, 318 bp, Oryza sativa
  Clone ID: PAT_MRT4530_17343C.1
atggagctacccccatggccctcattactggtcattgtgctcacagcagtcgtcttcttcctcgccaccattctctgccatggccgacgcgtgtataggctcccgctagggccaaagccatggccgatcatcggcaacctcaacctcattggcgcgctgccacaccgctccatccacgagctctccaagcgctacggcccgctcattcagctccggttcggatcatgcagggaggaggaacggcgccggcaaagaagaacgacgccgaagagggtggggcttcggccatcaatggcggatgagaaacgggcggcataa

SEQ ID NO: 11087 - DNA, 1072 bp, Oryza sativa
  unsure (1)..(1072): unsure at all n locations
  Clone ID: PAT_MRT4530_17344C.1
ccacgcgtccgatgagtacacagttttgtccatggaagactgccctacgagaacatcaagccggaccctgtcctgaagcacattctcaagaacctgcgcatccgcaaactcgtgagttcctccagaccagaatcgaaaccaatctcacatgtctcatgtaatcgtgttttggttctgaactggcacgcgtcgttgcagatattcaccaacggcgacaaggaccacgccgtgagagccctcaagaggctggggctggaggactgcttcgaggggatcatctgcttcgagaccctcaacccgccgtgcccgtcgccgccgtgcgacggggaggccagcatcttcgacatcgccggacacttctccatgcccggcgccgccgccgacgagcttcccaggacacccgtcctctgcaagcccaacgtcgacgccatggaggaggccctcaggatcgccaacgtgaaccctcacaaggcgattttcttcgacgacagcgtgaggaacatccaggcggggaagaggatcgggctccacacggtgctggtgggcacgccgcagcgggtgaagggcgcggaccacgcgctggagagcatccacaacatcagggaggcgctgccggagctgtgggaggaggccgagaaggcggaggacgtgctcatctactccgaccgcgtcgccatcgagacatcggtgaccgcgtaggccacacctactgtctctcccgactccggcgaatcgctcagaacgagcaaccatccatccatccatgtccatccctggccgggcaggtgatcatcaggtgggaattcagaattggccgggacaacaatacgttccaagaaaaaaagaggagggtgttccgtggaagttcaggattcagaatgtaacagcaatgttggaacgggtcctgtagtatatatatgtatcggtcagatctttgcatgtaaattagtactcctagaagcaataataataataattaataaagagaatgggggttatttatcactttttgataggggatttatctctcgtgtttaaatgaagctttgaaggcctttttttaggntgaacc

SEQ ID NO: 11088 - DNA, 432 bp, Oryza sativa
  Clone ID: PAT_MRT4530_17345C.1
gatcatattcaaattccaccaaccaatattcatagtattcgaggtgagcaacctcctgaaactgaactggcaagatttactcaagaattaaatgaatgcctgcctaatttaacttttgattggatcatcttaggtatgggaaatgatggccataccgcttcgctattcccctatcaaacagattttgctgatcagcatcttgcaattatcgcaaaacaccccgtaaccggacaattacgtatttcaaaaacagccaagctaattgaacaagcagcgcgtattacttatttagttactggtcaatccaaagccactatattgaaagagatccacgacttaccggcaacacaattagcttatcctgcggcgcatatccgcgcaaaaaacgggataaccgagtggtacttagatcaacaagcggctgaattattc

SEQ ID NO: 11089 - DNA, 464 bp, Oryza sativa
  Clone ID: PAT_MRT4530_17347C.1
gtctattaaattttaactagggcaatagagccataaaaattcagaactgttcctgcatttgaagaagattctgaaaaaggtttgaacggcaacaagacaaagttcccgcatcacaaattaactaaacaaatgaattaataaccagaattgagagaacagatttggagccgtcaaaagaacacatttgcaaaaggagaccaatccatcacccaagaacaaagactcaacggcacctcgattgcgctgcctcacgtcgccactccaattggagtcaaaacttaggggagatccatccggtgctgcccggaggcgttgagaccacatatggcgcacctcagcgccccggatttcaccacccagggctgccttgtggaaattgaagatggacatggaaccaggaaccattggacgctgctgccgattcagccatatccaagacctacaccatcggccgagcaagggac

SEQ ID NO: 11090 - DNA, 213 bp, Oryza sativa
  Clone ID: PAT_MRT4530_17348C.1
atggaggagagcagcgcatgggagcttggggtcctgcacccaactctcaagcaatgtggggctcccgtgatggagatggaggtgagcagcgcaggtggcgtcatcgagctcccaagtggtgcggccgtgggatgtcgacaacgcctccgtggtaaggatttgctcgtctacaccaaggagtctgggaaaatcaatatttttgtgtgcgggtag

SEQ ID NO: 11091 - DNA, 495 bp, Oryza sativa
  Clone ID: PAT_MRT4530_17349C.1
ccggggatccttagcctggtttaaacggcgttttctggtaataaaaatacggggataggtttctgaccaggtgatacacacataaggatattttttatcatctttaagcagaacattaaaatggggttggtgttgtttgattaaattagcttctaaggctaaagcttccgcttccgtatcggtgacaataaactcaatttccgctacctgttgcaccatcaaagcaatgcgggcagtgtggggttgggaatcccgaaaataggatctaaccctagttctcaatttttttgccttgccgatgtagagaatttctccttggcgatcgcccatgaagtaaacccccggctcttggggaatttcctggagacgccgttctaataattctggttgttcaagaagagacgtagaggaaacagtagcaaccattgattaagcaaaagagcgaatgtttttctatggtagaagggaaaactagggcttggcaatttgcgtctg

SEQ ID NO: 11092 - DNA, 13744 bp, Oryza sativa
  Clone ID: PAT_MRT4530_1734C.1
atggagggcgcggaggactcaggctttgctattaccggcacgcccttgacggagattgatcaccgcaacctccaactcaatgcccaagctatgcatgctttgttcaactctttgagccaagaggagttcgatagagtgagcaaccttgagaccgcatatgagatttggaacaagttggcggagatccatgagggcacaagcgagtacaaggatgccaagcttcatttcctcaagatccaatatgagacattctccatgttgcctcatgagagtgtgaatgacatgtatgggaggctcaatgtcattgtgaatgatctcaaggggcttggggcaaactacaccgatcttgagttgaagaagaaggagatggaggaagcctcaccttccgagaagtgcattgctctccaagccgaagttgaagacaagggcaagggcaaggtgaatgaagccaatgaggacttggaggaagagattgcccttcttgctagaaggttcaatgatctcttgggaaggagaaaggagaaaggaatgggctctaactccaataggagaagaaatagaaggcccaacaagactctctccaacttgaggtgctttgagtgtggtgagaagggacactttgcttccaagtgcccttccaaggatgatgatggagacaagtcatccaagaagaagagtggaggctacaagctcatgaagaagctcaagaaggaaggcaagaagattgaggccttcatcggggaatgggactcaaatgagaagagctccgcctcattcggggctcctctaaggcaacatctcttagtgatagtgagtgatgatgattgtgatgatgtttcctatgatgagcttgtgagtatgtttgaggagctccatgcttatagtaaaaaggagattgtcaagttcaaggccctaaagaaggatcatgcttctttggaggtcttgtatgaggagctaaagacctctcatgagagactcaccatttctcatgagaagcttaaggaagctcatgacaacctcctttccactactcaacatggagctcttattgatgttggcatatcttgtgatttacttgatgatagtgttacttgccatatttctcatgttgcatcatctagcatttctacctcttgtgatgatcttgtggatatgcctagctctagctctagctcttgtgtttctatttgtgatgcctcacttgttgttgagaacaatgagcttaaggagcaagaggccaagctcaacaagagtttggagaggtgcttcaagggtaagaacactcttgacaagattttgagtaagcaatggtgcatccttaacaaggagggacttggattcattccaaagaagggtaagaaaccttctcaccgtgccactcattttgtcaagagcaatggtaagtattgctccaagtgccgtgaggttgggcatttggtgagtgattgccccggtggtaagccttctaagacatgcatatttgattctcattatatgcttaggaaggctcatgatggtagcattgttgctagatatgtgggttcccctatactcggtggtaaaaagaatgtcatttgggtacccaaagctttggtctctaacctccaaggttgggtgaactaccgcaccggtggaagccattgggtgcttgatagtggatgcactcaacacatgaccgatgatagggctatgttcaccacatttgaagtaggagggaatgaacaagagaaagtgacttttggagacaatagcaaaggaaagtctattgttgccgagcttttcaaaaagtttgcaaaaagggcccaaaatgaatttaattgcactcttgtgaaaattagaagtgacaatggttccgaatttaagaataccaatatcgaggactattatgatgatcttggtattaaacacgaactttccgctacctactcaccccaacaaaatggtgcagtggagaggaaaaatcgtacattgattgagatgggtgttagactaaccaaatttgaaagtcagtgtgatgaagggtttcttctaggttatgcctcaaatagcaaggcataccgggtctacaacaagaacaaaggtattgtggaagaaaccgccgatgttcaatttgatgagaataatggctcccaagaagggcacgagaatttggatgatgtaggtgatgaaggcttgatgagagctatgaagaacatgtgtattggagatgtcaagcctattgaagtggaagacaagccatccacctccactcaagctcaacaactttgcaagaaacaaggtgtggactttgcatcatgctttgatataaaactatttcaaatggatgtgaaaagtgcttttctaaatggtgaaattgccgaacctgtctttgttgaacaacctcccggttttgaagatcctaaaaatcctaaccatgtttacaaactctcaaaatctctttatggtttaaaacaagctcctagggcttggtatgaaagattgagagattttcttttgtcaaaggatttcaaaattggaaaagttgacaccaaccttttcacaaaaatcattggtgatgatttctttgtgtgtcaaatttatgttgatgatatcatattcggttctactaatgaggtattttgcaaggaatttggtgatatgatgtctagggaatttgagacgtccatgattggagagttgagcttcttccttggacttcaaatcaagcaactcaaggatgagacgttcgtgagccaaacgaagtacatcaaggatctactcaagaggttcggcatggaggatgcgaagcccatcaagacacctatggcaaccaacgggcatctcgaccttgatgaggaagtgatggcttcccgcactcgccgtggtcgtcgtgagcccactccggagcccgtgagtgagaatgatgaatcgagcggagaggaatatgctcaaagtgaggaagaatttgtggaagaagttgagggggctgaggaggaagcaagtagagatgatagtggcagtggtggtggagaagatgaggaaagtgatgatgagggtcttctcgatcctaccatctatttttcgctcaatttgaggaatgcccaacagtacactatcctccatcatcacaaccaattccggaggcccaatgattgcgccaatcctcagtttcatacacggtatcagaaagctgtgtatgagcaagtatatgcaaacaaagccttcgctgaccacaagtggatttcttggaggcacattagtgagacaccagaatttgtggatcttcaagggatgttcaaggcggtgggcattgataggattgtcaccttgaagcaaccatatgatgaagatctcatccgacatttctatgccaccgtgtgggtgtccagcgactgtgatgctatgaaatggatgtcggggaccattcaatgctccatcaaccggcgtgaattcaaggagctcttgcacatccatttcaacaacggggatgacctccatgatgagcacactcacaaccccttccccattgatcactatgctcagttttatgaagaagggggaaggcacacctatgaaaaggtggcgggattgaggatcatccctagtggtcaaccgcatagtgagagccacccttctcccaaggagatagccatttccaaggggacaattggacaagaaatttactatgctccctacataatgcgattgattcaaagcaagttgggggaagttggcgacaatttgagagaacacaaggagtacaagcttcgccgccaactctccactcctcgagctccccaaatgcaccaacatatctttgatcaaggcgcaagctcaagtgcggcacctcctcatcctcatgggtttgttgatcctaatgccttctttaatcctcaatatgcttactttgggatgcaaccaaatgactacttcaacccggtgcttagggctataaataccctaagtgaaagcattcaaaggctatccaccaggcatgaggccatgcatgaggatcctgaccaggccggtctgaccggtgcacaaggccggtctgaccgacggcaattgggcggtctggccggccccccggaggccgggatgtcctctctgtgggctggctcccgccttacccaccccttgacgaagggggcgtgcggtggcttcgtggttgagcggtggagttgggctcgcctcaacggggagtaggaaaccgacgagtttctcaaagctatgagcttccatatttgaagtattgtggatgtaggctttgctatcaccggcacgcccttgacttgagaaccgcatatgagatttggaacaagttggcggagatccatgaggtcacaagcgagtacaaggatgccaagcttcatttcctcaagattcaatatgagacattctccatgttgcctcatgagagtgtgaatgacatgtatgggaggctcaatgtcattgtgaatgatctcaaggggcttggggtaaactacaccgatcttgaggttgcccaaaagatacttggggctctaccggagaagtatgagacccttgtcaccatgctcattaactccgacatatcaaggatgacacccgcaagcctcttggggaagatcaacaccaatgatatgtacaagttgaagaagaaggagatggaggaagcctcatcaccttccaagaagtgcattgctctccaagccgaagttgaagacaagggcaagggcaaggtgaatgaagccaatgaggacttggaggaagagattgcccttcttgctagaaggttcaatgatctcttgggaaggagaaaggagagaggaagaggctctaactccaataggagaagaaatagtagacccaataagactctctccaactttaggtgctttgagtgtggtgagaagggacactttgcttccaagtgcccttcgaaggatgatgatggagacaagtcatccaagaagaagagtggaggctacaagctcttgaagaagctcaagaaggaagggaagaagattgaggccttcatcggggaatgggactcaaatgaggagagctccgcctcatccgggtccgaggaagaaggtggtgatgatgcaagctccaagaagaagaagatgaccgttgttgccatcaaggaggctccatcactcttcgctccactttgtctcatggcaaagggctcctctaaggtaacatctcttagtgatagtgagagtaataatgattgtgatgatgtttcctatgatgagcttgtgagtatgtttgaggagctccatgcttatagtgagaaggagattgtcaagttcaagactctaaagaaggatcatgcttctttggaggtcttgtataaggagctaaagacctctcatgagagactcaccatttctcatgagaagcttaaggaagctcatgacaacctccttttcactactcaacatggagctcatattgatgttggcatatcttgtgatttgcttgatgatagtactacttgccatattgctcatgttgcatcatctagcatttctacctcttgtgatgatcttgtggatatgcctagctctagctcttgtgtttctatttgtgatacctcacttgttgttgagaacaatgagcttaaggagcaagtggctaagctcaacaagagtttggagagatgcttcaagggaaggctcatgatggtagcattgttgctagatatgtgggttcccctatactcggtggtgaactaccgcaccggtgggagccattgggtgcttgatagtggatgcactcaacacatgaccggtgatagggctatgttcaccacatttgaagtaggagggaaagaacaagagaaagtgacatttggagacaatagcaaaggaaaggtaattgagttagttgcaaaaacttcattgggttggctttggcataggaggctagcccatgttggcatgaatcaattgagcaaactttcaaaacgtgacctagttgtgggtttgaaagatgtgaagtttgagaaagataagctttgtagtgcttgtcaagccgaagccataaacaccgcttgccatgcaaccaataggctttatttgcatcgtctcttgaaaaagactttctatgagctaattgttgggaggaagcctaatgttgcctattttcgaatttttggttgcaagtgttatatttaccgaaagggtgttagactaaccaaatttgaaagtcggtgtgatgaagggtttcttctaggtaatgcctcaaatagcaaggcataccgggtctacaataagaacaaaggtattgtggaagaaaccgccgatgttcaatttgatgaaactaatggctcccaagaggggcacgagaatttggatgatgtaggtgatgaaggcttgatgagagctatgaagaatatgtctatcggagatgtcaagcctattgaagtggaagacaagccatccacctccactcaagatgagccatctacttccgctacgccaagtcaagctcaagttgaggtggaggaggagaaggcacaagatccacctatgcctccaagtatacacaccgctctttccatggatcacccaattgaccaagtgttgggtgacattagtaagggtgttcaaactcgatctcgtgtcgcttcgatttgtgaacattactcgtttgtttcttgtcttgagccaaaacatatagatgaagctctttttgatccggattggatgaatgctatgcatgaagagctcaacagctttgcaagaaacaaggtgtggactttggttgaaagacctagagaccacaatgtcataggtacaaagtgggtctttaggaacaaacaagatgagaatgggttggtggtgagaaataaggcaagattggtggcgcaactcaaggatgggacgttcgtgagccaaaccaagtacatcaaggatctactcaagaggtttggcctggaggatgcgaagcccatcaagacacctatggcaaccaacgggcatctcgaccttgatgagggagtgatgcctccccgcactcgccatagtcgtcgtgcgcccactccggatcccatgagtgagcctgaagaatcgagtggagaggattacgctcaaagtgatgaagaggttgaggcaaatgttgagggggctagtgaggaggcaagtagagatgatgtcagtgatagtggggaggatgaggatgaacaaagtgatgagatgaaaattgatccctccatccagtttgtggtgaacatgaggaatccatcgcagtataccatcttgaggcatcatgatcagttcttgaggcctcgggtcaccccggatccccggtttcacaccgttttccagaagacagtgtatgagcaggtttatgtagggaaagcttttgcagagtataagtggatttcttggagagacatcaatgagactccagagtttaagagcttgcaggatctcttcaagactgttggcattgaccggattgtgaccctcaagcaagactataatgaagatttgatccggcagttctatgctacagtgtgggtggctggagactatagtgatatgaagtggatgtccgacacccttcagtgttctatctctcggaggcagttccggcggctccttaacatacgcttggattttggacatgatttgcatgaggcgcacacccacaatccgctctccatagactatctctctcagttctatgaagatggagcgcggtacacacatgggaaggttgccggcttgaggactatccccagtgtggttaacaggattgtgagagccactatcctccctcgccttggcaacaatgatgacatttggggggtggcttggcacgtcatcgatgcaatcattcagggtcgtcagttcgacattgtgtcttttatgatgcaagagattgccatctccaaggggaccttcactcagggaatctattatgccccttacatcatgaggttgattaaagacaagcttggggctgctgggcaaaatttgaagaagcacaagcagtacaagccccgccttcagcttggagctccccgtgttcggcctgaccaggggcggtcagaccggcgtgccctggccggtctgactggccacaagacggcggtctgaccggccacgaaacggcggtctgaccggcggcacatgcgcggtcagaccggccccctggaggccgggatggtgctgctcagggtggctgatacagagccgacggagccgtattcggtcagaccgagccgatggcggtctgaccgagccgaggccgaactgaccggccactcaacgtcggtctgaccggccaggccgatggggccctctttgagcttagtgttcatccattgtagtggttgaggttgctctagacaagagtcaagtgcatttgcttccatttgtagagctagtgtggcacttgattgatcatctccacgccgggtcattgcttgttactcttggaggttgccgcctcctagacggcttgtggaggagttgcccggtgacctctccgagaagattgtggaggaggcccggcgccggctttgctatcaccggcacgcccttgacggagattgatcaccgcaacctccaactcaatgcccaagcaatgaatgttttgttcaactctttgagccaagaggagtttgatagagtgagccaccttgagaccgcatatgagatttggaacaagttggcaagttggcgaagatccatgagggcacaagcgagtacaaggatgccaagcttcatttcctcaagatccaatatgagacattctccatgttgcctcatgagagtgtgaatgacatgtatgggaggctcaatgtcattgtgaatgatctcaaggggcttggggcaaactacaccgatcttgaggttgcccaaaagatgcttagggctctaccggggaagtatgagacccttgtcaccatgctcatcaactccgacatgtcaaggatgacacccgcaagcctcttggggaagatcaacaccaatgacatgtacaagttgaagaagaaggagatggaggaagcctcaccttccaagaagtgcattgctctccaagccgaagttgaagacaagggcaagggcaaagagagaggaaggggctccaactccagtaggagaagaaatagaagacccaacaagactctctccaacttgaagtgctttgagtgtggtgagaagggacactttacttccaagtgcccttccaaggatgatggagacaagtcatccaagaagaagagtggaggctataagctcatgaagaagctcaagaaggaaggcaagaagattgaggcattcatcggggaatgggactcaaatgaggagagctccgcctcatccgggtccgaggaagaaggtggtgaggatgcaagctccaagaagaagaagatggccgttgttgccatcaaggaggctctatcactcttcgctccactttgtctcatggcaaagggctcctctaaggtaacatctcttagtgatagtgagagtgatgatgattgtgatgatgtttcctatgatgagcttgtgagtatgtttgaggagctccatgcttatagtgagaaggagattgtcaagttcaaggccctaaaaaaggatcatgcttctttagaggtcttgtatgaggaactaaagacctctcatgagagactcactatttctcatgagaagcttaaggaagctcatgacaacctcctttccactactcaacatggagctctcattgatgttggcatatcttgtgatttgcttgatgatagtgctacttgccatattgctcatgttgcatcatctagcatttctacctcttgtgatggtcttgtggatatgcctagctctagctctagctcttgtatttctatttgtgatgcctcacttgttgttgagaacaatgagcttaaggagcaagtggccaagctcaacaagagtttggagaggtgcttcaagggaagactcatgatggtagcattgttgctagatatgtgggttcccctatactcggtggtgaactaccgcaccggtgggagccattgggtgcttgatagtggatgcactcaacacatgaccggtgatagggctatgttcaccacatttgaagtaggagggaatgaacaagagaaagtgacttttggagacaatagcaaaggaaaggtaattgggttagttgcaaaaacttcattgggttggctttagcataggaggctagcccatgttggcatgaatcaattgagcaaactttcaaaacgtgatctagttgtgggcttgaaagatgtgaagtttgagaaagataagctttgtagtgcttgtcaagccggcaagcaagttgcatgttctcatcctactaagagtatcatgtccacatctagaccattggagctcttgcatatggatttgtttggcccaacaacctataagagcatcggtgtggagaggaaaaatcgtacattgattgagatggcaaggactatgcttgatgaatatggtgtttccgattccttttgggcggaagccataaacaccgcttgccatgcaaccaattggctttatttgcatcgtctcttgaaaaagacttcctatgagctaattgttgggaggaagccaaatgttgcctattttcgagtttttggttgcaagtgttatatttaccgaaagggtgttagactaaccaaatttgaaagtcggtgtgatgaagggtttcttctaggttatgcttcaaatagcaaggcataccgggtctacaacaagaataaaggtattgtggaagaaatcgtcgatattcaatttgatgaaactaatggctcccaagaggggcacgagaatttggatgatgtaggtgatgaaggcttgatgagagctatgaagaacatgtctattggagatgtcaagcctattgaagtggaagacaagccatccacctccactcaagataagccatctacttccgctacgccaagtcaagctcaagttgaggtggaggaggagaaagcacaagatccacctatgcctccaaggatacacaccgctctttccaaggatcacccaattgaccaagtgttgggtgacataagtaagggtgttcaaactcgatctcgtgtcgcttcgatttgtgaacattactcgtttgtttcttgtcttgagccaaaacatgtaaatgaagctctttgtgatccggatggatgaatgctatgcatgaagagctcaacaactttgcaagaaacaaggtgtggactttggttgaaagacctagagaccacaatgtcatagggacaaagtgggtctttagaaacaaacaagatgagaacgggttggtggtgagaaacaaggcaaggttggtggcacaaggtttcacacaagttgaaggtttggacttcggtgaaacttttgcccccgtggcaagacttgaggctattcgcatccttcttgcatttgcatcatgttttgatataaaactatttcaaatggatgtgaaaagtgcttttctaaatggtgaaattgccgaacttgtctttgttgaacaacctcccggttttgaagatcctaaaaatcctaaccatgtttataaactctcaaaagctctttatggtctaaaacaagctcctagggcttgatatgaaagattgagagattttcttttgtcaaaggatttcaaaattggaaaagttgacaccacccttttcacaaaaatcattggtgatgatttctttgtgtgtcaaatttatgttgatgacatcatattcggttctactaatgaggtattttgcaaggaatttggtgatatgatgtctagggaatttgagatgtccatgattggagagttgagcttcttccttggacttcaaatcaaccaactcaaggatgggacgtttgtgagccaaaccaagtacatcaaggatttactgaagaggtttggcttggaggatgcgaagcccatcaagacacctatggcaaccaacgggcatctcgaccttgatgagggaggtaaactggtagatttaaagctttatcgttccatgattggtagtttgctttaccttatcgcatctaggccggatagcatgtttagtgtttgcatgtgtgcacggtttcaagccgctcctaaggaatgtcacttggtggccgtgaaaaggattctaagatatttaaagcattcctctactattggcttgtggtacccaaaaggtgctaagtttaagcttgttggctattccgattcggattataccggttgcaaagtggatagaaagagcacatccggtagttgccaaatgcttagtagatcccttgtgtcatggtcatccaagaaacaaaactccgtagccctctctaccgctgaggcggaatatgtttcggcggaatctagattcttagttttggccaaaatgagatttatccccaaaataagattgagaaggaatttgagaaaagtttcaaaacaaagttgcggcggtctgaccgggcggcatgctcgcggtctgactggctgtggccgtcggtctgaccggccatcggtccgcggtctgactgcccctgactggccgatgatgcctccccgcactcgccatggtcgttgtgcgcccactccggatcccgtgagtgagcctgaggaatcgagcggagaggattacgctcaaagtgatgaagaggttgaagcaaatattgagggggctagtgaggaggcaagtggagatgatgacagtggaagtggagaggatgaggatgaaggaagtgatgatatgcacgttgatccctccatctagtttgatgtgaacatgaggaatccatcgcagtataccatcttgaggcatcatgatcagtttttaaggcctcgggacaccccggatccccgttttcacaccgctttccagaagttgtgggtggctggggactataatgagatgaagtggatgtccgataccctccagtgttctatctctcggaggcaattctggcggctcctcaatattcgcctagactttggatatgatttgcatgaggagcacactcacaatccgctctccatagactatctctctcagttttatgaagatggagtgcggtacacacatgggaaggttgccggattgaggactatccccagtgtggttaacaggattgtgagagccactatcctccctcgccttggcaacaatgatgacattagaggggtggcttggcacatcatcgatacgatcattcagggtcgtcagttcgacattgtgtctctcatgatgcaggagattgccatctccaaggggacattcactcagggaatctattatgccccttacatcatgaggttgattcaagacaagcttggggctgctggcaaaatttgaagaagcacaagcagtacaagccccgccttcagcttggagctccacatgcttaggatggtgccctcttctcatcttggagctagctcaagctcagcacctcctcctcctcatgggtatgatccaaatgctttcttccatccacagtatacttactttggaattcaacccaatgaatatttcaacccggtacttggggctattaataccctaagtaaaagtattcaacgcttgtctaccgggcatgaagcatgacatgaggatgttcgtggcttgcgcacggatgttggagacttgaatgcttccatggggagattgcacactagagtgggtacattggattctcaagtccaaatgttggagagctcccaagcatttgtgtatcatcgtcgtcgtgatgctcctcatccttccacttcggcgcgtcctccttctcctccacaa

SEQ ID NO: 11093 - DNA, 195 bp, Oryza sativa
  Clone ID: PAT_MRT4530_17350C.1
gccgcctctctgtactcctttaccaccctttccggatccctcactaactgtgacctgctcagctatgagctgcagatactgaacctcccctcctacttactatactactgcaccgtctgatctgcggactcaaaatactgaactatcatctgttgatgctcaccgcccccgtacaatttttcatgcatgaacggc

SEQ ID NO: 11094 - DNA, 364 bp, Oryza sativa
  Clone ID: PAT_MRT4530_17351C.1
ttccgccgcagcacaagcgcattcagatctcggtcgcttggttttccttcttgatttcctctccgagtggtaattgcttccgtgtttttctctcttttttttttctcgttgaacgattgatctgcttttgcttccattttgtttgtttgaagatttcaattcatcgcatcgttgatatagtttttgaatcgcgtttgggatgcaaatgatttggtggtgagaataatagggctctatattatgagtcaacagcaggcgccgtttcaatggtgccctgtctgccgctaggagcccagatcgatgcctaagccaggagaagattgtttggagatccatcttctttaagtcccagccacaatacctg

SEQ ID NO: 11095 - DNA, 707 bp, Oryza sativa
  Clone ID: PAT_MRT4530_17352C.1
tttttttttttttttgagaggaacccattattgcaatcatctttttttttcctggttcacatttcacaatcgactgtttgatgaaatcctgaattcgaccaatccaaatggagcaaaaggtaaatactaacatcaactgaattagaatgggaacgaagggtaagttgatccctatgtgaagatacatcggcactactttctaaaatgttaatcaacgacacatgttgctccttgtccatcatgctgcatggctcgcaaacaaattttcaccatggcctccgcccaccgatacgcctggcaagttgcatgtccttttgcatgatggtaacacgcttagcatggatggcgcagagatttgacacttcaaatatgtccactaagtggtattctgctgcctcttgcaatgcaaggagagcttcaagggtccaccgtgacacatcctttgaatagaaatcagtgatctccctgaccagccgagaaaatggtgcaaacgggatcagcagttcggtggttttctgaaatttcctgatctcccgcagtgccactgtgcctggacggaagcggtgtggcttcctctgcttcgtttgctgcctaggcgtcccaccagcgcgctgcgccttcgacggccgaggggagcgttcgaactggagcttcttcttgggctccgccttcgacttcctcaccgccgggtgcttcgtgcgagccat

SEQ ID NO: 11096 - DNA, 524 bp, Oryza sativa
  Clone ID: PAT_MRT4530_17353C.1
ggcacgagggccggtcggccgaccgagcccgagccggccaagccaccgccgtgcgcccccaatccgaggccaatccggcctcttttctttcagatttttttagagggttttttatcctctcgttctcctctatctttacccccaaaaatcggagcaaatcgttgggtattttatccgattcgaactcgttttcgagtttatctccaaaaccgaggtggttgttttcccgatcgatttcttgcgggaggagtccgatctcttcaatccaaggctataaataggaccccctagtcctcctctttcgtttgccctctctcccgtcctctcccgtgccccgtagctcgccgcagtcgccgcatagttcgccgccgccgccggccgagttgcagccgcgccgtcgcgccgtctccgccgtcgccgccgcttgctgtcgccgcccgtgggtgcgccaaggggtggagaagcccggccgccgctttcccttcgccgccggtgaaccgagccgccgccgccatcctctcgtc

SEQ ID NO: 11097 - DNA, 468 bp, Oryza sativa
  unsure (1)..(468): unsure at all n locations
  Clone ID: PAT_MRT4530_17354C.1
gagatcctcgactccaagatcatcaacgacagggagacggggaggtcacgtgggtttggcttcgtcaccttctcctccgagcagtcgatgcgcgacgccatcgagggcatgaacggcaaggagctcgacggccgcaacatcaccgtcaatgaggcccagtcccgccgctccggcggcgnaggcgggggctacggcggcggcggtggcggctacggcggcggtcgtggaggcggcggctacggaggaggtggcggcggcggctacgggcgccgtgagggcggctacggtggcggcggcggctacggcggcggccgtggcggcggnggcgggcggctacggtggcaaaccgtggcgggcgggtacggcgggcgacttccgggcggggaactggcaggaactgattggtgggggcccatcgtgggccaagtttatccttagctatccgtgtcagaatcatcttaatcatcg

SEQ ID NO: 11098 - DNA, 403 bp, Oryza sativa
  Clone ID: PAT_MRT4530_17355C.1
atggagggggccagcgatgcgcgggagctggtggcggcggcagcagcggcgcgcgggagccaccgccggcggaggcgggagggcgggcgggcgagggcgggtggaggcgcaggaggggaccctggtgacgacgccgtcggtgttgcggtagtcgtcggcgacggggtcgtagacgaggcctccaccgccatggtgatgaccctggtgacaacgccgtcggcgttgcggcagtcctactccaccgccgtgcagtgcctctgccgaaagggcgcccccgacgaggccaaggagacgctcgacgagatggtggcgcgcggcttccgccccaccgtcgccactttctccgccgtcgtcagctgcctctgcaagcgcggtcgtgtcaccagggacatggcccatggag

SEQ ID NO: 11099 - DNA, 758 bp, Oryza sativa
  Clone ID: PAT_MRT4530_17356C.1
gcgttcgagcggcgaggaggtcgaggcagcgcgtctcccgacccggcggcgaggggggttgaggcggcggcggcggcggctcccggcccctccctcccagatctggccgtgcggcggtggcgcggacgacggcggggcgcggccgtgcggcggcggcggctaccctcccctcccctcccagatccggccggagggaggccgggggagggcggcggcggcgaggcgcatggccggcggagcggcgacgacgacgcaacgcgcggcggcggcggctgccctcccagatccggccgggggagggcggcgacggcgaggtgcgtgaccggcggggcgccgggcggcgacgacgacgcgcggggcggcggcggcgaggggccgggctctgcaatggcggcgacgacgacgacgacaacaagggaggggccttggtgacttcaacgacgaccgtgacgacggagggcctcatcgacaatgacgacaaccgcgacgacaacagggatgagttccgtgacagcagcggtgcgaggctgttgctgctgcaagcatgctcgccggctggtgagcacgcatacgaaccagatctgagaatgctagttgttgttgttgatgaaagattgtgatgctagttgttgttgatgatgaatctgagaaaaatcctccctgaaccattatgctgctgttggtgattgtgaattcatgatgctagctgcatttgttgatgaatctaagaaaaatcctctctaaaaaaaaaaaaaaaa

SEQ ID NO: 11100 - DNA, 264 bp, Oryza sativa
  Clone ID: PAT_MRT4530_17357C.1
atggccggatccgggctttggggcaccggatccgcctccctacacctccccgccgtcgccaaggacaaagccggtggaggcttcgtcgcgcgccctgtccacgtcgcgccgaggagtgagtcgccgcgaagaaaggaaggcctcaccgccggcgagagctccggcggcagtgaggtggggggaagaagtggaggcgggcagctaggctttggttcagctatcatctatcgccaagtatatgaatacagatactacctcaggtaa

SEQ ID NO: 11101 - DNA, 470 bp, Oryza sativa
  Clone ID: PAT_MRT4530_17358C.1
gcggagcgaggaggacggcggcggcgcggatctggagcggcggcggcgcgaggggacaacggcggctggcggattctggagtggagcggcgcgccgtcctcgtgctcatgctcgtggtcgtcgtccttggagtggtcatcggagtggtcatggcgggcggcggcggcgcgtcgtcctcggagcggtcatggcgggcggcggtcctcgtgctcgtcgtcgccgtcctcggagcggtcatggcgggcggcggcggcacatcctcgccccgctctctcaccgcctgccccaacgccaagcggcggcggcatcctcgggacctggcggcgcggatctggagcgtcctcgccgtcctcctcaacgacggcggcggtggtggcgcgtcctcgcccgccctcaccggtgacagtggcccggattggagctggagccggagtcgtcggagtggaaggagttcctgctcgggaatcaag

SEQ ID NO: 11102 - DNA, 333 bp, Oryza sativa
  Clone ID: PAT_MRT4530_17359C.1
ggggggcccttggctcctttaaaaggggcaaagcaaacaattgggggggcccccgggcaaaaaaacggggggggagacaaactccccgggggatttgggaaaagggggccccacttctaacagagcccccccttttaaaggggggccccttttaaaacagggggggggggaaacctggccccaaagaggggcccggaaaaaaacccgcgccttcaagggattaaaaggtggggggggggccggtttttttttttcccccccgcctgggaacccggggggggggggcccccgggcccaacccttgcaaaacccggttgggccagttccggccgg

SEQ ID NO: 11103 - DNA, 1302 bp, Oryza sativa
  Clone ID: PAT_MRT4530_1735C.1
atggagcagcagcatgcagcagctgagcgaagcggcggcggaaaccctaggggcggcggcggcggaggccccaggggctgcggcggcggaggccccaggagcggcggaggcggaggccccaggggcggtggtggcggaggccctaggggcagcggcagtagcaagcctaggaggggcgacggagggctaggttgtggccgcggcgatgacagcgacctagggttgggttatggcggcggcggcagcggcagcgatgatggtggcggagggttgggttttggagtttctggcggtggcggaggcttacgcaagagattgggttgtggcggtgacgacggagatgggctgcggagtgcctccctgatgcgcagtaagaaacggcgtcgaggcatgtggtactcgcgaagatacggacacttattggaagaaggcaagaattttgttttggatacacaagatgggtccgacgatgaccagttcgagttcatccctgattccgatgatgaagccgaggaccatcagttctccttggaccaggagtttgtgcccgagactgaattccaggattgtggggaagcggaggagaagggtggtaggattgaagagtgcagtaaagtggaggagaagggtggtgggattcaagattgtggggtaacggaggagaatgtcgatgtgattcaggactgtaagaaagtggaggagaagggtggtgagatctatggtggcagcagcatggggcactcacatgatggagggacacggactgctgcccggaggggcggatggcatattcgaggcaagtggtttgaacgtaaatccggctacttattagaagaaggcaaaaatataatctttgatagccaggatgggcctgatttggatgagtacgagttctggcctgatttggatgatgaaggtggtggcttgatacttgattggttcgatggttcgatgaaggtgtccacttcgtcgaatgctttttacccacagggaggtgacttgcggcaggggacaatggccaaccaaggtggtggaccgagcaagcacatcatggtggaggcctccaatattagcgggcagagcaaggacgtgtctaacccactgatgcccaacaaggaggagatacacggcgaggagaagatacccaacgacaaagaaaatggtggtgatgtgtttggtggcgtggaacagtttggttattcacaggaggaagaatacgagcccattgatgacaccaagttggaaatgcttcgtctactgatcccaggttacatccagtgtttccaaccaaaaaaaaagtag

SEQ ID NO: 11104 - DNA, 402 bp, Oryza sativa
  Clone ID: PAT_MRT4530_17360C.1
atggagagggagaggatggagcggagcacagtttctggcgagggcggttcactcagtcacagggcactagaagcacttgcgaggcccgagagccctgactatagacagactaaaccaccttcacggacgaacacttctcctcaaccaccgaaagactccatggccgagtctggaagcagacagccaaaagaagggaggagcatcaaggaggggaggaggcctggccaccctgaagaggaactgaaagctgaagacaggggcatcgaagacctctgtgtcatccatgtatccagcaaggaccaccgggcttcgcaggacaacccttacagcagcgataaaccacctccaacttcaccaccagcacagagagaggagcgctggggtgagaagcaaagcaactaa

SEQ ID NO: 11105 - DNA, 1734 bp, Oryza sativa
  Clone ID: PAT_MRT4530_17361C.1
ttttttttttttttttttttagatccaaatccgagcgttctttttcttttttttcttgtgtttttgctttttgcaaacatccttcgactctattgcaccgggtttcataaatatgtacatgtttcaaagcaccatactgtgaatattcaagatcataaaccaaaactagcaccttagctttcctcaagatacctacgtccttttgtacaattactcaaaataagtagaactccacgattggtttctcattttttgcatttgtagtagtatcctaacctatggacgtaacatggagcagctacctgacgaacttccgataggacacacaacatcttgcacctgaagcttcaagatacgcaacctggtggtgtcaagtatctcgaggcattcctggagatccgcatcgctcgctaaaatcacccagtcaccctcatcgtctttgtacttgagctgaaataggccaattgacagtttcagcctcttcgctatttcctcgagcagctgctcgtatttcatggatggtagcaatttgaaccttatggggtcattcttgtagctcgcctttacgacgacggttttgttgctttcgttagctgactgactcttgatgctcttgaaagtttcgccgcttgatgtggagcaatctgtcatgctggaagaggacggtaggctttgtttggaattcttattgctcttgtcagtctcactctccattctgggattcttggtggcgcagaaaaagaatcccttgatgatggtttgtgctccagtctctccgtcctcgtgccagttttcgcaacacaagtcatttcccttgcaacatataaaccatttggcatatcctcacagaatgccccactcaatgttctggtagaatgtgagtttcgaaataattctccatcgtccatgtcaaaattaatttcaccattttgcttattctgcagtttgtgcagtacatcttggcctgcatgttctcttcggtatgcatcacagtcaggttcgaagttcaaatgtggaagttcagattcaataggtaggggatcagaacctttgtgttcaacattcatcaatacaggctctatggaaggggaaacagatgaaataaggcatccagtggaaggatcatatttcagcactccctcgactccatgtactgaacttatgacgttctggatcttctttagggatcggtttaccttctttatcttacgagatggccaccttgatattccatgttgtctgcatatccttttcagcgtagtaggacaaacaccaatactctttgcagcatctttcaggctgccagagaagtactgctggaggacacttaagctaacgctcttctctgttgagctgcgtcttttctctccatcggatgcattgctacactttattaacttcttagtactttttgtatctgatagttgttcatcaatgccctctatctgatattccaaagccgcgtgcgtttttgtttcattcgatacatcaatttctcggcctgaataaataaggttaacaggtgaagggcatcttgttcctgatcgattttcatttgatagctttcttgtaacatcttccttcaactcagcatctgaaacagttctcagacttttgcatactttccgcatagtcgcagatatgctgtcaagtaagagctgttgttcttcaccacctttgcacaagactggaagaaaaaactcaagcacatagtcatcatttttggtgtatgtg

SEQ ID NO: 11106 - DNA, 222 bp, Oryza sativa
  unsure (1)..(222): unsure at all n locations
  Clone ID: PAT_MRT4530_17362C.1
ctcatctcgcatcgcaagccgccgccgcgnatggaaggcctcatcccgcttctctacaaggccatcaaggatcgccggggcggccgcccgacggcggcgccgccgngcgtggacctctacgacccggagcagcgccggctgtggctggagcaggaggtgcggtccccgctccacccatcggccgcggcggcggggggccagcaccagcagcagcagcagccg

SEQ ID NO: 11107 - DNA, 219 bp, Oryza sativa
  unsure (1)..(219): unsure at all n locations
  Clone ID: PAT_MRT4530_17363C.1
cgaatttnatcatccgcttaaatacatccaaagctctccatcgccatcggggatcaacggcgaccgctccgntctacccaatccacccatccactcgccgccgccccctgatccaaagcctccgccgcgccgccgtcgagaggaggaggaggaggaggaggaggaggaggaggcgtgagccctatggggaccctcctccggccgcntccgatcgnccan

SEQ ID NO: 11108 - DNA, 216 bp, Oryza sativa
  unsure (1)..(216): unsure at all n locations
  Clone ID: PAT_MRT4530_17364C.1
aaggaacccttcgtcctcgtngcctcacttttgtntcccactccttcgtcggcggctcggctcggcgcaggcgnanggnggagaagaccaaggaggagggagaggnggacgtgggagcgacagagattaatttccantggggtttgggncgnggtgaggaggtnagggatgcagcganggcgggcgcagacgtgggcnggngtngggaagacggtg

SEQ ID NO: 11109 - DNA, 1725 bp, Oryza sativa
  Clone ID: PAT_MRT4530_17365C.1
gacgagcggccgctgttttttttttttttttttttacaggcaatgaccagttgatgtattgagaaactttttacttgattcattacaggagtacatgtcaaaccagaacaaataaaacaagaaaccatacgaacactttgggagaacatgtatttctactttaatactactatggcagtcgatgtgatcagaagtcctcgtcgatgctgaagacatggttgcaagaagcgccgccgttgaggctggacattacggacgccttctggtagtcgccgacgcgcttctcgaagaagttggtcttgccctgcagggagatgagctccatccagtcgaacgggttggcgacgttgtacatcttctcactccccaccgcctggagcagccggtcggcgacccactctttttttttttttttgttgatactaaacaactggattcataattcattaggatacatcaccaacaagaaccagcaacacaccaactataacattagggagcaccacgcgcatgtattactactactactagtaagggggggcagagagcaagtgactgcgagggttggagatgtacacgaggagattggcaaatcagaagtcttcgtcgatgctgaagacgtggttggcggaggcgccgccgttgaggctcgacatgacggacgccttctggtagtcgccgacgcgcttctcgaagaagttggtcttgccctgcagggatatgagctccatccagtcgaaggggttagcgacgttgtacatcttcttgcagccgagcgccatgaggaggcggtcggcgacgaactcgatgtactggctcatgaggtcgccgttcatgccgacgagcgcgacggggagcgcgtcgcagacgaactccctctcgatgtcgacggcgtcggcgacgatctcgcggacgcgcgcctcgtcgagcttgccgcggaggaggtcgtagaggaggcaggcgaagtcgcagtgcaggccctcgtcgcgggagatgagctcgttggagaaggtgaggcccggcatgagcccccgcttcttgagccagaagatggcgcagaaggagcccgagaagaagatcccctcgacgcaggcgaaggcgacgaggcgctcggcgaagcgctcgccgccgtcgatccagcgcatggcccagtcggccttgcggcgcacggccgggacggtgtcgatggcgcggaacagccggtccttctcggcgccgtcgcggatgtaggtctcgagcagcagcgagtacatctcagagtggatgttctcgatggcgatctggaatccgtagaaggcgcgcgcctcggcgacctgcacgtcggacatgaacctggaggcgaggttctcgagcacgatgccgtcggaggcggcgaagaaggcgagcacgtgggagatgaagtggcgctcgtcgggggacagcgcggcgtcccagtggcgcgcgtcggcggagaggtccacctcctccgccgtccagaacgacgccaccgccttcttgtagaactcccagatctgcgggtacctgatcgggaacatcgagaatcgctcggacgactccgccagcagcggctcctccatgtcgccgccgccgcgggctggcaccagcgtcttcgccgccgccgccgccggcatcctcgtcttcctcctcgcctccgccgcggcaaccgcgattcgatctggtggtttggggattggagttggctcggcgagtgggtgtcccggccgg

SEQ ID NO: 11110 - DNA, 447 bp, Oryza sativa
  Clone ID: PAT_MRT4530_17366C.1
gtctctacgtgcaggacctcattctcttcttcggcgtccacacgctgggcttgtgccggtgtgccaacttccgcgaccgtctttacaatttgacggccacgctagaagccttcatagatgtgtggttcggcgagacctgtgctagtacggtcgatgccggcgactacaaatgtacgctgttcgaaccgtcttgtgatattatgaattattaattatttgccattattacgagtggtgttaaattttatgatactatacccatatgtgatagacacatgagggttcatatgttatatacagtgtgttaaatgttctattaaataaagaatcatgtcttttttaatatttatttttcgtaaatggttaattattattaagaattttggttgtttctctatgatgtttcaaagctttacgtcacgtgaatgctaatttttattatttttt

SEQ ID NO: 11111 - DNA, 789 bp, Oryza sativa
  Clone ID: PAT_MRT4530_17367C.1
ccccgcaccttatgaaaacatggttgggtctcatatatcatttccaacatggtaatttgacaatgaaagctaaactagttacagatcctcaacatcctgcttggatgatgtagggcgaccttgatactccagttttgtacctaaacttgctgtgataaccctgaatttcagtcttatcttctccattatatcttgaacttgctcgtcttctgggttcgacaacggatagcttctcaacagtgcagctagttgctcaatgtttttcctgacccgagctgagaatgcatcttgatcaattgaaaccaacgacgtccaaacatccagacatccctgataaaaacctagttcttcacctacctgaaaaccattctttaaaccaacctgccttccctcttcttttccagacaccaagccctcactataaccattcttgaaacccgtttgatagtgtgtctcatctaagagtactgatggttcaaggaaatcaaaatcatccttaggtttctgatccataagaaggcgtcagtttccgcgatacttctggaacacgccgctgcagttggagtccttagccaccgcgctttccgccgcctactcagggcagaggcgaaggccgctgatagcaacggaactgcgctttccccggtctccgccggcgaaagaggcggggcgccgcacggcccctccgccggtggaccaggcgaggcgccgcagctggcggggggacgacgcggtggcgcggccgctgggcgccgccgctacgaccgggaggaggctcgtgccctcagc

SEQ ID NO: 11112 - DNA, 838 bp, Oryza sativa
  Clone ID: PAT_MRT4530_17368C.1
ctaacgtctcttccttctgcctcccttctgctttcccttgccatttttcttgcccattctcattttctgctcaggcgcatcccgacccgatagtttgggtggtgccaaaagatgcttgacatcaagtataccattcttgaagtgcccttgggtagccctaagtactcggtcctcaggtctagtcttttgagctttgctgttcttggaatcccgtttcctaaatattccaagtagtctttcctcttccgctttcttctcttctcttttcttttggttcttcatagctggctttgatacacttaacggcgttcggtgcttcttaatggcctttccacccaactgaactactttacggttctctaattgcttccgttccttccatgtagatgcaccgaaaagctctacatctttcaacaacttcccaatatcaatgtcaggctcctcatcatcatcagaagtatcatcagatttttccgcagctggcttccgatacatatccgaaagactcgatcccatgaagttgtgccactcgccagtcgacgacgacgacgaaggcgccccagggcggcggggcctccgggcaccgggcgcggacgggtcgaagacgacctccgccggcgcgttcaccggtgtgggcttcggcctccccttcaccatcctctccctccttccctcctcctcctgctgctcccacccccaaatccccccgaccaaatcctaccaccccggcgaagcgagggttcggctgggagcggggggcggcgcggggagggagggaggagagggcacacgtatgggcgggcctcgtcatgcccgcgtcgtaccacacggggaataa

SEQ ID NO: 11113 - DNA, 1185 bp, Oryza sativa
  Clone ID: PAT_MRT4530_17369C.1
ttgtttttttattttttgggtaccatataacctactaaattcgtatatccattaagcctcctcaagcagccttggtatgtatttacatgtacctgattttcactcatagctagctccgatcgaactcgatcttcctcgcccactagagtaaatcccaaccaacaacatagccgaaagatcagatgtctcactatacatgcttcagctaaggccccacccccatatccgatgtacacatgatatcaggaactggaattgattcaatgccagtaatttcatctaagcaaattcaattccctgaggatcctactctagtgtacacgattgagccgcacaaacttactgagcatggaagcaagaaccttcatccattgcagatggcattgaggagcacatgccccagcatgaggtccacgaaatactggtgcccgaccttgccatcccgccataacaacttcgccggtgcacgcccatagtgaacaccatcattgcaacgattgtcatagtgccatgggaaggtcatatcgaagttgtcgatcaacccaccagtgagcaccccatgacgcctcaacttctcgacgagcaccccattgaacgcctccatcttgctaggattgaatgccaggtcccgagcatacccgccggtcgcgatggtcgttcggtagaacatcctcggcacggcatgcccacgcgaccgcacttcagccataactccagcccagaattgtgcagcatactcagcagcctgcacatatgcgcggacgctggtccagtagcacccgtcgtgcaggccagagttgaggatgacaatgtccggggcacggtcctcagccaagaagtatgaacggacaagacgctggaaccccttgttccggagggaatgcagaccaagatagttcatgctcatgttccagtggccattgaaaatgctcgtgatcctcacagtccccggcccgccactggggttcgtgaacgcggcgtcgaaccggcgcgtcacggcggacgtgttcgtgacgccgaggacgaaggtcaggaggttgcggatggtgtcgacgtggttggagtcgccccagaagaagagccacttgccgtccaggcaccgccacgccgcgtcggccgtgaagaggctgaacgagcagtgcgcccagtagacccacccgttgctctccagcgcgcacagtggcc

SEQ ID NO: 11114 - DNA, 639 bp, Oryza sativa
  Clone ID: PAT_MRT4530_1736C.1
atggggcccttcaaccaaacctgccgaaacccatggcgaaggctatggagcaagaacggcgcaaagcgaagagtagcgccaggccagaggcttcttaggcgaaggcggtcatcgcacacagaacagcaactgccgccgcttcctcctttctcccgccagcactgccgctcctccgccctccgagcgccgcctctcctccatgcgctggccagccacactgccgcttctccttccgtgcagtgcagctgccttgccgctcctactgtggagatcaaggaggtcttggcgccgagtccgcctcgcccccatgctgcgcatattgaggaggtctggatgagccgaattgaagacagcgggggcggaatcaacgacgagctaggaaagggtgccaacaacgcgtgcagcgagcaggtacagggcgtcggctgccgttgtggggtgggcgccggcggagtggaggggatctacggagggagaagggaagagggtgtggttggaggcgacgaggcgggtggtgccgtcgaccagcgggaggcggcgcaggagcgcgggggccctgtggaagacaaagcgcgcgtcagaatcgtcggggtagccggtctggagcggcttgaggtaggcgacagtggaaggggatga

SEQ ID NO: 11115 - DNA, 1055 bp, Oryza sativa
  Clone ID: PAT_MRT4530_17370C.1
ccggccggattcaccttcacattcccaaacggccacctcactctccctctctctatctctctcttcacatttccattccaactcaatttcctcctctcttctcctctcctcttctcacacgaagccaagaaagccaagaaatccatccatccatagcaagggagctagctcgccggcggcgatgggcaaggactgcggcaaccacggcgacgacgacatccggcaggcgtgccggcggctgctgacgatcctcttcggcctcgccctgatcgtggccatcatcgcgctcatcgtctacctcgtgctccgccccacccaccctcgcttcttcctccaggacgccacgctccgccagctcgacctctccaattcctccacctcccggcgtcctctccaccgccctccaggtcaccgtcgcctcccgcaaccccaatgaccgcgtcggcgtctactacgaccgcctcgacgtctacgcctcctacaagtaccagcagatcacgctcgccgcctcgctcccgccggtgtaccagggccacggcgacgtcgacgtctggtcgccggtgctctccggcccggacgtccccttcgcgccctacctcggcgacgccctcgccaaggacgtcgcggcggagtacctcatcctccaggtcaagatcgacggccgcgtccggtggaaggtcggcagctggatctccggccactaccacctcttcgtcacctgcccggccttcttcatcgcctccggcggcaacggctaccccggcgccaatggcctcaagttccagaccgccacctactgccgcgtcgaggtctagctgtctcgtcttctccggctccggcgacggcgaggtgtgcataaatgtcggtaattactgtagcgttgaggtggggggtatagaggtaaatttagcgtgggttaatcaaagtatattttgtgtttaagcgttgttaagctttcagttccacgtttaattgttaataaaaggatattataactatggttaaaaaaaaaaaaaaaaaaatttttggaaaaaaaaaaaaaaaaaaaaaaaaaa

SEQ ID NO: 11116 - DNA, 195 bp, Oryza sativa
  Clone ID: PAT_MRT4530_17371C.1
gsagaghtgragctgacawggcccacttgatgagaawgwtttttgagctgtttgatgggcccttaccaatgagggggcttcttgtaaaggttcctgcttgcttcggctggcggattcgtggttggcctacgtcaggcgtcgggttcccggaaccttgcattccgaatcaagaatgggcccgcatctgtctgtccg

SEQ ID NO: 11117 - DNA, 228 bp, Oryza sativa
  Clone ID: PAT_MRT4530_17372C.1
atggcgatggaggaaggagaaggccacaggagagcaggatgtagaagatggcgggagggaatggcagaggcccgcttcccgccaaaagcctatctctgcgactcgtgtctccgtccgtgcacgttgcaccccactaccatccctgcttttgcgctagtaccaccacattcctatgcagctcgtgatccagcccttacagagctacgagtacaatttccccatctttga

SEQ ID NO: 11118 - DNA, 307 bp, Oryza sativa
  Clone ID: PAT_MRT4530_17373C.1
aacacaggaaaaattgttttatatgcactctttgggatcagggccccaaaaaaacaaattgtttccgggggcatgcatgtatccggggggggcgaaaaacattttttttttgatcgatcccgggggggatttccccttaattttattctatcccaagaaaaacccccccgggtgcatggtttaaaaagaagggggaatcttggggggttggggttttttcttctagctggcccgccatgcgggcgttccgggggtgggggttgtgatttgaagtctttgggacccctttttgccttttttttttttt

SEQ ID NO: 11119 - DNA, 1091 bp, Oryza sativa
  Clone ID: PAT_MRT4530_17374C.1
ccacgcgtccggcaagcatggccggctcctcctctcttgcatcgcctcactcactgctgctaccactcctccttcttttcctcctcgttgccgctgccataggcagctacgaccccaaggcgttctgctccaagacgacagacatagcatcgtgccttagggtgttcccgacactcccagacatcgtcaccaaggcgcaggacaacaaagagttgtacaaacggctggtccgctactgctctttcaagacctacgaggccacgtcgctcgcggaatccatgattgccaccaccaccgctgccgaccccaagatcagcgcccccttcttcccgcagtggaaaagggacgaggcgatgacgacaaaaacacctccaggcaagtgcctcctgagctgcaacaagaccatcggcgaagttgacgccatcctaacctgcggacacacctacatggaagacaggccccccatcatccaccagaacctcaccgtcttgttccatggcggccacccgccgtcactctgcaagagtggatgccttgacggctcgtcgtcagagggtgaggccctcctcgccaccaagttcaactatatatggagcttgttggatctcatgaaagctgtcctaccggaatatctttctgagactgggactgcgacgacgacggtaccatctccctacgtcgctgctgcggcggccccggcgccatgagcaactacatatgcatgcagtcccttcgattcgatcgaccacaccacaacagtgcagtgctcttggaatccctatatacacgcatatactatgtatctaagaaataatcaagatttcacagagagcatttaagaatcatgtttcactaattgttgcagtatatagtagcccatttaatttcatccatcagttagtgttctaattcttacagtggaattggatgttcacccctcaagtacatacacatacttgcttccctatcactcaaatagttacaaaatgttctgaaaaataattaaagcatttatacagcaagcatatattcataaccaaacttagtgtttttttttttggcaaaaaaaaaaaaaaaaaaaaaaaaaaaaa

SEQ ID NO: 11120 - DNA, 283 bp, Oryza sativa
  Clone ID: PAT_MRT4530_17375C.1
atgacggttgtgacggttggaatggtcggaaataccctccaaccatcattgggggctaatccacaccgtccaggcaaagccctggatcggatggcgctgaggagggttcagccgaacctgggaccagcccaactagcccatgttttggctggcggcctcctctattgcttctcttcacagacttgtgaattttggcccaattcattatgtcatttctgagttcttggcccattcatgcctaagtctgattctcaacatcgtccaattgatttatcgtctgatt

SEQ ID NO: 11121 - DNA, 225 bp, Oryza sativa
  unsure (1)..(225): unsure at all n locations
  Clone ID: PAT_MRT4530_17376C.1
ctcttgggcttgttcttgtcctcccttcgaagcanaagtangganganagggttcttccttctaaaattctangatctctcttctctttgaagaaaaaatgtatacaaaaatggaagcagcctcacctcttgcactctgctcacttaattagtgttattattattattattattatttttactactgtctttcattaatcaattgacttgcttgtnctttcgctt

SEQ ID NO: 11122 - DNA, 1237 bp, Oryza sativa
  Clone ID: PAT_MRT4530_17377C.1
atggagccactcgtgcgatcccccgtcacatcgccgccggcgatcgccggagcagcgtcgccatccccgtcccgctccctctcccgcagaagagcccctccggacgccgcggccttccctaagccctgggtgatcccttcctccagcgtcaaatccgccgcgtgcttgcagctgcagcaggcgcgcgctccccgccgatgcgcgcggctcctcgccagcgccgccgaaggaggacgaagaggggaggagggctctccggcctcctccagtgatgcggatgaccaggcggaagccttgcccttcctcgagagtgatagccatcatacgcaaacaagtaaacatggtgagagtggtgggagcaactctggtggatctagagccggcctattcagaacaccaatttcagggggcgtacacactgcgacttctgttcatgatttacccccaccggctcgagctgttcgcaatctgatggagcaggtgcctggatggagtggactgtcaaatgcacgtgtaacaatttttggtgatgttgttcccttgcctgctgacctgcaggtcttggttgattttgtcaacggaaatagtgacttgaaagttattttttttcaggaatgggctcatcaacagtatgttttgaagcaccaacagtgggcatcccatcagtggggcaacttttactattacaaaatgcagacaataagtgacatatatttcattggaggttttggcactgttgcttggttagatgtgaaagaatacgaggctctcaaacctgataagattgcgactgatggtggggagcaaagtttaaaggaacttaatgcaatgtactcaaagcctttgaaagagcttttatcaaccgaaatagaggtagatgatgcagctcttatatcaattgatagcaaaggtattgatatacgagttcgacaaggtgcacagttcaacatccagaggatagcctttgagctgcattacagcgtagaaacacttgaagaagccaaggaagcgattaggaggatattaggcaaatcaagatggcatgccaaattttagacttccttcaaatctgaatgatgaattcatggatggaaactatcaagcgcctgaatcctgtaaaatatttgtatatactcatgtaatttttgactttgtggtgtgccagatggaataagggaattccatttcactcttgtgttacaagggcctaaaaggcctgaagactaaggatagagtc

SEQ ID NO: 11123 - DNA, 2964 bp, Oryza sativa
  Clone ID: PAT_MRT4530_17378C.1
atgggatggaggcggcccgcgccggatcttgcagcatggcggcacttgcccctcggctccggggatccggaggtgggggctgcgcggttggaggtgcggcgcggcgaagacagtcggcgtggaggtggggctgccgactgtcggtttcggtttgagagtttttggtgcaaattggatgggttcaccgaggtcgttcagaatgcttggtcggcaccttgtgccatccaggacccaatctctaggctggatttcaagctgagagcaaccggtcgggctctccaaagttggagcgacaagaaggtcgggaatgttaaacttcagttagaaatggctcgggagctcattggtaaatttgaccgcatggaggaatctcgccgtctctcagcgcaggagcgcttccttcatcgcgcactcaaaaagaaatatcttgcactcgcttctttggagcgaaccatggcaaggcagcggtcgcgtatcttgtggctgcaggaaggagatgccaatacaagatttttccatcagcatgcagcctaccgtcgtaggaggaattttgtgcagcagattgagcataactcgcagatcgccacggcgccggatgagaaggcagtccttgctcaatcctattttactgatgttcttggcttagtcggtcagcgtgcattcactttggaactggactttttagagccaaggggacaactcttatctgagttggaggagccgttcaccgtggatgaagtgtggagagcaatcgttgacagccctcgggacaaggctccggggccggacggtttctcggggcaattctatcactgcttttggggtatcatccaggaggatgtgctagcagcactaaaccagttgcatcgcatggatggatccagcctccataaggtgaacaaggcattcatctctctcctgcccaagcgtccggatgccaagaatcttaaagacttctggcctatcagtttggtgcacagttttgtgaaactcttcaccaaaattctctcccgctgccttgcgccaaagctagattcgttggtcgccaagaatcagagcacttttgtgaagaagcgttgcattcatgacaacttcatgcttgtcaggcaatcggctaaacgcctccacgatcgcaaggttccttcggtcttgctcaaacttgatatagccaaagcattcgacaccatctcttggccgtttatcttggaggtgctagagcacaaaggcttcggacatcgatggcgttcttggattgcaatgcttttccgtactgcttcctcgcgtgtgctaatcaatggggagcccggcggcccaattgtgcacaggagaggtgttcgccaaggtgaccctatttccccaatgatcttcatcatcgcgatggatatgctgagccccagtgaagaattgttgagaccgttagggattccatttcagatttccctatatgctgacgacgtggtcgccttcatccggccggctttatgggagattcgggcggcaacagaaatcttagccatctttggtgaagcttcgggccttcgaaccaacttcgcaaagtgctcggcgttgcccatccaatgcaatgaagctgatcacactttgcttcgggatgagctgccgtgtcaggtcgcttctttcccatgcacttaccttggcctgccactatcaatctttcggttgaagaaggaagacctgcagctattggttgataggatagctcgtcggctgccttcatggattgccgacttaatgactcccatcgggagggcaaccatggttaatgcagtgctaagttcaatcccaatttatcttctcatggccatcaacgtgccgaagtgggtgatcaaggggatcgacaaaatccaccgtgggttcctctgggctggcaaggcagtcgcaaatggtggtgtttgtcgggtcgcttggcctcgagtttgtgcccctaaagaatttggtggactgggaattcctgatttggaaaggatgggtattgctctgcggtcgcgctggctttggcagcaaagaaattcgccggacaagccttggcatgggctcaatatcccggtctcgcagaaggagcgcaatctggtcacgatctccatgatttgtttggtgggtgatgggacttcggttttattttgggaggataactggcttgaaggttcttcaatccgctctctggcaccggctgtttatgcggctgtcccgtctcggcttagaaatcgccgtaccgtagccgaggcgcttcatgacaggaggtgggttcgggacatcgctgccgctctaggcatccaagcaatcctggagtatctcaaactctgggagattcttagggcaatccaactgacagccgtgcctgactctctgatttggagatgggaatcctcaggggagtattcttcttggtcagcttatcgtgccctgctctcgggaagaatccatttcgagtacaagccgatttggaaatcttgggcgcctccgcgttgttgctacttcctttggttggtcgccctgaacaggtgctggacggcggactgtctccggagccatggtctttctcaccctgcatgttgtgttctttgtgatcaaagcgatgagactattgatcaccttttggttgcatgtccggaatctcggcagctgtggtggatcgctctcagagcaattgggcattcggaatgcctgccgatcaatgaaccctcctttcacatttggctctgtgacagcagaaagaaggtgatcaaggcacatcgtcgagggtttgacaccattgcaaccttagtagcatggacaatttggaaagagagaaacattagagttttcaatcaaatcaacagatcttgggtggacattgctcgggctatggcaggagaggctgatctttggagattggctagggcagccattcctagtgtagtgatccatttggatagggaggggtcgccaaacggtttgggagattag

SEQ ID NO: 11124 - DNA, 179 bp, Oryza sativa
  Clone ID: PAT_MRT4530_17379C.1
ctacaccaacgactccattagcattcttctcttccgaaaaatacatctcctgcaccagaccttcaccatccccctttaattccttccctaaccactcctgcttcagctcttgatcctccaactgctttcttgctcaacctcactatctccattccccaccatattaccttccacccatc

SEQ ID NO: 11125 - DNA, 1923 bp, Oryza sativa
  Clone ID: PAT_MRT4530_1737C.1
gtggcggcgctcttccccactgcgtccccgggctcctccagggaaaacaactgccacctcaacccgtggcgacgagaaagcaaaatatttaatcccttgttggtctcctccctatcatatctacaagatctatcgacatccagctcatccctcccctcttgccggctctggggaagcccccccacttgcctcccttgaagctacaatgcagacatccacatttctcctcggaaagtcaaaggcaagaaacaccatggatgccactgccatcggcaacggcgccctgcactccaatggcgccggcgccgacaccaaagggaagccgatcaaatgcaaagcggcggtggcgcacggccccggcgaggcgctggtgatggaggaggtggaggtggcgccgccggcgaggatggaggtgcgcctcaaggtgctcttcacctctatctgccataccgacctcagcgcctggaaaggagagaacgagcttcagcgaaagtttcctcgcatattgggtcatgaggcagcaggggtggtggagagcgtgggagagggtgtggaggatcttgcccctggagatcatgttgtccccatcttcaccggcgagtgtggtgcgtgcacctactgcgagtccagcaagagcaacctatgcaaaacctaccgtgtcaacccattcaagagcaccatggtcaccgatggtggcacgaggttcaccatgatcgaccgctcctccggtgcacgcaacccggtctaccattttctcaacacttccacctttgctgagtacactgtgattgactccgcttgcgctgtcaagatcaaccctaaggctcccttggagaagatgagtctcctcagctgtggggtctccacaggagtgggagctgcatggaacactgcaaacgtctccaaggggtccacagtggcaatatttgggcttggtgccattggtcttgcggttgccgaaggtgccagattgagaggagcatctcgaatcatcggagttgacataaaccctgaaaaattctccaaaggcaaagagatgggcatcactgacttcatcaactcgaaggcatctggcaagcctgtccacgaggttatcatggagatgacagatggcggtgtcgactacagcttcgagtgcaccggcatcaccgatgttctacgggaggccttcgtttccacacatgatggatggggcctgaccgttgtgctggggatccatgcaacgcccaggatgctgccgctgcatccaatggagttatttgacggccgtcggatcactggctgcgtttttggtgacttcaagggaaagtcccagctgcctgaaatcgtggagaagtgcatgcagggtgagattaacataaattttgatgggttcataacacaagagttgcccttcgccgacatcaacaaagctttccagctgctggaagaggggaagtcactcagatgtctgctccatgtctgatgaaacttgtggattgtaaatttgaatacacaataaatgaatcataaatgttttcgcggtttcaaggtgtataattttcatatgcatgtatgttttgtacataaaatgggttgaacttcgttaaagaaaagacaaattgttaattagtagaatgcagtattaatatttgtaacaggtgagtgtgggtgtgcagtcgcgagaattgagcacacgattggttacatacatgctcgagttgctagtcagtagggccacacaccatttttatctattacatacgagttacagtctaattttattatagttacatataaatgttctctaccaaaaaaactgtctgaatgttgatatttgtaatagagttagcacaggtttcttctgtatactattatcatggtttcctacacaataattgtaaaatgttcttttgaatttagggatctccattgcttgtgtcc

SEQ ID NO: 11126 - DNA, 572 bp, Oryza sativa
  Clone ID: PAT_MRT4530_17380C.1
cctagccgcacatccccgcctattcccggcgccgaccgccgcgcgcacgccgtcgccgtcatggtgaggagacctgttaggtgcttatcgccagatcaagaacaagccgtaccccaagtcaaggtactggcgtggtgtccttgaccccaagatacggatctacgatgtccagaagaataacaagggtgtggatgagatctaccactgagagcatctcgcttcttggtaggaggacaatgtcaccatctaggctattgaggatgcgcgtatcgagtgcaacaagcacatgatcaagtttgcacaacaggatgccttgcacctgatggctcgggctcacctgctgcatgtgctcctgataacatgatgctttcgtgcgccgtggctgaatatgcttcagactgatactagtactgcttatcagaagtcacatcgaacctcttctagggtggctatagtacacatcctattttctgtgcggcgcttgctctacaatgtctcgccatagcctaaaaccgtcgtccgtcgttgccaagttcaagcttcctgctatccatgagatcatgtgatcccta

SEQ ID NO: 11127 - DNA, 493 bp, Oryza sativa
  Clone ID: PAT_MRT4530_17381C.1
attagacgatttttatttttttttcccccccgatcaatccacgtaaattcgcgccaggggctttaaaaacaactaataaaacacgggccgtctttacaccaacacgtccacagtacatatacactggaaagaaagtctcaaggatgcgcaagcacaacaatgggggcgaaacctcggaagaacgatcgaccctcgaaattctactcttcgtcgtcgccgatgacaaacttgccggtgccggggttgatggcggcaatgaaaaaaaaaaccacgttgaaaaggacgagcggctcaatcccgttgatggggaccccggacacaaagtagaactgcccgagggcccccttgccggagataatctccccgaagatggaaaaggcaaacccgagctgcccaagccggccaaaaaacagatcgtgggcctgggggaagccaaacagggggcccgccttgctaaggccacaagcggagcgaaagcccttgccccgggcaa

SEQ ID NO: 11128 - DNA, 351 bp, Oryza sativa
  Clone ID: PAT_MRT4530_17382C.1
gtgcggttggcgtagcgatgattcccctcgagtcgcggtggggaatccgacgggaccagcaccccgaggggcaggagcgacaaccggcgcttccgcggattgtgcgaaccccgaagggccacgcagagcgtctaaaccacacagcctttggaatccttaaaaacgaatagatcagtgtcaatgacctgaaactgataataattacaaaaacgccttatacgaggactaggagactatccagatggaccccttcaggaccaaggggaatagccagcctaccaacacttctatctttcaaaaacatataaattcttctcacttactgactcacaataccatacactatctcac

SEQ ID NO: 11129 - DNA, 231 bp, Oryza sativa
  Clone ID: PAT_MRT4530_17383C.1
atgggccaacttggtctgcctggttatgacggaaggggcttccctgggctggagggccctctggtctttggccttttgcttgcgtgcttcgccacatggctttcgacatatggcttcgccttagtcgaacctgatggtcttggcttggttcctcattggttaggcggtttcggcaggcaccagtgtctaaacaaggtcaagtggaatgaagattcttcagacatcccctag

SEQ ID NO: 11130 - DNA, 279 bp, Oryza sativa
  Clone ID: PAT_MRT4530_17384C.1
atgtcagggtccacgtcatctctctctctcccttcccctctctctcttttctcctcgctcactcgctggctggcgcgcgcggccgctggggggcgcaaagagggcacccgccgcgtcgttgaagttgggccggagacggcgaggcagtgggccaaagttgaggacaagtacgccgtcaccgccatcggcgtcgccgcgctcgtcggcctctggacggccataggcgccatcaaggccatcgacaggcgacaggcttccacttttgcccggcgtgcttga

SEQ ID NO: 11131 - DNA, 1260 bp, Oryza sativa
  Clone ID: PAT_MRT4530_17385C.1
taaggaccattataaaaagaaactaaatattgcattggaagggtaaatttaaatttgatttccaaaagcggccccccatttttttaatttttatttatttattttgtgtgatcggttaaaataataagagtaagaatttttatttttttttattaggaaaggacgtgaacggccgagaaaacctaaatgtgccaggggcccagggcccagggggcaggggttgatcatagaagccagggcaactgttccatctggcaatagacaaatttgtctggtttcaacaagtaccacgttcatcttttactagtatcttcaacgaagaaaagatactggggttttcccagacaaaccgaacaacataaataggtagttttacataataatcatcgaaacagtaaattttgtcagcttcatacccagtggcaagatgtatttcggtctcaactggaggtcttcagcctagaggactcggcctctgcaaggaagggcgctggcctcacatagctgaatcccacgaagttgctatctgcagcgacagggctggccactggagagtcgagcacgggcatgctggctccagcactcgtcaaagttggcgatgcaggttttgccagcaacatttgggcggaagcttggctgaatctgtcgggagtctagcttcttccagtttactgacttgaaccacttgtgattctttatttcattgctcccgcctggtccacagcccagcctcctgccagcttctttgtgcagtaagccttttagcagagaatgaacttcgctagataaatatgccggaagcttaattttctccttaacaatcttctgctgaactttgtccctgtttccgccaacaaacggaggctttcctgtaagcatttcaaacaaaaggattcccacactccaccagtcagcagccttatcatgaccacggccctgaacaatttctggagccatgtactcaacagtaccacacattgagtttgatctagtgttttcatcaaattcctttgccaggccaaaatcagtcagcatggcatgtccatcagcatccaacaagatgttctcaggcttcagatctctgtgcataattccattggcatggagatgggctacagcagacacgatttcagcagtgtagatgcgtgcaagctcctccctaaacaaaccctgttggtagagctggaagaaaagatggcccccatttatgaagtccaacacaaggtaaagtcggtattttgtctgaaaggagtacctcag

SEQ ID NO: 11132 - DNA, 117 bp, Oryza sativa
  Clone ID: PAT_MRT4530_17386C.1
atggaaaggaaagagtttggagctaacatgatctgggagaagtttaagttcgatgaactcaaagacatgatcgagtactaccctcagagctaccatgctactgatcgtgaaggctga

SEQ ID NO: 11133 - DNA, 197 bp, Oryza sativa
  Clone ID: PAT_MRT4530_17387C.1
ccaccctcgcgagccaagctaccattctcctcctcggcggcggcggcggcggcggcggcggcgatgcagatggcggcgaccaccaccaccaccgactcctcccaggcggccgtgccgcctcaccagccctcaccactgcacgcccaccgcgcaccctgcacgtcgcaccgcgcactccgcaccatccccataggcgc

SEQ ID NO: 11134 - DNA, 378 bp, Oryza sativa
  Clone ID: PAT_MRT4530_17388C.1
aaatcggggggagctcacactattaacaaatacaacaaccaaatcaacactcattcctaccctatatttgggtgcgctaataaactaacctcctaaaccttactactactactaaataaggtccaactctttatattttctcttcaaaatttaccaactttaaaacctaatccaacgtgacagaaatacaaaaatggtctatacatattagcacaacacttttgcttcttctattcttttacatattcaataatttatgcacaataaatcactaatggaaatggccatgcactcattattccaaaacaaaataagtctttcattatatcaactcatgcttctcatacttagcgaaattagtttatatttttaaaggct

SEQ ID NO: 11135 - DNA, 1014 bp, Oryza sativa
  Clone ID: PAT_MRT4530_17389C.1
atggctgcaagtaacctggatgttttcgaagcatgtcatgagaggttgcagcactgcgccagggctaccaggtgcacaatactgaccaaggttgcttttagccaaggcacaagtacatatgttcttgttttctacagaaatataatagctgcagtagtcttactgcctgttgctttggcagtagaaaggaaaactgccccaccactgtcactcaaagtctctctgaagctatttgtgcatgcactatgtgggatgtctgctgcgatgaacatatcatgcattggcctcaattattcttcagcaacagctgcttctgcagtacaaaatatcatgccagtattaactttctttttggctgttcttatggggatggagtcttttaaattaaagatgtgccatggaatcgtgaaaatttctggcatagtgttttgtgctgttggagtttctgtgctagcattataccagggacctgatctgaagtcttttatcaagcaccacctttttcctcacacaaaccgtgttggtactcattcttcaaggaactggatactaggaattttcttgcagtttttggcgactttaatgtgggctctttgggcagtacttcagggacctctgttagaggaatacccgtctaagctactcaacacaactctccagatagtcttctcggctgttcaatcattttttatggctctagtgcttgagagagacttttcaagatggaagcttggtttcgatataggccttgttgccatcatctattgtcataataagcggagcgctgatggttgtgggcctgtatactgttctcttggggaagaggatagaagaggagggtatcagcagtcaaggagcatatgggatgttgtctgtgatgccagaaatgcccctgctacagcaacaagctgtccatggctgttgctggccagagctggagccgaagctgaacaacaacggcgacaccgcttcgccacctgcagcgatcaccaccatcatcaagattacttgtga

SEQ ID NO: 11136 - DNA, 450 bp, Oryza sativa
  Clone ID: PAT_MRT4530_1738C.1
gttttagactcatataaaacgctcttacgtcgtggaccactttattatgacaccggcggccgggtggacccaacagctgtcatgcttcgtgccatcagcagcacggtgctgctgctggctttctttccatatgcagccttagcttcaagcacttttgatctttcaggcaggcagtggacgctgcagaacagcaacaggtccatttcagcctcaaccaccctgccatcataccctttggaggtgctgaagaccaaaggagtcatcaacgacccgttgttcaggtatggcgaggcagacagcagatgggtggcagcagaaacctggacctggagcaccacctttgacagcactgagctgccaagcgtcatgagcagcaaagcagtgcagctgcggctggatgggctggacacctttgctttcgtgcagcttgacggacagacggtgctgact

SEQ ID NO: 11137 - DNA, 444 bp, Oryza sativa
  Clone ID: PAT_MRT4530_17390C.1
aagagcgtgtgcaatagttttatgtttttctcttcgttcgagctcagatcaaatgtagtacaaagcagaaacagaatgcaaaatgtagttgcaaagaagattagattggatttacatgagatgagaatgagcaaaatggatgggccaattagcttggtctgatatatctaggatcctctcccaaaacatcaagcaaaatgacttcacaaaacaatctatcctctcctccaaatttgaaatttctcttcactccaaatcccaaactaaatttctcctctcaccctgttctttttttgttggttccttttctttggaaaggaaatgctacgactacttggctggctaattgaggttacattgctaatgcttctagcttagtcaaaacggaggtcagttgctagtaccaagatctctggatgcgccgccgccattgccggcgtgggg

SEQ ID NO: 11138 - DNA, 526 bp, Oryza sativa
  Clone ID: PAT_MRT4530_17391C.1
gggaggggccccggcgctcgcccccttgtccctcgggggaggcgggagcgggcggcggaggactcgacggccctcgggagaggcggcggtggcggtgggcggcggctcagcggcgcgtggcggcggcgctggtgcgaaggcgaagcggcgaggtggtgcggcggcgctaggcggccagcggtggcggcgatgttgcaagtcatcgattacaagtttctgaatcgggtgtggtcttgttgaagccccatgatgtgttgccaatggagattaattgattctagaagaagacctttgaacttttgtcttgtttttcttgaagatactagagatgtttttatttgtgatgtagctagaaaattagaatcttaaacattttccctgaaatgcagtgtctcaaaccttgtagtttcccagtagttttagttttgtagtttgtttttcggttcctattgtaaaccttgtaagttcttcggcttcttgccatcttttgaaaggaattagtttgaaatgtttggggttaattatt

SEQ ID NO: 11139 - DNA, 254 bp, Oryza sativa
  Clone ID: PAT_MRT4530_17392C.1
aattcgatcatcctttggatgcggccaggagttaaaatgggatcgggccctaaatataaaaatatgtagaccgacacttctatatatagcattaacatatgtctaacccaaaaacatatacacacagttaatgcccatacaaacatacactgatagaagagcaactgaaacaaaaactcaagcctactacaggcgtcaaaattaaaagacgattaacaaaatgtgaacacactaaacaaggtggcttacattat

SEQ ID NO: 11140 - DNA, 421 bp, Oryza sativa
  Clone ID: PAT_MRT4530_17393C.1
tgttgctcatcctgcatccttacttgcacatggggctctttgaaaactcacctggggtgtgaaaagcagctcgacgccatggcgcggaaagagcccaatggcaagagcaacggggagcacaccacccgcccaccggcgacgccgtggtcgatacggttctccaagttcttcccggcgaacctgaggatcctggtcaccggcgtagccggcttcatcatctcggacctctactacaagctcatgcacaacgagaagcacgacgccattgtcgcagacaactttatcactggctcaaaagacatcctgaagaaacggatcggacacccaatatttgtgctattccgtcatgatgtaacccatcccctgctcgtggaggttgaccaactctattaccttgcttgcgatgattcaccaatcttct

SEQ ID NO: 11141 - DNA, 364 bp, Oryza sativa
  Clone ID: PAT_MRT4530_17394C.1
attaactaggagagttgtaccatttcatgaggattaacatatatatctttaactccatggcattaaggcccctgcctataaaacacatgttcatacacaaacccattactccatacataccaataacaccaagaccacttgcataactcctttggcccattggtaaacacctactagctgaacactcgggggggatcgtccgatcaatacctgcgaccctgactacttacatgaggaaccgcacgagaaacaccaaccaccacccgatagatgacaagctcaccctctggacacatcaccacattccacccctctgcagcactcatgtggcacgcgtccattcgacacacatagatgttacaaa

SEQ ID NO: 11142 - DNA, 261 bp, Oryza sativa
  Clone ID: PAT_MRT4530_17395C.1
gaatggatggaaatggatatatttcacaagcgtggcaaccatttttgagtgccagggtgagtgtgtgcatgtccagtgcttgcttattgacataatctctgactgaaatgaccaccggtcttaaacggtaggcaaatgactcgttactattatcagcatagcggacaattatgcgatgacaaaatgtaagaaatccaacgtgtgcacaaagggctgtacaaactggcaatgtgatgatacgaaaaagggcgaatcgaatga

SEQ ID NO: 11143 - DNA, 2106 bp, Oryza sativa
  Clone ID: PAT_MRT4530_17396C.1
atggcggagggtaaaatccgatggagcgacgatgaaattggcatatttcttgaggcatgcttggaggagttgtccgcaatgaccataacatccacttgtccaaagccgcaaggctacaagaacctcatacagaagatgaaggagagaatcggaagaaacctcaccaaggatcaggtgaagtacatatggtgtcaatgtcgtaaaaggtggatgctttggacgtggctggaatcaaaggctaccggcattggccgtgacccgataactcaagccattgttgctgacgacaattggtgggaagacaaggaccagaaaaaggacggagctcgtgtcttcaaagattcccctctcaagcacatcgaccttcactgtgctattttttcggggcgcacagtggtagggaaccactctgctgttgcaggcgcagcaccagcacctcctcagcagccaactccaaggcccaacatcaatatctcacagctgctagctcaacaacaaaacattgcgactctaggagagtttcaagtgcaggaaaaggcaagaggccagcagatgaagctggcacttcgaggggatcggcttcaaagaagagtcgaagtgactcagccgtcgatggagagccgttcccggaaggtggaagaggacagggctagaagtgcagcagcttgcatccagttggtggtagctgatggacataacccagggagtgatttattctttatggcactggatgtatttgagcgtgcttattggggtcaatggttcattgattactgccctacacccgagtcacggtcccattacatagtacagacatggcaaaagcaatttggcggaaaaggagctggtggccaaggaggtggacagcctggatacgaaggaggaactgggcagcagcgttatggtgtaggagcacccccgccaactggccagcagggttatggtggaggagtacccccgccaacttgttcaggaggtcatacaaggtttggagcatctgctttactcatttctaatgcttgtagtctgaactggtacttgtggaatcacacaatgagcgacggttcatcgtggagttcggatggtactgaagggcaatacacgagcgatgaggatgacgctattattgcaatgatgcaagagattttagctgctcctccaagagctcctcgtcgtgtcccaacccaatttggaataacttggatgctagagacaatggcgaatcctgcacagtgccgaaataattcttcaagggagtcgaacaatcgttgggtccggtcgaactcgacggtgtctatctattttcgaagggttcttagccgaatggttatgttagggtcgaaaatactcaagccaattgatccgaattttacggacatccctcgtcgcctattacaagatagtcgttttggaccattccagtttgctgtaggtgctgttgacggcacacacattccggtcactgttggtgtggatagtgccatagaacacatgaatcgccatgacgagacaacaaaaaatgtcctaacaattgttggattcgatggtagagttatatttgccgatgccggatggctaggatcagtgcatgataatcgagtcctaaacgaagctattgactcttatccagaggagtttccaagactaccttttcgaaaatatcttcttgttgactccggatatccgagtaggatgggcttcctggcaccgtacccacgtgtacgataccacaaggatcaattcaaggggccacgcgctccaccgccagaaggaagggaagagaagttcaactacatacatgccaagctgcgtaatataattgagaggcaatttggaattgtgaaaaaacagtggaaaatcttaaaaggcataccgtacaacccatacaagaatgtccagagcgacataatattggcagcgttttgtttgcacaacttccgaatcgacagcaagcaaaatgacttccaggccaataaccctctgtataatggtaatcctatagcaccaatagcaccccccttctccaatatgtattacgccggcaatagcgcacaagcgatgaaagcataccgtgatgccattgccaattcggtggagaacctgtag

SEQ ID NO: 11144 - DNA, 198 bp, Oryza sativa
  Clone ID: PAT_MRT4530_17397C.1
atgaggaacccgcggaccggcggcggcggcggcggcatgaggctcgggtgtcgctgcggcatccccgcacgcgttcctccttgctacggcctccactcgggcgatgatggcggagtcgcgtgcggcacggtcctgcgcgcgcggcagcctcgcgacggctgcggctgcatctgcgctgatggacagccttgtaactga

SEQ ID NO: 11145 - DNA, 2334 bp, Oryza sativa
  Clone ID: PAT_MRT4530_17398C.1
atgggcaccaggggaacaaagcggaagagaggggaggacatccatccgtcgactgcagccaaggggcaggctgtgcctttggcgttcgccgcaccggctcctcacggactgctcatcaatctggattcggggacggggtcgagcgcctctggcaaatctgacgccagctctgcccctccttgtgacaatgacatcaatgtggccgcccgcttcctaacagccgtttgtgcgacctccccaaaaggcgttcgctctttcgtccgtcgtgtgtcgccggcgacggttgttcggtccctcgatttggacctgatccggcccatctcgccacaaaagatggcggagggtaaaatccgatggagcgacgatgaaattggcatatttcttgaggcatgcttggaggagttgtccgcaatgaccataacatccacttgtccaaagccgcaaggctacaagaacctcctacagaagatgaaggagagaatcgggagaaacctcaccaaggatcaggtgaagtacacatggcgtcaatgtcgtaaaaggtggatgctttggacgtggctggaatcaaaggctaccggcattggccgtgacccgataactcaagccattgttgctgacgacgattggtgggaagacaaggaccaggtataggacggagctcgtgtcttcaaagattcccctctcaagcacatcaaccttcactgtgctattttttcggggtgcacagtggtagggaaccactctgctattgcaggcgcagcaccagcacctcctcagcagccaactccaaggcccaacatcaatatctcacagctgctagctcaacaacaaaacattgcgactccaggagtttcaagtgcaggaaaaggcaagaggctagcagatgaagctggcacttcgaggggatcggcttcaaagaagagtcgaagtgactcagccggtgatgccctgcaccggctagctgatttgcgagtggagtcgatggagagctgttcccggaaggtggaagaggacagggctagaagtgcagcagcttgcatccagttggtggtagctgatggacataacccatggagtgatttattctttatggcactggatgtatttgagcgtgcttattggcgtcaatggttcattgattactgccctacacccgagtcacggtcccattacatagtacagacatggcaaaagcaatttggcggaaaaggagctggtggccaaggaggtggacagcctggatacgaaggaggaactgggcagcagcgttatggtgtaggagcacccccgccaactggccagcagggttatggtggaggagtacccccgccaacttgttcaggaggtcatacagggtttggaggttggaatcacacaatgagcgacggttcatcgtggagttcggatggtactgaagggcaatacacgagcgatgaggatgacgctattattgcaatgatgcaagagattttagctgctcctccaagagctcctcgtcgtgtcccaacccaatttggaataacttggatgctagagacaatggcgaatcctgcacagtgccgtgcgattttccgtttaacggaatatcagatatacactctacatggaattttggaaaatgccccttacaacctgcatgggagtaatgattttgctgtaggtgctgttgacggcacacacattccggtcactgttggtgtggatagtgccatagaacacatgaatcgccatgacgagacaacaaaaaatgtcctaacaattgttggattcgatggtagagttatatttgccgatgccggatggccaggatcagtgcatgacaatcgagtcctaaacgaagctattgactcttatccagaggagtttccaagactaccttttcgaaaatatcttcttgttgactccggatatccgagtaggatgggcttcctggcaccgtacccacgtgtacggtaccacaaggatcaattcaaggggccacgcgctccaccgccagaaggaagggaagagaagttcaactacatacatgccaagctgcgtaatataattgagaggcaatttggaattgtgaaaaaacagtggaaaatcttaaaaggcataccgtacaacccatataagaatgtccagagcgacataatattggcagcgttttgtttgcacaacttccgaatcgacagcaagcaaaatgactaccaggccaataaccctctgtataatggtaatcctatagcaccaatggcaccccccttctccaatatgtattacgccggcaatagcacacaagcgatgaacgcatactgtgatgccattgccaattcggtggagaacctgtag

SEQ ID NO: 11146 - DNA, 1899 bp, Oryza sativa
  Clone ID: PAT_MRT4530_17399C.1
atggcggagggtaaaatccgatggagcgacgatgaaattggcatatttcttgaggcatgcttggaggagttgtccgcaatgaccataacatccacttgtccaaagccgcaaggctacaagaacctcatacagaagatgaaggagagaatcggaagaaacctcaccaaggatcaggtgaagtacatatggcgtcaatgtcgtaaaaggtggatgctttggacgtggctggaatcaaaggctaccggcattggccgtgacccgataactcaagccattgttgctgacgacgattggtgggaagacaaggaccagaaaaaggacggagctcgtgtcttcaaagattcccctctcaagcacatcgaccttcactgtgctattttttcggggcgcacagtggtagggaaccactctgctgttgcaggcgcagcaccagcacctcctcagcagccaactccaaggcccaacatcaatatctcacagctgctagctcaacaacaaaacattgcgactccaggagtttcaagtgcagaaaaaggcaagaggccagcagatgaagctggcacttcgagtggatcggcttcaaagaagagtcgaagtgactcagccggtgatgccctgcaccggctagctgatttgcgagtgcagtcgatggagagccgttcccggaaggtggaagaggacagggctagaagtgcagcagcttgcatccagttggtggtagctgatggacataacccagggagtgatttattctttatggcactggatgtatttgagcgtgcttattggcgtcaatggttcattgattactgccctacacccgagtcacggtcccattacatagtacagacatggcaaaagcaatttggcggaaaaggagctggtggccaaggaggtggacagcctggatacgaaggaggaactgggcagcagcgttatggtgtaggagcacccccgccaactggccagcagggttatggtggaggagtacccccgccaacttgttcaggaggtcatacagggtttggaggaaataattctgcaagggagtcgaacaatcgttgggtccggtcgaactcgacggtgtctatctattttcgaagggttcttagccgaatggttatgttagggtcgaaaatactcaagccaattgatctgaattttacggacatccctcgtcgcctactacaagatagtcgttttggaccattccagtttgctgtaggtgctattgacggcacacacattccggtcactgttggtgtggatagtgccatagaacacatgaatcgccatgacgagacaacaaaaaatgtcctaacaattgttggattcgatggtagagttatatttgccgatgccggatggccaggatcagtgcatgacaatcgagtcctaaacgaagctattgactcatatccagaggagtttccaagactaccttttcgaaaatatcttcttgttgactccggatatccgagtaggatgggcttcctggcaccgtacccacgtgtacggtaccacaaggatcaattcaaggggccacgcgctccaccgccagaaggaagggaagagaagttcaactacatacatgccaagctgcgtaatataattgagaggcaatttggaattgtgaaaaaacagtggaaaatcttaaaaggcataccgtacaacccatacaagaatgtccagagcaacataatattggcagcgttttgtttgcacaacttccgaatcgacagcaagcaaaatgacttccaggccaataaccctctgtataatggtaatcctatagcaccaatggcaccccccttctccaatatgtattacgccggcaatagcgcacaagcgatgaacgcataccgtgatgccattgccaattcggtggagaacctgtag

SEQ ID NO: 11147 - DNA, 1399 bp, Oryza sativa
  Clone ID: PAT_MRT4530_1739C.1
tttttttttttttttgcaacttcctatgatatatcgatttccacaaaatacaaagatcacactggttgagttttgactcaaaaggaacagatattcacaaaatccacagcatacgtattctaaacaagcctcgttacatttgtgaagtgtactagaaggaacatactgatcccaaattggacatcctaaaaaaataccaagatacgggatgcagaggtacgccgccggagccggacgcccgggcaccggagggaagcgacagtggccgtacgatcacgcggccgatggcgccgtgacgtacttgacggtgcgggcctccgccagcgcggcgcgcagcggcttcttggccgccgcctcgacctcgtcggcgtcgtcggcggccgcgatgggcgggaggcccttgaagtccaggctgccgtcgttgtagacgtcccaccacttcttgaccagcatcttgatgtcctccctgtccatgttcgcctccttgcccgtgtacctccacggcttcgatcccgctgcgcagtagtgcacgaccttgaccttctcgagctggacgttctctggatgcctccagagcatggccaggacaaggttgtagatcagtgggatcggcttgtactgctccctgaagaacatgttcaggaaatcctgctccgcgaagggagtgggcgtggtgacgcgcagagtgtcgagcagggacttggcggtggccatgctgggctcgtgcacgaacatgccggcgttgaagtagagcgccggcggcgggccgagctcggcggtcggccacgccaccttgtcggggcactgctggcagtagccgatctggtactgcggggtgtggctccacgtcttctcgcagaagcagtccatcaccgcgtagaagtgccccttgggcagctcgaacagctcgtcgatgttgtcgaacacctggatgtcggcgtcaaggtacaccatcctctcgtactccacgaactcccagatgcggagcttggagtagttgatgacgtagtaggccatggcgaactgcgtctggttctccggcgggtacaccggctcgatctcccggacgatgcagccctgggagatgaggatgcggcggtgggactccggcacgtcggggaggacggcgaccaccagcgggtaggccgagcccaccttgcgaaggcccttggccagcccgacaacgcccttccagtagtcaccgtcgcccgcgaggaacgtcacgtacgccctcgtcgcgggcttcaccgccgcggcggccttggcggtcatcttgccggcaagctggggaggagccatcgatctcgtcggagaaaatccgggagggttaagaagagcgagttcttgtgtgaggatttggaggacgcttaagctttggttgtgctttgcttagtagatg

SEQ ID NO: 11148 - DNA, 491 bp, Oryza sativa
  Clone ID: PAT_MRT4530_173C.1
ctgaaatccaagcctcaattccggacgatctggcaaacaccattactccatccgtgtcccttgagcaacatcaattcaagctggagaaggccaagcaacggatagccgatcggcgagagcggaaggacattgaaaccactatccaagccaatcgacagcttgtgcatgaagagaaggctaaattagatcaactctctgttggaccgattcagtcgaatatagatcggcttgaagctcgcaaaattgatttactagctcaactcgaagagtgcaacgccgagttggattttgaaaaacaaaagctagccaatcttccaagtgccgttgaagaacagtagtccagattgagatcagctatcaagaacgtggctgacatgactaagtctctcaaggtcatccctggaaccgacgcccaagacatccaagctatcgaggaagtagatcaaattagacaacgggccgtgtcggctatccaacgctatctgtctcaa

SEQ ID NO: 11149 - DNA, 2277 bp, Oryza sativa
  Clone ID: PAT_MRT4530_17400C.1
atggcggagggtaaaatccgatggagcgacgatgaaattggcatatttcttgaggcatgcttggaggagttgtccgcaatgaccataacatccacttgtccaaagccgcaaggctacaagaacctcatacagaagatgaaggagagaatcggaagaaacctcaccaaggatcaagtgaagtacatatggcgtcaatgtcgtaaaaggtggatgctttggacgtggctggaatcaaaggctaccggcattggccgtgacccgataactcaagccattgttgctgacgacgattggtgggaagacaaggaccagaaaaaggacggagctcgtgtcttcaaagattcccctctcaagcacatcgaccttcactgtgctattttttcggggcgcacagtggtagggaaccactctgctgttgcaggcgcagcaccagcacctcctcagcagccaactccaaggcccaacatcaatatctcacagctgctagctcaacaacaaaacattgcgactccaggagtttcaagtgcaggaaaaggcaagaggctagcagatgaagctggcacttcgaggggatcggcttcaaagaagagtcgaagtgactcagccggtgatgccctgcaccggctagctgatttgcgagtggagttgatggagagccgttcccggaaggtggaagaggacagggctagaagtgcagcagcttgcatccagttggtggtagctgatggacataacccagggagtgatttattctttatggcactggatgtatttgagcgtgcttattggcgtcaatggttcattgattactgccctacacccgagtcacggtcccattacatagtacagacatggcaaaagcaatttggcggaaaaggagctggtggccaaggaggtggacagcctggatacgaaggaggaactgggcagcagtgttatggtgtaggagcacccccgccaactggccagcagggttatggtggaggagtacccccgccaacttgttcaggaggtcatacagggtttggagcatctgctttactcatttctaatgcttgtagtctgaactggtacttgtggaatcacacaatgagcgacggttcatcgtggagttcgtatggtactgaagggcaatacacgagcgataaggatgacactattattgcaatgatgcaagagattttagctgctcctccaagagctcctcatcgtgtcccaacccaatttggaataacttggatgctagagacaatggcgaattctgcacagtgccgtgcgattttccgtttaacggaatatcagatatacactctacatgtaattttggaaaatgccccttacaacctgcatgggagtaatgatgtaagttctttggaggcactaggaatcttcttgttcacaatggcaggaaataattctgcaagggagtcgaacaatcgttgggtccggtcgaactcgacggtgtctatctattttcgaagggttcttagccgaatggttatgttagggtcgaaaatactcaagccaattgatccgaattttacggacatccctcgtcgcctactacaagatagtcgttttggaccattccagtttgctgtaggtgctgttgacggcacacacattccggtcactgttggtgtggatagtgccatagaacacatgaatcgccatgacgagacaacaaaaaatgtcctaacaattgttggattcgatggtagagttatatttgccgatgccggatggccaggatcagtgcatgacaatcgagtcctaaacgaagctattgactcttatccagaggagtttccaagactaccttttcgaaaatatcttcttgttgactccggatatccgagtaggatgggcttcctggcaccgtacccacgtgtacggtaccacaaggatcaattcaaggggccacacgctccaccgccagaaggaagggaagagaagttcaactacatacatgccaagctacgtaatataattgagaggcaatttggaattgtgaaaaaacagtggaaaatcttaaaaggcataccgtacaacccatacaagaatgtccagagcgacataatattggcagcgttttgtttgcacaacttccgaatcgacagcaagcaaaatgacttccaggccaataaccctctgtataatggtaatcctatagcaccaatggcaccccccttctccaatatgtattacgccggcaatagcgcacaagcgatgaacgcataccgtgatgccattgccaattcggtggagaacctgtag

SEQ ID NO: 11150 - DNA, 506 bp, Oryza sativa
  Clone ID: PAT_MRT4530_17401C.1
tcttctaggttgcccaaggaggaggaaggagaatccatgtgtcgtcgtggtgccacatatatagcaaagagtggagagagtattgacacgatagtagaaggcgaggaagccatcgatggccaagattgtcacctgaccgacaaggatgcgggtgaagatcaggtcgaagacgcaggaattttacaggaatttcaaatgcgacgatttaattattgtacggaccggaaccatgaaaattcatgggtttcaaacaaggttccatctacatcatcgtgcatgcatcgagccaagggctatatctacctacagctatatgtaatattgtactctatgttcaggaaacagatgcgtaatttggcaaagatgcattcccccgtctaaaaaaaaaccccctcaaatcaagtctttttttatggagggttgaattgttccatttatctttcatttttttcattaattttttcagatgtaatattgtactctatgttcaggtaacaagtttcgtg

SEQ ID NO: 11151 - DNA, 431 bp, Oryza sativa
  Clone ID: PAT_MRT4530_17402C.1
atgtcgagaatcagacttatcaatgaatgggccaagaatgtagaaaggacacgaccaattggtccaaaattcacaagtctacacatgggagcaaaagaggaggccaccagccaaagcccgggctggttgggccgaaccaggggattcggccgaacccttctcatcgccgttggatgcagggcttcttctggacggtggagattcactccctatggcggttggaaagatattagagtagtatttggtaatttaagcgtggtgtttagattactggatataattatttggggttatatgctgtggaagcgaggtgggccgctgatggtgacagctcagtacggtatttctgcgccattactgggaattatatttgtagtaatatcattaagaaatatcatcaaatagttaggggcactgaacagcacacccat

SEQ ID NO: 11152 - DNA, 837 bp, Oryza sativa
  Clone ID: PAT_MRT4530_17403C.1
atgacgtcaccaccgacggcggcttggacggctcggacggcgcacgctcgccggcgaacggcggtgtttcagcacgaacggagggcaccaggacgtagagcgcgacgcggcgaactcaccgatgaccaaaacgacggcggaagatgaacggacggcggcggtgtcgaggaaaaggcggcggagaccttcggcttgacgacgacggcgatgctccggcggtctacagcggcggcgaagcggtggacgaggacggcgacgacttggcgacctcaacggtggccttcccgagcgacgacgacgaccggaacggcggcggcgcatggctggagcgacggcggcgacggcggctcgaggctacacgacgctagggcgctacggacgacgagaggcgaaggcgaaggtggcgacgggtagaggagacaccgggggtccttttaaaggggctaggaggcggcgacgaaggcccacggcgaccggcgacggcgaaggaaacctcgggaaaaacgaatccgaagcaaactcgaatccatcgatttccaaaccgatttagccgatgtttccaaaggagaaaaggtagaggagatccaaagattgtttcccctctatcaattcggccggaaaaggaaaggatcgatcgaatttggaagggaacggcggcgcggctcggctagggtttcgggcggcggccgacgcgaggaagacgacgacctgacaggcgggccacacctgtcagcgagcgagggcgcgcgcggctgtggcggactgggctgacttgggccggggagagagagagagggttttgggccgactttcggcccaaagccaaaagaggacttt

SEQ ID NO: 11153 - DNA, 159 bp, Oryza sativa
  Clone ID: PAT_MRT4530_17404C.1
atgacctccaccagcaacgaccctagctgccacgacctccgccgccccacctcctactctacaccctccgatggcaatgtcctcgcgtgcggacgggggcttcttgggtgtgattcacggtggacaacagatggcatgagtgacggcggtggtttctag

SEQ ID NO: 11154 - DNA, 850 bp, Oryza sativa
  Clone ID: PAT_MRT4530_17405C.1
atcgggtcgtcgccgccgctcccgcctcgtcatcgttgtcgtcgccgctgctcccgccgcgtcggcggcggcggcgtcacctcccgctggcctcccgcgccggatccgtggcggggggagggcggccggccgccggatccgggcggggacggccactgccgccggatccgtgcgtagacggccgcgggccgcccgtcgtcgccgcctgccggatccgctgcccgcgcgctcccgtcaccagggaggggagaggagagggaggaggggaggagccacctactactttaaaaatcgggtcgtcgccgccgctcccgcctcgtcgtcgttgtcgtcgccactactcccgcctcgtcatcgttggcggcggcggcggcgccacctcccggtggcctcccacgccggatccgtggcggggggagggcggccggtcgccggatccgggcgaggacggccactgccgccggatccgtgcgcagacggccgcgggccgcctgttgtcgccgcctgccggatccgccgcccgcgcgctctagtcaccagggaggggagaggagagggaggaggggaggagccgcggccggatccgtggcagggggagggcggccggccgccggatccttgcggggacggccgtcgccgccagatccgtgcggggacggccgacgcccaccggatctcgtgcctccaccgccgcgccgccaccgccgccgccattgatgccgccgcttccgcctcccttaccgacggcgccggcatcgccgaggagggagagggagatgggaggatggggaggaggagagggagagggagagggaggatgaatggagaggtggtggggagggtgcgcccg

SEQ ID NO: 11155 - DNA, 537 bp, Oryza sativa
  Clone ID: PAT_MRT4530_17406C.1
atgccggcgccgtcggtaagggaggcggaagcggcggcatcaatggcggcggcggtggcggcgcggcggtggaggcacgagatccggcggcgacaacaggcggcccgcggccgtctgcgcacggatccggcggcagtggccgtcctcgcccggatccggcgaccggccgccctccccccgccacggatccggcgtgggaggccaccgggaggtggcgccgccgccgccgccaacgatgacgaggcgggagtagtggcgacgacaacgacgacgaggcgggagcggcggcgacgacccgatctagggcgatttgtttcagacgggcagaaactccgcacgcaaaatcctattgaccgtctgggcggcgacgacgggcggcccgcggccgtctacgcacggatccggcggcagtggccgtccccgcccggatccggcggccggccgccctccccccgccacggatccggcgcgggaggccagcgggaggtgacgccgccgccgccgacgcggcgggagcagcggcgacgacaacgatga

SEQ ID NO: 11156 - DNA, 108 bp, Oryza sativa
  Clone ID: PAT_MRT4530_17407C.1
ggtggtttgttttctcctcccaatccaggttaggttcgggtgggttaagattacggtacgaactcaggtatcatacacataggagacttggcgtggaatatttgtgat

SEQ ID NO: 11157 - DNA, 533 bp, Oryza sativa
  Clone ID: PAT_MRT4530_17408C.1
ttttgcggtctcgccctcctcgcgatcgactcccctcgccccgactcaccgccggtctcctcccctccgccacagattcctccctccctcctctttgcaattccaccatcctctttccagaggggctctcacccttgctccctcccctaaccctaatctcgcccgcgcccccaccagcttctaccgctgaccgtcgcgccgtgccgccccgcctcgccctcttcaaccgccgaccgtcccgtcgccctgcatcttgcccgcgccgccgccgtcgtgttatcccgccaccgcagaattagcatggatcaggcaaaagggttgacgtgctccagtgtaagaattgcttgagactcggttgtcaagagcgctgctttgacgactttctactcggcctttcgctttactgccaccgccgacactgccgcgttgtccgacaatatttggctcatggtagcacatgggtatggtaaatctatcccaacgaaaaatggtgttcattgatcatacctctcctctcctctttatagctttgg

SEQ ID NO: 11158 - DNA, 1431 bp, Oryza sativa
  Clone ID: PAT_MRT4530_17409C.1
tgggtaaccgggccccccctcgagttttttttttttttttttttttttttttttttttttttttttttttttttttctctgaagacggaccagattaccagatttcatatcagcaaacaaagtttttccgtgatacatttcttttttctttttttttttttttttttttttttttttttttttttatcacaaggttcacttggggcattgatagtaccataatacttctagcatccagatatagtaactatgcttaaagttgaacatgaaaggggggaaaagatcagcagatttgagccagcattgctcaactccacaaaagattgcacgccacaaccatctgccaccacataacaactatcagccatgctagaaggctagaactgcccatgcaagtatatattatcaactagacacacacacaaggactcataaccatcctccaaaataaaagtcgagcaatagtgattaacacggctgctgattcattgcaggtaccttctactaatctagtgcttcttatctttcaaaggacccttgggaatcttcgataggcatttctcttcaaagagggcatagtacttcttaaattcaatctcagccttctcaccaaaagcatcaaccttgtcctcatacttctcatacagtactggcacagtgtagagcgccacaaaaactatgtagaacaaagtcaaaaagttacagctgctaccaagaactgacagaatccagagtccagcgatcacaatgaggaacttcttcagatcacggccatgaccaatctccctcaaggttgcaaaacctctattgatctcatatctcagagaaagggcaatgtttactgtcaagtcctctggaattttcacctcaggaatgtttggaggggacttgtggatgaaagtggaggcattggaccagaggaagaggacagccagggagagaatgaggcagtggcacaccaaggtgaggaggtggtactccatgatctcgaagagtagccagatggccgtggctccggcgagcaccccaccggagatcttcttgttcctccatagcacgagatcagcaggcttgccgccgccgaggacggagtggacgggcctctcgcggccgaagaggcggtagatcttggccttcatggccgccgccgccgacgacgaggaggaacccttcttgtcgtcgtccgagtccgaggaagacgacgaggagtcgccgtgcagcttctcggagagcttctccatcaccgactgctcctccttgtgctcagccatgctgctcctcctcctcccccctcttcttcttcttcttcttcttcttctcccctcactcttcgcttccaagaaatcacccaagctttttctccgtggcttcaaacagagagagtttgctccgacgaaagtatccccggccggcctcgaggatcccaatcgc

SEQ ID NO: 11159 - DNA, 348 bp, Oryza sativa
  Clone ID: PAT_MRT4530_1740C.1
ctcgaccttctcacgagatggactacggcgacggggaggtgccgctggcgaggaggacaggggaagaagacgctagctccgactgcggctccgtctccggcggcggagaggggctagagggacatgttggacgagctccggcgggactaccgctatgtgctcaaggattatgagatgaatacgaggaagctcgagagcataaacaagcgagaggctcgcctgcttcctgaaataaagttcttacaaaaaaagttaaattctttcgagaaaaatgattcgcaccaagcactgctgaagaagaaagctccgcgagtgccatcatatgtgggaatcaatgatgcttcatct

SEQ ID NO: 11160 - DNA, 1608 bp, Oryza sativa
  Clone ID: PAT_MRT4530_17410C.1
atggccggaggaggatttgccgccgccggcggtggcagtgctcgcgactacggcggcggcatcactttctccgtcgtggtgaccagcctcatggccgcctcctgcggcctcattttcggctacgattctggcgtcacaggaaggcatctatatatcccgcctgaaagttacgggctccatcggttgcctacgggtggcgtgacgcagatggagtcattcctgagcaagttcttccccgaagtgctccgtgggatgaagagcgcgaggcgcgacgcctactgcaagtacgacaaccaatggctcaccgccttctcgtcgtcgctcttcatcgccggcacgctgtcctccctggtggcgagccgcgtcgccagggcggtgggccgccaggccatcatgctcctcggcggcgccatgttcctcaccggctccatcatcaacgccgccgccgtcaacatcgccatgctcatcatcggccgcatgctgctcggcttcggcctcggcttcaccctccagtcagctccggtgtatctgtctgagacggcgccggcgaggtggcgcggcgcgttcacgtcggcgtacaacgccttcgtcgtgatcgggatactgtcggcgaccatcaccaactacttcaccaaccgcatcccggggtgggggtggcgcgtctcgctcggcctcgcggccgtcccgggcaccatcatcgtcgcggggtcgctcttcatcccggacacgcccagcagcctcgtcctgcgcggccaccacgaccgcgcccgcgcggcgctgcagcgcatccgcggcgccggcgccgacgttgacgccgagctcaaggacatcgtccgcgccgtggacgaggcgcgccagaacgaggccggcgcgttccggcggctgttcagcaggcggtacaggcactgcctggcggtggggctcggcataccggtgttctacgagttcaccggcatgatcgtcatctccatcttctcgcccgtgctgttccgcacggtggggttcaacagccagaaggccatcctcggctccgtgatcaacagcatgaccaacctcgcctccacgctgctgtccacctccgtcatggaccgcaccggccgccggccgctgttcatcgtcggcggcgtcggcatgatgctctgcgaggtggccatctcgtggatcatggcggaccatctcgggaagcaccagggggtgacgatgccgcggagctacgcgaccggggtgctggtcctgatctgcctctgcacgttcagcttcggcttgtcgtgggcgccgctgaggtgggtggtgccgagcgagatctacccggttgaggtcaggtcggcgggccaggcgctgagcatctccgtcgcgctctgcctctccttcgtcgagctgcaggtgttcatcgcgctgctctgcgccatgaagtacggcgtgttcctcttctacgccggctggctcctgaccatgacgatcttcgtcgccgccttcctgccggagacgaaaggcatgccgatcgaggccatgcggtccgtgtgggagcggcactggtactggaaaaggttcgtcaacgacggcgaccaccacgacggccgtgtcgtcgccgacgagggtaccgattaa

SEQ ID NO: 11161 - DNA, 922 bp, Oryza sativa
  Clone ID: PAT_MRT4530_17411C.1
gcacgaggctctctctctctctctctctctctctctctctctctctctctctctctctctagccgaattcatctcgaggcgctttcgcctacttacatgctgacataagaagacgctcacacacaaatacagactgagatacggatagaggtggatctggagctagatgtacctgtgcctgaaactgaacatgcgcaaagaagagccctgccctggaagagacgagcagcagcaccaaaggcgccatcaggctgagggtgccgccgaagaagaaggggccgcagatggaggcggccgcagatcccgctgagactgcccacggctgcacatgcaggagcacggccaggtgcaacccttgtaactgtgaatatgcgtacctgcatgtacgagagttcaggtgtgcgtgcgaatagggatgcacaaacacaaacatgcgtgggcacgcgagctcgagacccgaccgagagatgagtgtgagagagtgagcgactggcacatcggtcgcgtctcctcccctcgtacataataattattgttacatgctactacacaccacagagtttagaatactagagcccagtctctgtctcacatacaaggtactggaaccaatactctctgatagtgtgaaataagtcaatctccactactctcttcccaactacatcactggtagccactaatctatcatgcgcatttcaaataccattaattaagtcgtcgcgtctttcgagttttcctaatgcgttggctcgcgccccgtcgcttttcgatccaccggacacggcctgccacaaaatctcggccgccggggagcagccggtttgtccccaactcgccacaacataacagtaaatgagcactgcagctacatttataattaggcctagaatcagccacatgcttcgattttgcattcgct

SEQ ID NO: 11162 - DNA, 3132 bp, Oryza sativa
  Clone ID: PAT_MRT4530_17412C.1
caggaactatttcaaatcccagaaaactcgtgcaaaatccttccattccaggattttggagtaaatcctactataaaaatttcttcgctgaatcgacaatcatatggcattataaagatacaaaaattaaaataatagtactaccactaaagtaaataatagtaatcgccagacgttgtcattcagcagtatgatgggcctcgatgtgtgctagcagaagcagctctggttcgatctcagcattccaagccaactcacttaccagcgcacataacgcttaaattacatcagtgtatcatcatcatcagaaactgtttcagacaccccaaacaaaaactccacatacccaaaacaaaaaagaacaagacgagaagctagaatctacggcagtttccatcatcaccaagaagccaagcaggcaagcatttgtcacatgttccatgagtagccaccacctgcctggtcacccaggaacagcccactctcctccagttcagtactgatcagattcccaagattgtcaagatcatccaactcatgcagagcatcagccttgggggtagccgcatggccgccgctgccaatgccgccgcccgcagcagctgcaacttgggggttgctgctcactgacttgaagctgttacttctgctggggaggatgctggctgtattgttgatcacactgctaggacctgttgtaaccattggagtcccacccttcaccgcgccgttgttattcatatgatccccgctagcggcgctgccggtgatagccgttcctcctgatgcaagaccactgttagcaggagcatgttgaagttgttgttgctgctgctgctgcgccaagacacggttgttagtgttcttggcctcttgcagcaactgatggagcacatgctgctgatattgtgggctcacacccaagccctggaggctgctctgctgaggcataggctgctgaaatgaggccggatgttggaactgcgcgagatgcacctggtttggtccacggaaggatctagatgcttccagctgaatgccattgtgcattgctgtgggacctttaaacatgcttgatgcctcctgctgaagcaaactctggtttgcgactgaacttctaaggatattctggtaattgttaagtgcagcagcattctgcagaccatttccaatgggattctggtaattgttaagtgcagcagcattctgcggaccatttccaattggtccaataccgtgcgtctcattcgcatgggtgttcatttctgttttgacacccatggctttgaggttagtctggtcattaggaaggccagcagctgccattagttgctttggctcgtgcatgttttgtactggaagttttgctgcagtttgcttgggatagctcttcagaccctctataggaccaagcttgttcttgtggctgaattcaatcaggtctttcatgtgattcaccacctctgatatctgcaagcagcgaacatatcttttagatagaccatgctcatttaaggtgtggtggtctatatttttcgctagctgtcgtgacgccgtcacaaacatgttgcaaatgttctgtgcatcactgtttgagaccccagctggaccactttcagtggcaacagtttgatatttctgggcaacttgcagcagatgagcaacctggggtgaaagaaacctgcgagtgatatactcatcatgtcgccgtgaacagaactcccaggacattatcttcagttctggtgtgaatatgattctcaactgcccctcgtgtatcacatgcatatgttcataaatgcttttctgaacaactttagtatgttccagcagcattagtccattgggcaaccggaattcattggccatgtcaaggaataagtattcatctataacaccatggtcaaatctaatttgacagagtctaggaagtatttcataggtagcctcatatcctttgcccccatgtgtattacaaatgtcacagcgccatgaatccggagctgtgtgtggaacagcacctgaaggatttcctcttttctcatacgaggatacacaccatctttctcttgctcgtggtgcaaaatattcatcaataagcttcctccagtatgttattggattattctctggtcggtgacgcttatggtataagtattgctttaaccttcgagaacaaagcccattctcgacaggagtcctaacaggtccagctagctgcattccaggctgcgctagtggaggcctcaactgtggctgccgaggtatgccaacttgagattgttggatctgtgaaaatggttgcaacatctgatgctgctgttgctgctgaatctgtgccagtttatgctgatggatcaaggcttgaatctgagggttctgttgaccctgcagatgaagagaactctggccttggagcagttgctggattaaattgtgttgcaggatatcatcttgcctaatatcaacccttgacttcttctgagcatgcaatgcaccagcagcatcaataacaggttgtgatgttacactagaagaccttcgcttctgcatctgctcttggggaggactttgttgcacaatgggaccatcaataactgaagatccagagatgttattggatgaaaacgacattggggaagcaggaaggcgcatgaatgaatcagcattcatgctcgtacttggctgcaactgggcacctccggagagcgatgagttagcatccgtcaccaaagagctaacaccaatgcttggcccagaggaatttgtagtgctaatagggatactaccatgcatatccctgggaacaagtccaaggttggagcatggcgccccagacatggaggttaccagggttcgatcccaatcatcactttgaagaaccttgagttcgtcggctcaatcgctggccctcccaaaccccaacttctcctcctctaccttgcagctgcgatttttttttcttttttgctgcgaattttttttttctctcctcttccgcttcttctcctcctcttcctgcgcctgtaggcggcgtcctcgccgacgagcaaaccggttaaatagattcgcggcgcccgggacggtggcgaccggctgcagccggtgggccgggcccacattgaccgccat

SEQ ID NO: 11163 - DNA, 395 bp, Oryza sativa
  Clone ID: PAT_MRT4530_17413C.1
taaaaagttaggaaaatctgaagggaaaccaacacagctgcccagaacatggagaaaagcctttggggcaccataataacatgaacataggtgattaaatttaattcagtagttgatggttccccagggccaaacctgccctttcagtactataaaatatataacttcatgttggcttaaacatccgctgccaggctgtaggaaacacagttctacctctaaccatctttcacatgagaggtaatttattaaagaccttgcccttccctttggtgtacagttcaggttacctgcttctcttctatcatcatagtatagtttctcccagaaatggtgattttgtcagggaaatttccaagggcaggagatgaggccaactgcttcatcattttttc

SEQ ID NO: 11164 - DNA, 387 bp, Oryza sativa
  Clone ID: PAT_MRT4530_17414C.1
atggcgaggcatcgttgtcggcagtcacacggcggcgtcgacatcggagcaaggtggcgcgcgatagggaggaggtgcttgacctcgccggcggccacatggcggcgcgtggttgggaggaggcaatggacctcatcggcagccacacgacggtggcggggcaaggtgggtagacaacgcgggattgaggaggaggtgctggaccttgctggcggccacacgacggcggggtgtagacaacgcaagattggggaggaggcactggaccttgctggcggctacacagcagcggcggcgacgtggcagaggtgctagaggcgatggacctcattagcagccacacgacagggtagacaacgcgggatttaggaggaggttcttgacctt

SEQ ID NO: 11165 - DNA, 929 bp, Oryza sativa
  unsure (1)..(929): unsure at all n locations
  Clone ID: PAT_MRT4530_17415C.1
ggctcttgcatttcttgatttctcctcgatcacctagtagttgatcgagcaatggcggccaaggtgcaccccaacctggccgtgccgtcgctgatccagccgccgatggcgccaccggcggcgatggcggcgggggacagcgtgatgaagacgaaggcggcggcggcgggcggggatgtggtgctgacggtgtggaggaagtcgctactgttcaactgcagggggttcacggtgttcgacgcgagcggcgacctggtgtaccgggtggacagctacgcggcggactcgcgcgcggaggtggtgctcatggacgccgcgggcgtgcccgtgctcaccgtccgccgcaagaaggcgatcggcagccagctcgggcttgggggcgaccagtggctggtccaccccggggaggagacccgcctcccgccgctctacgccgtgaagcggacgccgcagtacgtccgcggcggcggcagcgtcaagaccatggcgcacgtcgcgccctgcggcgtcgccctcggcgccggcggcggcggtggctacgagatcgaaggctcgtacctgcggcggagctgcgcggtgtacgacgcgcggcggcgcgcggtggtggcggaggtgcaggcgaaggaggcggtggggacggacgtgttccggctggtggtgcggccggggatggaggtgtcggtggccatggccgtcgtgctggcgctggagcagatgttcggcaagccctccctgctcaggagctggtcctcctaataattagcctgtttctttctttctctttttttttcttttttttttggccttgaatttccaacattgtttgggcctgagagcagaagagttgctcttggctgcctctttctctctgatcctgaaatgaaacctcaaattgggngtcaaaaaaaaaaaaaaaaaaaaaaaaaaaa

SEQ ID NO: 11166 - DNA, 2070 bp, Oryza sativa
  Clone ID: PAT_MRT4530_17416C.1
tcaggtagtgtgattcagagatttccacacaccaaccaacaaaagcagagagccggccatcacaaagagagccggccactgccacccccaccctagtcgcacaacagagctagtccatttctgaatatgaggtgcatgctgctgttctcgtgtctccaacgaaggtacattattctcattgctatttctagactccactctcaacagcctctgctttagattagttccacggggctgattagcatgtaccaacatctcttcatgaaaggagaagccttggagcttgtccataacttccactgaatgatccacttgaataggggtatcctctttgcactgaatatgcattggttctccatcaataaactgtagtagtaccataatctgggaggctgcatcgtcattttcctcgctgtggttattagatgaacttccagtgttacaacatgatccagcttcatcttcactcctgacactttccttcttgttattagatgaattgcgagtgttacagcatgatccagcttcatattcactctgcaaatgtgaggatacaggttgagagactgatgccctctcaacagagcatacaaggcggatccttcttgcagcagttccttgttgtggatcaacgagatcttgagctgtcaagtgcttcattgaaggtgcctgttcctgaccttgttctttcaaggcatctgaaaatgtcatgccactcctgcccggttctacgatagtatcgaaccaatgctggggataaggggtccacaatccagcccaacagaaggctccactcttttgtgactccatgtgaggattgaatgcggagtgtagttgatcttggttgcacaagggggagccctcggctactccactgtagaccatgctgctactctgggctcttgcttcaagattagcatcacttgtttctgtttgtggtgcattgattgaagaagaacagcaagtagcatctgtgttgtctgcacgctgaattagaagcatctgatatgaatcattcttcctccaactatccatgagtaatgtgttattgtttggattgttggacgacgcggtaggattagactctacgtttccagtggggtgcttatccattttggtgtaatttggactaaacaacaaactttgcaggtcctgctcagacaaggtactgccaaaatgcgctgaaagatcttgctcacccagattgccgacaaaagggtgatcgctgtaagggcgaattggagaggtgatattagggaatccattgtatctttgctcaggctctaggtctggaagttgagataacacgtccagaaaagcatcgtcatgggctacagtttgctctttgtcatggacagatgtactagcatcttgtatttcagtcagttggctgaaaccagatgatggtaaggtctgatgatccttcattattgaggcgagggccggttggacagcaggtgtgccattttggggattgccttgagaagacgtggacaattgttggtccaaattggaggccggggtatgggtatcatcttgttcgtgcttgttaaacaggcgatacagaacgaagctaccgtttttgcctgattggaagtgaggctcagtggtgcggtactcgtgcatgatccaggcggtgcggaggccccgcggagctctgccgcggtggaagacgagggtcttcttgatgccgatgagggggccggcggggcgggagcggatgaggcggtccttgccggtggccttccagtagccggcggcggtggagcggttggagcggtggccgccgggatacttgcggtcgcggggggcgaagaagaaccactcggggtcgtcggacttgataacggacatggccgggagatcccagggctcgcaggtggagaggtccacgtccgggatgaggaggaggtcagggtggctccgcccagcgatctttcccttcagatagtgcctcaccagctcctcgtccgtcggccggaaacggaaccccaccggcagaaccgccgcggcggcgaccgccggcgtcatctccactttcccttgtttcatcgccacttttcccttctc

SEQ ID NO: 11167 - DNA, 370 bp, Oryza sativa
  Clone ID: PAT_MRT4530_17417C.1
cccacgcgtccgatattttttgatgactatttaggtgacatgcatgaaacgaggggatatcccctcgagggatgaatttactttcccgttatatatgtccatgactctacttttcatgatatatgctgtggtgtttggcatcccacatggaagctatccaattattgtccaaagagatgcttgtatatcctgtaggatatagactaataatagggaggtgagagaactattttgggtcttgggatccagcatacatctgaattgttcctgtcaaaatctgccagtaatttttttttgaaacagacacgatgcaatgtttcatatttgtatagccagaaaaatctgacagtaatagttgcactcttgcctg

SEQ ID NO: 11168 - DNA, 1552 bp, Oryza sativa
  Clone ID: PAT_MRT4530_17418C.1
atgacgtgtggggccccgggagcggtggggcccacccataacggagggggagggggaggggacgcgggggacggcggcgaggcggcggtgggatctgcccgagaaggcggccgacagcactccaagcggcaaaggggttgtagaaatgtccacggatgatgaatcagattgtgtggttatatgtcccccaaatgggaaagctggtcatacagaagttatgagtggcaggcatgatgaagattcttcaagagggcaagaaaccccttctactatagactcacatatgaatgggaatgtccaggatggagtgcctgcagatcaagatgtgctgaagctggttgatcagcagaagtcttctcttacccagttcaccaataaaccatggtatagctgaacaaggaagagtcaaaccacactgttcctcagccatttgctcctgcaactgaaagggaggattctggagaaggagattgtactccagtgcctcatcccaccagaaacggtgaaaaactctctgataaaagtagcacctcgctggcaagtatggcgaagaagagtccatcagtgacacccaggaggcctctgccagctgacagtacttcccatagtcacgaagatgacttcattcatccagaactgtaacttcagcaaggactggaaaaattaagaagacaacagttcctgtcgcacctacttttatatgtggtaatcgtcttgagaagaggggagagttttacacaaaattggaagaaaaacgcaaggccttggaagaggagaaactagaagctgaggcaagaaaaaaggaagagcaagaagaagctctgaaacaactaaggaagaatctggttattagagcaaaacccatgccaagcttctatcaagagggtcccccacctaaggttgaacttaagaaggtgcctccaactcgtgccaaatcaccaaaattgacacggagaaagagctgcagcgatacccctcatacaccagagggtaaaaatggaagtgcagcatgttgccggttacatcgtcacagtattgggaactccaaagaagttaacagcaggacccaatgttctccgaagagtgctccaaagactggagtagccgcaaaacccagagcgaccaagggcgtcatgaagaatgtgggaaagccagaaccttggtacagagaccatgtggtattccgtgttgtaaatttgtcgaggttttgtaagggggtaaccgagtcgatgctatcttatggtattgtatttaagcatcaacttgttattgttgatattcttgcaaaatctacgaagattttctgcctggttgaattcgggatcgccaaaattccttgtaaaagtacttggtacagctgaccatgtggtattccgtgttgtaaatttgtcgaggttttgtaagggggtaaccgagtcagtgctgtaagaactaatctggcagccgataggctgttggtgtgacattgttgttgatgtatggcggcgttcgcagatcctatggtattgtatttaagcatcaacttgttattgttgaaaaaaaaaaaaaaaaa

SEQ ID NO: 11169 - DNA, 158 bp, Oryza sativa
  Clone ID: PAT_MRT4530_17419C.1
ttccactgaaccgccgacaccacccgccgacacccccttgcattgtgtagcggcggcgcctccgacatctatactgcgccgacatcccccatcctcgagctggacacggtggcacgccttcacctttcttgggtagcgttttctcctcatacttcccc

SEQ ID NO: 11170 - DNA, 525 bp, Oryza sativa
  Clone ID: PAT_MRT4530_1741C.1
gctgcaggaattcggcacgagcgccagagccgctctgcctccctgctcgcgccgcgacggagaggaaggatagctggggtctgctcacaccgccaccaacggagaggaagtattttggtgtgtggtttaaggattgttgatataacgatttcattttgcctaatagtgtttgatgaaattttgttcacgttttattaattatttttcactaatgtgtctgcaaatacttgagtcaggataagagggaggatgccatattcagcctgggtgctctctgaagatgcataaccgtgtgatgtctataaatttcttctagtgcctgttgttgcagggtttatttctctatctgtttagttctgcttattcatcaatataatcaaagcttctgcttattactatagttttgtcatgactgaattctttactaatcatgaggcgctacactttatactacctaaattgattggaagaatatgccttcaatggaataagtgggactatacttaatcatccagttgtattact

SEQ ID NO: 11171 - DNA, 405 bp, Oryza sativa
  Clone ID: PAT_MRT4530_17420C.1
atggcgtccgatgaggccatgtacaacgctccaccgtggacggtggtctcaggcctccagctaggcgggtgggcagatgtgcccgcgcagtggggagggggaggggggcttaccacataccagcagccgacaagctcctttgcgccgccggaaagagatcacatcctcgaagctcatcgtcgtgcgctgctgccactaccaaggtcgtcgccgattgccgccaatgcctccgaggagtctggcgagtcgccagcgtccggatccagcgagctcatcgctagccgaggtcacggccggacccggcgagctcgctatctggtcgccatcgcgctccccaaccgtcgcaaggagagggaagagatctccaactcgccagcggagaggggagagagctcgagctcgtag

SEQ ID NO: 11172 - DNA, 285 bp, Oryza sativa
  Clone ID: PAT_MRT4530_17421C.1
cggaagggaccgactgcggcggtgaagaccgacgccgacgaagacgttcgtggcatgccggcgacgcaccaccaccaacacaataagtcgttgccgtcggtgttgctgtcgctcgacttccggcgatcacatgctgggcaacgggtgctggaggagcagcgaaagggaccgacagcggcggtgaagaccgacgccgacgaagacgttcgtggcatgccggcggcgcaccaccaccaacacaataagtcgttgccgtcggtgttgcagcctgctggaccgcgttaa

SEQ ID NO: 11173 - DNA, 887 bp, Oryza sativa
  unsure (1)..(887): unsure at all n locations
  Clone ID: PAT_MRT4530_17422C.1
aancacagacttcgtggaagccctgtctccaattccgttctctcacagttacacaacagtcccactaaacaaacacaatcaatcccaaacttcagccaaaatcacacccaatgggctagccctcggcnctnacacaaccccgaaaggccnaacatgccccctccacngggcccgaatggccaaaattcgancatctggggctacaacccggccaaaaacgacccaatannccgagtacccctccccccacacacaaccacgggtncccctccccccgaacncacacgacgattaaaccactctcttgaaacaatcctcccacataacacaacccacagaaaaccaaaaggggtctcacatcctcccaccccgcaaagagaaagggctctcctctccccccgcacacacaacgggggccagagggcgctcgcgctacacccccncaacaacacactgtccaccgtagacccaaccagcngaatttaacgttatacccgcntgtcgagccccccgggaagatctccgtttctcccacccccccaccacccgntaatcggaagcccccggttcctccgaggggagaanagagggggttggtgggaggggtgttncttcttccctcttttaagaagctcctcctccgaactcccaancaaaagatcctanacaacgggtcccaaccccccgtgccacaaagcgctctgtgcggcctctcccccccctctnaaagancaccctcctccccactcccngagatgatgttgtttctcccttnacatccttcaaattcntcccttaataccaccttcnaaccctaaaggaaacatattcccggcgttgtgggcgaaacaccaaaaacaacactttccccgccaaaggggggtgtg

SEQ ID NO: 11174 - DNA, 533 bp, Oryza sativa
  Clone ID: PAT_MRT4530_17423C.1
atatcaagatttataagacattaagttttgaactgtaccgcaagaacgatgcatgacgtatagctggtaaccttacataccaatgatgctattacaaatcattgccagtcaccaaccaaggaggcaatgctcctgggtaaattgttaatgaaacgaaggcctccacatatgaatggtaaggtaaaggacacctgccccccagaatcgtggttgagtcccaacaaaccagacaacaccgacctgctgcggccgtagttcatgaacacgcgcctgatccctagtaacggcctggtagtgaacccggggcgctaccagctccgagctgatgccgacactgcggttgccctactcggttgccaagccacggaagagtaccttcaatgcagaaggccggtgctgctatggtattgtggtgagttactaactcaatggttggactagtgcccttggttgctgtaacaggagatgcgattgcagcagatcttggctataactttgactcagagcatcaaaccgggcagaagctttgcgga

SEQ ID NO: 11175 - DNA, 1482 bp, Oryza sativa
  Clone ID: PAT_MRT4530_17424C.1
gcacgagccacctgcgcaggaaggcaggggacccacgcacgcgtccggagagaaccccaccttggcaaaaagaaaagaaaaataatatcatcgcactttttgctgcccttttcatcccctcggatattcacgaagcaaatctctctgcaattcttttctttttttttttttgatcttgcggatcttctccattgaggaaaggcgagagctttgggatcgattccgggccatggcgaaggaggtggatccgtgcgaccacggcgaggtcgtcgacgccgggtgcgtccgcgccgtgctggccgagctcgtcctcaccttcgtcttcgtcttcaccggcgtcgccgccaccatggccgcaggggtgccggaggtggcgggggcggcgatgccgatggcggcgctggcgggggtggcgatcgcgacggcgctggcggcgggggtgctggtgacggcggggttccacgtgtccggcgggcacctgaacccggcggtgacggtggcgctgctggcgcgggggcacatcacggcgttcaggtcggcgctctacgtcgccgcccagctgctggcttcctccctcgcctgcatcctcctccgctacctcaccggcggcatggcgaccccggtgcacactctgggctcagggatagggcccatgcagggcctggtcatggagatcatcctaaccttctccctcctcttcgtcgtctacgcgaccatccttgacccgcggagctcggtcccgggcttcggcccgctgctcacgggcctcatcgtcggtgccaacaccatcgctggtggcaacttctccggcgcgtcaatgaacccggcccggtcatttgggccggcgctggccactggagtgtggacccaccactggatctactggctcgggccgctgattggcgggcctctcgctgggctggtctatgagtcattgttcttggtcaagaggacccatgagcctctgctagataattccttttagtagtctggtctctttagatggtttcatttgcagaatgcatatattgccaggtagtaataagatgcttgtgcagcttgtaggcctgtaagggctgtataattattattttctttttgccctcgaggattttatcaacgttgataatcagccatgtaaaaagattgtttgggatatgatttttttgttagtataaaatgtagtccggtagttggtctgttgtaaatcggcgaatgccatgtggttttgaaattagaatctatgtaaacattttcaaatgaattcagtaaaattcatttcaaatgggtatcaaaaaaaaaaaaaaaaaagcacccaacccgctaccgtcgataaatctttctttctatctttgcctgtcaaaattaggatccgtgaacagaggaggaaatttttcttatttgggggtggaaacatgcctacctgtcgaattgtccggggccatcaacctctaaatttgttatctgtagctttttttggga

SEQ ID NO: 11176 - DNA, 1925 bp, Oryza sativa
  Clone ID: PAT_MRT4530_17425C.1
ggccccccccctctcgttcccctcctcccccccccgtctccactgtcgccctccacccccctgcctccccgcgtcggcgaccaccaccaccatggccgccgcctctcctcctccgctcgcgctcctcaccctcaccctctccctcaccctcaccctctccctcgcctccgccggcctcgtcctggacgacggctacaccgtcaccaccgccgccgacctcaaccacccgggcgcccccgccgcgccccacccctacgcgctcctcccgcgcccgcgcgccggggacctcgtcctgctcgactccgcggcctccgcgctctacaccctctccctcccgctctccgggggcgccgccgcgcggaccctcgcgggcggtggtggcggccccgccgggttcgccgacggggagccccgcgacgccgccttcgaccgcccccgcagcctcgccgtcgaccacgcggataacgtctacgtcgccgaccgcatgaacggcgccgtccgaaagatcgcgccctccggttttactactacaattgctggagggcgctcaaaagggcctggtcgcaaggatggacctgcacagaatgctacattctcttcagattttgagcttgtttatgtcccaaaaatgtgtgctctgttagttactgacagaggaaatcgtttgatcaggcaaatcaatctaaaacaagaagattgtgcacgtgagacacagccaggcttgggaacaacttcggtgtcaattattgcagtgctatgtgcactgcttggttcagttattgggttctccattcggcatttctaccctgctcatgcaggaagtctccatcaaccgctttttcaggaggatgcagatgcagtacaagacaatccagaggacggccgctctgatcagcttctccgacatcagaagcgtagctgctaactccacgtttcacgccctcctgctgaagctagttagagtttgtgttggctatctaagtgttgtgttccctagcgttaggttagagaaacgagcccctgttaagccttgtccttctcttcttgatttagactaccctgttgttactagtactggtcctgacaacaaggcagatgaatctactgagctagtggggaatttcatcggcttcgatggagataccagttcagaggaggataatgtgcctgcatcttatggcaaggtgcctgctggtgaattggtggcgcttctagatggtccagaactcagcaataagatagatgacatgatcgaggccaacttatcgggcttcggcaacgtcagcaatggcggaaggatcaagtgcatgcaggtgtggccaattgagggcatcaagaagttcgagaccctatcgtacctgccaccactcaccgtggaggatcttttgaagcagatcgagtacctgcttcgatccaagtgggtgccttgcctcgagttcagcaaggttggattcgtctaccgtgagaaccacaggtctcccgggtactacgatggcaggtattggaccatgtggaagctgcccatgttcggctgcaccgatgccacccaggtgctcaaggagctcgaggaggccaagaaggcctaccccgatgcctttgtccgtatcatcggcttcgacaacgtcaggcaggtgcagttgattagcttcatcgcctacaagcccccaggttgcgaggagtctggtggcaactaagctaagatcaagcatcgcgctggtggattgctgcctataataatagtatgcagctttgttttgggctatgttgatgatatatcaatataatagcttttttatttacagtggatgccatctaaggcttgttaacacatatgatattttctcttcgcgtatgaagctcaatgtggggttgaacaatcgtttcccaatgttagttttatcccataaaagggtcgatatgtgttg

SEQ ID NO: 11177 - DNA, 1099 bp, Oryza sativa
  Clone ID: PAT_MRT4530_17426C.1
cccacgcgtccggcacgaggcacaaacgcccgcggataggcgcgcgcacgccggccaatcctaccacatccccggcctccgcggctcgcgagcgccgctgccatccgatccgctgagttttggctatttatacgtaccgcgggagcctgtgtgcagagcagtgcatctcaagaagtactcgagcaaagaaggagagagcttggtgagctgcagagatggccccctccgtgatggcgtcgtcggccaccaccgtcgctcccttccaggggctcaagtccaccgccggcatgcccgtcgcccgccgctccggcaactccagcttcggcaacgtcagcaatggcggcaggatcaggtgcatgcaggtgtggccgattgagggcatcaagaagttcgagaccctctcctacctgccaccgctcaccgtggaggacctcctgaagcagatcgagtacctgctccgttccaagtgggtgccctgcctcgagttcagcaaggtcggatttgtctaccgtgagaaccacaggtcccctggatactacgatggcaggtactggaccatgtggaagctgcccatgttcgggtgcaccgacgccacccaggtgctcaaggagctcgaggaggccaagaaggcgtaccctgatgcattcgtccgtatcatcggcttcgacaacgttaggcaggtgcagctcatcagcttcatcgcctacaagcccccgggctgcgaggagtctggtggcaactaagccgtcatcgtcatatatagccttgtttaattgttcatctctgattcgatgatgtctcccaccttgtttcgtgtgtgttcccagtttgttcatcgtcttttgattttaccggccgtgctctgcttttgtttttgtttcacctgatctctctctgacttgatgtaagagtggtatctgctacgactatatgttgttgggtgaggcatatgtgaatgaaatatatggaagctccggctatatatatttatacaaagggtacgagatggatgtgaatcctagagcatatgtgtccaacaatcaattcgtcgacaatgaaaatttgatcatggaattaaaaaatcatgcttctgttgttc

SEQ ID NO: 11178 - DNA, 2502 bp, Oryza sativa
  Clone ID: PAT_MRT4530_17427C.1
atgtcgacctccgccagcccgtcttctatgccatcagccgagtatgctgagcatctttccaatctggtcgcagttccaagtctgtcgcatgagaatcactattttcttggtctgattggtgatcttgaccccactgaattcatcattgccgaaaccaatagaatcccctttagattggccaaccctaatctaggtcactggaaaagcacctttaagtcttggccgtctcttgaaaaaacttcacctgaaaaaagttggattacgtggttcaagcgcgtatcggctagtaagcagacacactgggatgaaattggaatcggccaagcacttgccctaaccatagcaaattcagctaaggacgaacccttaatggccgctgccacatacttctggtctaacactatcaacgcctttctgttcaaccaagggccgatgaccccaactctgatcgacatcaccatgattactggattagatgtcacctcatcggctaatcctatgagtttgaacactaagaatcaatccgactttaggaccatgagcataggtggttggtctggttatttggcggcatatatgggcaaagggccagtcacctctcgggagcatgtagcctttctactaatgtggctagaaaaatttctcttctgtggatcaagctgcggccccacaaccaactggcaatttctagccgaagccctagaaacaaagagacaattccccttaggaaaaatcctcctcggctatctgtaccaaatgttgaacaatgcatcggttaagatagttgtcggctcagtggttggagcaggtggaccaaggtggctgctgcaaacttggttaaatctggtagtcacgaaagctgtcaattggccatctgtgacagaagctgaattcccaagactagagccgactacaaacgatgatggagaagaacgaacccaccacaggtgcatgtcttatggggaatttgcatccacaccagccgatgctggaacaaaactatcggctgagctgctcaaggattggttctgcagcttctatgaaggctttcagaaagatgcccgagtttggttcccttatgaagactcggtgaatcttgaagtcccatcagattttagatttaaagacatcaatcatgagagatatcaaaaatccagagaagtcttttcaactgcaattagcccatgcatccttcctgtcggcattcatcaaggaagaaacatacaagtttcttatgaattttatcacccaatgagctctgccagacagtttggaatgggccaactcccaatcggcttattttttactgacaaaattcaatgccgaggagaaatttcatcaacccttatgatggatcggctgctcaacatcccaggaccctctttgggcagcattgaaaacatagagctggcaaaattcagaagcagggcatttgacagatggtggggtgaatggaagctgcatctgttccaccaaccggcctctatgtatatgacagatctctttcctgatgttatccctcagacaacaaaatcctcttctcctcaccagagcaaaagtggcagggacacagaatatgctccatgcctcattccaaatggagatccatctatcgagcaagctctggatgaagaagaaattgaagaggatgttgacaaagctgtaaccaaaaagaaaaagattgctgtgaagaaaaaatcggcagcaacaacacttaaaccagctccaccgcaatcaccaagtgatcaaactccatcggctacaggtagccatcatgtcgaggaagaagaacaaccagctgctcctgccatcccagccttagccgatctgttctctttcgatatccaagactatcttgatgaagaaatagaagcagacaccaccagcatggctttagctcccttttccaatgacgtgaagaaaacacttgaagacatctctcatcggctagaggcggcatcactagacagcttggtggtcgattgtgggttgatcagaacttggctacatgaagtgcaagctctgatcccatatgaattagtcaatgccctcactccggccgtccacctcgaacaacatcaattcaagctggagaaagccaagttaagactagccgaatgtcagaaacacaaggacattgaagccacaatccaggccaatcggcagcttgtgcacgaagagaaatccaagcttgatcagctatctgaaggcccgatcaagtcaaatattgatcggcttgaagctcgtaagattgagctcttggcacaacttcaagaatgcaacgccgaactggatctagaacacaaaaagctagccgatcccccgcaagctatcgaagaacagaaggcaaagctgaaatcggctatcaagaatgtcgttgatatgaccaagtccttaaaagtcatccctggaaccgatacacaagatgcccaagctattgaggaagtagaacaaattaggcaaagagctatatcagctatccagcgctatttgcttaagtga

SEQ ID NO: 11179 - DNA, 135 bp, Oryza sativa
  Clone ID: PAT_MRT4530_17428C.1
agaggaatctgctgatattatacctagcttcacaaataatgcctatctagaggggaggtgtgcagaattgggtctgatacaaaatcagcgctatccccttgaaggctgttgttccaagttcggaggggggccctc

SEQ ID NO: 11180 - DNA, 451 bp, Oryza sativa
  Clone ID: PAT_MRT4530_17429C.1
aaaattctaatacatggtggatggctcaatgtgttacttcgtgatagctcaattatgtgctattaatatacagaaggcatggaactacagaactacagaaaagcatagcatatgtacaacatgagtcactcatattactctcaaatacgtaaatgtctttccctaatcaaattcaggattttctgatttatgtgctctgaaattgtgaaccacctgaagtagaactctttgtctgcgaagaagctgtgctattatgcatctgcgaagtttgacttgatgaaacatctgagaaaaaatttatgacatcagggctttcatcaagaaccttcagtgaccttggaacaggaggcatgttgacatcaaggaatccctctaaaatttggacgacctgacccattgtaggtctgccattttcatcatcttggatacaccagcaggcaaccttgcaagc

SEQ ID NO: 11181 - DNA, 330 bp, Oryza sativa
  Clone ID: PAT_MRT4530_1742C.1
gaccgcgccggccccgcccgccccagggggggccccggcaggcccgggccacgcaaacgctccaccccgcacagggggggaccgaccggcccaccggccgccggggccagggagggcctcccgtggcagggccgggcggagatctttccggggcgaccgcatcacgctgcaaggggaggccgggccgtcgtgcgcgacgccgccctcggggttggcgccaacgccgccggcgccgccggggctggagttggggctggaattggagccgccgccaacgtcgccgggtctctcaccggcgccgccggcgtggcacccaaggtgcatgtgtga

SEQ ID NO: 11182 - DNA, 437 bp, Oryza sativa
  Clone ID: PAT_MRT4530_17430C.1
gcgccctggtcaaaatttcgtttcatcttcagtagcaccagtacccccatccctcggcatggcgcctttgagtaataatcagggtgcgcctgggttcactcaaccagttgctcaactgagtctctcagatccactgcaaggctctccagctagggaagagggtgaagttcctgaatcacagttagatcctgacacacggagaagacttcttatattacatcatggtcaagacaccagagatcctacacctgctcttacagcagtacctcctgatcaagtcccaactccttcagttcaacctcatggaaattggcttcctgtaaaggatggcatgaatccaaataatctaaacaggggttctgcagggttccctttggaatctgaaactatgcactatgagtaatagcaactacctcacccattctctcatggagggg

SEQ ID NO: 11183 - DNA, 642 bp, Oryza sativa
  Clone ID: PAT_MRT4530_17431C.1
atggggaggaggacaacaggtcaacggcggtggtggtggctcgatgagagaaggcgacaacggcagctagcgcggggaggtgatggtggcggctcgacgtggggaggaggcggcggcggctcagtgagaagaggaggcaacaacggtggcggcggtttatatcaaattttgaagcaaatttttattgatgtttatgttaaaattatcatgttggtaaaagtttatcgaatttgcaaggttcatgtgctaaatgtgggcaaattcttaatcatgaacaaaaacaggggaagtttgcaacatgaaaacttctggacgaccttctggacaaccgctgcacgcacgcacacgagcgtttcacgctgcacgcgcacaagcaggatcgagccatcccgcgaaaccgtacgatccgtcaaattatatgtgccagcaatatatgtttattacgcggccttgatgtgtccatggaaattaacgaccggtcgaggacactgcaaggcagctacaggaattgatgcgaacacgaacaattcaaactggcctgaccggaattcatttcgaattgtcaatgttgcgagattgactgtcaagaccttggagctagtggatccgtctctctccgggtttaggcgtttagggctcttt

SEQ ID NO: 11184 - DNA, 1471 bp, Oryza sativa
  Clone ID: PAT_MRT4530_17432C.1
agatcaaacgccgcacgcgccaaaataaaaaaaaaatcggaagaatagagagagagagagaaaaaaagaacgatgagaccctccccgagcgcgcccacctcccacggctccggctaaaaccctagagcgcgcgcgcgcgagcgcggatgcccctcgctctcctcgcccgcgccgctctctcctccacctcctcctccatcgccatggccaccacgcgctcctcctcctccagggtgcttcgtgcctcccgtgcggagctcaacccaggtgctaaagaagtgaaacgtgaatccagtgtttcttttgacttgaccaaaactgaagcggttgcttccatgagaagcaaaaatgtgaaacgggtgcttgaagtaactggggagaatattaagaaagaggttgatatcgttcctgacattgaagattttcgatatggcaaggcatcgccatctttagttaggttggagaaaaaggtgagagtttcatctgctataaaagttggagctccagaaaattgggaggcaatccttaagggtattaaaaacatgaggttatctggcgaggcccctgtagatacaaagggctgtgaaaaagctggttctcttcttccacccaaggaaaggagattcgcagttttgatatcaaccatgatgtcaagccaaacaaaagatgaagttacacatgctgctgttgaacgtctatctgagaaaggtttacttgatccggatgctattgtccgaacagatgaggccacactagcgaatcttatcaaaccttttcttgctggaaattactcagctcagcctttgacatcatactggttattgtttaatcaggttggattctatcagaggaaggccaaattcataaaagaagcttctaaaatttgccttgaacgttttggaggggatattccagattctctgaatgagcttcttgctctgaaaggagttggtcctaaaatggctcatctggtgatgagcattgcatggaagaatactcagggaatttgcgttgacactcatgtacatcgcatatctaaccgtcttgggtgggttttccgagagggaacaaaacagaaaactacaacacccgagcaaacaagaatgtctcttgagaagtggctaccaaaggatgagtgggaacctatcaacccattactggttggatttgggcaaacaatctgtactccacttaggcccaaatgtgacatgtgcggcataaacaacatctgcccttcagctttcaaggaatcatcaagcccaaatccaaagcaaaagaaaatgagatttgcagttctcatggcgatcaacattgccgatctcttgtaggtacatgcattatttactgacctgctagtgctggaatgctcttctaaaaggttggcatatttattgcctggatgaccttcctgcagccatctatcattttgtatagccattatgtagcattttgtatagccgtaatctattga

SEQ ID NO: 11185 - DNA, 572 bp, Oryza sativa
  unsure (1)..(572): unsure at all n locations
  Clone ID: PAT_MRT4530_17433C.1
atattctgttccacccccgaaaccactccaaaaccaaaccaaatctcgcggcgcatggcggcggcggcggtggcggcgaacggcggcggggacggcgcgcaggctgtccaacgcgcccgcccccaccaggctcgcgtctgtctacagcgaggtgcataccagccgccttaagcacgcgctccccctcccctccgttcttcgctcccccttcgccctcgctgacggccccgccagctccgccgccggccgccccggggagatcgtcaagctgttccccagcctgttcggccagccgcgcgtgtgtgtcgttccgtccgcgcagcctgcgtccaccgtgccaggtcatggccggggtggtgctctccggcggttacgtgccccgctgcctcgatgtcgtctgcgggttcttcgatgacctgcgggactttgccggcggatccgtcntgtgtggattcgctggatgtccccctcgagtcatgatcggcacgtgcgctcatctcactgcggatgatgtgtccccttacggagaccaccgtgggtttggtgtgatctgcggcggtcgggctggattg

SEQ ID NO: 11186 - DNA, 431 bp, Oryza sativa
  Clone ID: PAT_MRT4530_17434C.1
cccacgcgtccgggcaaacaatctgtactccacttaggcccaaatgtgacatgtgcggcataaacaacatctgcccttcagctttcaaggaatcatcaagcccaaatccaaagcaaaagaaaatgaggtcatcttagaactttttggcagggatgccttgtgtactttgtgtacatgcattatttactgacctgctagtgctggaatgctcttctaaaaggttggcatatttattgcctggatgaccttcctgcagccatctatcattttgtatagccattatgtagcattttgtatagccgtaatctattgagacaatgggtagggacacattgatcttgccagttatttattatgggcaaacaactggcacttggtaggaaaaagcttttgtaaacagtataactagaacaaaacggaggacgttcatc

SEQ ID NO: 11187 - DNA, 495 bp, Oryza sativa
  Clone ID: PAT_MRT4530_17435C.1
ctatttatcctcactttcagttcactgatcttcaactttttctgttaaccgtctccctcatgcttcctttcctctgctgccatgtggccttagctgctggccttcaccctgtgatttctgtcagcttctgctcccaacaccaccattctctccaaatgtccaaaccaaaatcatcggttgaaaataaatttgatgaggacatggattttggtctctcttgtttattaatatatctctagtacctaaaagagtggctctactggttaataaatgtgcagccggtgagcaagttacttaggaattctgtgccctacttttttttaaaccttcaaaatgtgcatcatgagaacagctagttgggttgtcataagaattaaataaattagtacttgtaaagcccttatattagtgtctggcacaacatgtgttcaatagaagcatttgttaaataacattaaaaaaaataaagcatctgcatatttggtcctccgtgaa

SEQ ID NO: 11188 - DNA, 758 bp, Oryza sativa
  Clone ID: PAT_MRT4530_17436C.1
cagactgatggttagaccgagagggtcaatcagatactggaggatatgttgagagcttgcactcttgattttggcggagtttggaataaaagcctaccttatagcgagttctcctacaacaatagttatcaggccagcttacaaatggccgtctattttgggaccaaacaggagaacgccaattgtttgggaccgaattattgagtgatgtagaggaaaaaagtcagaaccttcatggaaaggataagaatttcacggtctcggcagaagagctacgcgaacaacagccgaagatagcttatctttgaagcccgggactatgtgtaccttcgagttacgccactccggggagtgcaccacttccaacccaaaggcaagttggcaccacgctttgtgggaccatacaggattttggaacgcagaggtgaagtcgcttactagcttgagctcccatctagcaaggctagtatccacgatgtgcttcatgtatctcaactgaagaaatgtttgagcgtacctaaggaataggctagttctaagcacatcgagattcaagaggatttgacatatgtggagaaacaagtccgcatccttgaaaccagcgtgagaagaaccagaaacaaggacaccaggtttgcagggtccagtggagccaccattatgaggaagaggtcacctaggaaagagaagacgagttaaacgccgcccatccgcacctctttgccagcttttccgaatctcggggtcgagattccgtt

SEQ ID NO: 11189 - DNA, 275 bp, Oryza sativa
  unsure (1)..(275): unsure at all n locations
  Clone ID: PAT_MRT4530_17437C.1
cgctttttacgcncctacctaccgcccgggcggcaggcggccctgccgctggagcatcgtgggggggtgcccgtggcgaggctcaggaaggtggtgctgcgcgagtgcgtcgccggccggccgccgtgggaggacgatcgtgtcgctcgtcggcggcggcacggtggccctgcgcgtgccggattgccgcgcccccgccccggcgttcctcgtgcgttaatgtgtgcctctcctgcgacccctgcgtgcgcggccgtntgcggcgcttcccccgt

SEQ ID NO: 11190 - DNA, 727 bp, Oryza sativa
  Clone ID: PAT_MRT4530_17438C.1
ctgcaggaattcggcacaggctgtggactcgtcgtcttcctcccgccgccgccgcctaccgggccgcgcggagcgccacgggcgcggcggcgccgccgccgcgggggcaggaggggcaaggagatcgcagcggcggcgatgagggcgggagatacggggtgctcctctactacaagtacgccgaggtgcccgacgccgcggcgctcgccgccttctacgagtcccactgccgcgctctcgccctcgtcggccgcgtccgcgtcggccccgacggcgtcaacgccacactcggggggaggatggcggcgctggagaagcacgtcgccgagatgagctccaacgccttgttcgacggcaccgacttcaagctggcctcctgcgacgaccccgtcgacgagcgggtcgccagggagtgcggcttcacctcgctctccgttcggctcgtcaaggagctggtaacgctttgtgcaaacccgtcgttggcaaccccgcagattacatgcgccgggaggcatttgtcggctgcggagttccattcggtactccaaagtgttggagctacttcggactctgaagcaaccgtggagaagagtgaagtggttgtcttggatgcgcgaaatgtctacgagacacggattggcaagttccgtgtaccgaacgtggagaccctccgtggagaagagtgaagtggtcgtcttggatgcgcgaaatgtctacgagacacgga

SEQ ID NO: 11191 - DNA, 165 bp, Oryza sativa
  Clone ID: PAT_MRT4530_17439C.1
atgacggttagcgagcccggtggcagtggcttcgacagcggcagtgatggcggaggtagcgacgctaggaagcgggcggcggcttcaatgatggtcggaggcagcggtaaggactccggcgacattgatgtgtcctactactatcccatcgagggtagtgagtag

SEQ ID NO: 11192 - DNA, 1488 bp, Oryza sativa
  Clone ID: PAT_MRT4530_1743C.1
atcgaggagacccacaagtcgctgtccatggactgactaaaggagcgcataaatgggcaggggttcagcggcgtaacgttcgacgtggagggacgccgggcatggtcttccgcgagttagtctagggccacgccgccgaccagcccgacacgccgcccggcgcccaccatcctggatcaccccggcccgcgctcaccttccgctggtgcgctcacctcctctccgtgcgacgtcgggggcttcgccgccaccggcgccgcgacggcgcccggcgccgtgataccggtcagctcgttcaggtacgaggtgttcctgctgctcctccacatcctgcacgccggccgcgtctcgatgttgaggctgaagggcgagccagggccgggctgcggcgaccgcggctgctcgcacaccctctgcttcgccgccttcgtctgcgccctcgacgccgtcgccgccgcgcgctccttgggcgtcgtggagctcgaccacctcacccagaagcagctggcaggcatggtggagaaggcgtcgatcgaggacgtgatgaaggtgcttatggcgtcgaggaagcaggacctgcaccagctgtggacaacgtgctcccacctcgtcgccaagtcggggctcccgccggaggtgctcgccaagcacctccccatcgacgtcgtcgccaagatcgacgagctccgcctcaagtccatgtcgcgccgctcgccgttcctctcgcaccaccaccaccacccgcacgcggccgccgccggcatcgaggcgtcgtcggcggccgagctcgacgaccaccacaagatccgccgcatgcgccgcgcgctcgactcctccgacgtcgagctcgtcaagctcatggtgatgggggaggggctcaacctcgacgacgccctcgcgctgcactacgccgtcgagaactgcagccgggaggtggtcaaggcgctgctggagctcggcgccgccgacgtcaaccacccggcgggccccgccgggaagacgccgctgcacgtcgcggcggagatggtgtgcccggacatggtggccgtgctgctcgaccaccacgccgaccccaacgtccgcaccgtcgacggcgtcacgccgctcgacatcctccgcacgctcacctccgacttccttttcaagggcgccgtgcccggcctggcgcacatcgagcccaacaagctccgcctttgcctggagctcgtgcagtcggcggccatggtgatgtcccgggaggacgcccagaccgccgcggtcaatgcggcgcccatctacggcgagtcccccggcggcggcggcggcggtggcgtgtacaatgccagtggcaccagctcgagcatggtgaacctgagcttggacaacaggatggtgtacctgaacctggggatggacgcgcagttcgggaagatgaacgacggtggcgacggcgacgacggcgggagcagagggccatcgtcgttgttctccccacatggcttcccctga

SEQ ID NO: 11193 - DNA, 438 bp, Oryza sativa
  Clone ID: PAT_MRT4530_17440C.1
atggccaccgcggtgagggtaatcaccaagtggggccaccccaccgcggacatcacccacctcgttgtctccactaacgccggcgcccactcccttgggaccgacgagtggctcgcggcactcctcggcctccgtgccaccgtccaacgcaccatcctctacatgcacggctgctccgccagctgcagcgcgcttcgcctcaccaaggacatcgccgagaacaaccacggggcgcgcgtgctcgtggcctgcacggaggtcttcctcatagtgttcgccgcccccgacaaggcccaccttgacaccctcgtcacgcattgccatttggcaacgacgccagcgccgtcattgtgggcaccgacccgagagctcccgttgaacactctgtcttccacatggtgtataatcggatggggagcgagagctagggtttggtga

SEQ ID NO: 11194 - DNA, 516 bp, Oryza sativa
  Clone ID: PAT_MRT4530_17441C.1
gttcttgctatcagcgatggcgccgttggcgtcggtggtcgccggaagcgttctgggctacctcatccacggcgaccgccatggcatcccggtgattgggtacctgaagaaggggataaacccgccgtcggcgcgcgatctcctcctgtcgtcgccgcacacgatggtcgctctcaggaccgggatcatcaccggcatcatcggcctcgccgagggaatcgcgatcgggaggagcttcgcaatgctgaagagctacaatgtcgacgggaacaaggagatgatcgccttcggggcgatgaacatcgtcggctcctgcacctcctgctacctcacagctggcccgttctcgagggcggcggtgaaccacaacgccgggtgcaagacgccgatgtcgaacgcggtgatggcggtggccgtgatgctgacgctgcagttcctgacgccgctcttccactacaccccgctggtggtgctctcggcgatcatcatctcggcgatgatcggcatcatcgacta

SEQ ID NO: 11195 - DNA, 468 bp, Oryza sativa
  Clone ID: PAT_MRT4530_17442C.1
atggtgcgcatggctggtgtagaccgggagtggttacacagcatggcacatgcgctggcactggacacatggacgtggccaagagaggacgttcctggcctgggggcgttgatctctcttaagggggtgagggtttgcgcaggcatggtgcgcatggctggtgtagaccgggagtggttacatagtatggcacatgcgctggcactggacacatggacgtggccaagagaggacgttcctggcctagggttgatcgacgggggcgtcgatcgttcctggcctagagttgatcgacgggggcatcgatctctcttaaggggccaatctccaaagaactccagggttaagcgtgctcggcttggagcaatttgggatgggcatggtgcgcatggctggtgtagaccgggagtggttacacagtatggcacatgcgctggcactggacacatggacgtggccaaggcctag

SEQ ID NO: 11196 - DNA, 930 bp, Oryza sativa
  Clone ID: PAT_MRT4530_17443C.1
tttcctacatattaaataatttgatatcaaaggttaagtcagtctgcgagatataagtttttttttaaaaaaaaagaagtgtatcatcacttcagagacaactgtgatagttaatctacatacaaaattaagtttcagggacacagaactgagtatgaatgcttagcacttcgatcagactccacaacacactatacacacttatgttgacagaattgcatctcctataggatttccagaaaaaacagataaatgaatgtataccgcctgcagattggtgtattctcacatgatcctacaggtaaatcacaggaggcctctcatctgcatgacagaagagatagattgcttttagtaagtaaactgaataataatttttttaacaccacaaattgcaaaatacaagattggtccaatcacttggatggtcaacaaatgagaaaactgcatgccagatggataccttgttgatctaaccacaatatagagcactcaagaattctagaacgctcaagacgtgctcgatgaaatgtgtatgtgctgccaaccagagctagcaactactacttagttctaggtcgtcggcgacgcgggcgcgggtgttccagaggtggcacggaggagattggtggggtggccctcgctggcgacgcggatgggagagatcggcgcgggcggagcagattggtgagggagtaccgacggtggcacggaggagatcggcgaggcggccgtcactgccgacgcggacgggagagatcggcacgagcggagcaaatcggtggagagatcggctcgggcgaaggagatcggaggacgacgaccctggcaactccgggcgatggtgatgtagcggcgcggaggcgggcgcccggcaaagatcgggggcggcgcgaggagaggggtggggctgcgcgatgtgtagatggg

SEQ ID NO: 11197 - DNA, 901 bp, Oryza sativa
  Clone ID: PAT_MRT4530_17444C.1
gccgccctccatggccgctcccaccgcagcagctctctccaccctctccaccgccagcgtcacctccggcaagcgcttcatcacctcctccttctccctctccttctcctcccgccccctcgcaacaggcgtccgcgccgcgggggcgagagcggcgcggaggtcggcggcgtcggcgtccaccgggggggcgaccatcgccgtcggagacaagctccccgacgcgacgctgtcctacttcgacccggcggacggcgagctgaagacggtgacggtggcggagctgacggcgggcaggaaggcggtgctgttcgcggtgcccggcgcgttcacgccgacgtgctcgcagaagcacctcccggggttcatcgagaaggccggggagctccacgccaagggggtggacgccattgcctgcgtgtcggtgaacgacgcgttcgtgatgcgcgcgtggaaggagagcctgggcctcggcgacgccgacgtgctcctcctctccgacggcaacctggagctcacgcgcgcgctcggcgtcgagatggacctctccgacaagcccatggggctcggcgtcaggtcgcgccgctacgcgctcctcgccgacgacggcgtcgtcaaggtgctcaacctcgaggagggcggcgccttcaccaccagcagcgccgaggagatgctcaaggcgctctgaagatggaatccgagctctcgtaggtggcaacaatggcaggatcagcccgttgctctcgcgcgttggtgagtagcgtcgtcgttgtgaagaggaaattttgtgtgtgttttttttcggttgaatgttgcatgccatgtgcttgacgaaatgacggaataacaaaagaaaaaaaactacttttatttttttgttgaaaaaaaaacaaaaaaaaaa

SEQ ID NO: 11198 - DNA, 716 bp, Oryza sativa
  unsure (1)..(716): unsure at all n locations
  Clone ID: PAT_MRT4530_17445C.1
atcgccaatccacggtcaactacacaacaccttgtcgccttaaacgcacaaccagcgacaagatgcgaacctacgaggacaccttctccggcgcgagaatctaccctggcaagggtaagctctacgtccgtggcgacagcaagatcttccgattccagaacggcaagtcggagtctctcttccttcaaaggaagaacccccgccgtatcgcatggaccgtcctctaccgccgacagcaccgcaagggtatctctgaggaggttgccaagaagcgaacccgccgcactgtcaaggctcagcgtggtatcgttggtgcttctcttgacgtgatcaaggagaagcgcaacatccgacccgaggcccgctccgctgcccgcgcccaggccatcaaggagagcaaggagaagaagcaggccgaggctgctaccaagaagtccgagaaggctaagctcgctgcccaggcctccaagggccaggctgtccgacaggtcagcaagcagggtgccaagggctctgctcccaaggtccaggccaagacccgttaaattaggaatggaacttgagtgaggatgaaaatgggagagtggagtccgtggttcttgtgtctttgtccggncggttcttctacaatctcgggtgcatgggatgccaatagggtgcattgatagttgagcaatgcaaaatggtcaaacaaacaaacagacnacgcatctgga

SEQ ID NO: 11199 - DNA, 568 bp, Oryza sativa
  Clone ID: PAT_MRT4530_17446C.1
atggtcctttttaggcaccagagtggctggcgccgtccccaaacatggcggcgccagccaccatggtgtcgcgcccatgccactgtggcagtagggtgtcgtcgtcgtgctgactaggccaaggggggcgccagccaccttggcgccgccccttataacacggcgctagcatggctggcgcacccctccacacccttctcccccccaccttcttcctccggccggccgacgcacgcaccgtcgccgcgccacggcgccagcccggcttcggccgtcgcccgcggcggcgcggcccaccgcccgcccgccgacgccgcctcgacgcctcctggctcttgcccagctgcggagctgcccaacttgtctcctcccatcctcgacagcagtcagcaagacagcaaccgagcaacggaatacccaagttgaaaaacctgggcccgcccctggcgccgcggcgccagggtggctggcgccgcccccctccaccccccgccctaattcgaaaaagtgtggcttctttgagaccacactcctaatttctgttggagtggcccaaatacaaggagaa

SEQ ID NO: 11200 - DNA, 714 bp, Oryza sativa
  Clone ID: PAT_MRT4530_17447C.1
aaattagtccgaggccctaatgttcccagcattccagaacaaatttgcattcctatactattaaacgtctaatatccaagtgatcctactttggaccttgtgatgagagcacgatatcttcaaatggcatgtataaaagcttcaacaatctgccaggttaatatctgagttaatgaaagcatattcaaacatctaacatggcatttttctcctctatatgaactaatgctacggcattgtcctttttacagtactttacacaccatttatatttcaagtctagaatgtgcagcttcagaactcacaaattacactaaatacagggaatcaagcattgaaattctttttaataatgcctgtaaaataaccctttaacaatgtgtgtttgtgtagtgaatgacaaatatccacttagtcaggagtactccgctcagggatttctagtgactgttcatggtcttctaaatgggtaatgatttgcatataatctgaacagtgatggacctattgtcatgtcttctactgaataatttctgccagcaggtccatatttttaccaactaacactgcattagttttctgaagtggaatattacaaagtgccttatttgttgtactgatccttattgctggtcattacaataaaataccctcatattttttcagagttatccctatcagataccatggaatgctatcttttctgattcttca

SEQ ID NO: 11201 - DNA, 408 bp, Oryza sativa
  Clone ID: PAT_MRT4530_17448C.1
atggcggcggcgcttcgatttgcggcgaggaaggtgagccgtggcgcccttcaacaggcgacggctttcgtatcgccgtcgccggctgttaaggaggaacaacggcgtctgttgccggagcaccaaactatagcaagctgcaaagagcctgcgagccttagggcgcaaattgaggagaagaagcacgagttgttccatctactatttgagctgaaatatggcaggaaaagtatagctggtggtgaaaaactcagcatccaggacgaaaggatactcggggagcttacgccataccgtgagcttaaggcaatggctgataagtatggactaaaacaagccttgaaatatattggaataacctatgttttgggcttcgctgtgttggggatggcggtgaaccatatgtga

SEQ ID NO: 11202 - DNA, 864 bp, Oryza sativa
  Clone ID: PAT_MRT4530_17449C.1
atggagcctggctgccacttcgtgccctggtttcttggcctccaggcccgcggccccctctccctccgcctccgtcagctcgagatccgctgcccgaccaagaccaaggacaatgtgtatgtaactattgttacgtgtgttcagtaccgtgctctagccgacaaagcgagccatgcgttctacacgctcatcaacaccaggtcacagatccaggctcacgtcttcgatgtgctgaggacgagcataccgaagctggcgctggaggaggtgttcgacaagaagaaggagatcgcggaggcgctggaggaggaggtggcggaggccatggcgccgtacggctacgaggtgatgcgcgcgctcgtcgtggacgtggagcccgaggaggccgtgaggcgcgccatgggcgagagccgcgccgcggccgacagggcggtggcggagcgggcggcgcgcgccgggcgcgccgaggccgacgccgaggccgcgcgcctcgccggcgtcggcgccgcgcgccaccgccaggccgtcgtcgacgggctcagggcctgcgtcgtcgcgttctgcgccgccgtcccgggcgccacgcccagggaggtcatggacatggtgctcgtcgcgcagtacttggacaccgtgagggagatcgccgccgcgtccgcgtccgggtgctcggcggcggcggcggtgccgttcctcccgcacggccccgccgcggcgcgcgacgccgtggcgcagatacgcgacgggctgctccaggccgtgcagcctcctgccgccgccgccgccgcaagcgtcgccgccgttggccttccattgccattgccagtcgccagcgtttgcgaaggtatcacagaagagcagtag

SEQ ID NO: 11203 - DNA, 276 bp, Oryza sativa
  Clone ID: PAT_MRT4530_1744C.1
atggccgagccgtcgtgcgtcgtcgccgttccgcgagcactccctctccagcctcctcgctgccctccccgccggcgcacgctgtcgtcatcccgttcgcttccagctgcgacgttggcggcgcgagcgcggggaagacacgccgccgtcgtggagtgcgatgcggtgctcaaggcactgagcctagtctctcccaagggtggcgacgcgccgcggcccgagggggctccgggagaagccccgacactccgagaagcccaccaagtacgccggtag

SEQ ID NO: 11204 - DNA, 1038 bp, Oryza sativa
  Clone ID: PAT_MRT4530_17450C.1
tcaaccccacctctcctgtcgccctccccggggatggctagggaggcgagctccggccaccccctctcccccacctctctcctccgcctcgccgccgcctgagcggccgccggcttttgtcggcggccgcaaggatggcggcggcggggctcgcttctcgccggcgggaccacgcttgggtaacctagggagccgccctggacggatccggccctcctgagggcagatctggtgtggggcgagcttgcggcggtggcggtgctgcggagctcgtggcgacagcgtcagcgtcaacggggtgaactcgtggcgggagaggccgtcgcagcggcgacagtggcgcggagcttgtggcgacggtggcaacagcggcaacagcaggtggctggccgacggcagcatcggctgctgtggcgaccgtggctgcagtgggaggaggcacggcggtggcgaccgtggctgcgatggaaggaggcacgacggtctcgaacggctagtcgggggcgtggcagacggccgcatctggccagcgcgacagcgattggaggaggggtcggaggctggtcctcggcacagagaggtacggctgatggcagtggagaccggcacggcgcgagaggcatgcccgacgatggtggatgccggcttggcgtgagggacgcgaccggtggtgggaggccagattggcgcgatgaggcgcgtctggtggtagaggaggtcggcgcagcatgataaggcctgctcacggaggaggaggtgaccatggtgcgaggagctgccggtaggtgtggcgcggtattcggcgtacgaaggctggccggcggaggggcgccggtgaagtggtccgacatgttggcagagttgggtgatggtggagcatcggtcggtggtggagcaggtggtgagcggcgggggtgaaagcccagtcttggctcttttgagaccctgacggacgacgtcagcggcttttcgtcgcttctctccttggagacgtcgtttaagcatccccttgtcgaaccactcgaacaattggtgcat

SEQ ID NO: 11205 - DNA, 150 bp, Oryza sativa
  Clone ID: PAT_MRT4530_17451C.1
cccgtacgttctccagttcgaagacggtgagggcggggattgactgctggctccccccgcgtcccaccccaaaagaggagaggtcttgggaggaaccatccatgggggaggacctacacccagccaaagtggaattccgatcataccccg

SEQ ID NO: 11206 - DNA, 862 bp, Oryza sativa
  Clone ID: PAT_MRT4530_17452C.1
tttttttttttttttaaaacaagaatgaagtgtaattagcaagtgtgatgaatggaatggattactggttgcaatcagctgcaactacatatgtatttgatgagttgatttcactctgcatgtgtgtgtgtgtgtctagacaataataatcagcttgaatatacatacatacacatgcaaattaatatgcaatccaatatgtgttttggatatattgatcggagaagaagaagatagaaaaggagctaggaggaggtgttttgtatttgttgccttgagcggtagaaggccatgcccctgatggcgtcggggtccatggcgaagccgaggaggcggtagaatcccacgacgcggggctcggcgtagagcgcgatgttggagacgcccttgcctcgcaggtcggcgacgaggcgctccatgacggcgcggccgaggccgaggccctggcacgacggctccaccaccacgtcccagaccaccgcgttgaacacgccgtcccccgccgcgcgcgcgaacgccaccggccgccccgccgacgacgacgccgagtcctccagccacaccacctcgctgtgctccagcgctcgccgcagccgctcctcctgccgccgcgggaaccccacccgcgcgaacacctcgttcagcgcccccacgtccagccccgtcgagctgcgccgcaccgcgaacccgcgcgccgcaagctcagagtccgacaccgacaccgcacacgcacacgcacacgcactcctgttggagttgttgttgaagctcaaggtgggcagtggaaacggccgaatgccaccgcgaggacggacaccaacgcggggccgcgccgcctgcatctgcatctgcccctcgtgcc

SEQ ID NO: 11207 - DNA, 1215 bp, Oryza sativa
  unsure (1)..(1215): unsure at all n locations
  Clone ID: PAT_MRT4530_17453C.1
tgagctagacttgcccgatcatggaagaaaccatcttcagttccacgcacacaagtttggttgccgatgctaggattgctgtagtcaccggcgggaacaaggggatcgggctggaggtgtgccggcagctggcngancgngcncaccgtcgttttgacagccagggacgaggcgaagggcgcggcggccgtcgagaagctccacgggctggggctctccatggaagaaaccatcttcagttccacgcacacaagtttggttgccgatgctaggattgctgtagtcaccggcgggaacaaggggatcgggctggaggtgaataatgccgccgttggtgggattgtgcccgttgacgatccatcttttggtctgctgcccactgaagaaaagttcagcggcatggatgggcatcagagaattgaatggatgtggaagaactgccgacagacgtacgacgctgcaaaggccggcctgaagacgaactactatggcacgaagaatgtcactgaagcactcctccctctcctgcaatcctcctccgatggaagaatcgttaacgtcgcatcaagcttcgggctgctaagaaccgctgatacaaaggactgtatgcagttcttcacaaacgaggagctgaagcgagagctgaacgacgccgacagcctcagcgaggagaggctggacgagctgctgggcatgttcgtgagagacttcgaggccggcgcagtggcggagcgcgggtggccgacggagttctcggcgtacaaggtggccaaggcggcgatgagcgcgtacgcgaggatcctggccaggaagcgccccgcgctgcgcgtgaactgcgtggacccagggtacgtgaagaccgacctgaccaggaactcgggcctcctgacgcccgaggaaggcgcgagcagggtggtggcggtggcgctgctgccggccggcgggccgacgggcgcgctgttcgacggcggcaaggaggcgtccttcgtgtgagtgtgtgtgacgtgtacacggttccgctgccggtgggcccacccacgtctgtatgctctctggactctggaaccgtgtttcctggtgggctgtgcgatgaacactttttttttttgatcaaagggcaacgccctccatttccattaggatgaacacatgtgatcgctaatttgctgtttttattatcacttgtatggagtacctattaaaaaaaaaaaaaaa

SEQ ID NO: 11208 - DNA, 454 bp, Oryza sativa
  Clone ID: PAT_MRT4530_17454C.1
gaagaaggccggcctgaagccaattagccaaagcagctgttattgagtgctcaaatacatcctcctattcaactacatcaaccgttgaaagaaaagagactaacatatgtattttttctgcctagtattgttttaatgactctagtcaagtacaaacaacatctctattggcagtttacaaataagtacattttgcattatctgtgcaagtttatatattaacttcatcttaagaaatatgaagttaacaatgcgcctccgtggcgttcagccccagcatgagaaacgggcacattgtatgccacgtccaccacaagcggagtccaatgacgaacgcgtagcaaatgttggtcactagttcttcccactgaaaagcctgaaaaagctgggcacagcggctgggaagaggggagagagagtgtgaacgctgtcgatctgcagccaccgtcgtcga

SEQ ID NO: 11209 - DNA, 132 bp, Oryza sativa
  Clone ID: PAT_MRT4530_17455C.1
atggtgtcagatcgggcatcagggaaacgcggcgcgagcagatccgccaagggcgacgaccgggagcggccgatctgcggccacgccgtcactcgcacatacgctcgagaggaagaggaagagatatgctga

SEQ ID NO: 11210 - DNA, 360 bp, Oryza sativa
  Clone ID: PAT_MRT4530_17456C.1
atggagctcgccgcgctctgcaccgaccccgtcgtgctctccgccgccttcctttgcctcctcctcaacctctccctctgctcctaccgcccgccctcccctggcggcggccgccgcctccccttgggacccccgggcgtccccgtcctcggcgcgctcccgctcgtcggcccagccccgcacgccgacctggcgtcgctagcgcgcaagtacgggcccatcatgtacctcaagatgggcacctgcggcgtcgtcgatgtgcgtggcgagggctttctttccgagcccgagttcgaggaagctccggacgttgttttcgagggagaagacccgcgccctgtgcaaggcaagcctctttga

SEQ ID NO: 11211 - DNA, 282 bp, Oryza sativa
  Clone ID: PAT_MRT4530_17457C.1
atggaggaggagagtcctaggagcacggtggccggtcggtccggccccaacatcgaggaaggagtggagggcgttggccgcgggcgacggggagatggtcgtggtggaggcgaagaggctgcgcagttggttctcgcgaaggcgtgggcacatagatggatggacatgacgatggtggtggcggcgttgttggcttgccgcgacgatgaccgatgcttcctgccgcggcagagcccaaccacacacacactgcccccacttagagcaagttcaatagtatag

SEQ ID NO: 11212 - DNA, 1357 bp, Oryza sativa
  unsure (1)..(1357): unsure at all n locations
  Clone ID: PAT_MRT4530_17458C.1
ccccccctttttttttcccggnanaaaaaaaacccggnaaaaggnnaaaggnaaaagnnaaaggccctaanggtttccanccctttcnaaaggttttnaaangncccnggaaaaaaggnccctttcccngggccnccctggtggggaaaaggnnaaaaaaacccgggggggnaaacccgggnaaatttncccaaacccccccgggnggggnaaaaggnnaaaaaanaggngggggggggggggggnaaaaggannaaaggnnaaaggnnaaattttgggnaaanggnccccgggnggggcccgggnggggtttccccnaaagggnggggaaaaccccccttttggggcccctananggnccccttttngggccccccccgggnccnncctnggggggggggggggggtttttttccccccccggggggggttttntttccccccccaaacccccccccccngggnaaaancccgggngggggaaaaccccggnnaaaaggngggggnaaaaggnccccntttgggggggggttttgggnaaaattttgggnccccnaaaccccttttnaaaacccccccctttttccccttttnggggcccccccccggggnccccccccggggnccctttttngggnccccngggncccccccccggggggggggcccccccctttttccccccccccccccccccaaaaatttttccccnggggncccccccccnggggtttttccccccccccccccccccnaaaatttttccccccaaaanttttcccccnggnncccccccccnggggnaaaaaagnannnaaanttttncccggggnaaaaaaccccccccctttttcccccttttttanaaacccnnaaaaaaaaaggnntttttttttttccccccgggaaaaaattttcccccccccnaaaatttttgggggggggggncccnaanangggnccccttttttttttccccccccccccccccccccnggggggggggaaaaaattttttggngggggggnccccngggncccccntttttgggggtttttttaanncccccgggggggggggnaaaaaagggnnaaaaanggggnnnaaaanaaaaggggggggggnaaaaaaggntttttttnggggggggggtttttnaaaaancccccttttnttttcccccccttttnttttnccccccttttttcccccccccccccccccccgggggncccccgggggaaaaaaaggggnaaaaaaccccccccccgggggncccccnnaaaaaaaaangggnttttttttaanancccccccccccccccgggggaaaaaaaaaaanccccccgggggggg

SEQ ID NO: 11213 - DNA, 1710 bp, Oryza sativa
  Clone ID: PAT_MRT4530_17459C.1
atgtcgtactacatagatcctcataccaacataccccaataccctctatattcggtctacgggtatcccctgtcgacagttgcgcgccaggtaggggaatttggtgctcaaggttttactactatgacttcaagcctcctcgacaacagcgtcgaccctgggatcaaccaaggagcttcaacttcaacgatgctggtgtggactcaagtcggcgaaatcgtcttcccggtctacaccacgatgccgatctcgactggcgcagtaatcaccagcagcgagaacggcgtggttacgaccccggtcgactccatgtcgaaagatcctcccgcaggagcggagaacggaacatcgacaacatctgcgcccgagaagggtcctaacgcggccagttcttttcgttctgacaagaagcacgagccgacaaggacaacttccgaggcgacgaggatctggtgtcccatccacaagaccaaaaggcacactttggaagcttgctcggtttttctcgacgtacaagctgaaatccgtgcctgcaaagagcatggaatccaacgcacttctccaactcgtgatgtctattgtcccattcacaaggcaaagactcatgacctctcaagctgcaaggtcattctcagcgccatgaggacgtcacctcctaaggtccaacagtcacaaatctctcctagagatgcggacaaggaacgaggagcaacgaatatttaagatcgattcgtcagggtaatcgatattgatccccacgagccatctgtcctacatctgctcgaagaccaggcctcatcatcaacaagtacaccacgcaacatgtacgccatcggtgggaccagcacgtctggaggcggcaacacggaagcggaggatcaattggctacgccagcccaacatatcagaaccatcaacgcaatactgagggaaacctctaatgatcccgtcctgaatgctgatctcgatcagtggacggaacgactacgggaatcagtggccagcctcagtaacgcgttcgaggaggccgctgccagggcaccaccagaacaaccgccgaccggcggcgctaatggggaacagcctgaacagcggacgccacctcgtcaagccacccttccgccttgcggcaccagtgatctgcgcgaccatctgaatggtcgccgagaagcgcgacgcacgtgagacaacgaaaatcattccccacatcgcgtctctttgcgacatcacgagaacgaagaacaaggaggacatccgagcgagaaccgagaccgtgatgatcaccacaaccaccgagaacatgctaatcgcgaactgtggctgccgggtgatacaagttgaggtcgacgccgcaatgacgacgacgatggaggtcgacactgggaaaacaacgatggatgacgacgaggctcacgagaacccgagcgtcgtcctcggaaccctgccccaaaaccgagtgattcgtcatcgtcctcgtcatcttcatcatcttcctcatcggacagacatccacgacgagcacatgatcgccgacaacccaccgctcctggcggcgggtgcagagctttcactcgttccctacaagaggttcgatggcctgagaaatttcgaccaggagcaatagagaaatacgatggaagcaccgaccctgaggagttccttcaggtctacacgaccaacggaaaagaaaaggcttttactctaataaac

SEQ ID NO: 11214 - DNA, 529 bp, Oryza sativa
  Clone ID: PAT_MRT4530_1745C.1
ccgggctgcaggaatcggcacgagggtcgatgagatataaagagaatccaccaaatttattatttggtatacttgtggagtatattatagaacgagaaatatgaccaccaaattagcatgaatatttttccttcttgacctaagccataactttggtgttatgacttaaatgaattacgatacttgcctatgccagcaatggtccaatgtgtggtccagtctgagtttgtgtcagatatataacctgaatcaaggtgaatggaaatatttagctggagtgctgtgcagtatatgcagagttcacacaatttagacggttggagtttaggcatcctgtaaactcccaatttcattgatcaagtgtttcttttgtaaaagcctgaactccaaaaattgatttttaatcatgggttgaactgaactatcaaaatggatttgctacaaatttcagtatttcacctgctctgtgcagtcatttgatgtttgatgtaaccttctaaaagaaaacatcttgcctagggtcagagaa

SEQ ID NO: 11215 - DNA, 612 bp, Oryza sativa
  unsure (1)..(612): unsure at all n locations
  Clone ID: PAT_MRT4530_17460C.1
ggacttggcaacggctcagaggatgaggttggaaagcttaggaccataagcatagaagaagcttaacgagcagcacagcaagttacagtaaattggcgaccaggaacccatcagtgaactagcagcccatatatagtggctggatctgaacttttgtgggtcaggtatggaacatattcatgtattgcgcaggcacttctatgctatgctagctctgaacattgatgcctggaggtttgtttcatggcatgttcactgctagatagtagtagctgtgaaatcaatgtatggctattgaaattgatgcagacctggtactattgatgtctggtaccctggttatcaggccaagcgtgtcctaatcttgtcgagcgatgaacactatagtgtattttgtcttatgtacaatggaggtttgtcatactgaatctgtgtttgtactcaaccccatgtatatgtagaataccatgtaaagtaatattattaaagaatgtgtgatgtttgttcctctggacttactctcagtgtcctagatatgaaagggcggggggcctgccgcccgggctcagctatncatntctcatgccttgcatgaaaaaaaaaaaaaaaaaa

SEQ ID NO: 11216 - DNA, 409 bp, Oryza sativa
  Clone ID: PAT_MRT4530_17461C.1
ggggaaagcattcttgggacgataatgaaactatgctactgatcccgtcttcatccatcaccgggcacgtattgctaaaaaaagtgttcgataaaatactactagaaccaactggcaatccagccagcatccagaaaaaggaattgccacctccaccggacaaagccagaggtgcaaagagctatcgcccaatgggcaccacaacccctgttcagtcgatcacactcataactggatctgcccgcccagcacacgatcccagggtacaatttccaagaatgcccagggcgctgcacttatgctgagctcaacctttagtacctggaaattgcgcaaggacgttgcttgcttcccaaaacgttaagtgcattcagatgggcttgttgcagaatactgacattcatctcca

SEQ ID NO: 11217 - DNA, 852 bp, Oryza sativa
  Clone ID: PAT_MRT4530_17462C.1
atgccgctccttgtcctgattttcttcctagtcctcggtgtactttgccccgcggcagcggccaaagagcagttaatcttaaacgagttcaccagcacaaaccttcatcttcgacggcatggtgatgggctgctcgatcatgctgaccaacaacgtacacaaaacaagcaagggccatgtcttgtactggtgcctgccacaagatgcccaatagcacgggggatgcttgcagtcctttctccaattaattatgccttcgtcatcatgttcgaggaactgagcaaccacggcatgtgctcggctccaatgccgccattgccgcggccggctgctgcatgctcccggatcgatgccgatggcgtcttggtgcagctcgtcggagttcatcggctggaagataagaaaggaggaatgaagacggagagggaggagggccggcgagctcgcccactccgcccgacgctgtgtgggtgtggcgaggagaaagcaggagatcaggaaggagaaaggtggaaggagaggaggatgacatgttttgacggtgaggttagtgaaaggaagccgagaggtagcggctgtggtggccttggcggtgagattagcagcaagaggcagcgcagtgcagcaaggtgcaagggtggatccacacagagctcaagtggtgcacaccacacagggtctggctccgtgtgttatcccctcctggctgggctgccctctctccccctcgtggcagctggctccaggattggtggtcattctccaggagtgtttgaaaaaacagaaaacgagaaaatcgaggagatacgtaaaacgagacaagctattaacgtgcgattaattgagtattaa

SEQ ID NO: 11218 - DNA, 654 bp, Oryza sativa
  Clone ID: PAT_MRT4530_17463C.1
atgggcagacaggagaaggcgggcggcagcgttgcgccgctgtgggcctgcggcagcggcaagccgccaagccggcaaccggccgagcggccggcgtccggcgaggcggttgttgacgctgccaggagactaggaataccaaggagtcgaagccgctgcgaaggtgctcagccgatgaactccgacgagctgcaccaagacgccatcggcatcgatccgggagcatgcagcagccggccgcggcaatggcggcattggagccgagcacatgccgtggttgctcagttcctcgaacatgatgacgaaggcataattaattggagaaaggactgcaagcatcccccgtgctattgggcatcttgtggcaggcaccagtacaagacatggcccttgcttgttttgtgtacgttgttggtcagcatgatcgagcagcccatcaccatgccgtcgaagatgaaggtttgtgctgaggagagggtcctcgatcctccggtcgccgccgccgcagtcgtcttcgccccggacatccgacccaggcacagcgccctgctcccgcgttgcagccaccgccacctcgtcgccgaccgccggacctcctcctctcccgcctcacccctggtgacctcctccccatccgccggccagcttgcctag

SEQ ID NO: 11219 - DNA, 680 bp, Oryza sativa
  unsure (1)..(680): unsure at all n locations
  Clone ID: PAT_MRT4530_17464C.1
gcaggatgatgcaatacgtaatctattcagtgcaaaaacattccatgaatacagtgcacaaagccttatcaccttcctggtatgctctacttggtgctgcttcctttcttggtggctcaatgagaatgactgtatctttatgtgttataatggttgaaattactaacaacttgaaactcctgccgttaatcatgcttgtgcttctgatttctaaggccgtgggtgacttttttaatgaagggctgtatgaagtgcaagcccaattaaggggcatccctttacttgactcaagacccaaacaggttatgagaaatatgagtgcgaaggatgcctgcaagaatcaaaaggttgtgtcccttcctcgcgtttcaagaattgttgatattatttctgttttgcgaagcaacaagcataatggcttccctgttgttgatcgtgggcagaatggcgagtcacttgtcataggtctgatacttcgtagtcacttacttgtacttctgcaatctaaagtagatttccagaatagtcctttcccttgtggacctggtatactcaacaggcacaatacaagtgactttgttaaaccagcatcgagtaaaggaaagtcaattgatgatattcatttgacagaagatgagcntagggctgtttttggatctcgccccattttctaatccttc

SEQ ID NO: 11220 - DNA, 439 bp, Oryza sativa
  Clone ID: PAT_MRT4530_17465C.1
ctagacggttttgatctggttttgactaagggtggcatatgtggtgccgaagtagcatctcccagcatctagtgatggtggcggcagtgaggagtgcccaatagtggtagcagcgtcgacagctacgaggagcacccagtgacgaagaacgagcccaccaatggggctcgaggagggcacggctctagccttccaatctgtccgcttctcctcaccgcctctacctccactgaccgccatcgcctccgcctccacagaacacttgaggaagagaaggcgaattggagaggagtgcggtggtggtccccgatcagtagctctgaggcagggtcttgtcgccgccttcacctcgacctcccatatcaggtccgggatgcgcaggagccgcatctatttccaggatgaagacaatggcaagaagatggtgcctaacttctag

SEQ ID NO: 11221 - DNA, 2773 bp, Oryza sativa
  Clone ID: PAT_MRT4530_17466C.1
atggcgcggctggcgtggacgcggctccccaccgccgacggggcgggggcaggggcggaggggcccgggcccgtccctgcctccccctcgtcggcagggtacgagctcttcgccggcggcgtcgagagcctcgactacgaggtcatcgagaactacgcctaccgggaggagcaggcgcagcggagcaagttctgggtgccgtactacgtcatgctcaagtggctgttctccttgctgatcggcgtcggtactggattggctgctatttttattaatctggcggttgaaaacttctccggctggaaatatgctgcaacatttgctataatacagcactcgtattttgttgggttctttgtgtacatagttttcaatttagccctcgtcttctcatctgtatacatagtaacaaacttcgcaccagcagcagctggatctggtattccggagatcaaaggttacttaaatggagtggatacacatggaatcctccttttcaggacattagttgggaagatctttgggagcattggatcagttggaggaggtttggctctaggaaaagaagggcctcttgttcatactggggcatgcatcgcttctcttctgggacagggtggatcagcaaaataccatttgagttctaggtgggtacggatttttgaaagcgaccgagatcggcgagaccttgtgacatgtggatgtgcagctggggttgctgcagcattcagagctccggttggtggggtactatttgccctggaggaagttacatcctggtggcgaagtcatcttatgtggagagtattctttacatctgctgttgtggctgttgtggtgcgatcagcaatgaactggtgcaagagtggaaagtgtggtcattttggatctgggggtttcataatctgggacatatctggaggccaagaagattactcctaccaagaactattgcctatggcaattattggtgttattggtggacttctaggggcattattcaatcaacttaccctgtatataactaaatggcgtcgaacatatcttcacaaaaaggggaaacgagtgaagttttattgttctaaagataacgaatacaacgacctagcaaccattttcttcaatactcaggatgatgcaatacgtaatctattcagtgcaaaaacattccatgaatacagtgcacaaagccttatcaccttcctggtcatgttttactccttagctgtcgtgacatttggaaccgctgttccagctggtcaatttgttccaggaataatgatcggatcaacatatggccggcttgttggaatgtttgttgttaagttttataagaagctaaatgttgaggagggcacgtatgctctacttggtgctgcttcctttcttggtggctcaatgagaatgactgtatctttatgtgttataatggttgaaattactaacaacttgaaactcctgccgttaatcatgcttgtgcttctgatttctaaggccgtgggtgacttttttaatgaagggctgtatgaagtgcaagcccaattaaggggcatccctttacttgactcaagacccaaacaggttatgagaaatatgagtgcgaaggatgcctgcaagaatcaaaaggttgtgtcccttcctcgcgtttcaagaattgttgatattatttctgttttgcgaagcaacaagcataatggcttccctgttgttgatcgtgggcagaatggcgagtcacttgtcataggtctgatacttcgtagtcacttacttgtacttctgcaatctaaagtagatttccagaatagtcctttcccttgtggacctggtatactcaacaggcacaatacaagtgactttgttaaaccagcatcgagtaaaggaaagtcaattgatgatattcatttgacagaagatgagctagggctgtatttggatctcgccccatttctaaatccttctccttatatagtgccagaggacatgtccttagcaaaggtgtacaatctcttccgccaactaggattgcgacatatatttgttgttccacggccttctcgtgttgttggattaataacaagacaagatcttttacttgaggagaacggcaataatgtgacaactgagctccagtcgactagtgtaaggggtcagctgaatggcaaaatgctcagtggcagcacacatctggggcatcctcttcttgatagtattgtggttgaggagtaaatacatgtgaccataatctctcaagataattttgaccgcaagcagctaacctgtcactgcatcctggggcatgtttagctcctcgaacaaggcggccctggactctggctgatgcaacatgaattggattctgcaatcctatgcgacagaaagggtagcaatgagctatcctcatgtagtggctaattaggtgatttgccccataccttggatactagttaggtgattgtaagttgtaactcgtagaaatgtttagatgtttatacccatcatccgtgcataccacgagaaaacatctgattatgtttacacaacgattttataggattcatttttctttacaggagtttgcgcatgtaaataccttttttttttcttaacgggaattacagggaagccccagacctgaggcatgagttccttaaattgttgcccccgtttgcacaaatttatgttcgcgggtttttatctgggcatttgcttgtgctagctatttaccagttaaaatgctcataaggagcttcaagcctgcactggaggcaagaat

SEQ ID NO: 11222 - DNA, 879 bp, Oryza sativa
  Clone ID: PAT_MRT4530_17467C.1
atgtcgcagaagcggcagctggaggagagcagcggtagcagagcggaggcatgggggcccctggcccagccaaatctggggctgggagctcgtcgccgccccaccgctacggggagcccaagcatcagatggatgatcacggaggtgatgcagaaaagcagcattgaaaagttgttcatggctattgagcccctcatccgaagaatggtgaaagaagaaatcgagtcagcgtttgcaaatcatgccattatgatggcaagaactgtcatggacgttgttccacctacatcgaaaaatttccagctacagttcatgactaagctttcacttccaattttcactagctccaagattgaaggagagagctccttaagcataactattgctctagttgacactgttaccagagaagttgtagcatcaggcgatgagtccctgatgaaagttgaaatagtagttttagagggggattttgaagatgatagtgctattcagcaaaatatatggatatattggccctcttattctcaaaccatgcagatattgggcagtggtatgtcaacaaagatgtgggaggtcacagttgagcattcaaaaacttgtattctcactgacaaggtgcatttgtactatccacacagcctaatcaaaacagctgtcgtgttcaatgttgttggagaagtgagagggctaatatctgagaagttcgtttgtgctgatgatcttatggaaaaggataaggctgaagcacatgcagctgtgaagcaagcgtatgaaaattggaagaatgtttctactgatggttttggtttgagccagtcaagcataccatcagctgacattggatccttgtcaactgggaactgcagaaagcaatga

SEQ ID NO: 11223 - DNA, 1085 bp, Oryza sativa
  Clone ID: PAT_MRT4530_17468C.1
ctagtggatccccgggctgcaggcgcaagcttgtgtactgtcaagagtgagtagtagagtttgtagtgacaacgagatgagatcaatcctctcactgtgcttccatttggcgcttgccattgcattggcggcaaatgttcctgatcacattgccaatggacgcgtgattgaagctaaatctgatccaaagccagcagatcccaatcctaaacctgacccaacaccaaaaccacaaccagagacaaagcccagtccacagcctaaccctcaacctaacccacagccagatccaaaaccatcaccgcagcctgacccaaaacctacaccacagcctgaaccaaaacaagatcctaaaccaaacccacaaccggatccaaaaccatctccgcagcctgacccgaaacctacaccacagcctgacccaaaacaagatcctcaaccgaacccacaacctgacccaaaaccaacgccgcaacctaacccaaaacaagatcctcagccgaacccacagcctgacccaaaaccaacgccacagcctgacccgaaacaagatcctcaaccgaacccgcaacctagccccaaagctgacccaaaaccaaatccaaagcctaagccacaaccggagccgagcccaaatcctaagccggagccaaagcctgaacccaaacctgagccaagtcctaaccccaagccaaatcctaatcctaagccggagccacagcctgatcctaagccagaacccaagcctcagccagagccatctctgccaaagccaccacctctttcaccagcaatagctataattgtgcccgggaactgagtagactttttgctacgtatgattccgcatagttttggtatgtactattgctctagtgactatctatgtgtttgtcgtgtgttgttcactggtgtatgtgtccatgtggctatctatgtgttttcttaatgctgttgcatctgagcaggcgtgcttcttataataaagcatatatatgcacgtgtgttatgtatgtgcgtacatatataccatgaataaaaagagcatgtatccctgtgtgtcactaaaaaaaaaaaaaaaaaaa

SEQ ID NO: 11224 - DNA, 153 bp, Oryza sativa
  Clone ID: PAT_MRT4530_17469C.1
atggggtgcaggcgtgagcacgctagctgggatgcgatgcgatgggggtcgaaggagcggatgcgcgatcttgagattcttgacggtgcggccagcaggagagggggagaggatgcggtgcggacggggatgcgatgcagtgcagatggttga

SEQ ID NO: 11225 - DNA, 1045 bp, Oryza sativa
  Clone ID: PAT_MRT4530_1746C.1
gctgcaggaattcggacgaggacagagcgaattgctttccgctacctcacaagccaaaagtatgcaggtgatgttgcccaactaggtatcattcgggcaggcaacaccatgaaagtacagaccgttttgcagccaagaaaacatttagtgccgttccatgttgaaggagggcagccttcctatctgatagttgctggccttgtcttcacacctttgacagaaccatttatagaggaggagtgcgaagaaactctagggttgaaattgctggcaaaggcacgctattctctatcaacatttgaaggggagcaaatcgttattgtatcacaggttttggcacacgaggttaacattggctatgaacacatgggcaatcaacaagtcattaagctaaatggaaccgtggtaaagaatattcaccatcttgcccaccttgttgacaactgcaaagacaagttcttgacgttcgaattcgaagacgacttcctagttgttttggatcgggaagaagcgactaccgcatcatcagatatcctaaaggaacatgcaattccctctgtaaggtcatctgatctatcagagccatatgtcgacacagagcaagaaatccaaaaaccaaacgatgattttggtgacagccctgtcacaaactatgaaatgggagttgactgtctcctctgggcatgaacagccaaggatggaatttgaatttcagttcaaacagtgacaatgccggtgaatttcatgcatctggatggcaggaaagagcatttccccaccatgttgaaatccactccatagaggcgaagccggagtcatgtttgttagtgtaggaagttcagagttatgttgtaccttagaaaaccacacaaatgcttgattcatcatcaatttttttaggggatgggactatgggactgtgggagattgggggagggctgtagaatttggcagggtgtaatcctgtaattttttgggcatgcaataaatcgtccagaaattttgttgcttttaaaaaaaaaaaaaaaaaaaaaaaaaaaaaaaa

SEQ ID NO: 11226 - DNA, 114 bp, Oryza sativa
  Clone ID: PAT_MRT4530_17470C.1
aataacttacccgtgggaaaaagaggtcgggccaacttttgaacttgggttcaatgttggggtcctcctctacatggggcacgagaacaatcaaaggctacacccgttcctgaa

SEQ ID NO: 11227 - DNA, 282 bp, Oryza sativa
  Clone ID: PAT_MRT4530_17471C.1
atgggcaaatccactgctatcggccctttgaccggtagatccaggttgctgccgccatcagggtatggaggggcagtggagaaggttgtggaggcgcagggagaggtgaaggcggcctcagtgatggcagcggctacaacgacgacgagctgtggagactcggcgactgcgacagcaacgacgagctacaatgacaacgtcaccggcagacgacataagcacccgttggcaaaaaatctaatttttgcatgcgagtgcaccacccacatggaaaaattatga

SEQ ID NO: 11228 - DNA, 285 bp, Oryza sativa
  Clone ID: PAT_MRT4530_17472C.1
caacattctttgtggcttggcaatatgatatatttttttatgcaattttatgaatggagtatcataaagggttaagtccgatttacccccctaaactcttgcgaaagtacgctgtacccccctaaactataataccagacataatacccccttaaactatttaatccagacacttaacccccccgcgaccaatttcggctggttttacccgtttgatccgacgtggcacatccacgtggcaaatgatgtggcaataacataaaaatacccctcccctcccacaca

SEQ ID NO: 11229 - DNA, 298 bp, Oryza sativa
  Clone ID: PAT_MRT4530_17473C.1
atgaaacaaccactggcaggaaatttgtaattcatttaaccgggcaagttcagcgttatatgtagcacaacattagtggaccgcaaagaagaaagacttatactccataacaaaaaccgcagaggtaaaacgccctgatatgatgcatgcttacctctggtggtgaatgaaattatctgagctcattaatgagcagattcttatacctgactaggttatggatggcctcgttctatgccttgtcgagctcaagaagcatagccgtgaagactctcttaatatcatgagagctggaaac

SEQ ID NO: 11230 - DNA, 270 bp, Oryza sativa
  Clone ID: PAT_MRT4530_17474C.1
atgcaggacgcagcccgggaggccttctccgacttagctctattcaccgagctgagttggcgagtaccgatagacaacttcgacgaggaggctctgttagagatcgacgaccagcagaggcgtgtgggacagttagagaccgaggtccatggtgaccaggttcagcagctatctgatcagtgcaacgatcgccgcgggatgatggatacacttgaggagcagctgagagaaagccaggagcacgtcagccaacttgaggagcaactatag

SEQ ID NO: 11231 - DNA, 483 bp, Oryza sativa
  Clone ID: PAT_MRT4530_17475C.1
atggcagggctacacaagaccgttggagatgaccttgctcgacatcgacatcttcatcgagacatggatagtgatcaacatgatgctaatgaggaagtgcataatcgcgaaaaggaggagagagacttgaatgagccgccattcccattgttcacattcaaattcgatgcacctccatcatcaaaagagcaaatcacaggtaatctaaatggtgctgaaataaatgaagatcaaccattagtggaaccaattgatgagatgcctttgtcacaagttgatttacttgctgttccttgtgataaagaagagttgtgtgataatgcttcacttatatccataccacaactagtgaatgaacatggtatttctagtgtttctttgtgtgctgattttaagcatgttgttcacattgctaatgaagttgaggaacgaatagggttgatttgcacgggcaagatcaacaacccacaaagaggtgtatag

SEQ ID NO: 11232 - DNA, 1950 bp, Oryza sativa
  Clone ID: PAT_MRT4530_17476C.1
ctagcttccgggagtgaacttcatgcagattggtggcttaaccttagcaagggaaagcagggaagaagggaacatccatataccatctccacaaataaaaccagacgcaaccgctggcactagcaacgcagactccttgctgttgatcttgtgccaggcaaagactatcaggcttcccacacacatgtcaatagcaaaatttgcaccaacaaggaatggcacagccattgccgtcggcaggggcacataatccctgtacttgcgtggcaagaagtccctcataaggttgatgagcacagaaaatgcaaagaagccagcagacagctcaagacaatgctttggtagtgcagaaaagccctcgacgccaagaatggccatgtttcgaaatatcagggcatatggagccttccagtatccatcagggttcccaatatcaaatgctttgtagaagagcaagaaagtcagtggagcgattatgcagcccatggctgtaccaatggcctgcccaacaagcatggatcttggtgatgttaatgtcagatgaccagtcttaaagtcgtgcatcaaatcagcagagacttgtactagctgcttcactattccacaaccaacaagaccagcaatgacaccgttgtccctccctccccaagctgcaaagatgaagagagcaatcttgccatagttgtagctcatgttcatgtcagttagcccagttccataggcattggagaatcccagcacaggagcaagcacaaaggctacaacaacatagtaccacttcacctgttggaacattatgggtatcgcaattaccgcaacaatgctcagtaaggcatatccagcatacgctagccagtttggaatatagtctttgttgaagaactcgtcacgctgcatatcagcaattacaaatgtatcctcatctgtcgctttcttagcatgtctacgattggatcgttcatgcaggctcttagcagtgatacctgttacttttatgaagtggtaaaggccatcccccatgatcaaagccttttgtatgctgatcagtggccacattatcccccaagaaagtattgcgccaaagagcgcggagaggtttacaaggtgtgagcagatcattcccgcaccaacatatgtgaggctgaaatcaaaatagaacgtttgtttccaagcctttagaccaaaggtagggaattgaagaaacccacaactctctccaccagtgtagaaccactggaagaagctccataagaggctgatcccaaagcaattcagaaatccgcggacttgcttctttgcactattttctccttgaggggtatggaatccgtttataagaacagcagttgcagtcccacttggataggttaacttataatctatgatcaaagcctttctgagtggaagcaagttaaggagcccaacgaagctaatcgcaaacaggaatccggtcatccacccgaccccgggctccttgtagctccccggcgagttgcccggcgtgctcaccccggccaactcgtacgtcttcctgttcagagccagcagcgacgacccgaacccaccgccgaatcccatggtgtagcaggcgacggcgcaggtctggacaacggtgttctcctggcgggtgaaggggcggcgccgggaggaggaggaggcggcgccgccgccggggaggaggagggcgggcgcgcgcgtccagccgcggagcgcgaggaaggcgaggagcgcggcggagacgttgagcgtggggatgatccccgtggtgagcgccagcttcatgatgatgacggtgtagacgaatccgatgagcagcgccgccaccatgccccgcgccgtcacctgctcgcgccacggcggcacgcgctcggcggcggcggcggcgccgtcgtggtccgactccacgtcgccggcgtcgcacctctctatctcgggagcggcggcttccat

SEQ ID NO: 11233 - DNA, 304 bp, Oryza sativa
  Clone ID: PAT_MRT4530_17477C.1
tctttatataccactcgtttcctccacaaagagggagggaacaagggaagggtgtcgtccgccccccaccccgatctgcctccgccgctccgctcctccgcgcctgcgaaatctaccaacgctaactcagtaagatgggtgccggcggcaggatgacggagaaggagcgggaggagcagcataagctgctccggcttcatgtccttctctcccctctgtcactggaagttcagctacttcaagatcatggactccatgactccttacttctccccccttactccctacttccatcatcttcctt

SEQ ID NO: 11234 - DNA, 486 bp, Oryza sativa
  Clone ID: PAT_MRT4530_17478C.1
tttggaaggtgttgactgaagtcacagcatttggtatgagaagggactcgaagattcacccctaaaagtggattcaagtataaggtggtcaagcactgaagctgctggatgtcagtaggtcatggtatggactctctatacactttattgaatagcttcatgcctgtatatccattggtttctattcatcatatgtcaatactctagctgctgagggccatgtgtggtcctgatatcttgtatatgcaagtgaatgttctcactattagcttattttttattcttattgtaatccaatctgcagtagtgtggcacagcatagctgggtgaattatgtataggaagttcgcatgttatgagatgtccttctgttatctgggcccatgatattggttcagaatagggcccccaaaattctgggtattttattttcaagctaggtgcgctgttgtttgttttcaagcattgtgcgtatgcactatgcac

SEQ ID NO: 11235 - DNA, 303 bp, Oryza sativa
  Clone ID: PAT_MRT4530_17479C.1
atgcgatcaatggcaatgtggcttttacaatgtcgtgtgctttccggccgtctcggtccaactgcgacggccggccgcctcttccgccgtgctggccgcgccgcgatctcgcggcggcgccggcagcagctagcagcagcagcagcagccaagaactgcacacgcagccagctaccaacagcggggcaggtggtcgctgatttgtcgtcgaggtcgcgtcgttttcgcgcatctggcgcgcgggcagggcaccgcgccgtcgtcaacgttaaccgcagagcagcggcggctacgcttggaggc

SEQ ID NO: 11236 - DNA, 1916 bp, Oryza sativa
  Clone ID: PAT_MRT4530_1747C.1
ttggagatggatgaagtcgggcgtcgatggacatttttaggacaaatgaaggctacacgagctgcggcccggtagtcgagatgtcatggcacagggccggtgtcctgctgctaggggctcagtcctgcctgcctgtcccgggggttccggccgtaggtgggattgggtcggtactcttgtctatggctaggatgggttggaaactatgtcacgtcttccgtccgtataccgtggtggtatgtggcacgtggtcacacgtgaggaagatgtgtcttgtggcacttgtgggtgtgtcttgttgagtacggtggttgtactcagtcttgctcaatttttcccaaacccagaagaggagttcctggaggatgaaggctttggtgtctagctcgtgcctgccgtcaagtgcctgtggtcgtcgccctagtcttccgctgtttgtcgtttgtctttgtgtgtgctgggccttgcctcctgggacaaggattaatgcacgcacgtaaggaacgcccgttgggttatttccggtcgtgacaagcagtcgtgtcatgggcttagcaatcttagaaaaattctctataaaccttcgataatatcctgcgaggcctagaaaactgcgaatctctgaaactgtctttggttgcttccaattagttacggattccacattactaggatcaacggcaactcctcctgctgagatgacgtgaccaaggaacttcacttcagacaaccaaaattcacacttgctaaacttagcatacagttgatgttctcgtagcttctccaatgcaaggcgaagatgttcttcatgctcttctttggttcgggagtagataagaatatcatcaataaagaccaccacgaacttgtctaggtatttccatttaaacagcgcttttattcatcaagttcatgaagaaagcaggggcattggtaagtccaaaagacataacagtacattcgaacaacccatacctagtggtaaaagctgtcttaggtatatcttcctctttgattctcaactggtgatatcctgatcgaagatcgatcttggagaaaacaagggcacctttaagctgatcaaacaaatcatcaattctgggtagcggatacttattcttgatagtcacatcgtttaatgcacgataatccacacacattctctgggtatggtctttcttttccacaaaaataactggagctccccatggagatgaactcggtctgatgtatcccttctgaagcaaatcatctacgtgcctcttgacttctgccaactcattggctgccattctataaggtctcttatggatcggagttgttcctggtaccagatctattctgaactctatatcccttttaggcggcataccaggtaaatcatctgggaacacatcgggatactcccggactataggaatctcttccaaagttatctggttcagtcttgaccttaaagactcagaagacaatgcatgaacagttacaactcgaccatcattgctggtgagagttacttttctgttggcacagtctatcacacctttatgtctggctaaccagtccatccctaggatgacatctaggtctttggattccaaaatcacatctggagcatcttgagcttctgcagcagcgacatgattaacacgggcctttgatgctggtacggtagagttgctctgggtagggacaaccttcatgcgtcggggcttcggacacttgtcagcataatgtcctgggtctccacagttgaaacacaccacgggcttgctgccttgctccctcttggcaggttgttgctgtgttggagctgcaacagggcgtagagcttgattgcggatgttgttgccaacattgttgttgaagaactgacgctgcggacgaacaacagacgaagaacctccctgtggcat

SEQ ID NO: 11237 - DNA, 236 bp, Oryza sativa
  Clone ID: PAT_MRT4530_17480C.1
ataagacgccgcccaactcgcgaaggcggagggggaaattaagagagaaaaagagaaggaagaaaaaaaaaataaaactcgcgcacagcaaccgaatcatctggctcctcctcaagtagtctagacctcctctcttctccggagtctgcgtgcgaacgaagcagaggagcttcgtggccggccgggccgccatggagagccgcaaggaggaggagccccattggggaggaggggcc

SEQ ID NO: 11238 - DNA, 3090 bp, Oryza sativa
  Clone ID: PAT_MRT4530_17481C.1
ctacctcggttgcagcttggcaaggaacctgagatcgggctgctgcttctggaggacaggggtgacgcgcgccagcagcgacggcttcttggccttggccgggaacagaaaggactgcaggggcaccttggacttggaggcgacgcgcgtcaatggcagcggcggcggggttgtggctccggctccggctccggctgcaggtccgtcggcgtcaggcagggtgacgcccccgtgctgcagcttcttctcgatctgggcctggaggcccttgacgtggtcctggccggcctgcagctcgtcggaaacccggttgttctcctgctgcatgttgagcacctcgccctggaacttggccgcctggtacgacgtgaactctcctcctcctcctccttgttccagtgccgccgtgatctcctcctgcacgtcgcacagggccgcgaacctgcactgcagctcccctcgcagcatcgcgttctgctccgaccacacctgcagctccgtcttgagcgccctcagctgctgctcctgcttctgcttctgcttggtgtcactgttgccgtcggtggccgccggctgcagctgctgcatcagctcgtcgtgcttgcgctggaactcctgcacccgctgcagggacgagctgaacttcatccagaactcgaggttctcctccagcagcgtgtcgatgtccttgcgtaacttgttctccagaggcgacgacgatgtggccaccgctggcaaccgcagctcctcagctttcaccttctcgctctcgtcgccttcatggatggtcgaccccattctgatcatcctcgagatggacgacaggctctgcttcctgtgatgtcccagcgaatagctcggcgtccttcgatggccgcgccgacctccgctgctgtctcctcctcctcctcctcctcctgctgctgccgctcctgcctcggatgagccactgctgagcagctcacgcagcgaccggatctcatgcatgcactcctggttcgtcttctccacctcagccagcctcctcttggcatccttgttttcctcaaggagcgccctgtactccgccaccaggataaccttcttctcttcttcaaccccttctccttcttgtcctttcttctgcttccgcatgccatcggggtcatccactgcagctggagcttcatcgtcacagcctcccaggtcgtcggaggagatgtgacgcagccgtaccaacgaccctctctcccgcgaacatcctcctgctttctcctgtccaacgtccaccgcctgggcctcctcctgcgtcgctgttgatttacccgcaggatcaacgtcagctgttgatttacccgcaggatcaacgtcatcagatgcagcctccgtctggacctggggttcagcaacatcatctatgcctcctgcatcattgtcctcctcctcctccttcccatccgccactgccaatgtgcctcctacaccaccgtgttcagatgactgcaacatctctgatataccactcagtctgcttatggcttcgctgaagttcgagcggatcgtgctctcgtctttgtggaagcagctttcaagagcctgcactctcaccagctcctcttctagcttcttcagcttctcatttactttatctgggtcactcacattctcttcctccagactctgcagacaactctccaactcgctgttctctcgacacagcctgtctatctgtgagctctgcgatgacaccataagctccaaatcaaccaccttgttaacaagttcatcgatatgttctgtgatttctgccaccgagatgctgccgtccctctcaaaatgttccttgatcttctcgagcactgtctgcgtctcaaattcacccagtttgatatgctgtacctcttccatctcaaagccatgattcttcctcacgtttttatcacaaggatctggagaatccggcaaggatttcccatgcccctccattacagccttgagcttctcacgtagaaccttgactctttctgactcgcccattgcctggctagcagatgtcttccgctgttcctgcagtttgacaatggtgtcttcacaagatttaagggctgttgctgtcatcagtgcccgggcttcatcatcctcaatcaccgcactttcatcaaacttatcttggaaatggcacacctgttcctgcatgtcattgatttgcttctcaagatcccagtactttgcaatgccactctcgtacgagcttttgatgaattctttctcggtctgcatcacaagtatctctttctgtagtctgctgatctcctcccgtgcgttgtccttgtcgattggagctgacgtcgtgttcttgttcatcgaccctgcaggctgctctcctcctttcttcttcttcatcaatccgtcaacagtcgacttgtgaattttacgtggatcgactggggtaaatgccttggggatattgtcatcttcctcttctagcattgcatactgcacttggtcagggaaagctgtcgcgatggtatggtttgctttgtgcagttcccctgaaatgatgtcataccggtcagctagacccctgtacgccctgtatacttcttccacttgagtgatcacctccggccgccttttgtagtacatctctgccctttttgaaaaggaatcagcttcctctccaaggagtaagagcatgcacttcactctgtgttccatatcttggagatggctatcaagccatttggactgcttggtgcggatgtggctcgcccaccaccatgaatacgcattgctcgccgcccgctgcagcatcctgcctcctctgtctcttcctccttcaccttctccaaaatccaaagcattagtctttctttccaaaactcggagctcgccgacaagtagatctttggccatttcttttctgaatggatgcatgctcctagaggcagggccatcaacaatttcaagttgctcaatagctgcagaatggccctgaatcatttcagcgaagtgcaagagcaacctgcggtgagcatggatttctctctccatattcttcaaaggacatctggcaagcctaccatcactttcagcagcctccatggccat

SEQ ID NO: 11239 - DNA, 2787 bp, Oryza sativa
  Clone ID: PAT_MRT4530_17482C.1
atgggcgtcacccgcgcgcacatcgtgaagaatgacgcactggaggggatgctgggcgagttcgtcggcggcggcaagggcggcgggaaggcggggcgcgcggcggcgaggcactcgtcgcggctggtcgcggcgctgacgtgcctccagctcgcgttcgccatctacgccaccttcctactctactacatgagccccgccgtggacctccgcgccaagccggacttcgcgtgggcgacgcgcatcgcgcagcactggaagcagctcatggcgcagcccgacggcggcggcggcggcatggcggtgtcgccggaggaggtgtgcgagcacgagagcatcgacttcgagcagaagaagtcgacggacgccgtgatgatccgcctcaagcgcgagctctacgacgaggtccgcgacttccagcgccggagcttcggcgccgagacgctgccggagctcctccggatgcgctcgcggtggagcgccgccgccgccgccgccggcaatcagccgcgggtgacggtgatcctgaaccacttcaagcggcggacgctgtgcgcgcagctggacacgctccggcggcagacggtgccgttccaccgcgcctgggtgctcgccttcgggagcccgaacgaggcggcgctccgccggatcgtcggcagctacaacgactcccgcatcagcttcgtctcctccggccacgacttcaagtactacggccgcttccagatggcgctgcagtcggagtccgacttcgtctacgtcctcgacgacgacatgatcccgggcgcccgcatgctcgagatcctcacccatgtcgccggcaccgacaagtaccgcaacgccgtgctcggcagcatcggccgcatcctccccttccgccagaaggacttcaccttcccgagctaccgcaagttccgctccaaggaggccggcctctacctccccgacccggcgtacgacatcgccgtcgaccgcatcgtgcaggtggacttcctctcgagctcgtggttcctcgccgccgacctcgtcaaggcgctcttcatcgaggtccccttcaccttcatgaccggcgaggatctccacctgagctaccagctgcagaagtacatgggcgccgggtcgttcgtgctccccgtcgacgccggcgacaaggagacgtggggggacagcgagcaccgcctcgcgtacgtggcggagacgacggtgatcttcaaggacatcgtgcaggtgcgggacgagcagtggtggcgcgcgctcacctccggctacgtcacgcagtgggcggcgatgcacccacagaaggtggacgcgctcttctacgcgcactcgctcggcgaggtccgcgcgctggcgccgctgctggagcggttccgcaccaccgccgggaggaaggcctacctcgtcgtctccggcggcggccactgcccctgcgaggaggcggcggcggtgctcaagtggcccaaggttgtgtgcaaggagaggcgcttcaagatcttcgacctcgccgtcggcgcgctctccggcccctcccactccgacgtgcccgtcctccacgccgtctactccagcatgcgcggcatcgtccgcatgcacaacccgagcgtcatcgtcgccgtcgccgacgtcgactccaagatcaaggacgccctccgcatggccgccgacgccgccgtcaaccgcaccgccctcgtcctcctcccccgcaactccatctccaaggttctctggatggccaacctccgccccacctcactgcccaactggaacaggatgcggatctcggtgaacatcatcacgcagaaccgggccaagtcgctgcggcggctgctggcgtcgctgcgggacgcctactacgtcggcgacgaggtgccgatcagcttcaacatggacagccgcgtggacgcggcgacgctgaacgtcgtcaacgccttcgactggccgcacggcggcaagacgctgcggcggaggatcatccagggcgggctgatccgcgccgtgagcgagagctggtacccggcgaccgacgacgactacggcctcctcctcgaggacgacatcgaggtctccccctactactacctctggatcaagtacgccctcctcgcctaccgctacgacccccaggtctctctccctgagctctcctccatctccctctacacgccgcgcctcgtcgaggtcgtcaaggagcggccgcgctggaacgccaccgcgttcttcggccgcagcaagaaccaccaccccaacaccccctatcttcaccagcttccctgcagctggggcgccgtcttcttccccaagcactggcgcgagttctacgcgtacatggcggcgaggttcaccgaggatgccaagcagaatccagttcagatacctcggtcccgcaccaatggctggcaggcgtcttggaagaagttcctcatcgacatgatgtacctgcgtggctacgtcgcgctctacccgaacttccccgaccagagcagcttctccaccaaccacatggagcccggcgcgcacatcagcgccaagggcaacgtcgtcaagcacgacaagagggacttcgaggtgccgctcgtcgccgacgacttctcgccgctgctccccgccgggaggatgccgccggcgtccaagctccccgtgctcaacctcttcaaccagccggtctccttcaaggcgctcaaggccgccggcgccaagctccgccaggacgtcatcggctgcgccgccacgcagctcgtcgccgtcgaccacgtcaccggcctcccaaagaactgcaccgccttctga

SEQ ID NO: 11240 - DNA, 544 bp, Oryza sativa
  Clone ID: PAT_MRT4530_17483C.1
tgaactttcaactgcagggtggactgagcactgatacgccacgtccttacccgacgaccagagggtggactggatacgccgcgtcctggacacgacgaccagagggtggactgatacgccgcgtcctgtcacgacgaccagagggtggactgatacgccgcgtcctggcacgacgaccagagggtggactgatacgccgcgtcctggcacgacgaccagagggtggactgatacgccgactcctggcagcgacgaccagagggtggactgatacgccgactcctgccacgacgaccagagggtggactgatactgccgactcctggcacgacgaccagagggtggactgatacgccgactcctgtcacgacgaccagagggtggactgatacgccgcgtcctggcacgacgaccagagggtggactgatacgccgcgtcctggcacgacgaccagagggtggaccgatacgccgtgtcctggcgcgacgaccagagggtggactgatacgccgcgtcctgacacgacgaccagagggtggactg

SEQ ID NO: 11241 - DNA, 313 bp, Oryza sativa
  Clone ID: PAT_MRT4530_17484C.1
ctaatttctagatcgacacctgccgcttctccttttaacatagcccacgcctccgtggacagtttttaatttaacacatcaatccacacccatacacttgaccaatttattgactgacaacatcataaaacattatcacctctatttcccagtttgtcattaatctttctttatgtaacaacaacctccaccattaccattattccgcttacaattcactagacacgtattttattattttatattttatgctttctttatcctctatttaaacaaaattaaattaatcaaaacacattatttatcttttttt

SEQ ID NO: 11242 - DNA, 1069 bp, Oryza sativa
  Clone ID: PAT_MRT4530_17485C.1
tattaaccctcactaaatgctggggaggataagatagacataattttcaggacctatcattggtagcaatattatctcaaatacattactagtaattctttacttcttcgtattttcatgacggatggattatgtactaaaggctatatttagggactcacttggcaatgactcatacgaacactaccaagctgataaattggatagcttgtggatatattccttatgtagcaagaaaacaccattctatgattactaggtgttgctcactaagcaacaaaactgaaaatcagatagctcactaggcaacacctagtagccattttatggttgcattttatgcctagtgagtatatgtaggcattggatagactcagtggatagttggggtacccgtatcgcgtgctcatctttaagtggtggtctatgtagtattagaggcaaagattttggggttttatatagcagtgactcatatgagcatcacacggaaaaatcagatacgtagcttttagatatgttctttctgtaacaagaaagtgctagtttgtggttaccaattattgtattgtgagcatgtaccctcgttgtcccatgataggtttattttttactcctcctatttatcctaaaataaattaattttttgagtaattattacattggagtttataaaaatatttaaaaattatattaggagtcgataaagtaagaaataattacattggaatttggtaaagtagggttattttaggtttttggttttgtattactacgtgtaagatggatggagaataaatttattttagaacgggggagtaacagatagttggggtattctaagcgcgtgctcacctcttaatgatggattgacggggcaaacagggacaactacaaggcaagggggggggggggcaagagtggagcatgaactgggttgcacagagcatgcggctgatctgcatttccttttccattgcatttttttggcccccccaaggatcaagggatttaacctccaaatctacaccttgctttcgttttccccagcatttagtgagggttaata

SEQ ID NO: 11243 - DNA, 441 bp, Oryza sativa
  unsure (1)..(441): unsure at all n locations
  Clone ID: PAT_MRT4530_17486C.1
cggcagagcttgtgtggtggtggagtatcagtgcgttagtcgtggattcgcttgtggtgagcggcgggtcgtgctgtctcacccctcaagggtgtttgccgggtgaaagcctagtcttggctcctttgagtcccgacggacggcggcggcggtttttccgtcgcttctcttcttgaagacgtcgttctggcatcccctagggggcgatctcgtctgtgtccctttgttggtctagtggcggtcggtcacgcttancggcggtcgatccggtgctagacttctcctgggtttgtgtgttggcgatgtcggtgtgtgggtggtgttttttttttcctttttcctggttacgaccctccaggttataatcttgtaatttttgtcctgctctatcaatagaatttcgcatcgtctcgtgcgagttgtttaaaaaaaaaaaaaaaa

SEQ ID NO: 11244 - DNA, 324 bp, Oryza sativa
  unsure (1)..(324): unsure at all n locations
  Clone ID: PAT_MRT4530_17487C.1
caagaacgggagnngaggtgtccganatcagcngccnccgccgntgccncctccatgccgtgcaccccggggccctactccggcgtcagcngnctcgccnncgtggctaaggcgtccgcgctcggcgtcngcatcatctacagcnccgtcaaactctccatcctcaaggcganaaaacctaacaaaaaggagcggcaaatgcncatcactgaaggacaggaacncntggcggtnactccaacggaangatntcntaaattctcattgtaccccctcntctatacgtgnnctggttnatgattgtggacctcttttctgaaaccc

SEQ ID NO: 11245 - DNA, 1679 bp, Oryza sativa
  Clone ID: PAT_MRT4530_17488C.1
atgccctccgccgccggttcacgggccacccccgatcacggcaacctcctcatgctcggcatcgagaccagctgcgacgacaccgccgccgccgtggttagaggcgatggcgagatcctaagccaggtggtatcttcccaagttgtccagaaagcacttgataatgcaaatgtgtcagaaagtgatctttctgcagtggctgtcaccgtaggaccaggacttagtttatgcctcagagttggtgttcacaaagctcgaaaaatagcaaaatcatttcacctgcctattgttggagttcatcatatggaggcacaggcattagtttccagatcaacagatgatattcctatttcatctgctacaaaagatgacagacaaataagggcgaacattgctgcctcttttcagttattaaaggttgtttcaggaggcgttgcatcaaaccagtatgtcagaactcatttgaatcagattgctgagaagaatggcctacagctcgtatgccctccaccaaggctttgcactgacaatggtgtcatgattgcttggactggtattgagcatttcattgcaggcagatttgatgatcctcctgctgttgatgagcctgatgatttgcagtcccaagtaactgcatttggcactatagttgaaggatcagtgcccgataagaaattagaccaaagtgataatgtgtgcagtgttgcatctcctttgggcagagttgcttctcctttatttgcatccaaagcagctgtttgtgatgtgccatcaaagagcgcgagcacacacatacccatgccgctaaacagtcttgacaacaagtgtcccctgcagtctgaaagagatttcaggaaaagaaagcaaacaggaagagtacaagatacagcagaggatgaaggaaaagaaaaagaaacggagttacgtcagcagggcgtacccaaattcaacttgcaggtactagcaccaactgtttgaagttttctgatgttgacctctgcagtgagttgctgttttacatttggaagaaagatgccaacgagcagttgaatgggcatggaagatggagccttctattaaatactttgttgtttcaggaggcgttgcatcaaaccagtatgtcagaactcatttgaatcagattgctgagaagaatggcctacagctcgtatgccctcccccaaagctttgcactgacaatggtgtcatgattgcttggactggtattgagcatttcattgcaggcagatttgatgatcctcctgctgttgatgagcctgatgatttgcagtatgacctgcgtccaaggtggcctcttggtgaggaatattcagatggaagatgtgttgcacggtcaatgaaaactgctcgagtccacccatcactcgcatcgatgatacagggttctgttcattagtagtttagtgaaaattgcaggagcaatacaaagatcctgttgatatagaaattggattgtgtttaggaagtatgctatactacattgatagtttgtatattttggtatattccattcacttttatttagttgactcactctttgaggtatcagtaccagacactctaaagttacttctggcatttgtattgtttggactgctatcttttacattgataatattagcaaatacactctcttaaactagtggcgttcactggag

SEQ ID NO: 11246 - DNA, 615 bp, Oryza sativa
  Clone ID: PAT_MRT4530_17489C.1
ccggccgggattagaatcttcttatttaaatagggtctcgataccatattacattatgagcagagggacgcgtaccagacgacgggctgctacaacctggtctgctcggggatcgtccagacgaacagcaggatcgcaatgggggcggccatctcggcgacgttcggatacgagggcggacagttcgtcatcaacttgctcgtatggaaggatgcgaaccacggtaactggtgcctggagttcgggaatggagagctggtggtgtactggccgtcgtttctgctcagccacctggcgtcacacgcgagcatgccgcattacgctgctgagggggcgaacaccatgccccacggggttgcgcacacagaaacgcagatgcgaagcggcttcttcaccggtgaggagttcgacggggccatgtacttccgcaacctggatgtggtggattgagacaacagacttgttcccctagtcggcggattcacgtaaccgccgaccacccagagtgataccacatacaaggcggagtaaaagaccgatgtagcaactactgctactacggcgtgccccgccagaacgttaagagcacctaggcatgccgatagatttcggctt

SEQ ID NO: 11247 - DNA, 992 bp, Oryza sativa
  Clone ID: PAT_MRT4530_1748C.1
tcgcgatctgacaatggcccaagaatgatcctgcaatatgcaaataccattacatggtagcttcttttttacacgctgtcttaacagcttttgcatacataggacgacatagcggtatatgtacatatacggatgcacgtatgtacatacactgatgcaaaatgacccaaagaacgcaaatttaatttactagtaccatcatatctctctctagtcctactctgctgtagcgtggggtaattatcaaacgtaatacgtactatgaacacacaccaagccaagccccacgtcactcgcactggctgatcgattgatcaatactactactaatttatgctatatgcgatggtcgaggggttgtggcgttgttcatgcgttgccggtggcgatccgggcgacgtggaactgcggcgcgtagttctgcgccttgccggcgatctcctcctgcggcggctcgttcaggaacgcccagttgctcctcgtccaccagtcgtggctcttgctggggctctcggcggcggcggcgtcgtcgtgggggaagaagccctccacgcgagtcgccgggtcgatacggccgccgcgaggcgacgaggcgtgcgccttcgagcggctcaccggggccgaccgcgccatgccgccggcggcgggggagccgagcggcgagcccgacatcatctcgccgccgtgctgcttccagaacgcctccacctcctccctcgtcagcgacttgttcctcctcgcaagaactctgttctcatcgccaagaacgggtgaatcccatccagccatcagagaccccatcttttaattcactactcagagataatttctctgaatttggatcgatcgacaaagttggtctgatttgttatccagaaagaactgaagatgaaatcaagctgaagctactagcttgtatgattagttatcaactttaatttgcagatgcaaattgtagcgaatggataaacaacggagagagcagtgcagtg

SEQ ID NO: 11248 - DNA, 769 bp, Oryza sativa
  Clone ID: PAT_MRT4530_17490C.1
cccacgcgtccgcccacgcgtccgggtggaatggcggccactcttttccccaccttatcgccgccggtctcctcctccgacgcctcctcgcccccgccccctccccgccggtacggtctcctaccttccgctccctctccacaatgccctccgccgccggttcacgggccacccccgatcacggcaacctcctcatgctcggcatcgagaccagctgcgacgacaccgccgccgccgtggttagaggcgatggcgagatcctaagccaggtggtatcttcccaagaagatttactcgtgaggtggggaggcgtcgcaccgaagatggctgaggaagctcatttgcttgcgattgatcgggttgtccagaaagcacttgataatgcaaatgtgtcagaaagtgatctttctgcagtggctgtcaccgtaggaccaggacttagtttatgcctcagagttggtgttcacaaagctcgaaaaatagcaaaatcatttcacctgcctactgttggagttcatcatatggaggcacaggcattagtttccaggtttcgatgcgacaacacaaagattgcaatttctcttatgctggtctgaagactcaagttcgattggctattgaatccagaaacatatctgcagatgatattcctatttcatctgctacaaaagatgacagacaaataagggcgaacattgctgcctcttttcagtgagttgctgttttacatttgggagaaagatgccaacgagcagtttgatgggccttg

SEQ ID NO: 11249 - DNA, 1628 bp, Oryza sativa
  Clone ID: PAT_MRT4530_17491C.1
ccggccggggggtacccgagctagagtggaatggcggccactcttctccccaccttatcgccgccggccccccgcgccgccgccgccctcctcctccggcgagccccaccgttcccctcaccccttcccgctcccctcctccgacgcctcctcgcccccgccccctcccctccgctacggtcctctcctaccttccgctccctcgccacaatgccctccgctgccgccgccgcagacctcctcatgctcggcatcgagaccagctgcgacgacaccgccgccgccgtggttagaggcgatggcgagatcctaagccaggtggtatcttcccaagtgagatactatactatgccccctgcttccctgttcagcccacttacactttgtttctgtattattggtcatgctatgctctgtgcgctgctgattgtattgttttgtgcttacaacatttggaaggaagatttactcgtgaggtggggaggcgtcgctccgaagatggccgaggaagctcattctcttgcgattgatcaggttgttcagaaagcacttgatgatgcaaatgtgtcagaaaatgatctttcagcagtggctgtcaccgtaggaccaggacttagtttatgcctcagagttggtgttcacaaagctcgaaaaatagcgaaatcatttcgcctgcctattgttggagttcatcatatggaggcacatgcattagtttccagttctattgatgtcaggttagtgaacaaggatcttgatttcccatttttggccctcctaatttcaggaggacacaatcttcttgttcttgctcatggacttggtcaatatgttcaactgggaactacaatagatgatgcaattggtgaggcttatgacaagtcagcgagatggttaggtcttgatatgcggaaaggtggcggtcctgctcttgaacagcttgccctagaaggtgatccaaatgctgttaagtttagtgttccaatgcgacaacacaaagattgcaatttctcttatgctggtctgaagactcaagttcgattggctattgaatccagaaacatatcaacagatgatattcctatttcatccgcgacaaaagatgacagacaaataagggcgaacattgctgcctcttttcagttattaaaggttgtttcaggaggtgttgcatcaaaccagtatgtcagaactcatttgaatcagatcgctgagaagaatggcctacagctcgtatgccctcccccaaagctttgcactgacaatggtgtcatgattgcttggactggtattgagcatttcattgcaggcagatttgatgatcctcctgctgttgatgagcctgatgatatgcagggaacatgatatggataaaactgctcgagtccatccatcactcacatcgatgatacacggttctgttcattactactttactggaaattgcaggagcatttgcccattgaagctagtgctttcatgtgccatgtggtttatcagtttcagttttagtgattactgaagcgccgcttgtttccagtgaataactcccaattttcagtcccagtttaatttgaaaaccatgggggcctgttagcagtacagtttgttgttaaacttcccatcaa

SEQ ID NO: 11250 - DNA, 404 bp, Oryza sativa
  Clone ID: PAT_MRT4530_17492C.1
acggcccgcccttttttttttttttttttttttggaccgacctctctccttaacttgggggttggttctcatgtacaatgagggaaacacacacgcacacacacatgggtgcactgtatctctctgagcaacgcactcgattgattcgaattcgatccgctagggattcaagagaagctgagatagagatttctacgaacatgctacgctgaaggagctggttgggctatcgacgaacttactggaggccttgaaccacctcttgtggccggcctggaccttgcacacggacagatcgccgtcgttgacccgggccgaaaccaactgatgcttggcgacctcttctacgcccggcattgtactgagaaacctaacgctggaatagtggttccctcccaccgccg

SEQ ID NO: 11251 - DNA, 1117 bp, Oryza sativa
  Clone ID: PAT_MRT4530_17493C.1
atggagggagaggggattgggaggagaggccttccttcactgctcggttcctcttccagcgaaagcggcggaatcgggcaagaacacattgcctctgacatcacgcaggttgaaatgatcgaggatgcagaagagaaagggctgattactcctggtgtcacaactctagtcgagccgacgagtggcaatctgggtttaggattggtgcttgttgctcttcgcaaaggttacaggttcgttgcagttatgccgggccagtattcgtttgataagcagatcttgctgaaatacatgggagctgaattgtttctatcagatccaacactcgggtttcaaggcttagtcgacaaggtcgaacagctcaagaaagaattacccaatgtgcacgttcttaatcaattctcaaatccagcaaatcaggaggcacacatgagattgactggacctgagatttggaaggatactgctggcaaggtagacatatttgttaccggttcgggctcaggaggtacggtatctggcgttggaaagtatctcaagctgcaaaatccagcggtgaagatcatttgtgtggagcctgcagagagcccagtcatttcaggtggggagccaggtaaacataaaattcagggaatagggccaggactcatacctgatatgttggacacctcggtcatcgatgaagtcgtcacggtaaacactgatgaagcaatggtgaatgcaaggaggctggcaatggaagagggcctccttatgggcatttcttctggggcaaacctggcagcttgcttgaaggtcgcgtcgagagaggaaaacaaggggaagatgattgtcaccatgttcccaagcgggggtgagaggtacatgaactctgacctctttgcagctgtgagagaggaatgcaatgccatgacattttaatctcactggttgttcagaagaatcaagaacagttatgtgtaaaactataggagggtaacttgtaccacaatgtacacatagcacgatcttgcaaagggatttatcggcaaggagccaaagaatttgtacgaattgtatatttgtactagtcattagtcaataaataaatgaaataatttgctcacttcgtgtgagt

SEQ ID NO: 11252 - DNA, 306 bp, Oryza sativa
  Clone ID: PAT_MRT4530_17494C.1
ctttccggccagagccaactcggcctgctgtttgttgccccagaggaggacaacagggagacgatcgtcgcgcaggatgcgcttgtaatcacgtggaactcgtcgccagacaccgcagatcttgcccgtggcattctgatagacactgagagtgcccgccaagggggcccccggtgatgctcgtttcatgttgcgctcttcctcttcattgggcacgggcacatccaaggctacatccgtatctacatttaaataaggaagtgctttgtatttgaggatgtgcggactctggggttctgaattcat

SEQ ID NO: 11253 - DNA, 457 bp, Oryza sativa
  Clone ID: PAT_MRT4530_17495C.1
catggatacccctgctatggcctgcctaagattaagaatctgcataatgtgaagatcaccatgatgcaagtcacgactcgtgaaacagtgagaggaactagagaacctgtgaagccgcctcggtatgtggatgtgtgcactaactcttttgtgctacgaggatggatgcttgctatgtttttgctgtatgaacagtttggatgtgatcattgttgatcagggatggatgcatacacactcagaatgtttctgctacatgagccgttgagtctgttggtgtttgaaggaagtagtagcactcctagttgttgggggcttaactcttggtgcatttttctatgaacaatatgttatatctggaggatggtaggggatctttacggttttaggccattctgtatggaaattaattattttaaaaggtgttgtgataagctggtgtttaggctgcccctaa

SEQ ID NO: 11254 - DNA, 2469 bp, Oryza sativa
  Clone ID: PAT_MRT4530_17496C.1
atgtctccacctcacctcctcctcctcctcctagccctcctcctctcgccgcccctcctcctcgcctcctcctccttccccctccccaccatcgccatcgccgccgtctccaactccagctccaacccctccaagcagcatctcgcgtgcgggctcgtgccggcggcggggggcgcggcggcggggtacaggatctcgtgcgccagcgtgtcgaacaggtcggcggcggcgccgcacgtgtacgcgtatggcggggacgggacgtgctcgccgtactcggcggtggtcgccggggacgggtacctgtgctcggctgcgccgacgtcgtcgccgccaatgtcgatgcggtggtgggatctgaacgaggccggggatgggtcgaagcgggtgtacagggggcgggtgctctcggcggtgtccggcggcggggagtccgtgtgcgggctcgtcggggagaggatgcagtgctggaggtgcccgtggggggagggcgcgccggcgagggtggggttctcggcggtggcggtgggtggcgggttcgtgtgcgggttggtggtggggagcggggaggtgaggtgctatggtggaggggaggtggtggggagggagcccgcggggaggaggttcatgctgctcgccgccggcgagaggcacgcgtgcggcgtggatgatggcggggtggtgggttgctggggggaggcggcggcggtggcggccgcgtcgccgccgaggatcagccgcgcggtgtcgacggtggcggtgggcgacgcggtcacgtgcgtgctgtgggggaactggacggtctcgtgctggcccgagggggaggcgtcgccgccgccggcgctggcggggcagcagttcgtcgcgctggaggcgaaggggaaggtggtgtgcggggtgctcatgtccgactactcgctgcagtgctggggcgcaggcgtcgcgggcggggtgaggaaggtgttcgacaaggtgctcccgggtccgtgcgcgccgtcgaagtcgtgctcgtgcggcgtctggtcgggctccgcgcagctctgcgccggcagcggcgggggaggcggcggagacgtgtccgtttgttacccctgcggctacacccctcctccgatggcgctgtccccgacgtccaactcgtcgtcgtcgtcgagctctcaatcgaaggggaagcgtcgcccgagcaatctggcgatagcgttgatcagcgccggagctggatcggcgctcgtggcgctcctcgccgcgctcgcggcggtttactacctgcgccggcaccgtggcagcagctcgccggtctccgggcgcatccacgccgagccgacgggcacggcgccgcgcgtggagcggcggctcagcgcgctgctctccaagggcccgaacacgacggtcgagcagttcccgctggtggcgctccgcgccgccaccgactgcttctcgccggcgaagcgcatcggctccggcagcttcggcgcggtgtaccgcgcgtccctccccgacggccgcgaggtcgccatcaagcgcgccgagcgccgcgacacggggggcccttcctcctcctccgccgccgcggcgcggcgcgtcgaccacgaggcggcattcgtctccgagctcgcgctcctctcccgcgtcaaccacaagaacctggtccgcctcctcggcttctgcgccgacggcggcgagcgcatcctcgtctacgagttcatgcccaacggcaccctccacgaccacctccacaggcgtgcggcgtcggcggcggcgccgctctccccgccgctcgcctcctggccgtcccgcctccgcctcgcgctcggcgccgcccgcggcatcgagtacatgcacacctacgccgtcccgcccatcatccaccgcgacatcaagtcctccaacatcctcctcgactcctgctggaccgccaaggtctccgacttcggcctctccctcctcaacaccctggacggtgacaatgccgccgccggcgacggaggcaatgccggcgacggagacgacgaggagcggtgcgtgacggcggggacggtggggtacatggacccggagtactacaggctgcagcacctgacggacaagagcgacgtgtacagcttcggcgtcgtgctgctggagctgctgtccgggtgcaaggcaatccagaagtacgagggcagcggctcgcccaagaacgtggtggacatggccgtgccgcacatcgagggcgaccgggtgcaccgggtgctcgacgcgaggctgccgctgccgacgccgtgggagatggaggccgtcgcctacgtcggctacctggcggccgactgcgtcaggctggccggccgcgaccgccccaccatgagcgaggtcgtgggcgtgctcgagcgggccgtggcggcgtgcgacgagtacgaggaaggcggcgccggcgccggcggcgagcccgcgctgtcgcggtcgtgcaccgatgggtccacggcgacgtga

SEQ ID NO: 11255 - DNA, 318 bp, Oryza sativa
  Clone ID: PAT_MRT4530_17497C.1
atggcctgctttgggttcgacttatccgcgagggcgcgcggcatcggcgacgtgtaccatccgttcaacgagacggcggtgcgcgagaagttcaaggagtggatccggcagttcgacaccgacggcgacggccgcatcagccgcgacgagctgcgccgcgccatgcgcgccgtgggcgtgcggttcacggggatcaagtgcaggcgcggcatgagccacgccgacgcggacggcgacggctacatcgacgacagcgagatcgacggcctcatcgagtactgggggaggcgcctcggcctcggcgtcgccgcctactag

SEQ ID NO: 11256 - DNA, 152 bp, Oryza sativa
  Clone ID: PAT_MRT4530_17498C.1
cgactgtatatactctatgggaggggtttactataaaaggacacccataggcccccaatcgaccaccttcttaattaatcgataacccatgggtttaatttaccttttattatggccactcacaaaccacattcatgtgggtgggtcttctg

SEQ ID NO: 11257 - DNA, 1211 bp, Oryza sativa
  Clone ID: PAT_MRT4530_17499C.1
ctagtggatccccgggctgcacgaatcggcacgaggcctgatcattgcaatagtggaggagtttgtttcgcgacaaagtgatactggcaagatgaaatttcaagatgatgatgagattgtggaggttgagaaccttactcctgtttccagcacctcaaatctggctgttgcaaatcttattgatgggtatcttgctgagattgctaaagacaccaatcttcccctttcaaagttcatcgcaattgctgaaatggtgccccctgcatcccgcaaaaatcacgatggtctatatcgtgccattgacatgtatctcagggcgcggcccagcctatcaaagagcgaaaagaaagcattatgcagattgatggattgcaagaaactgtcccaggatgcgtgcctgcacgccgtgcagaacgagcgccttcctctgcgtgtggttgtgcaggttctcttctttgagcaaattcgggcatcagccgcttcggggcggaccgatgccgcagcagagctcacctctgctgtacactcactactccccagagagaatggaaactcctatggcagctccaggtcagcggccaccacaacaaccgaggaggacgggaccggggtcccgacctccagcgacatcaactcgttcaggtcactgaggctggccaacaacagcgggggcagcgagagggagcagtggcagcagcgacatcaacaacaagagctgtgacgacaagagctccagcaagtccaagggatcgctcatgcccaagaagatcctgagcaagctctggtccgggaaaacaaacgccagcgagaacagtagctcggacacgtcggagagccctgggtcactcaacccggaggaggtgaagtccacaacgtccaggaatacaaggcgtttggtaacctagtgtcaacagagccagccatggtttttgtttttgtttcttttttggctttgatttgccttcagatgagataaaaaaaagtagtactagcaatctttagaatgtggaatactactgactggcagtccctccgatggcagatagtgttttttatagcattgttattatgctggcatttgctataggtttggtcatcggtaaatttgttcaggaacgtttcatgatatagtcttgtaatttttttggtggaaatataaagataaaggaaggaaagatcttttattgacccaaaaaaaaaaaaaaaaaaaa

SEQ ID NO: 11258 - DNA, 3141 bp, Oryza sativa
  Clone ID: PAT_MRT4530_1749C.1
acacctcccaactctaagctatcaattgaggctccccgtggaccggcattgtcagtacctcattctcccggtggagctgatatggacttggcagatatagctcaaagcttggctccaataaagaccacaatagcgccgccgccgccgcggattccgccgcatcccgccgtccccgcgcgcattaaagagggggaaattattccccgcgtttccctcccccgtttcccccgatttcccctctctctctccctcggatccgtccggattcatcccgtaatcctcgccggcgacatctatggagcccgagatccccgcgcccgtttccttcctctccggccgcgttctccccctctcggtgctatataattgctccccgagctccgctcttccgtttcccgccgctcgccgctcgctctcgccgtcggatccgtgctcgcgccgtgctcctctctctccgccgtcgccgccgaccttcggttcgccgccgacgtcgctccggtcctccgcccgactcggcgacacctccatccgcttcgccgtatcgccgtcgacctcgtccgcgcctccgtttcgctcgccgaccgtcggagcgccgccgtcatcgtcatcccgagccgcgccgccgcgtttctccactccgttcgtcgtctccgccgtcctcgtgtctcggggtgagccgtggaccgtcccttccgtttccccctcctctccgctctctcgggcgctgctccgccgcgccgatggtcgccggcggtgaccatcggggcgcgggcgcgccgctcccgtcggccgtgccggcgaggccgccttcgggcgcgccctcgcggctgccaggtgggcccggccgtcagccgcccgcgcccgcgggtgcggctgacgcgcgggacccacggcgccgaccgccgccagccgcgtgcgcccggtccaccgtggaccgagaggctgacgcgtgggccccacttcccgtggacccgggcaaatgaaggctacacgagctgcggcccgatggctgacaatgagaaaggcaataaggtcagaagtcaggacattggtacctcaagctcccgagtggatgaagcaccagacaccagttgtgtgacactggtccaacacctgattaaccagaaccgattgcttatagagatactacagcagcatcagacgccaattctgaacctgagtcaaacacaacctcaagtgcagttggaggcagtccaagcactcacaccacaagtcagcatgccgccagcatcccgaaggacccatggtgacgtgccacatgttgacccaaaaggagcaagtaacatttgctttatgtgtgatgagcaagggcactatgcaagggagcgtcctcagcagaaaagaaaaacaccaatgcgaaccgaagatgaagtccgtaagatgatcattactagcacagagtggcctccaccaggaatgaccagacgtcagagaagaaataccttccgaggtgcaccacagttgacagagcatcttttagctaatggaggtagagtgtctgatagtgaagattcagatcaagtctcctcagatgatgaagatgaaatggaacgtaaggcatgctctcgttgtggagaaatcggtcatgtcgccagctcgtgtgccactatatgcgttcattgcgaggaagaccatccacccgacaggtgtccaacgagcaggatcacttgtttcttttgtgaaggaactgatcatgtaccaaaagattgtcaattcagttttctgctgacgaagaagatggctaaccaacccgccagttccaacggagagaagcatcaaggcaacaccaatcctcgccaagattacagtttcagcctaactccagtgccaggacagaggaatcaaaatgagaaaagaaaatgccgagtccgggaagatatctgttgcttcaattgtcaaggaatgggtcatttcgccgacaagtgcccaaaaccgagaaacatagctgccggcacgtcagtccacgcagctccctgcaatcagaagcttgctcctcagcgaattgtcatccatgcatcccaaagcagtcctatggctcgcgttgcaacagctccaactccagcgagtgcattaccacaaggtgtcaatgctcactttcagccccagcaaagaattgtcgtcgatggaagaagttgtgtctctccccgacctactccaggccaagcaaagggcgataccaagcagaagaccgtcatccgcttcaaccagcaatcagaaggaagcttctcctgtgaagagaagattccatccgcaacaggaggtcaagccaagcagttccgaaaggtaaagatttgctggaagtttgtcaagacgcaacggaagaagcgggcccgcccgccgctctcgctgacgggtggggcccacctgtcatcgccttcctcccgccgcgcccgccgccgcgcccgtgccctagcgccgccgccgccgcggattgcgccgcatcccgccgtccccgcgcgcattaaagagaggggaattactccccgcgtttccctctcccgattccccctcttttccctctctctctccctcggattcgtccggattcatcccgcgaagttcgccggcgtcttcaatggcgcccgagatctccgcgcgcggtttcctctctccccggccgcgctctccccctcccgttgctatatattcgatccccgtgcttcgctcttccgtttccgccgctcgccgctcgctctcgccgtcggattcgtgctcgcgccgtgctcctctctctccgccgtcgccgtcgaccttcggttcgccgccgacgtcgctccggtcctccgcccgactcggcgccacccccatcggcttcgccgagtggttgccgaccccgtccgccgctccgcttcgcccgccgactgccggagcaccgtcgccctcggcatcccgaaccgcgccgtcgccttcctccgctccggttcgccgccgccgtcgctccggtcttcctcccggctcggcgccacctccctcggcatcgccgcatcgccgtcgacctcgtccgcgcctccgtttcgctcgccgaccgtcggagcgccgccgtcatcgtcatcccgagccgcgccgccgtctttctccgctccgtccgccgtttccgccgccttcgctgcctcggggtga

SEQ ID NO: 11259 - DNA, 1944 bp, Oryza sativa
  Clone ID: PAT_MRT4530_174C.1
atggctgctgatctgcagacatttggtgcgttgctgaaatacccaaaagtggaggggccaatccggaaaaacgcctctgcccctgcctctgcctgttcgtccccacatcgccgcggcgacccgctcgacgccgacgagcggcgactggcacgaggagggagccgatcagccgaatttggagcagaagccctcatcctcgccgagggcgagcaggccagccgccgtgtaatgcagggtagcatcttggtgaagactgaaagtgattcacctggaaatgcagagatatgtgccaagaggagtgtgttgatggaacggtatgtaattgggagacaattggggcaaggaacctttggaaaggtttattatgctcgtaatcttagttctggtcagtctgttgcgataaagatgattgataaggagaagatcttgaaggttggcctcatggagcagataaagagggagatctcgataatgagattggtgaggcatccaaatgttctccagctcttcgaggtaatggctaccaagagcaatatttactttgctttagagtatgctaagggtggcgagcttttccacaaaatggccagagcaaagctcaatgaggagtctgcgagaaattattttcaacagttgatctctgcaatggactattgccatagccgaggtgtttatcatcgtgacttgaagccggaaaacttactactggatgagaatgaaacccttaaagtctctgactttggattaagtgcgttagctgaatcaaggagacaagatggtcttctccacaccgcatgtggaactccagcttatgttgctccagaagtgcttagtaggaaaggctatagtggctcaaaggcggatgtgtggtcttgtggagtgattctgtttgtgcttgtggccaattatcttcctttccatgatagaaatatcatacaaatgtataggaagatcgcaaaggctgagtatagatgccctcgtcatttttcagctgagctaaaggagctcctttatggaatccttgatcctgatcctagtactaggatgtctatctcaaggataaagagaagtgcttggtacaggaaacccatcgccatatctgcattgaacaacgaaacaggaaagaagagttgtacaagtgaggctcctttctctggcccaacaatctgcatcagttctgagagaaatcaagagccaccaaacctacacaacttgaatgcatttgacatcatttctctctctactggattcgatctatcaggtttatttggtgaaagatatggccgaagagagtcactgtttacatccagaaagccagctgcagctgtacttgtgaagctgaaggaactggccaaagccttgaatctcaaagttacaaaaactgacaatggagtgcttaaattggctacgacgaaggaaggaaggaagggcagacttgagcttgatgcagaggtttctgaggttgctccttttctcttagttgagttgaagaaaactaatggtgacacattggagtatcaaaggatgatgaaagaggacattaggccatcactcaaggatattatttggacatggcaaggaaactctatcgagctgccaaatgatgaattgacggtccaatgtagtgaaggtgaagtacagaagcaatcaaggctaccaagcatcaagaattttctggacagggtcacggttacttattccactagtagaacttcctggtcatggactcatggtcacggaaactgcagtaagaatgcaagcaaaaatggaatcaaaggcgaggcttacaatgcagattgtgtctccaggaggtctattgaggtctgtgccaaattgctagagccagatgatcagatgactaaactaattgataggctggaccgccggagatgtaaactaattgataggttccgtcctaaagaaaggttggaaatgactgactaa

SEQ ID NO: 11260 - DNA, 813 bp, Oryza sativa
  Clone ID: PAT_MRT4530_17500C.1
atggccgcggcaggggacgggtgcggcgacggcggcggtagcgggggacgggcgcggcggcggcggtgggggatgggtgcggcgtcgtcgatgggggacgggtgtggcggcggcggcggcggaggcgacgggggacgggcgcggcagcggcgggggacggcgacggcggcggaccatactgtatacacactgtacatcaaaaccggcaacccatccaggccaggtcccagcaaatgcggcattcgggcatggatccaggcgcgcctgcttggctgcatcccatgccgtccctgccggtcgacgtctttggtcaacgccttcgtgtttgggcaggccaacacccgccattccagccgtgcatcgctacaagagaagctcaagagagaagttcccggcggcaagatggctgactgctgcgtgttcctccgatggccattgaccttgccctccctcctcggttaccgctccctcgacaacagcaagctacccatcccggctgctcctcgagaagcggtgaggaaggaggagagcaaggcgacgctcttcgtcgatgtcgccatccttttcttgtcagtgttatgtgcaaacgtcttggggtggatgaggcctagccacggtggcaagaggaggtggtcgcgcgagcggaatggggagcgccatgctgcgggcggtgctggtgttcgtgttctctgccgccatgctgatacagctgataccagtatggtaccaactgcatggtacatagtacctgtgacacctgtacctgatacctgtgacacttggtacccgatacttgtgatacctggcacctag

SEQ ID NO: 11261 - DNA, 339 bp, Oryza sativa
  Clone ID: PAT_MRT4530_17501C.1
atggcggcagagaacacgaacaccagcaccgcccgcagcatggcgctccccattccgctcgcgcgaccacctcctcttgccaccgtggctaggcctcatccaccccaagacgctgtacaggcgcgtgatggtgtacgccgtacagaccccaagacccctgggacggcatgggatgcagccaagcaggcgcgcctggatccatgcccgaatgccgcatttgctgggacctggcctggatgggttgccggttttgatgtacagtgtgtatacagtatggtctgctggatgatgactgtatgcctgaatttcgaggaaccatcgccttccctcgttttgtag

SEQ ID NO: 11262 - DNA, 167 bp, Oryza sativa
  Clone ID: PAT_MRT4530_17502C.1
acgcaagggcttgttgatacaatataaacatggagggtaccttgccggttccatatgtacaaaaataaaaacaccgaaaccccatatggccattatgccgatcctagcctcatcttggctaggacattttccaagagcattatttggtcaaacgggtataatctttt

SEQ ID NO: 11263 - DNA, 339 bp, Oryza sativa
  Clone ID: PAT_MRT4530_17503C.1
tttttcgacgccggcgatactggacctgccgggggcgctgatgctgcacatcctgagcttcctgacggacgtgaggtctcggcacagggtggcgctggcgtgcgggaggatgcgggcggtggaccggccaacaaggcccgagctctcggtgtggggcgacccgaggacgacgggggtactgttactcgcgcacgcgtttcgcttcccggcgctggaacacctcgacctctcgctcgtatagccgtgggggcatccgttaatcttctccgtgccgccctgcggcggcggcggtggcggcgcgccctcggtgtcgtcgtcgtcggggatgaacgtgtacca

SEQ ID NO: 11264 - DNA, 311 bp, Oryza sativa
  Clone ID: PAT_MRT4530_17504C.1
ctaccatccaagggcgcgccgaggcgccatggacgacgacatcgacagcagctgctccaccccattcgccagcgcgccgtccagccccggcaggtcgcctgccaccggcggcggctacttcttcagcgcgccggccagccccatccaccacctgctcctctcctcctcctcggttgcctccggtgtggggtcgggggcggtgtattgcggcgtgggcgatgcggagttcgagttcggcggccccggcgggcccatgatctccgccgacgagctttttcacaacgggcagatccgggcgctcaccctggccc

SEQ ID NO: 11265 - DNA, 192 bp, Oryza sativa
  Clone ID: PAT_MRT4530_17505C.1
tggaattcgaaatccacacgagcgcggcggcggcggtggccgcgatggcgagcaccattaacgtggcgtcggccacctcgaggttcctgctggccatcgggaactgcgttatgaccggctacagtgccagcccggttagcttctcgactaacatggtcgagaggagcgatcgcgccgtttcctgccagctac

SEQ ID NO: 11266 - DNA, 729 bp, Oryza sativa
  Clone ID: PAT_MRT4530_17506C.1
caaggaggccttcttcttttttttttttaaaaaaggcgctttttccatgaactcttctttatagtatagcatgctgtaattgaatgcagtatgaagcaaaaaattacatagtttcatgcgactcatgcaggggttaacattctactaaacgccaggaggaagtacaagctcactatatcaaaaagtttaagcatgtcaaacagtactacattgttgctaaactggggaaggatggaacacttgagctccagttcaactgtcctgaagcttggcttccccagctttctcggcttcatccgaaacaaaattcttcagtgactccacatttcttgggcctttatattttgcaacctcttcaccttcataaaacaccttgaatgtggggtacgaatggatatccacctttgagcatactggtttgctaacaccacagtccacttgccctatctctatttcatccgcaccttccataacctttcccaagtcctcccaaagtgttccaaggttcttacagtgtttgcaccatggaacgcagaacttcacaaaccataccgtgtctttctcctttatctggactctcctagctcgatcaacctcagtgatcttgtcggagaaggtctcctcggtgagggtgatgacctcggcgccggatcgcgcggctagggccacgaggacgacgagggccagcgccaccagcagtcgcgcgcggcggccgggagccagatccat

SEQ ID NO: 11267 - DNA, 306 bp, Oryza sativa
  Clone ID: PAT_MRT4530_17507C.1
cccacgcgttcgggcattgctttctatgtttcctctactgaagatgatgaactttgcctcagtaatcaaggactaatcatatgcaatatgccctgtggctttaggatgcatcaccctgacaaaataactgctgatggccaatcatacgcgccatattatgactgctaatcaattagctcacgcgccacatacatcatgatactgaatgcacgttctggaacgtacaacatgacactgactccatatggcttctaggttcactgtactgaatactagagatccttgtttgcttaaagcacttatgac

SEQ ID NO: 11268 - DNA, 143 bp, Oryza sativa
  Clone ID: PAT_MRT4530_17508C.1
agcccatatctctatggaatgtgcttaatcaacaaaaacatgccatccccagataccgattcatcgctatctttttcacctaacaaagataacacataacacgcacacatgtttaatagcaagccctatgactaccttcttaa

SEQ ID NO: 11269 - DNA, 830 bp, Oryza sativa
  Clone ID: PAT_MRT4530_17509C.1
cagcgaggtgatggtctccttttccattcctttgatctggagtggacagtctgtgcccttgttggtttcgttggatatggaagtgaggggtcagaggaggagcatgctgcccatctccaccggatctggactcccctctccggtgacctctctccccaggcggcagcgttcggatcagcccctcagcagacgtgaggcgcgagccatcggcagagggctccatggcggcggtgtcctggcctcctaggggtcggcggagtggcctcggtgacggcgtatcttgtgccgctggcactcacctctccctcgccatcttcctagcctccgccaccactgcccctcctcgtcggacgacgagcttgatggtggcggcgcaagagcaagccagggtcagtcgttccttacaccccttgcctttgccccccactctcgccagatggcgagctagatggtgccggcgcccctgctctcctttcttggccggccatgaggtggggtggcagattggaagaagggggcgacaacctcgacgacggctgcacacatcagcggtggagcggatctagagtggccacgggacagtatagcgatattggaaccaaggactatacatctaaattatcagtgtactgatctctctgatagtctattgctgaagaatgtggagattattgcaaaaagactcactaatgcatccgtgatttaaggtacttctggtagcattggagtctataaaatttccctacacatctttgatttaaaatattttgctttatgcatgtgtatagaattggatcctttctcaacaataatataagcttatgaacatg

SEQ ID NO: 11270 - DNA, 184 bp, Oryza sativa
  Clone ID: PAT_MRT4530_1750C.1
ttcttttacacctattaggcttcctgccctgtgtgagccggtgtagctaagcctcgtctttcgacaccagccacacctcgttcgtagcccttacgcttatctatattggtcaagtctaccttcctagggcataccatcactccattggtccgcgcaccttctacgaggcgtattgttctggcag

SEQ ID NO: 11271 - DNA, 183 bp, Oryza sativa
  unsure (1)..(183): unsure at all n locations
  Clone ID: PAT_MRT4530_17510C.1
gtgccatagtgctttcgtgttattcggtggaattgctcctggtttagggaactgaaacccgatatggaatgatctgacgagtgtggtgtgtggaccctctgtatactgtgngttacaccttgagatgacttggctcccctgaatgtatttgatggaccccattaatccctttccaataaaata

SEQ ID NO: 11272 - DNA, 744 bp, Oryza sativa
  Clone ID: PAT_MRT4530_17511C.1
atgggggagaggtgggcaccggcgtccatcgtggagaggcgggccgtcgttgcgccggccggcagcatcttgaggacgacagcggagcaggctgaggagggaggagaccggcgagggtgcggggaggccgggagagtcgtcggagtcatcccccagccgccgccgtcgtcgtcgttcgagccgctcccgccggagtacgatgagcccagccatactcgttgctgcgacgaccacctctggcccgacgacgaccgccgtgccccgctacccttccccgacacctgctcgctcgaattttgcgcggcggcggagagaagcgccgcccgcctcctccctctcggcgcgctcgccgcatcccctccgcgggcgcttgccggcattgcagctcgtctcgacagcctcccctccgctgtcccctcctcccgccgcctcgagctccggcgggcgcggtggggagggcgagacgggcggcgggcgccgaggacattaaagatgacaacggcgagctcgggcatgcgcgccgacctcccgatggcccgagagagaggggtgagagggggccacttcgtcgccctcgccacttcgctgccctccgccgcgacaggggagcacggcgccatcacgcctgccccaccatgcccgccgcctgccccggccccaccactccccgctgcgcccgccgccgcgctcgccgcccgtccgcgtgccgctgccgccgcccactgcccgttgacgcacgcttga

SEQ ID NO: 11273 - DNA, 101 bp, Oryza sativa
  Clone ID: PAT_MRT4530_17512C.1
gccgcacatagtgagtgtatagatctagaggcagacgacgatgatgttgtagacactaatataatgtaattctatgggtatggacttttattgatatttag

SEQ ID NO: 11274 - DNA, 3159 bp, Oryza sativa
  Clone ID: PAT_MRT4530_17513C.1
aagctgatgatggtgctcccccggtcttagagaccttggggcacatcttccaccccatgcgggcacccctgaagcagtctgatgcctcctggttctcgtctagaatgccacgcgggtcgtcgcaactgttgttgccccccagttgggctttgagcttgcttgcgctctccaagcacgcgctgaccaggtaggtgaagacggtgccccccctcttgttccgagggggccgcttttaaccgcaatcgaaccaaggtcatatgcttataggccttacagcagaacatcaccatagcggcccaagcaacggggttatgtgcggagcgtcttcatgcgcctgcttgaaggcgtgcatagcattattatattcttacaaaatacaagcaactatcagccttaatataatacggaaatgctaacaatttcgcaggccctattagcaaactgttatgtaaaaataaaggttgaaaatcttcatgagcactctgctaggatacatggcttgcaactccagggatctgcagctgcccgatatgatcccacttgctagtaatatctatatgtcgccgttggccttgttctcttccgatgtccttttgtccttcccttcgtcttcaccgttggtcgttgcctgctctttggttttcatctcttctatccctttcgctgcctttgcctcctcgtcctctttcgccgccttgtttgcttgtgcttcctccttggccatgttcagcgcctcgactagacctgccaggcacgcgtcagggtccctcttcttcctcttggacatgggcatcaggttctcggcgacgtccgccggcgacatgtcggcctcctcgagcagccgccgtatgtcgcctagcagctcgtgctgctccacgccgaggtagttgctggccagcactttgaacgcctcgaagccgcagtaggacatctcgatgtggacgtccatcctcccccgccggatcagcgccgggtccagcttctccttgtggttcgtcgtgaagatgatgatccgctcgccgccgcacgccgaccacagcccgtcgatgaagttgagcagccccgacagcgtcaccttgctgccgccgtcgtccttgtccgcctcggtcggcagcttgggtttgtcgtcgctgccctcgccgccgccgtcggacgccttgttgtcgccggaggacttcttgcgcttgccggtgaggtcgatggagcagtcgatgtcctcgatgacgatgatggacttgccggtggtctcgatgtagagcttgcgcagctcggtgttgttcttgacggccgtgagctcgaggtcatagacgtcgtagtcgaggaagttggccatggcggcgatcatggtggacttgccggtgccgggcgggccgtagagcagatatccgcgcttccatggcttgcccaccttggcgtagtagtccttgccgtcgcggaacgccacgaggtcgacgacgatggcgtccttgtcgccggggtccatggcgagcgtgtcgaagctggccgggtgctcgaagggcacgtggctccagacgcccttcccgcggcggtaggggttccagctggtgctggcgttgttggtgaagaggcggcgctggcggttgcggacggtgacggcgcggccctcggcgaggacgtgggggaggtagccgtcgaggacgaggtcgcggtggcggcggtggaagacgaggcggtagaggcggcgctcatcctcgccggggtagaagctgatgacgctggacttgttggacatggaggaagggtaccaccagagcgtggcgccgcggaaggagtcggtgacctcctggtggtcgtcgacggagacctggacgctcctggcgtccctgccgaggtcggccttgagcctgcgggcgcggcgggcgcaggcgtggctgaggtaggcctcgacggcgaggaagaagtcgctgcggcggaagcggtggtcgccgtactcggagatggtgatgtgcaggtaggggctgaggtgggaggcgagcttgtcggccatggcggtgagccagtggcggaggccggcggggacgtggttctgcagcatgggccagaggaagacgaggctcgccagcgcagaccacaccgcgccccacatctcgaagttcatcgccatggccgcccggcgattggcgagaacgtgtgcagatgtgcactgcagtatgtcatacactctttctctctcttcgtcggccagcagcaggcagcgccgcgcacggcgacacgccatggcagagaggcgagcgccggtgaggggatgcgatgggcagcggcgcgcgggggcaggccggcggtcggcgcgaacggcggcccgcagcgaggtggaggggatgggggagaggtgggcgccggcgtccatcgcggagaggcgggccgtcgtggcgccggccggcagcatcttgaggacgacagcgtgaggccgcggcggcggtggtccaggcggagcacgagctgggcgggcagagaggaaggaggtgaggaggccagggagcgggctaaggagggaggagactggcgagggagcggggaggccgggagagtcgtcggagtcatcccccagacgccgccgtcgtcgtcgttcgagccgctcccgccggagtacgatgagcccagccatactcgttgctgcgatgaccacctttggcccgacgacgaccgccgtgccccgctaccccttccccgacacctgctcggctcagatttggcgcggcggcggagagaagcgccgcccgcctcctccctctcggcgcgctcgccgcatcccctccgcgggcgcttgccggcatcccagcctgtctcgacagcctcccctccgctatcccctcctcccgccgcctcaagcaccggcgggcgcggtggggagggcgagacgggcggcgggcgccgaggacattgaagatgacaacggcgagctcgggcgtgcgcgccgacctcccgacggcccaagagagaggggtgagaggggggcacttcgtcgccctcgccacttcgccgccctccgccgcgacaggggggcacggcgccatcacgcccgccccgccacgcccgccgcctgccccgttcccaccactccccgccacgcccgccgccgcgctcgccgcccgtccgcatgccgctgccgccgcccactgcccgttgacgcacgcctga

SEQ ID NO: 11275 - DNA, 329 bp, Oryza sativa
  Clone ID: PAT_MRT4530_17514C.1
ttcactgtccggagatacgtcactgcacgaagctacctagcttaattacctggttactttatcgatcatcagcctagatatggcggctttgaacggtaaggtggtggtggcggtgatggtggtggcgatggtggcccattctctcccatctcatccctccgcaggattctcggccttcccctcctttgaggctcccacccccgaagccagggttgcagtagctgccgaatcttctactgcctcacccgaccatcccccgcactgcgggacttccccagcttggttcgttaccaaggcccatgctattacatctagccccgtgttgggga

SEQ ID NO: 11276 - DNA, 330 bp, Oryza sativa
  Clone ID: PAT_MRT4530_17515C.1
cccccccccactaaatcctataatttttataattaaagaccccccaattccaaaattccaagaaaaaattgttggggcaaaaaaaaaaaccccatttaaaacccctcccccaataaattttttgcctttgccatatttaataaaccccccaaacaaaaaaacttaatttaattggcattaaaggggggggttgcccctttaaacctgacccatttggcccaaataataaattaattttttttaaaaatcccaatcccggcattattccagtaaaaagggccgcgcctccctttgttggggtcctgccccaccaattttttcccggccccg

SEQ ID NO: 11277 - DNA, 501 bp, Oryza sativa
  Clone ID: PAT_MRT4530_17516C.1
atgtcgtatcgctccctgctgcacaagaggatcctccccgccgccgccgccgccgccaccgccgccgccggagctgctctccggcgaccggcggccggctctcgccttctccaagcccgacttcaccaggcaacgcagcagcagtgcatttctgacgctggttttagagacagcgagaaggatatcgatagggaaatagaacagctcgctcaaaagttcgaagaaaacagcaaacggtggaagcaagaacgggaggagttggacaacctcaggagggtggaggaaggccctgcgccggtggccggtggcacatgcacccactcaattctcggtgacttgccggcggctcgcaagcaggcgcgccgtgcagtggagattaaacattcccccatcgagctgatgtcgcaggcggagatgatcgtgctaggcggccctgagctggtgatgataaacattatagctacacaaatatttgggaggaatcgggagaaggcaaagtaa

SEQ ID NO: 11278 - DNA, 124 bp, Oryza sativa
  Clone ID: PAT_MRT4530_17517C.1
atgcacactagagtcgcctcctattgccgcacgccgcgccggttgctcaaccctggccagatgcgagcagggacgcgggatctggccatgggcattggatccaccgccgtgccggagttcgtcg

SEQ ID NO: 11279 - DNA, 364 bp, Oryza sativa
  Clone ID: PAT_MRT4530_17518C.1
ttttttttttttttttttttttttggttgggtttttttttttttttttttttttttttttttttttttttttttttttttgggcaattgggaaaaataaaaatagacaggcgctcctaaaattacttgcataaacaaatattccttttttaaactaaggggggggggggggggccaaaaaaaaaaattttgggaggcacttttaatgctaaaaactgtcccaattgaaatattttgccaaaaaaaaaaaattggaaacccgagctaggggccccttttggataaaatttttggggtaggggaagttatttttccctgggtgaaaaaaacaaaatttcttcaagaatatatttggttttcgcacc

SEQ ID NO: 11280 - DNA, 184 bp, Oryza sativa
  Clone ID: PAT_MRT4530_17519C.1
ccttgggccttcaccattggcaacattctcgcctgttgcttaatgtgtttttgaatatctagagccatatctatggttatctaaaagtctgtcgtaataattcggacccttttggggtaacacaatgcccaatacccccccccccgggggatggaaatattcgtttttacaaaaaaaaaaaaaa

SEQ ID NO: 11281 - DNA, 930 bp, Oryza sativa
  Clone ID: PAT_MRT4530_1751C.1
atggtgcgcaaggccaatgggaagtggaggatgtgtgtcgatttcaccgacctcaacaaggcgtgtcccaaggatcacttccctcttcctcgaatagaccaattggtggattcaacaactggttgtgagttgctgaattttcttgacgcttactccggctaccaccagatcagcatggcaaataaggacgaggagaagacaacattcatcacgccgtttgtcacgaccggaattaacccaacgggcgttccttacgtgcgtgtattattccttgtcccaggaggcaaggcgcttgacggcaggcacgagctagacaccaaagccttcaacttccaggggctcctcttctgggtttgggaaaaattgagcaagactgagtacaaccaccgttttaagaatgaaaacactaacttgggtacattgctcggcttgcccataaccgagggcgcggctattcgaataggttatactctgatcagaggcgaccacgccggcgcagcggcgggaggcggcgcgcccgcgcccctatggtcgccggcggcggccataggcacggcggagcggcggccgagaaaggggagggaaagggggaaacgaagcggcggtccacggctcaccccgggtcgacggcgacgacggaaacggcgaccggagcggaggaaggcggcggcgcggctcgggtcgatggggtcgacggcgttccggcggacggcgaccgaaacggaggggtggacgaggtcggcgagaatgcggcgaagccgaaggaggcggcgccgaggtgggaggtggtccggggcgacaacggcggcggaccggagctcggcggtgacggcggagagagagagcgacggcgcgagctcgattccggcgaggaggaagggcggcgagtggcggaaacggacggaggaggcgcggggagggtttatatag

SEQ ID NO: 11282 - DNA, 257 bp, Oryza sativa
  Clone ID: PAT_MRT4530_17520C.1
gagggggaaaaaccaaagcaaagccccaaaatgggcaaatcatagccaccccccagcccattattggattgaaaaaaaaaggggaagaaaaacccccccccctaactaagcgggaccgagccccacaacccgggggaatattcagtccactaagggggaccgacccccacccggaaattaattcaacaaatctttcaaaggcccccccccccggagggggaaatcaaaaaaactttcaaaggcccccccccccggaa

SEQ ID NO: 11283 - DNA, 578 bp, Oryza sativa
  Clone ID: PAT_MRT4530_17521C.1
gcacgagggatcgagcgaaaaaaaaattggaaaagcgcgcgacttcgatcccggccgctgcccggccggtgacttgccgccggcgaccgccccgcaccccgccctcccgtcgcccgtcgcccgtcccgtcgtgccgccgtcgacggtcgaccggcgcccatcgccgcatcagcgcatcgcgctgcgagcgtcctgcgccccggccgcccggtgacctcgtgggggtgactcgccgccggcgagagccctgcgccccgcccgtcgcgccgtgacaccgtcgacagtcgaccgtcacccgttgctccatcgcggctccacacaccagcgctgcgattccccatcgccgcttcaagccctaggcccctacttcgcgatctgtcgctgcttcaaacaaggacgatcgtcggcttactgcagcaagtaccaaattgggaaatatgaccattcaaattaaatggagggaatattggtacccattctaggtgttaccgcgttaaccttccattgacaggaactatctgcccaggaacatcctatccacctcaggaacctggactaaattactctaaacaaatttg

SEQ ID NO: 11284 - DNA, 1512 bp, Oryza sativa
  unsure (1)..(1512): unsure at all n locations
  Clone ID: PAT_MRT4530_17522C.1
atgctngtggcgctgagctatgctctcctcctgcttctcggcgtccccagggccgggagctcccgcggggcccttactgacggtggccgcggttggggagatggccggcggatggctcctcggctgactcagtggaaggcgttgcatgattgtccacatttggctggtggaatgaaatgggggagaaggaaaatgagaaccggaaggaaaatgatgaataggcggatcatagcaaaaaagatgataagagaaaatgatgctgtcagaaatggagatcttgaaagagcaaaggcaagagtcacagaaggtgctaatttggataccttgatacagaagctcccaggatgtagtagtcgagatctgatcgatcaattgacggtagagttttgctatctgaattctaaagcaaacaggaagaaacttgcatgggccttatttaatgttccaagaacatcattggaactgttaacttactattcccgattagttgccaccttgtcaacatacatgaaggatcttccaagtattacgttgtcaatgcttgaagacgagtttaattttttgataaataagaagccaagttcatctgattgctcaactgctggtcttagtcactatcatgaagattttgcggtggctgtggtagatgaggttctagaggaaataagagttgggcttgagctgaatgactattcaatgcagcaacaacggcttgcccacatgcaattttttggggagttatataactacgagcatattggctcatctattatatttcagacactataccttatcattgtatttggtcacaaaacacctgaaccattaggttataaattcaatataagtggagaagagctggatttgtttgctcatctaggatctaacatgactagatattcatctatggaagaactgagtgttgctctgattgagcttgaagcaaatgggtatgttgcatcagctgagaaatgtggaaatgaatggcactcaggcagcaaagagcagacgaaacaatctgattatgtttcttttgatgctaatcacaagagctcaagagacaggattgatgaaaatggaaatgataatgaagaactggcagatggacatgaagacactgattttccaagcgaagggagatccgatggaagatctgaggaggatgacaatggcgatgataacatgcctgttggttttgatgatgaagaaattcctcagatgacaatggcgatgataacatgcctgttggttttgatgatgaagaaattgttcatgttaaaaaagaggatgtcaaaggacttaagggccactgaactagagaatggaggagaaaatgcatccgtgagtatcaatgatggggatggtggcaaggtgtgtatcaaggtgcttgtgaagaaagggcacaaacagcagataaaggaaatgttcatccctggagactgctcacttgttcagagcacaaagcagcaagaggctgctgagcttgaggagaagcaaagcatcaagaattaa

SEQ ID NO: 11285 - DNA, 135 bp, Oryza sativa
  Clone ID: PAT_MRT4530_17524C.1
atggaggtggagagatcagagatagaaaggacaaggaaaggctccgccacttttgcgaaagccgcaaatggggtcagcgagagagagaagagagacgaccccctatgtttcttccaggttcccaaccgctcataa

SEQ ID NO: 11286 - DNA, 719 bp, Oryza sativa
  Clone ID: PAT_MRT4530_17525C.1
cccacgcgtccgcccacgcgtccggatcttcaagaccaccaccggcacccccttcctcttccccaccaccgggacgggggcgtgggagagcgcgctgacgaacacgctgtcgccgggggacaagatcgtgtcgttcctgatcgggcagttcagcctgctgtggatcgaccagcagcaacgcctcaacttcaacgtggacgtggtggagagcgactggggctacggcgccgacctcgccgccctcgactacaagctccgccaggacccctcccactccatcaaggcgctggaggcgagcaagacggccaagtcggtgcgggtcttcttcgactggaaggactacctcaagttctacaagatgggcacctactggccctacaccccatccatccagctcctctacggcctccgcaccgccctcgacctcatcttcgaggaaggcctcgagaacgtcatcaagaggcacaaccgcctcggcaccgccaccaggctggccgtggaggcgtgggggctcaagaactgcacgcagaaggaggagtggttcagcgacaccgtcaccgccgtcgtcgtgccgccgtacatcgacagcgccgagatcgtgaagcacgcctggaagcggtacaacctcagcctcggccttagcctcaacaaggtcgccggcaaggtgttcaggatcggccaccttggccacctcaacgagctgcaattgatgggtgccc

SEQ ID NO: 11287 - DNA, 2781 bp, Oryza sativa
  Clone ID: PAT_MRT4530_17526C.1
cggacgcgtgggccaagaccaggtagccgcagcgagaggagagcgcgagcagagcaagcaaccaagcagcagcagcgatggccgccgcagccacgacatcctcccacctgctcctgctctcccgccagcaggcggcggcctcgctccaatgcggcctctccttccggaggcagcccggcaggctcgccggtgggtcgtcggccccgagcgtgcggtgcatggcggccgtcgacacggcctcggcgcccgccgcgacggaggctagcaagaagagcagctacgagatcaccacgctgacgacgtggctgctgaagcaggagcaggccgggaccatcgacggcgagatgaccatcgtgctggccagcatctccacggcgtgcaagcagatcgcctcgctggtgcagcgcgcgcccatctccaacctcaccggcgtccagggcgccgtcaacgtgcagggcgaggaccagaaaaaactcgacgtcgtctccaacgaggtgttctccaactgcctcaaatcgagcgggcgcaccggcgtgatcgcgtcggaggaggaggacgtgccggtggccgtggaggagagctactcgggcaactacatcgtggtgttcgacccgctcgacggctcctccaacatcgacgccgccgtctccaccggctccatcttcggcatctacagccccaacgacgagtgcctagccgacatcgccgacgaccaaaatcttgaccaggtggagcagaggtgcatcgtgagcgtgtgccagccggggagcaacctgctcgccgccggctactgcatgtactcgagctcggtcatcttcgtgctcaccccctgcctcctccttcgcacgtattacgtgcgaaaaaaaaaatcatcagcacaagatcgaggaggctttatctgaacaagggagatggcggactacgtgtatgggccggggcggaaccacctgttcgtgcctgggccggtgaacatcccggaccaggtgatccgcgccatgagccgtcagaacgaggactaccgctcgccggcggtgcccgccctcaccaagaccctcctcgaggacgtcaagcagatcttcaagaccaccaccggcacccccttcctcttccccaccaccgggacgggggcgtgggagagcgcgctgacgaacacgctgtcgccgggggacaagatcgtgtcgttcctgatcgggcagttcagcctgctgtggatcgaccagcagcaacgcctcaacttcaacgtggacgtggtggagagcgactggggctacggcgccgacctcgccgccctcgactacaagctccgccaggacccctcccactccatcaaggccatctgcatcgtccacaacgagaccgccactggagtcaccaacgacctttccgccgtccgcaaaatcctcgacaagcacaggcacccggcgctactactggtggacggggtgtcatcgatatgtgcgttggacttccgcatggatgagtggggagtggacgtggcgctgacgggttcgcagaaggcgctctcgctgccgacgggtctgggcatcgtgtgcgcgagccccaaggcgctggaggcgagcaagacggccaagtcggtgcgggtcttcttcgactggaaggactacctcaagttctacaagatgggcacctactggccctacaccccatccatccagctcctctacggcctccgcaccgccctcgacctcatcttcgaggaaggcctcgagaacgtcatcaagaggcacaaccgcctcggcaccgccaccaggctggccgtggaggcgtgggggctcaagaactgcacgcagaaggaggagtggttcagcgacaccgtcaccgccgtcgtcgtgccgccgtacatcgacagcgccgagatcgtgaagcacgcctggaagcggtacaacctcagcctcggcctcggcctcaacaaggtcgccggcaaggtgttcaggatcggccacctcggccacctcaacgagctgcaattgatgggtgccctgagtggagtggagatggtgctcaaggacatcggctacccggtgaagctcggctccggcgtggcggcggcggcggcgtacctgtcgaattcgacgccgctcatcccgtccaggatctgaagcacaacgaacgaaggaaggaaagcaattctcagcagcgatggttctgcctgcagtttggcagaacggaacagcggcaaattaatcctattgcatataatttggtctctgtatgtaaagttaaatttttatacgctccatcgatcagctctatgctaaggagtaaggagtataattttgtgaaggtactgcagcttttacttaattaatcttgaacctcgatgtatacaacagtgaacagttaaattaatcatcattccctaatgcctcttaattttaaataaaaaaaaaaaaaaaaaccagaagagcaagaacggcaagctgcggctgctgtacgagtgcgcgccgatgagcttcatcgtcgagcaggccggcggcaagggctccgatggccaccagaggatacttgacatcatgcctacggagatccatcagagagtgccgctgtacatcgggagcgtggaggaagtggagaaggtcgagaagttcttggcttgactgcaagtttcatatacgggggtgtttctaaaaaaaaaagtattgtaactaaattataatatatttgtagaaattttcttttctgatggcgaattaattaaacccattgtgaaggatttcatccctactgttgataggtcgaggctccttctcactagtcctg

SEQ ID NO: 11288 - DNA, 310 bp, Oryza sativa
  unsure (1)..(310): unsure at all n locations
  Clone ID: PAT_MRT4530_17527C.1
acacccgttcggaggaccnttttccaaaggcaaccttccaaggnnggaccccctttccgggcaaaccaaacccttggcttccaacccgttcaatcncttccgcgcccctgcccggatgaggacgcccagcctgtaaacatctccgccggcgacgctggctggcctcaagttaattttaatcttacccgggaagaagaagggaggagtttgagaagggtggaagaatgtgttaaatgtacgtgtaaattatcgtcgagttgggagatgaatttgaaaacctgttcattctgatcaaaaaaaaaaaaaaaaa

SEQ ID NO: 11289 - DNA, 382 bp, Oryza sativa
  Clone ID: PAT_MRT4530_17528C.1
gtccacgaggtgattcacgcggcaaaaccctgaacccctccaaccactgcagccgcaattccgccgccgccgcagccacgttggccggcggcctactgggggtgctggaggcgcgattgatgagccctgcagccgacgccgcgggcagcgatgcacaggctcgtaccccgcgccgccgcctccttcctgggggccccggcggtgctcaccacccaggcgggcccgatattcgccgggcgttcgggcccaccaaaccctagccgactccggctgcgtctgtcctcgtggcggctgctgcgctcgaggagggggctctcctgctccgcctatgcagggaacaggcgctgggatgatgatgccgaggaggatggctagcagagcg

SEQ ID NO: 11290 - DNA, 240 bp, Oryza sativa
  Clone ID: PAT_MRT4530_17529C.1
atgccggaggagtcttaccaggaggaggggtacgcaccggaggctgaggaggaggcagcggatgatgatgatgaggaggaagccgtcgaggcctccgcggaagttgcggaggaggctgaggacgtagaggaggggtatggtggccatttctcattatatggactggtctctattaccactcaaggcactggcatactactggcaaactggcaatgcgttttcagctgcagcttggcatag

SEQ ID NO: 11291 - DNA, 243 bp, Oryza sativa
  Clone ID: PAT_MRT4530_1752C.1
atggcggggctgacaagtagtacgtacagcacgacgacgcgcgtcattcggcacaggccggccggcggagtcatcggcgtgcgtgcacacccacctcatctacatgctcgggctcccctcgtctcgccagcgcgttgccgcgatgacagcaatgctgcaagcgaaccacaagaggccatgaactgggatttggaggactccttactatacctcatccagatcaagaaccccaactcgtcgtga

SEQ ID NO: 11292 - DNA, 524 bp, Oryza sativa
  Clone ID: PAT_MRT4530_17530C.1
cccgggtcgacccagcgttcttttaaaaataagctcaggtatcatcgggtgtgacatggtgaaacttaaggtgatataaatagaaataaaattatctttcataaaaaaaaaaaaaaaaaaaaaaaaaaaaaaaaaaaaaaaaaaaaaaaaaattaaaaaaaaaagaaaaaaaaaaaaaaaaaaaaaaaaaaaaaaaaaaaaaaaaaaagggtggggggggggaaaaaaaaaaaaaaaaaaaaaaaaaaaaaaaaaaaaaaaaaaaaaaaaaagggggcccccttttaaaagaaccaaatttacctccccctcccttcaaagtaaaaattttttttaagggcccccaaaaaaaaaaaaactgccccggttttaaaaacctgggacctggaaaaaccccgggtttccccaattttatttccttggaacaaatcccctttttcccaattggggtaaatacaaaaaggcccccaccaatcccctttccaaaaaattggccccccctttaatggaaaatggaacccccc

SEQ ID NO: 11293 - DNA, 249 bp, Oryza sativa
  Clone ID: PAT_MRT4530_17531C.1
atggagggccggcggttggatgggggcaatggtggctacgacaagatagaggaggcggggttcgagataagggcgacgagtggaggatttccgaggcagcagcggttggcaggaggaccatcggcgacggcgtgggtgcctggcagcagcggcggcgaccggaccatgggccggcagcgtgggttatgtacattaaagaaatggttgaaactcctctccctgccacctagccctctccccgccgcctag

SEQ ID NO: 11294 - DNA, 207 bp, Oryza sativa
  Clone ID: PAT_MRT4530_17532C.1
gaggcacattggggcacatcaccggttctcgcattcgtggaagggactcctgcatggctccatgagcgattttacccctactttcttgctggctttcggactacgacaagcaaatgtgacaaataccagacttgtgattagatcctggataacccggagagctttctaggtcccctatgaataagaagatatgcttcgttctctgga

SEQ ID NO: 11295 - DNA, 277 bp, Oryza sativa
  Clone ID: PAT_MRT4530_17533C.1
aagaaaaactggcttatgcaaaactttgcaggtattgattgagcccatatttagaaagaatacaaagtacagtctggtgtcattcacaaaaccattcgggggagtaccatgtggaattgcacctcaattctacaaaaatgttatatttagctggcaaacaggaggcctttcttcttgaactcctctatgttggctacaaccatgctgatgttttggcgaccttggcaatggccttgatctcattaggtgaccacctcctcaagaagggacccatcac

SEQ ID NO: 11296 - DNA, 2478 bp, Oryza sativa
  Clone ID: PAT_MRT4530_17534C.1
tagttcttatatcaaaaccggctacatggagaccctgagctctgtcactaatatcgtcgtggggaagctcttcgcgctactggagaagaagtacgagcagtggaggggcctggaggacagcatcggtttcatcaagcgggagctccgcgtgatccatggcttcctgcacgaccagctcccgcgggatcggaatggggaggatccgccgatcagcgccgtgcaggccacatgcatcgacgagctccgggatctggcgcacgacatcgaggactgcctcgaccgcttcctgccctgcgccgcgtgcgagcgcgattcgtcgttcctccgccgcctcgcggcggactctcggttcgccggcgaggtcgagaggctcaagtcgcggctggaggaggcgcacgagcggagggctaactacggcgtcaacggcgtcgccggctccgccgccgagctgtggccttgtgggcatcaacgtgcccaggcaagagcttcttgacctgctcctgctcgaggacgtggagggccggccggagcggatgcgcgtgatctccatcgtgggattcggaggctcggggaagacgacgctcgcgagggcagtgtacgactgccccgacatcgccggccagttcgacggccgcgcctgggtcgtggcgtccaagcacagagatgataccatggggctcctgtcggcgttactcggccaaattcgtcaggaagatgaccaaagattcaatcaaattcctcaggatgatgagcaaagattccagctacagtcccaagtccaagctgatatcatttccattatacctgctaggtaccttctcgtgtttgatgatattgaggagaagcagtggaactgtataaaatcaaccttccctacagaaacaagaagcagagtactagtgacaacgactattaaaccagttgcaaatgcctgcagccatggtaccggttctgtgtacaatatgagaactctgaatgtgaaccattccaaggatttgctgcaatctgtcctaaaggaatactctcctgagttggagttggacttgccatcgattctggagaaatgcgacggcctcccgcttgctctgtgctgcaacctaggtcatcacattgagaaggagcacgcctttgcagaactgcgacaagttcttgcgaacaactacaacactctgcctggccatcccctcaagacctgcttactgtacacgactgtgttccccaatggctgttccatcagaaggagcagtctgatcaggcgatggttagctgaaggctatgtacaatgccaatatcctcgcagttcactggaggttgcagatgcaaacttggaggagctaatggaccgaaatatcatcaggtcgatggatgttaccaacaatggaagggcgaagaactgcagggctcacggtatcatgcacgaattcatgctgcacaagtccaggtgtgataatttcattgcatccctccatgacccagatcgaagcaaatgccgccacctcttcttaacccagagccttacaagtggaaatcaatcatacatggattgtggaactaatccaaagggtaagcaacctcgtgccaggtctctgacgatctttggaaatgcaggggaatttgctttagattatgccaagtgtgagctgttgagggtcttggatctagaagaatgtgatgatctcaaggacgatcatgtcaagtacatatacaagctgttgcatctaaaataccttggccttgggagcaccattacatatattccgagaaaaatcaataaagggctgcattgcttacagacactcgacctgaggaagacaaggataaacacattgcctgtggaaatcattataatgccacatctagctcacctgtttggaaagattaagattagggaatttactcaggctggcatggacactactggtgctcattctctgtcacttcgatccagaaaatttcctaaccgtctactgtgttgtctggagaagtcgtatggttatctcagctccttgaaactgcagggcgagttgagccggtttccacagttcatcacatcactgtgtggtctcacagagctgtgcctttcatcaacaaatctgaataaggaggatctatcaaacgtttgcacattgcaccacttgctttatctgaaactggttgaatctgaccttcagggctttatcataaaaaatggtgacttcccacgtatgcgacacttatgccttgtggtgcaaaatcccaatctccctacagttgaaaaaggagctttgccacatctcctgtcactccaattgctctgcaaggatctagttggtctttctgaaatcaagattgagtaccatgattaccttgaggaagttgctcttgattctatggtcaatatagaaacaatagaaggaatatcagcgtggtgtgcggccggcgggcggcggcgatgggagaggcgcaggccttggtctggtgcagccagcctagatattt

SEQ ID NO: 11297 - DNA, 3436 bp, Oryza sativa
  Clone ID: PAT_MRT4530_17535C.1
caacggtccaaaattagaaagatagaatgtgggattttctgtcaacgtatgtatagacagtccaatattctaggagtaatagcaaaacattgggagtatttcagtcaatttgttttagttcagaaatttgggaaaatatctaggctggctgcaccagaccaaggcctgcgcctctcccatcgccgccgcccgccggccgcacaccacgctgatattcccgtgcgccgccacgatgcgcaacggcaggccctctcccagtcgcaggccacagccgcaaggcaagccccagatcgggtgtggcatccccccacgtcgtcgcggtaaccttctcttcacctgcgatcggccaacggcgccgtccccgcctgcaccggcgagcggcgagcggcgaccgtagcctgggccctgaggagatgagggtgaggctccaccgccactggatctgatctgccaccttccacctaaagaagaatctacaaaccattgccagcatttggcacctcagttaaacgccagagcagcatcttaaactcttttttgtttcaacagactcgttataatatgattggatagcatggaatttccgtttttttatcaccgcagggcatcctgtctcaggtactggtctttctgttgcagcatacttcgctgtggactgagcatcggttggatcaaccctcttgcggaacagaaccttgggtctatttgggtgcttcttagcttcattttcccaaatttctattgtttctatattgaccatagaatcaagagcaacttcctcaaggtaatcatggtactcaatcttgatttcagaaagaccaactagatccttgcagagcaattggagtgacaggagatgtggcaaagctcctttttcaactgtagggagattgggattttgcaccacaaggcataagtgtcgcatacgtgggaagtcaccattttttatgataaagccctgaaggtcagattcaaccagtttcagataaagcaagtggtgcaatgtgcaaacgtttgatagatcctccttattcagatttgttgatgaaaggcacagctctgtgagaccacacagtgatgtgatgaactgtggaaaccggctcaactcgccctgcagtttcaaggagctgagataaccatacgacttctccagacaacacagtagacggttaggaaattttctggatcgaagtgacagagaatgagcaccagtagtgtccatgccagcctgagtaaacttctgaatagccgctgaaattaagctgatactgctattacgttcagctgcgggctcgcaccatatcttgacctttcttagtttattcatatgaaccatcaggcgaggaaacaaagagttcttgtctacaacaaaacctgctagagtttgcaatttacttttatctgataatatcttctctattttattcgtttcaaggacccaaaggccccttgcttccctaatcttaatctttccaaacaggtgagctagatgtggcattataatgatttccacaggcaatgtgtttatccttgtcttcctcaggtcgagtgtctgtaagcaatgcagccctttattgatttttctcggaatatatgtaatggtgctcccaaggccaaggtattttagatgcaacagcttgtatatgtacttgacatgatcgtccttgagatcatcacattcttctagatccaagaccctcaacagctcacacttggcataatctaaagcaaattcccctgcatttccaaagatcgtcagagacctggcacgaggttgcttaccctttggattagttccacaatccatgtatgattgatttccacttgtaaggctctgggttaagaagaggtggcggcatttgcttcgatctgggtcatggagggatgcaatgaaattatcacacctggacttgtgcagcatgaattcgtgcatgataccgtgagccctgcagttcttcgcccttccattgttggtaacatccatcgacctgatgatatttcggtccattagctcctccaagtttgcatctgcaacctccagtgaactgcgaggatattggcattgtacatagccttcagctaaccatcgcctgatcagactgctccttctgatggaacagccattggggaacacagtcgtgtacagtaagcaggtcttgaggggatggccaggcagagtgttgtagttgttcgcaagaacttgtcgcagttctgcaaaggcgtgctccttctcaatgtgatgacctaggttgcagcagacttgatttcggtaacattcagtgatcctttctcgccatagaaagtttcccacactaaccagagcaagcgggaggccgtcgcatttctccagaatcgatggcaagtccaactccaactcaggagagtattcctttaggacagattgcagcaaatccttggaatggttcacattcagagttctcatattgtacacagaaccggtaccatggctgcaggcatttgcaactggtttaatagtcgttgtcactagtactctgcttcttgtttctgtagggaaggttgattttatacagttccactgcttctcctcaatatcatcaaacacgagaaggtacctcttagcattcaggtgttgcctgatatcagcttggacttgggactgtagctggaatctttgctcatcatcctgaggaatttgattgaatctttggtcatcttcctgacgaatttggccgagtaacgccgacaggagccccatggtatcatctctgtgcttggacgccacgacccaggcgcggccgtcgaactggccggcgatgtcggggcagtcgtacactgccctcgcgagcgtcgtcttccccgagcctccgaatcccacgatggagatcacgcgcatccgctccggccggccctccacgtcctcgagcaggagcaggtcaagaagctcttgcctgggcacgttgatgcccacaaggccacagctctgggccatgtaatccgtcgtatttgctgagcctgagcttgatccgccagctgcggcggcggagccggcgacgccgttgacgccgtagttagccctccgctcgtgcgcctcctccagccgcgacttgagcctctcgacctcgccggcgaaccgagagtccgccgcgaggcggcggaggaacgacgaatcgcgctcgcacgcggcgcagggcaggaagcggtcgaggcagtcctcgatgtcgtgcgccagatcccggagctcgtcgatgcatgtggcctgcacggcgctgatcggcggatcctccccattccgatcccgcgggagctggtcgtgcaggaagccatggatcacgcggagctcccgcttgatgaaaccgatgctgtcctccaggcccctccactgctcgtacttcttctccagtagcgcgaagagcttccccacgacgatattagtgacagagctcagggtctccat

SEQ ID NO: 11298 - DNA, 4476 bp, Oryza sativa
  Clone ID: PAT_MRT4530_17536C.1
gttgctatcatcaaatgtcagtcttgtatttatgtacaatctcatctgtttacactctacgcaactatgccagttggctttacattttcataatactagatcagcgtgtacaaaataatacctcaaaaaaaatcacttctacatattcccagaaccactaattggctctcttatctcatcagtttcgtggctggttagattggccaaacccaacaggaactccattgcatcaaattttcttcgcaaaatgctgccaatctttgatcatagagtggaggtatacttggattattggtgcacaaaattgattgaatgtcttatcctggtgtgtgtggtttacggcgttctacgtgtatcggctttttcatgaggttctacagcaatcaacttgatggcagcagcaatgggcatcccaaggaagccgaagagtatgctgatgagccactgttgctgggtcagaggtgtggtgttagcgaaatcgcccaggaactggactaggatgaactggaagaagatggtgccggtgaggacaccaaggaaaatggagttccctgccatgcccctcagaacgttgatgtcctccatctctcttgagcttatttcattgaacacctggcagaagacaaaagtgttgaatatgattgtatttagtacaatatcagcatggtagccttccagcccaaacaagtgtttcccttgagtttgtagataccacatgacagcgaattggtataacgactgccccacaatgttcctccacatcacatttgtgatgaacttccctttccttcctaccggtgctttcttcatcaagttattgttaggtggttcggtggctagtgcaagcgcccctagggtatccatgatcatgttgacccaaagaagttgtacagctgtaagtggagcatcccctgtgaaacatgcagaagtgaagttaactagtaatgcaacaacattaacagtaagctggaactgcacaaatttttggatgttcacataaacagagcgtccccatttggcaacagtaacaatcgtggagaagttgtcatccagaattacaacatcagcactctcttttgccacctcagtccctgcaatgcccatggcaagtccaatatctgcctcacgcagcgcaggtgcatcattagtgccatcaccagtcacagcaacaacttcattgaatgcggtgcgcaagtgcttcacaagtgtatgcttatcaagtggggaagaacgggctagtacctgcatttttggaatcaaatcatggagttcttcagcacttttctctctaaactcagcaccctcaattgcaatgccatccttggtaagtatgccacattcccgagcaattgcttttgctgtatcaatattgtctcctgtaatcattctcactgaaatgccagctgaccggcaagttgccacagactgcctgacacctggacgaacaggatctttaataccaacaatgccgatgcaagtgtatccttgtaacggtatttgctcttgagtagaaaacccttcttccatttccctataagcaaggcaaagtgttctgagcgcttcactagaaaaggctttgattatatcattgagcttactggaagttttatcatcaagggggacaatacaacctctttcatcaataaacttatcacatgcagccaatactatttctgaagcacctttacaatgtgcacgatatcctccaccaggaagctcaagaatggtactcatcctctttttggttgaattaaaaggttccactttaacaatcttacttcccagttgcttttctttgcaatctccgtctagcaacagtgcaaactccaacaaagctgtctcagtaggggtgcctagtatttgatacttcccatcttggttagtcaccacttcgccactggtgttgttaaatatggactccagaagagtttctacagcaacttctgggaaattggaagacatgtttggagtctgtggattgttaacttgtatggtattcccacagatgcaggcttttacaacagtcatgcggtttgttgtcagtgttcctgtcttgtcactgcaaatgactgtggcagagcccatggtttcacaggcagccaactgtcgaacaagtgccttgtcattcatcattttcttcattgcaaatgcaaggctcaaagtgactgccaatggcaatccctcaggtacagcaacaacaacaattgtaactgcaacagcaaaatgatccaatatctctagcacatcatctccggaccaactcaaaagaagcccgtcaaggtatttctggccaattatcccttgtgagaggacaatgaaagtcaatacagcaaaaaatagaccaattttcccaatagtattcgcaactccattaagtctggtttgaagtggagtttcatcatccccaccatcagtaagaacagccattaatttgccccattgtgttctcatcccaactgctgtaaccagcattttgcaggacccatcaagcactttcgtccctgataaaagataagggttatcttcgtttacaaaaacaggttcactctccccagttagactagactcatcgaccaacacagaaaacccagaaataaataggccatctgcaggaacctgatctccaacagcaagatggacagcatcaccaggaagaaggtcatctatcagtactctttgtctcaagccattccttgtgacttgaacaagaattttccttttctccttgtcaaggtccctgaattgcaaggactgctgatagttacttgttccggtaacagaaacaacaaggaggatacttgcaacaatgccaacgccatcatgggctccttgtggccatccttctgtggttatgccaacaaccaaagagaaaatagcacacgcactaagaattataagggttgtgtcttccagtgcttcccatacaaactcccaaaagctgcgaatctcggtctcagcaaacttatttactccatatatgtcctgcctttgattcaagaggtccttgtctgtaactataccattggttaatgatgttcctaatttgtctgcgatcccatttaattggccatgcacagtcaactttttagtgtcgcgactttcaacaatagatgctagttcatcagcatcaatctggaaccctgcagcttgaacatcttcaggaacaatatatgcacttcgaagtgagacaccatgttcaaactcgagtgtagctttggatggcagtgcagcaacctgtaacttctccttgtgaaagaaagcatcaataggtatgtgttttccttcttttgaagacttgagcttcttctttggtgtgggtgtgctagagcatggcctttcagctaacctctctttcgagagggggcctgtgctgtccactgcctcttcctgctgaagcatttcagccaagtggaaatctgaatgttcttgtctctcctcctcaaaacctggaggtagttcaaatccacaaatggaacaaatgtagccatttatccagaaaagctgatcaggtttactcgatgaagtagttgcgttagagctggtgagctggccatcaaactttacagtatgtgtacccttcgaactggaggagtcatcatccaattcttttccaccaacaccatcacacataagtggattgcttgatgcagcatcattattataattgtctgagctccttccttctggaacaaataagttcttttcatgcaaaaacaatgcctgatcatccatggaatcatgctctaaataatcgaccttggtcatcacattagtgcaatagttatcccctcctgtggtattaccgatgcttggactgtttgctccaatgacatttgagttgtcaggcgtgcggaaaaatctatctagtgtcttttgggtttgggtagatgaatcatccttctcatcgcgaagttgggacatccgcaaccccatcaatctcaaagaaagaggcagttcagccttaagcaatttcctagcgtagatcaggatgtcttccttggagttgatatagttttgtgtggttactgctcttgtcctgacctcaaaagcggcagtctttagtttgagtgttagtgtccttcccttcaggcattctttttgcatatcatcggccaaattgtctgcgagactatctaatttctcgaaaagcatagaacaatcatctgttgccctgaaagttcgctcgcaacttatacttttccttagtctttgctcaggagtttcagtaccgcctagtccaagaccaaccgaaataaagaaatcagctgaggattcagaaaaaagagcacataagaaagaagccttttgcagcatctcctggcatgtactgataccaagaacctgacgtaacatttgttctgttactttgcctataccacctatctgcatacaaagatcttcaaataaaaaatcagccttcacctttttcatgaatgtccaaagaggcaaagcacttagtagtaaagaaaactccat

SEQ ID NO: 11299 - DNA, 842 bp, Oryza sativa
  unsure (1)..(842): unsure at all n locations
  Clone ID: PAT_MRT4530_17537C.1
atgtgcaatcatgtacnacttggtacagtcattcatcaaacaaggtaataataatcgggtgcccgaggatccttatgctaaggtaaagtttaaaataccatctttttcgggatattatgatgctgagaaataccttgattgggagatgacagtagaacaagccagtagtgagttcaaagattttgctatcatgtggggggctgggttatctgataagggagctttatctactatttgggaagaacttaaaggagctatgcgcgataggtttgttcctccatcttatcatagagatttacgcaagaaactgatgcgtttagaacaaggggataaatctgtacaagattactatggtgagctacaaaaaggtgtgagacgttttgctatgcttgcaaagaaagaattgcaagggcgtgagcagcaaggcaaagaacaaggcgagtacatacacttctcacacgatgccatctgcgggattgcccaaggccgtctcttttcgggcgcctttctaaccagcgagcaagtgaccagctgcattcggagcttttgctgcaccaccaaaaccattttcaccacgaccagcagagttagggtaaaagtctttccaggtaccccgccaagagtgctcatttgtcgcttttataggacgcatttaatgccaccgtgcccaaggttttggcatgttccagaaagattgccctatttaacaggcatatgttgtacagaagatgggttcattaaccacctccnantgggaagaagaagaagaggaagaaaaaattttgggttaaggatggcgaaatctttgggcgtgatgcaccatgggcctacaggacattatt

SEQ ID NO: 11300 - DNA, 315 bp, Oryza sativa
  Clone ID: PAT_MRT4530_17538C.1
ggtggaaggataacaattcccttctattttgtgcaagcaatgcatcaagaccggtccaaactcccagcccacaaccaatacaacgtaccatggttcgaggagtacaaaacggtatataaatgttgacatctttcagctgctacgagacatgtacacgaaacacaaactttgatcactgatcgggctgccattccgggcacatcttttaccgtgcgtctaactgaacatagctgtagggcagaaaaagcaccggaccgaacacctccacacacttgcggattccaaccatgggctggtcttacacacgccccaatt

SEQ ID NO: 11301 - DNA, 549 bp, Oryza sativa
  unsure (1)..(549): unsure at all n locations
  Clone ID: PAT_MRT4530_17539C.1
ggaattcggcacgaggctgcgcaagcgcttctccctccttgcgcggtagccggcgccaatccctaccctcgtggcggctggctctgctccctctccctgcgcagcagccgacgcctctccagccctctcccctatgcagcgagtcctctcctctctcatgaggtggaggaggaggcgtggggtggcgggggcaagatccaacgacccccaagcttgggaccagcacagcgttaagggagatggcgaggacggtgcgacgacggcaaggacagtggctccacgaaggaggaggtgcagggcggcggcggccagatccaagtgaattttttgctgcctcccgctttcactcacccttgcttctgttactccatctgtaagcgatgtctttgccttagcagccagatttgatgtcgtcctttggaaatttgtggccttctttatggggatctttggtgcttgcccgatttgctctccatgggtgttntggagatgcttgggctgattctgtcacactggatttgccgcatcgtgactcgtgagctgctgcat

SEQ ID NO: 11302 - DNA, 177 bp, Oryza sativa
  Clone ID: PAT_MRT4530_1753C.1
atgaggcgattccctccgttcagggttttcaccattggcatcgccagttggtggctgctctgggtgcgctgcggcagcggcctcttcgaacgcattgctgagtatagcgtcgacggctctgatgtgctgggctggggtggccacttgattctccgcttctgcattggtgcgcgctga

SEQ ID NO: 11303 - DNA, 767 bp, Oryza sativa
  unsure (1)..(767): unsure at all n locations
  Clone ID: PAT_MRT4530_17540C.1
gcacgaggctctctctctctctctctctctctctctctctctctctctctctgtctcacccaaacaaaataaagaaagagaggagcggagcgccatcagccgaccgatcgagcgatccgatggctctctctctctctatctatgttgttgctgccgccggcgggcgcgcgctcgcagggagggtgacaacaacaacaacgaggggtcacgcggcgtcggcggcgtcgtcagcaatcaggcgtgcggcggcggcggaggaagggaagggcgcggcaggaatcacgcacgcgaacgaccggtcgtcctcnccnnnnnnnanggatgtttcttgcntnccccaccccctgaccgcccactacctaccctccaacttcgtcggcgacaccgacccaatctacctgcagaccaaccaactcagcacgagatacgcacgtgcgtgatgcgcgcgacctcgccggcgagcgaccagagaacaaagcatccatccatattaaaatagtcccagctaataacatattacctaacgagcagacgaccgagcccggcggcaaacacgtccgccataggagtatattaacaagaagaaacaagacatanttgatcggcggctgatttgacgccgaaggagacacccacacacttgcatggagcgtggggcaggaacgaccaatggtggggtgtatgaccgacagtgatatgacagcaggggagccctcaccttctcgtgcaaacaactaataagcacaatttatacacctgaaaccaca

SEQ ID NO: 11304 - DNA, 264 bp, Oryza sativa
  Clone ID: PAT_MRT4530_17541C.1
atggcgccgacgtgggtggggaaggctgctcggctcggcggcgcagctggggacggagacagcgccgccgccgccgtcctcgtccccagccgcgccgccgccggcgctacccaccatttgcaacggatagaaggaagagatagagggagagatgagactatccaaggctctccgaggtatgcctgctgccttctcaagaccgtcgccgatttcgttgtccccgaacaggaggcatccttcggcgtagacagtctcaacccatag

SEQ ID NO: 11305 - DNA, 503 bp, Oryza sativa
  unsure (1)..(503): unsure at all n locations
  Clone ID: PAT_MRT4530_17542C.1
cgcactttcttcaccacagcgcnttggcccgattcaattaatggcaagctgncacgaacaggtttcccgacttgggaaagcgggccagtgagcccaacgncaaattaaatggtgaagttagctcaacgtcaattagcaacccaccagcattgtacacttttatggctttccggctcgagtatgttgtgtggaattgtgagcaggataacaaatttcacacaggaaacagctatgaccatgattacagccaagctctaatacgactcactatagggaaagctggtacagcctgcaggtaccaggtccggaattcccagggtcagacaccacagcagtccagctgctctgctcaagcttgccaagccatggcagcaaagcaagcggcttttctaagatattgtcgctaaactgtattttggggtgaaagtattgctactcgattccatccttaaaaagttgtggtaatagaaatgttttgatcctaaaaaaaaaataaaaaaaaa

SEQ ID NO: 11306 - DNA, 242 bp, Oryza sativa
  Clone ID: PAT_MRT4530_17543C.1
cccgccacatatccagtcttacccaggggggctcattaaataatatgggggggcaccaacaaaccttatcatggaacgacatttcgtttgacttccggtcgaatacgtcacactccttactacgaccggactgttatccctacctttacgtggacaaccatcgatagtacttttccctcgacaaggtcacagtctaggatcgacttcacttagcctccctcagcgatgaacttatcggcctc

SEQ ID NO: 11307 - DNA, 355 bp, Oryza sativa
  unsure (1)..(355): unsure at all n locations
  Clone ID: PAT_MRT4530_17544C.1
tcannganggccngcggcgtcgaatnccgtccgccgacccgtcggacttcggcctccactactcccagttcagcttagagagtaagtgcgcgttctaactggntaatttgatagattacggacanagaaaagantattcacttggatgaatgaaatattataaanctnaaganataatttngaatanntnatctnaacaatnntgatgtagatnttttttaaaaanaantnanncgtgcttttnaagagcatatgntgccatggacaatccatncatgcctaatcgtgctttttaattattangatggngtatttcggaccacgctcgactgcatcttgcaccacctgcatatgc

SEQ ID NO: 11308 - DNA, 420 bp, Oryza sativa
  Clone ID: PAT_MRT4530_17545C.1
atggcaatgaaaaataatagcaatagtcgtctcgtaggtgcaggtgctggtgaaagaatagcttatggggctggagtcaaaggagctttcatagacatagaaatcataatagaaagagcaggcctgcgagcagcgagtgcccttttcttagaaggtgatcctacttataggcgccattttgtgattcccctcgaggatcgtattgtcattgatgcgttatcggatgttttattaataaaagcgcaaaagtttatcgatcctaaggtccatatttatggaaaaactgtgatgtctggagttggtaatgatataggtcctggtttgcggaatgaattcaattcttggaatggtgtcaactcagtagcagtcttcgatattcatgaggttctttcacgtgtggacctaaatatgcttttttga

SEQ ID NO: 11309 - DNA, 168 bp, Oryza sativa
  Clone ID: PAT_MRT4530_17546C.1
atgggcagcagaggcttaggaattcgacgaagcatatcctttcagctcgcgtctggtcggctagttctgactggacgacaatggatgaaggtggactacccggcggcgtgtggcatcggcttacttgaagcagatgaagatggcaccagtggagattcgctgcgataa

SEQ ID NO: 11310 - DNA, 1400 bp, Oryza sativa
  Clone ID: PAT_MRT4530_17547C.1
attttttttttttttttttttaaccataaatcaccgaactatttgcataataatattgtctcaaaagtgccacaaatgctgtggcacaaccaccatccgaaggcaagaaagatagcacacacattataccaccaacaatacaacgcaaaggaaaaccaacaaacaaatccaacaaaagaaagaaagagatatagagagcagtctagtactaatccaatgtcacagctgcaaattgtgccccaattgctgtgttcttcattcattcagtcattcattcaagtgaagctcgtcagaggtgatccgcacagctgcacgtcggagatgtcggagagcctctgcctcgagctggacgccatgccgaactcctccagctccaggtcggagatgctcttcctcttgtgcgcctcctgcttcgccggcctctcctccgacgcctccaggattgggctcagcatcggctgctcactctgctgctgctgcgatatcatcgcctgcgcctccgccaccatcgaggggtcatcctccgcagcgtagagtaccttatgaatcgcgttgacaatcggcaaatgctcgacttcagggctctggcacaagatctccacatccctcagcttggagaaatagaaatctctttctttctcgagactatcgacgagcagcttcagctcagtgatctgttcatcataagctggtccagcggagtttgcgggagacggctttgcgctccgtgacggaggggcgttcggcgcatgcccattggccttcttggcaccatgagatgatgcctgtgctttgtgggtggcggatgaggatttggccggcgcctgagaaggcactgatgtccttctgttggtctctttgccgcccttgctgctctcccttctttcagaagcattgtaactgttcatgaagcctccattgaccgaatcacagtatcgcttcatccattgcatgaattccagattgtcaaggggccttcccttggtaagcttgttcacttcgatgtgcttggtgatcttgagcttgttgaagacgtcctgaagaactttgtagttctggatcatctcgtactccgtcttggcgtcgaagttgaccttgtgcatcggcaccgcccccgggtgcgccgcgtccatcagctggcacgccaccgcccccgacgcagcctcctcgaccttggagaggccgagctgcagggtggtgttgatccacgccaggatctcgttccgccccacgaagtaggccccgtccatcatcccgatgttgctcgccgccatctcctccgccgccgcgaaccagatcaccaccaccacggggatcgaagagatcgaagaagagagaagcctcgaagatctcgcgaggaggaggaggagatcgcgacgaggttttccctcgtgccgatt

SEQ ID NO: 11311 - DNA, 1716 bp, Oryza sativa
  Clone ID: PAT_MRT4530_17548C.1
cgacgcaccgcaccacgttcgttccggacgtccacgccttaccaaccttctcgacttgtacccagctcgtccccttcgtcgccgccgcaatcacacgcacaccctttacccgccggaacgcgcgcacttgccttgcccccccgccaaacgccagcgacaacagctatagcagcagccgcgagccgcgaggccttctcctcccgggacgccgcgcgaatgccctcccctcgctgccggggggaagaggagcggtagcagcaggcgagggcgccgcggcggcggcggggatggcggggcggccggggtacgtgacggtgccgatactgtccgtgctcgccgcgatcgggtacgtgtactacacggcggtgttcctggcgatcccggcgtggctggggctcgccacggcggccggggtggccaacgcggtggccttcaccgcgctggccgccgcctgcgtcgcgacctacgccgtcgccgtctcccgcgacccgggccgcgtgccgccggccttcttgcccgacgtcgaggacgccgagagccccatccacgagatcaagcgcaagggtggcgatttgagatattgtcagaaatgttcccattataagcctccccgtgctcatcattgtcgtgtctgcaagagatgtgttctaagaatggaccatcactgcatatggattaacaattgtgttggacatgaaaactacaagattttcctagtctttgtgctgtatgctgtagtagcaagcttatattcactggttctggttataggaggtgctgtgcacagtttgcctaagaatgaacaattaggcagtgattcttctagaacatcaattgtttcaaatgtgcagatcatttgcggggtatttttgtgtccactagctttggcattgtccattcttttgggttggcatgtgtatctcatctttcataataaaactactattgagtaccatgaaggagttagggcaatgtggttggcagaaaaggctggaaatctataccaccatccctatgaccttggtgtctatgagaatcttgtttcagtgctagggcctaatgcgttgtgctggctctgcccaatatcaaggaatacaggcaatggtattcgtttccgtacatcatatgatataccactatctacaccaccaatttgacatcaggtagcattacattcatgttagatttctggtaatttgctaaaaaaacttggttgcctatccaagtgtgaaatgtgctattctcgcaatagcatttgataacccttcataaaggaatagcgtttgtcaatgtcttgaaactcttgcatcaagagtttgtacttgatgtgatcaaatgtgtaaatgacactccacgtgtaagatacaggaagaggagctggatattcctccaggctccaaggatctatatggattttggagctagaaatgttaacttggttttctttttgctttgcaattttcgacatacttgatgagaagagtcgccagcgcctctactgatctagagtggttgtattcatacacagaagtccaaatacatgagtgcctcttgtaaagttcaatgtcttgtattgttattttttggaaactaatattgcgttgtccggtcatattgagaaagtatccaagattaattgtatagagttcagaaatatatgttacatttgataaacattgtggctgtttctgtcaggacatgtgtgtgttctttgtc

SEQ ID NO: 11312 - DNA, 323 bp, Oryza sativa
  Clone ID: PAT_MRT4530_17549C.1
ctctcttgtcggagttgctcctgctccatcgtcataggcggcgccaccagaaatgaaacaggcttagggggtggaagcccaaaccggggaaaccctagatatctctccggttcgtcttgttgcttctccagaccctagatccccgccatgcaccatcccagggcgcgctacccgccgggctacacctgcgggggaggaggaggaggcgtatacggaggtggagacctaccgctcctgcttagaagattttcatagatcgacatacgacctcgtctgctcctgtcgccggagtttatatccatttccctatatcttccttaaca

SEQ ID NO: 11313 - DNA, 600 bp, Oryza sativa
  Clone ID: PAT_MRT4530_1754C.1
cccacgcgtccgcccactcgtccgttcctctgtttcctttcctactacagtagagtagctccatttccatttgagttttgatttttgaggatatatgatgcagccaccgtacacgtacagcaacagctaccaccatatccatagcagcttgccgccggagatgagcgaccgcgacgtcgacatgcacatcctcaccgctctcatggccgacatggccgattcgtcatcctcctcctcctcctcctcatcatcatcatcatccgacgactccgacatgcgagcatcagcagcagcagctgagcctgagcaccggaggagccctgcaccgccgacgccaccgaggcaacagcagatgatcggggtgcggaagcgtccatggggcaagttcgccgccgagatccgcgactccacccgcaagggtgctcgcgtgtggctgggcaccttcgacagcccagaggccgccgccatggcctacgaccaggccgtcttctccgtccggggcgccttcgccgtcctcaacttccccctccaccgcgtttcaggagtcgcttccaggccactccccttcgggcgccgcccgggagggaatcgcccgggtta

SEQ ID NO: 11314 - DNA, 660 bp, Oryza sativa
  Clone ID: PAT_MRT4530_17550C.1
atggagtgggcgtactacggcagtgggtactcctcgtcggggacgccgtcgccggtgggcggcgacggggacgaggactcgtacatgacggtgtcgtcggcgccgcccaagcggcgggcggggaggaccaagttcaaggagacgaggcacccggtgtacaagggcgtgcgcagcaggaaccccgggaggtgggtctgcgaggtgcgcgagccgcacggcaagcagaggatctggctcggcaccttcgagaccgccgagatggcggcgcgcgcgcacgacgtcgcggcgatggcgctgcgcggccgcgccgcctgcctcaacttcgccgactcgccgcgcaggctccgcgtgccgccgctgggggccgggcacgaggagatacgccgcgccgcggtcgaggccgccgagctgttccgcccggcgcccgggcagcacaatgcggctgccgaggcggcggccgctgtcgctgcgcaggcaaccgcggcgagcgcggagctctttgccgacttcccttgctacccgatggacggactggaattcgaaatgcaggggtacctcgacatggcacagggaatgctcatcgagccgccgccattggcagggcaatcgacgtgggccgaggaggactacgactgcgaggtcaatctatggagctactga

SEQ ID NO: 11315 - DNA, 354 bp, Oryza sativa
  Clone ID: PAT_MRT4530_17551C.1
atggcggcgttccaaatctgcgcccaggtctggctcgccatgtcgctcctcgccgacggcctcgccatcgccggccaggccttgcttgccagcgtgtttgcaaagaaggatcactacaaggtggcggtgaccaccgcccgcatgctgcagctcaccgtcgtcctcggcgttgggctgacggccttcctcgccgccggcatgtggttcggtagcggcgttttcaccagcgacaccgccgtcatcagcaccattcacaaaggcgttccgttcgtcgctggcacgcagacgataaacacgctggccttcgtcttcgacggcgaatggaggggaatggcgtcgattaggataggatag

SEQ ID NO: 11316 - DNA, 1028 bp, Oryza sativa
  Clone ID: PAT_MRT4530_17552C.1
cccgggctgcaggaatcggcacgcgccctcgctctccctgctccggtatagctagttgagctctgatcgatcaggttgcatgagacggagaagctgagtgaggctagggtggttggttgtgatcatcaccatgagctgcaacggttgccgggtgctgcggaaggggtgcagtgacggctgcgtgctgcggccatgcctgcagtggatcgacgccgccgacgcgcagggccacgccaccgtcttcgtcgccaagttcttcggccgcgccggactcctctccttcatctccgctgtccccgaggcgcagcgacctgcgttgttccagtcgctgctgtacgaagcagcggggcgaaccatcaatccggtgcacggcgcggtgggcctcctctggacggggaactggcccctctgccaggccgctgtcgagaccgtgctgcgtggaggcgccatcggccctctgccggagctcggcggggcctgcggcggcgctggcggggacctctacggcgccgccaagcgcaacggcggctggtctaccttctccactgcgaagcgggtgaggaaggccgaggtacctgaagccccgtcgtgcgacctaggcctgtgcctcagcccctgctctccgccggcggtgggggagaggaaaccagcactgcggccggggacgccgtcaatgagctccgatgagtccggcaccacaaccggaggcgaaagggatcctgtgctgctcaacctttttgtctgaggccggtcgtcaagctagctaatactaatccttgcttgacctccgtctactggatcccggcggcgaagcagtagtaattttttctcgccggcgagcctagtttattggcatttttttttctttccctttcttttaggagtactagtctacgggtcttggtttttgccgtgtacgtagaaaagaaattaccggccggcctggacgccccgtttgcgtgggcgagcaactttttaccctttttgttcgtttaaattatataaataatccttcattagctatatag

SEQ ID NO: 11317 - DNA, 267 bp, Oryza sativa
  Clone ID: PAT_MRT4530_17553C.1
gcggattgttgtcattacgattcaccataaccggctattaagtctataagagttcttattaacacctgtctaataaaatggacttttttctaaagcttgtccaaaatacaaaaataccttcttccttttcacaattctgtttatggaaactctttctagtgcatatattctcacgcaacactatcacattcttgtaacacagcttcaataatttgcttgatctcttgattacccaaaaaaataataaagaaggcgggctttctttaa

SEQ ID NO: 11318 - DNA, 756 bp, Oryza sativa
  Clone ID: PAT_MRT4530_17554C.1
atggcaggtcagtttgcaaagccaaggtcagatggctttgaggagagggatggagtgaagttgccaagctacagaggggataacattaatggggattcattcgatgagaaatcaagattgccagatccacaccgcatgatcagggcatactcacagtctgcagcaacactgaatttgctgcgggcttttgctactggaggttatgctgccatgcagagggtaacacaatggaaccttgacttcacagagcatagtgaacagggtgacaggtacatggagctggctcaccgagttgatgaggctttggggttcatggcagctgctgaattctggacatcacatgagtgccctcttcttccctatgagcaagcacttactcgcgaggattccacatctggcgtctattacgactgttctgctcacttcctttgggttggagagcgtacacgtcagcttgattgtgcccatgtggagtttctccgaggaattgcgaaccctctgggtatcaaggtcagtgacaagatggacccaaaagaacttgtgaagttgattgatatcttgaatccccagaacaaaccagggagaattactatcattacaagaatgggacctgaaaacatgagagtgaaactccctcacctaatacgtgctgtccgtggtgctggccagatagtaacatgggttactgatccgatgcatggtaacacaatgaaggctccttgtggcctcaagactcgctcctttgatagaatcttg

SEQ ID NO: 11319 - DNA, 190 bp, Oryza sativa
  Clone ID: PAT_MRT4530_17555C.1
gctgaggtgcgcgcattctttgatgtgcacgaacaagaaggcagccacccaggaggggtgcatctggagatgactggacaaaatgtgacagaatgcatcggcgggtcacgcacgtctctggagttggcgttcatcatcgccgagcggctcagaaagaggaggatcgcctcatggcagttgaacaagaaca

SEQ ID NO: 11320 - DNA, 1822 bp, Oryza sativa
  Clone ID: PAT_MRT4530_17556C.1
cccacgcgtccgcacatcctgaaccccagagaggaaaaccctaccctccatcgctattccccaaaatgcccctcgcgccatgcccctcgccgcccctcccctcctccccgtggccggcgcgcgccccgcgccggggcggcctcctccgcgcccgcgcggtgcgggcggcgccccggccgccgagcaagtggtcgctgggtagctggcgcagcctgacggcgctgcagcagccggagtaccccgacaaggcggagctggatgaggtgctccggacggtggaggcgttcccgccgattgtcttcgccggcgaggcgcgcaagctggaggagcggctcgcggaggccgccgtcgggcgcgcgttcctcctccagggcggcgactgcgccgagagcttcaaggagtttaacgcgaacaacatccgggacaccttccgtgtgctcctccagatgtccgtggtgctcatgtttggaggccagatgcctatcatcaaggtaggaagaatggcaggtcagtttgcaaagccaaggtcagatggctttgaggagagggatggagtgaagttgccaagctacagaggggataacattaatggggattcattcgatgagaaatcaagattgccagatccacaccgcatgatcagggcatactcacagtctgcagcaacactgaatgtggctgcgggcttttgctactggaggttatgctgccatgcagagggtaacacaatggaaccttgacttcacagagcatagtgaacagggtgacaggtacatggagctggctcaccgagttgatgaggctttggggttcatggcagctgctggtctcactatggaccatcctattatgacaacaacagaattctggacatcacatgagtgccttcttcttccctatgagcaagcacttactcgcgaggattccacatctggcctctattacgactgttctgctcacttcctttgggttggagagcgtacacgtcagcttgattgtgcccatgtggagtttctccgaggaattgcgaaccctctgggtatcaaggtcagtgacaagatggacccaaaagaacttgtgaagttgattgatatcttgaatccccagaacaaaccagggagaattactatcattacaagaatgggacctgaaaacatgagagtgaaactccctcacctaatacgtgctgtccgtggtgctggccagatagtaacaatgggttactgatccgatgcatggtaacacaatgaaaggtccttgtggcctcaagactcgctcctttgatagaatcttggctgaggtgcgcgcattctttgatgtgcacgaacaagaaggcagccacccaggaggggtgcatctggagatgactggacaaaatgtgacagaatgcatcggcgggtcacgcacggtgacattcgacgatctgggctcacgataccacacacactgcgacccgaggctcaacgcatcgcagtctctggagttggcgttcatcatcgccgagcggctcagaaagaggaggatcgcctcatggcagttgaacaagaacagtcatctgggcaacatcccatctttggggctctgaaagtcatatatatacagaaacagtgataagaaaagatcaaataccataggcaagctgtgagctatccaattgtcttgtactagctgttatgtcaagttgtcaagtttcgtttcatgttactcatgtactgctaaacaagtcaccctcttgatttaccctgtcatatataaataagaaatgcaagttcaccttaaaaaaaaaaaaaaaaaaaaaaaaaaaaaaaaaaaaaaaaaaaaa

SEQ ID NO: 11321 - DNA, 114 bp, Oryza sativa
  Clone ID: PAT_MRT4530_17557C.1
atgtacttaccaaacagtcatccctccaaattcacaaatcgctacgcctccccgacgttcggcggccgacacatgggaccagggggctcatatgtcggccaccgtttaccgggg

SEQ ID NO: 11322 - DNA, 921 bp, Oryza sativa
  Clone ID: PAT_MRT4530_17558C.1
ttgttcagaaaaatgccacacgcacaagaaaaacgccaaatatttacatcgtctctccctctccttctctctctctctttctctagtatccttgtgttcctcgtcgtcggcgacgaggacaactgcggcggcggcggcggcggcggcggcgatggccgtgtaattccttctagggccgtctcaaatcgtccctcggacctactcgattttcgtggctttcgcgaccagcctctcgtgtcgtggtgatgagagagaggggcgaaatggaaggccgtgagggctctaggttggacaattcgctcacgaggaagcgccggagcagcagcacggcgaggcggcggccgaggccggagagcaatcatgtcgtggatgtggagcagcagcagcagcagcagcagcagcagcagcgagacggctactcctcgtcttcttcgtcggcgattggctcggatgaggatgccaactccgatggggaggagcaccagaggcgagagatccatctgaatgccccttccccggatcgtgccgcgaggcgtgcggcgatggagggcggcgctatgtcctccaatcctaacccgagaagctcgcacaagaccaaggggagcaaccagctgcattccgagggctcgggtggtggtggtggtggtagctccaggaagggcgagagcggccatggcgcggttgtttcggcagggaatcgtgagtcgtcgaccggtgataaaacaaggaagttgaagctcaagattggcggaatccgccgtagcgtgccggcgaaaccaagccctgatatgtcgcattccaggtctttgcctgtgaagcctccgcggccaggagattcgcagcaacggcaaaagcattctagtcaggctgaaggagtaaaagattccagtaggttggcatcttcccgagacaagaaaacca

SEQ ID NO: 11323 - DNA, 182 bp, Oryza sativa
  Clone ID: PAT_MRT4530_17559C.1
tcgccccgaacaggcgcgcatcgtcgaggaggccgttgcctgcaccgacatggcccttgagcgcgggggcgcctacatccgcgcccagggcgccttaagccgtatgttcgaccctgaccttatcctctacattaagcgcgccgttaccatccccttcatggccatagcccgaatcggccact

SEQ ID NO: 11324 - DNA, 677 bp, Oryza sativa
  unsure (1)..(677): unsure at all n locations
  Clone ID: PAT_MRT4530_1755C.1
ccggccgggaaatgcgtccagggttccaggtccagcggaaagcagtcttctccccagtccccacccagtacatggcacccgcttgtcctcgctagaacaccaccacgcctccagcctccagctgtgccgccgccgcgccctcctcccccgcccgccgcccgcacgcacgctttcctccccgacggcgtcggcgctcggcggaagcagcagcagcggcgtccgactgaacgatcccctgtcgcttacctccagccgcccggatcggacgccctccacaccctagcgtctcgcgccgcattccgccgtttcctctttcacgtgtccggacggatcatgtgtgaagaagatggatgccactaggagtgcacaatcaatccatggccaagatgaacaaaaattgtatgatgaactaaaaagtgcagtctgggtaattcatgtagagagtgatgaaagtaatgggacagggactggtttctgcattgatcagcgtgggttaattatgacgtgtgcacattgtgtgagtggcaaaacctgttttgtagcaaggcaaaacgacaagaagttccaaaaggcttatgttttacacaaaattgaatcttgggacattgcaattctgtngtttgtgcctaatggctcagatgcttattcagctggttctctgccaatgatgggacctt

SEQ ID NO: 11325 - DNA, 510 bp, Oryza sativa
  Clone ID: PAT_MRT4530_17560C.1
tttttttttttttttttttttttttttttctttttttgttttttggtctttttgatctggtttgattgttttttttttccccaaccaaagagcccgggattatgggggggctcaaagaggggggggccccccccagggaaagggggaaaaaaaaattaaatctggaaaaagcccccaaaaaaaaatcccccggttttcaccctggggggaccagacccaatttttgggagcaaacagagtggaaccccgccagcgatttccccgccccaaaccccaatggaagtccctcccaaacaaactgagagagcgggggcccacctaaagggaacccaaaaacctggctaacctaagaagtaaaccccccccccaccccggaagaaaaaaaaaagagccatccggggactccctccccccccccggggggggccacccagggagataccggagggaccaggcccgaaaacccccggtaaacggggggggggggggggggccccggctttgggggcc

SEQ ID NO: 11326 - DNA, 368 bp, Oryza sativa
  Clone ID: PAT_MRT4530_17561C.1
ttttggtgtttttctttttaaaccccaaaagagtaacagaagaccagactagtctattgactggctggggcaggggccaaatggacactacaacatttcctgactataggacgacacatccgaaatttgaaacggtgccagacggtaaatcgaaactcgaagcattgcaagtggaaatcttgcattacatggggccagtaatgaagagcgttgcagcaatgtcaagaaaggacgggtaaggagtgagcaacatggtgaagcggacatgacattgtgacgaggttgacagagatacacagccgcgtgtcctgatcttactgcgtatcagctagccttgagcgaaggatctaatcatctgcactcacaca

SEQ ID NO: 11327 - DNA, 207 bp, Oryza sativa
  unsure (1)..(207): unsure at all n locations
  Clone ID: PAT_MRT4530_17562C.1
gcagaaaatccanccacaaggnccangncaggncaaggntcctcnntaannnaanccccntaatngccacctcngtttccgggccatgnngtttgccctggttggngacccttncgaatggcgtngcgaacgtnngttgcgantccgttggttcntttncccgncgtaagttccaagggccgttnatnnaacncgncgntgaccaaa

SEQ ID NO: 11328 - DNA, 736 bp, Oryza sativa
  unsure (1)..(736): unsure at all n locations
  Clone ID: PAT_MRT4530_17563C.1
ctcgcgtcacgccaccgccatcgccgcctcctactcactcctctaggaaccgacgccgcagaaccctctcacctccctcctccaaccccgcggctccgtccaccgccgcctcgccgcccccgaacccaaatctaggtttttgttttggttcgggaaatctatggctgtcgtcaccggcgccaaagaggagggagagttcgccggcggtggaataataagtcgacgtccctccggtgagctaccctctctcccttccccctcatcccgacgggccggctgcgtcccgttgggttcgaatacccaacctctaaatcctgggcccgccactggatcataatccaacggccaggtccaggtgactgaaatgtgcctagcgaatcctaacatattcgttctttggccccggcgatgagtagcaagtttattactctctccgtttcaggttataaaacattttgactttggtcaaagacaaactgtttcaagtttaactaagttagtttcatcaaatcaataattgaatatatttttataataaatttatcttggggtgaaaatggtactacctttttctacaaacttgatccggacttaaaacaatttgcctttaaccaaagncaccaaagncaaaacggcttataacctaaacggggggagggaggacatgccaggtgttgggattccctgnggntaattaaaggcatcatcagtaaatctatatattttcatatatatc

SEQ ID NO: 11329 - DNA, 351 bp, Oryza sativa
  Clone ID: PAT_MRT4530_17564C.1
tggggttttttttttttttttttttttttttttttttttttttttttttttttttggccaaaacccacaaagggatccatcttttggttaaaagcagctcactaaaatttatcaaacttgggacgtacatcgaccccgtgttctcaaaaagatattaaagaatgcgatttgcatactacatttacatctccgggggaacaaaacacattcattattcgccatttgacgtgctctttttattatttttttcatcgatgacggatcatgcatgccttgcgtacgttatgaacatctttttgggtggaactcaacggagcttgtacttggggggggtgccctgggggaacccct

SEQ ID NO: 11330 - DNA, 608 bp, Oryza sativa
  Clone ID: PAT_MRT4530_17565C.1
cccggggatctttttcccggcttagcggacatgctcggagaagctcccctccagtgttagtggcgagttagatgacttggatgccttgttgagtgacaccagctcccccggtgccgatgctgtgatctcaacttccctagacgattttgacttcggcccggacgaccatgacccctagactttttcccctaaatttccggtaacaaattgaccttaaagcggataaacccaactaactttactgggcttatccgtttttttgttgtcggaaagaatgagttaatcgactaattcactattgaattcgttataggtacgctgtttcagttccatggactcggaacggggcaataaatcaaataaatcccggagaacatcatccactacttgaaacttaagtgctccctgggcgtcgaagatttttttgccgcttttgtctagaattaccggctggggtaccccaccgctgtagtaatagccaggctcatcgcgacggaaacgcttttggtcgggaatgctgtcaacggaaaccggaataatgctagcaacccgaccgtaaattcctgcatacgggaaacgatgaaagcatactggttgcaatctttact

SEQ ID NO: 11331 - DNA, 231 bp, Oryza sativa
  unsure (1)..(231): unsure at all n locations
  Clone ID: PAT_MRT4530_17566C.1
aaaccaaaacttntatctccataacttcgannncaanncaanngctacagcacgtcgcatttcntgcttnnataaaagnnagacgttccatccgcatactncaacttngcacgacgancgtgcgcggatnncgctcctactngacgnnnnacctggnagtttgaccctngncatgantnctncgtgnacctaaggcacgagcagctgtgcagcacgttagaacatgnnnta

SEQ ID NO: 11332 - DNA, 265 bp, Oryza sativa
  unsure (1)..(265): unsure at all n locations
  Clone ID: PAT_MRT4530_17567C.1
cacacctaatgggagtaaaaatgtggagggataattttgtccatgaaaaatgttgtgcggagtggtaaaatggtaattttccaattgctaaccctagcagggtcgaaatggattggcctcgcgcccgtcatcctccctcgtcgcctcagccgccgccccccttctcgctgcctccaccaccctccgtcgcctccaacgcctgccccgccctccccgactctgcgcccgtccccntctctcgccgcctccgtcgcctacctcgtcg

SEQ ID NO: 11333 - DNA, 546 bp, Oryza sativa
  Clone ID: PAT_MRT4530_17568C.1
atggatgacgccgccggcaactgcgacggcatgacggccttcgcgctccgtctggcgaagcgtctcgccgacaacggcgacgacgtcaacaacaacagaaacctcgtgttctcgctggtgtccctgtacgccgcgctggcgctggtggcggccgggggacagggcaccaccctccacgagctcctcgcgctgctcggcgcatcgtcgctcgacgacctcgcggagtccgtctaccgcgccgtggagccaaagaaatcaagaaagaagatcaacgagtgggtgtccaaggcgacgaacaagctcatccctgagatcctcccagatggatcagttcatcgcctcaccaccctggtgctcgtgaacgccatctacttcaagggcaagtggtccgatcccttccccagggagagcaccaccaccggcaagttccaccgcctcgacggcagctccgtcaacgtccggttcatgcgcagccgggaggatcagtacatcggcttctacgacggcttcaacgtgctcaagctgccgtacaacggcgggttatga

SEQ ID NO: 11334 - DNA, 858 bp, Oryza sativa
  Clone ID: PAT_MRT4530_17569C.1
atgacgcagtacattgaggttcctgctaaagtctttttagaagagtttgtacgcatgcttgaccttggtccactgactattactgggaggcatatatatagttccactggactgcatgttgtaggggtgcaggttaaccttggtccggctgatcgtgttccctacctttattatgaggcagctaagaccacagtagctgaagctgagcaaactgcttcactcatggctatacacgccttagcagcagagcgccaaattgagataagggatgtcaattaccctcaggtgcagcatctgcgccatcaggtggcgcgcttgcgtggtagggtggtggaggctgagaagctctgtgcagaactgctgactattgttcgctctagtgagaatgaagttatgtttctggagcgcctcacccatcgcctgtaccaccgcgtccgctacctgagtgaaaccattactgttctacagcgtgggggtgggggtagtgacagctctagtggcagaaaccgaacccagtccgtctggcccgaggaaacctttgcacgcctccgttaccttttgggaggcctacgccccatagaaactgtctacctgagactgtcccttggcccgcgggtgggtctgacacaaggtacccctttgttgaaggtcgttcgagcttttcctgggagtatggcatgggttacatacttcagcgccgtagcgcctggtatgagcctcgtggagaagcaatggctagtccacggggctcatacttcagcgctgcagcgcttggtactcggacctcggctcgaggcattttctctaccccttcttaccctgaaaaagcagggtcaccttgtgtccttaaacctataa

SEQ ID NO: 11335 - DNA, 548 bp, Oryza sativa
  Clone ID: PAT_MRT4530_1756C.1
ccgcatcgcggggatcagagctcctcgtcgccgtcctccaccacctccccgcatccatcctcgcatcgccgtcgcgaggaggtgagacctcgtagtccagtgcctcctccttctcctccatcccttcacgcacgtcagctccagtgcgggagggtgcgagacgtcgacgacggcggcgggcgcgggatgtcgatggcggaggcatcgagcgggttgagcggcgtgcgagcgagcgcgagtgcgggaggaggcaccgacggcggcgacaacacgagctcggtggctccgcctctcccctctcccttccggccctcacgcgccgccgtcgcctctcgtgtaacccaccacctccgttcctccctcacctgctatcctctcctctcctctctccacttggcgaggccgatggtgaggccgccgccgctgctctggccccgcccgccgccgctccagctctagccgcccgtgctccccgcggtcggccgaaggggagaggagaaagaaaaagaaagagagaagggaagaagaagaagaaagggagagagagg

SEQ ID NO: 11336 - DNA, 1091 bp, Oryza sativa
  Clone ID: PAT_MRT4530_17570C.1
gcacgagctgatgttgaagaatcagcggatgagttgtggttaggggtgaaatgccactcgaacccagagctagctggttctccccgaaatgcgttgaggcgcagcagttgactggacatctaggggtaaagcactgtttcggtgcgggctgcgcgagcggtaccaaatcgaggcaaactctgaatactagatatgacccaaaaataacaggggtcaaggtcggcagtggagacgatgggggataagcttcatcgtcgagagggaaacagcccggatcaccagctaaggcccctaaatgaccgctcagtgataaaggaggtgggggtgcaaagacagccaggaggtttgcctagaagcagccaccctttaaagagtgcgtaatagctcactgatcgagcgcccttgcgctgaagatgaacggggctaagcgatctgccgaagctgtgggatgtcaaaatgcatcggtaggggagcgttccgccttagagggaagcaaccgcgaaagcgggggtcgacgaagcggaagcgagaatgtcggcttgagtaacgaaaacattggtgagaatccaatgccccgaaaacccaaggtttcctccgcaaggttcgtccacggagggtgagtcagggcctaagatcaggccgaaaggcgtagtcgatggacaacaggtcaatattcctgtactaccccttgttggtacggagggacggaggaggctaggttagccgaaagatggttataggtttaaggacacaaggtgaccctgctttttcagggtaagaaggggtagagaaaatgcctcgagccgaggtccgagtaccaagcgctgcagcgctgaagtatgagccccgtggactagccattgcttctccacgaggctcataccaggcgctacggcgctgaagtatgtaacccatgccatactcccaggaaaagctcgaacgaccttcaacaaaggggtacctgtacccgaaaccgacacaggtgggtaggtagagaatacctaggggcgcgagacaactctctctaaggaactcggcaaaatagccccgtaacttcgggagaaggggtgccccctaaaaaaaaaaaaaaa

SEQ ID NO: 11337 - DNA, 1341 bp, Oryza sativa
  Clone ID: PAT_MRT4530_17571C.1
acggcacgaggccacgcgcccgcacaaagagaagcaaccagacactgcacacatcatcatcttctcccccgagaccgggtgatcttgggttagcttagctagctaaattaagctgcgtgcagcatggggctcctcgaccagctctgggacgacacggtggccgggccgcggccggactccggcctcggcaagctccgcaagtacgcctccttctccccttcctcctcctcctcgacgatggcggcgtcgccgtcgcccatctcggcggcggcggcggcggccgacgcgccggccgtgacgcgcagcatcaccatcctccgcccgccggcgctgtccgtgacgtcgccgcgcggcagcgagtcgggcccctccacgccgtcgtcgccggccagcgtcccggactcccccttcggctcagcaccgacgccgaagggatcggagggctggaagaagctgcgccgtggggcggcgaggatggccgacggcgtggacgccagcgccggcggccagccgagaagccccaccgtatacgactgggtggtgatcagctcactcgacaggtgaaggcgtgatctatctaatcgagcagctaagctctgcatccggcgagaaactgcacctgcacaatatgaagcagctagaaactgaaggcgagcaaagaagaaaaaaaacactaaattctgctctttttcagttaagtttcagctcgtcgatccagagcatgaaatgttcagtgttcagctatctgcactactacagactgccgattttgtagccaaggatgtataaacgtatgcatgcttgtactaccaccgtataatatacgtacgtgtacgtagtagatcgatgcagacaaaaagtcttagcagaagaggggatccttgtacgtacacaacctgtagtgtacgtacacgatgcgatcgatgatgaactgatagtatatgtatatggcgcagctggtgtattatattacatgcgctagctggagggagagtgtgctaatgttgtactagtactacgactgatctgtttgcttctcctctgctttctttgtctccagaaaagagggagaggagagaagtttttcccctgtttttgtggaatatgtaaaagatggctgcagtgcatgcagcagtgtaaaagtgtgaaaagaagtgggcaataatgcatggccaaataatgttatgaacctataaaaaaaaaaaaaaaaaaatagtaagtaaatgaaatctgtcaattatcatggtggttgataattgacaatacttgattgttttttcacagcagtcgtgttcctgatgtccagacgaaggggaagaaaaacagaaaaaaaaaaaaaaa

SEQ ID NO: 11338 - DNA, 318 bp, Oryza sativa
  Clone ID: PAT_MRT4530_17572C.1
atgctgcctcagcctatcaacccagaccttagtggtgcctcctcccgccttcccccgtgccagcgctaccaccctcccaccgtccgagcaccgtcgacaaatcaagctcctagagatggatccagcctcggtggcatcagagagctacgaatctggcctctacggttgcggggagtagtggatccggtcttggtggcatcctccccaacaccgcatctacctccttccccatcctgccagcgcttctcctcgtcaaccccaaacctgacaccgtctcaactcgtcaacctcgacccgggcagcggttcctcccattga

SEQ ID NO: 11339 - DNA, 620 bp, Oryza sativa
  Clone ID: PAT_MRT4530_17573C.1
gcgttcgcgggcggcgccacgaagggctcgtccacgcaagacgggcgtccgacggctcacagccaactcgacgagggccgtgcaaacaagagggtgtgcagcagagacgcggttctcatcggggggcgccgacggccgggcgggtttcgacgggctgcgccccctcacacgggggggtacgcgcgaaagaccgacggccccacagagctggccggacgccgctcgccgctaaggggggacgcggcggcgccgcgacgacccttcgcccgcggcaagcccacggtctcgcgctcacgcccggccatggccaaagccgcctgatccgacacgtccttccgttgtcgcccggcgctcggatagtcggcatcgccgtcggcacggaggtcctcgggggggcaaacgccggcctggctgaggccctcataggcgccgtcgtcaacatccacgacgcgctcaagatgctcggcctcgccaccaagatcgagctcaccacgccccactccgaggccgtgttcgccaactcctacccgccgtcggcgtgcgtgttcctcggcgacctcatggcgtccgggactataaatagatctttagtcctggttggtaacaccaaccgggactaa

SEQ ID NO: 11340 - DNA, 231 bp, Oryza sativa
  Clone ID: PAT_MRT4530_17574C.1
attatccttgcttgtgaagagagagatatagagaggagagctagcaatagtttgagtgagaaagacgcacgtacgcgcgaaaacgttgtgcgcttttgagtgatcgatacacggaggggatacacacgctaatcgatctatttggtaaggaagcgggtggcagttgtgatggcgttagccgtggcgacgctcgcaacgagtgctcctgctcgtctcatggcttgaccacgc

SEQ ID NO: 11341 - DNA, 175 bp, Oryza sativa
  unsure (1)..(175): unsure at all n locations
  Clone ID: PAT_MRT4530_17575C.1
tcctccncgacctcgaagccgccggcgccgacgcagnctcgtcgncntcgacatggattaggtncacgcttcgttcgctcgcgccgggnagnagagcgggcagacgcacaaggnnngcgaacagnttcaagannaagaagccacgngncggtngccacaagaggttgcagtacaa

SEQ ID NO: 11342 - DNA, 326 bp, Oryza sativa
  Clone ID: PAT_MRT4530_17576C.1
ttttggtttttttattttttttggttttttttttttttttttagaacctaaaaacactcaagctggtttcaacgttaatgaatacaattacacaacattatattcagcagctttacaagaacataaaacatttgaccttacacgtacaaggaaaaaaaagaaggaagggaaacacaaacacagccgaattgagcttttaaggagtttttctgtggcaaagttttttaaacgcaaaaaccggggaatcggaaaacctttatacgggggaaaaggggccccaacttggctttgtaagcacaaggaaaatttgaaccccgggggggacc

SEQ ID NO: 11343 - DNA, 144 bp, Oryza sativa
  Clone ID: PAT_MRT4530_17577C.1
atggagaggctggcgtacgaggctatacggaggccggcgtacgaggctacgagcggatgcgtgcagcgtcgggaaggagttgcagtaatacaaggcatgagcgccatgcggcccaggcactacaccgttggctgctcaaagtga

SEQ ID NO: 11344 - DNA, 2795 bp, Oryza sativa
  Clone ID: PAT_MRT4530_17578C.1
atggagcagccaagtccatctccatatcaaccttcagcttctgatcatcatttgtggtcttcttcgactggtgctccctggaactattcaatgaataactctaaccaaaacacagtttattatgacccacaaagggatgtgtcagttccaggatctactgaaaatgtgacaagtggtgcaactcatgtggtccaatcagctatgggcattactggtgcaactgattcttatgctccttactcgaattctgttcaacccggttacaatgctccacagtatccaaactattactataactgtccacaaagtacaaatgaatcttctgttcaacaaggagtagatcaaagttcaggtgctgcttatcagcctcttacttcatttcagaattcaggatcttatgttggtcctacaagtaacacatattataatgctggtgctcatcagactgcaccgggatatgctaccagcaacaattattatcaaagcaattcctggactggcggaagttctggagataatcatgtacaatcatatcagagctatactccatcagatactaatgcagcccagagttctagttcactacccaacaattcttaccattatcatcagcagtataatcaatggccttattattatgatcagtccgcaccaagttctggtggtcctgcagttgctgtcagcagtgtttctgatgcaaacactgccagcgtcagttctggttatgtttatccgagcacccaaccacctccaccaggcactacatggagaagtgatgctggtgcaactgctgtccctcccccgcagggttctgcgacatcagatgctctcagggtaaacaaaatccagatcccaacaaatcctcgaatagctccaactcttcctatggcaatgcccaaagtagagaagagaaatttagaagctgattcatcaaaaaagcctgcatatgttagtgtcgcagtgcaaaagaatgatgtgaaagcagctcaagatggtcacgaagctgtaacgcagggatcaatccctgtttcgcttcgtacttatgttgggcggaatgtttcccgttgcaaggatgatgcccagaggtctgccgtgcagaacatcttgaaagagataatcaccaaggcaactgctgatggtatccttcatactaagaactgggacattgagccactggttcctttgccagaaaacattacaagcacaaatttgacaagctctgcaaaggatttgagccccttctccttctcaacttctaggaggagccctagtagacgtgcaaaaagcaggtgggaacctgttgtagaagaaaaggttgcaaataaggtggaattgatttccaaagaatcagcaaagaccaatacctacaatagttcagaaacaactaaaagagcgggtagaagttgggatattgggaagtttctccaatcccgtcaggctcctttaagtcaatataatcagagacctagtaaaaagaagcggattggtggtaactcaagtctaactgaaaatggaaatgtttcaagtgacagtgataaggagcaggatctgacaaaatattatgctaatgcaatcacaatagcaaattcaccagaggagaagaaacgccgggagcatagatccaagcgttttgaacgtagtcagggtgctgcatcctcaaaatctaggagctctgttccagataaggatggaacatccaatacatatgctaggagatctatgccaatgcttcttagcagaagtaatggagatgatgttagcttcgctgtggaggatttggattgggatgcactgactgtcaagggaacatgtcaggaaattgagaaaagataccttcgtcttacatcagcacctgatcctgccacagtaaggccagaagatgttttagagaaagctcttcatatggttgaaacatctcagaagaattatctgtataaatgtgaccaactaaaatcaattcggcaagatcttactgttcagaggattcagaacgagctgactgtcatggtttatgaaactcatgcgcgcttagcacttcaatctggagatttacctgaattcaatcagtttcattacgcacgtctactaacagccttgttagaaattacccgctctcagcggtttgagccaaatctctatgttgaacggatgcgctttgaggctataaaatgcatatctaaatcatatcgcccaactttacctgtaaaatatgctgcacaagttttgggattcatggcaattgacgaagtttgtgaagctaaaagagctgatggattggaagaatgtgaagaatggttaaaagcgcatggtgctgttctttcagtagataacaataacggagaattgcagatagacacaaaggtttcttctacttccctatacatgccggaacctgataatgctgtttcacatggtgatgcatcacttgctgtggatgattttttggcacgaacatcataggtgatgccatgctgagcatttttatcactcatgtggcactgaacttcgaaggtatttctcgattgcatgtagcaatgcctgtagaggaatgttctgttaaatgcagggtaggaccttgaaatggatcagctgaaggggggagcacggtcccttgccgaagagaacagaatgcacatgagcaggtcgctttctattatactcaaaacgtgctctgggcctctgaatctcagatgctgtgggatcgttggcatgttgctagctctacagccctgcagcagttccattttgacaaacaaaattctggaggcagcattaaccgaaaaaaaaaaaaaaaa

SEQ ID NO: 11345 - DNA, 202 bp, Oryza sativa
  Clone ID: PAT_MRT4530_17579C.1
ggggggtgacaacacaagacagagagaaccaccactttctggaggcttttgttattcaggacggcaccaatcattttctgtaaaggttactacagttcctgaacaaattggaaccacgttggaaggctgggagaggggtgatttagaagcatggtggtcaatatatgagccttaatgacatttgggggttggacgcatatac

SEQ ID NO: 11346 - DNA, 555 bp, Oryza sativa
  Clone ID: PAT_MRT4530_1757C.1
atggctctgataccagcttgtcgcgaccgggaaaattgccttttcccgaacgctagtgtattaatccccgtcccaggaaaagccgggccgcgggaggcggccgaaggcggcctcgccggctcgaccgacgggagacgcgcgcccgcgccccgatggtcaccgccggcgaccaccggcgcggcggagcggcgcccgagagagcggagaggagagggaagcgagagggacggtccacggctcaccccgggacaacgaggacggcggaaacgacggccggagcggaggaacgcggcggcgcggttcgggacgacgaaggcgacggagctccggcggtcggcgggcgaagcgaaggggcggacggggtcggcgacaacgcggcgaagccgatggaggtggcgccgagtcgggaggaagaccggagcgacgacggcggctaaccgaaggtcggcggcgacggcggagagagaggagaacgtcgcgagcacgaatccgaaggcgagagcgagcggcaagcggcggaaacggaagaacggagctcggggaacgattatatag

SEQ ID NO: 11347 - DNA, 380 bp, Oryza sativa
  Clone ID: PAT_MRT4530_17580C.1
ttgctgttgatggtcatctctctcagctatgacagctcactgcatcaatggccgcggccaccatggcgctctcctccccggtgatggcccgcgcggcgcctgctacctcctccgcgctcttcggcgaggcgcggatcaccatgcgcaagaccgtcgcgaagcccaagccggcggtgtcgtcggggagcccgtggtacggcgccgaccgcgtcctctacctaggaccgctctctcggcgagccgccgagctacctcaccgacgagttcccgggcgactactgagtgggactccgtggcgctctctgtccacccgcagacctgggacaacaacggggagacgcaggtgaatcgccttggagcacatacccttttcgccagct

SEQ ID NO: 11348 - DNA, 231 bp, Oryza sativa
  Clone ID: PAT_MRT4530_17581C.1
tgttgatatcccatatgggatctgtggacttcattaaaaccttgctgtgtgatacaaatccataatatgtgagcttgagaacgtctctgtgtcgctgtatcctaagcctgcccgtttgaacagaaatgttgaagttgtccatcaaaaaaaaaaaaaaaaaaaaaaaaacaaaaacatagaaaaaaaaaaaaggaaaaataaaaaaaaaaaaaaataaaaaaaataaaataa

SEQ ID NO: 11349 - DNA, 400 bp, Oryza sativa
  Clone ID: PAT_MRT4530_17582C.1
ggggttctgaacccacggccaggcattgcctgccaacagtgaaagtgtttacaatatacagggtcccccgaaaaccaatcaaatggactgggccaggcaaaatgatttttacttgttacaaaactgcttgatagcctccgtctatggtgaaaccctcagtagcataagaactaattcaacacgagcggtataaatagggagcataaacaagctgctagggggacaggtttgttacagcacagcccgatcagtccaaggggagcaaaacgcatcctagccgactgggctagagataagaacaatccctaactgtcattatccaagatattccgattcgcttggtggggacccccttcttcctggaagacgacgatactacatttggtaaaccgcatggaaa

SEQ ID NO: 11350 - DNA, 334 bp, Oryza sativa
  Clone ID: PAT_MRT4530_17583C.1
aaaaaaggttgtgttcgatccccaaccgcgatgtgctagggtttggaggcccggtgttcaatcccatcttccctccgtgcagccgctaggatcagttttatcttctttctttctttctttccgtgtcattgttattagattagatcctaagttccctgttgagattccttgctgctcatgggggcctgccgaaaactacctcacctgattacgttttgtttttggttttagccccttatttttttttatatgcagatagcgctcaccggaaattccaagcagtatatagaattatagatcgccgacatgtgtaggcgtttcttgtttcatgatt

SEQ ID NO: 11351 - DNA, 798 bp, Oryza sativa
  Clone ID: PAT_MRT4530_17584C.1
atggagagccttcctcagaagaggcagcacgtgccgctcaatgtgttcgtcctagcttgctggatcgaacacctttttccatggcaatgcaagcttgtagtcatagtcagagatcccgccgcacagcctaaacacgtccgccgcggctaccagcgtgggcaagatgacctcatccaggatggaatccatggtagcttgcagaaggaggcagcgctccaccaccacgcatccaagggaggtgccatcacgaggtcgtggatcaggcgagggtacgccgctgatgcgtccgctcccagcgtgtccttgagcgcttctaccatgacaagtgtacggttcagcaacggctccgtgcctccatactcacctgcgctgtactgccggctcagctgcgagtggagcagcggcgccgcgaagctgatcgccttgtacggcatactgttcgtcctgtactcctccgggaacttcgccttcactcccgcgaactcatggatcaggccgcccaatgtgagcttccccgactcgctctgctcccggaccaccttcaaggcgcgcttgatggccgtgtacccggaggttatcccctcctgtcatagactgccatggccgcccaatgtgagcttccccgactcgctctgctccaggaccaccttcaaggcgcgcttgatggccgtgtacccggaggtgtacccggaggaccaccttcaagacgcgcttgatggccgtgtacccggaggttatcacgtcccgccttcccctaggccgggcccgcttacatctgatagctttcataggtcatag

SEQ ID NO: 11352 - DNA, 1980 bp, Oryza sativa
  Clone ID: PAT_MRT4530_17585C.1
atgaagatggtttgcagtgctctcactagggacatggagggaggcgtgccaaagcggtgcatatggagaggagaggcaccagcagagtatgaagaggaggcggcggcagccatggcaggaactgtggacaaatcgacatataactcatttgtgttgatattgcaactgttggcattgcaagttctgtgcttatattcaaagattaacctttcagggaagaacaatatgaaaaatgagacgctggttttctggccggccttaacagggaggcgcacacttcacccaatgctgatcttggcctcggttatttcaatggcctccgtcggtgacgaggggagaaaccaaggtggtagtctttcccacggcgagactaatgcaggccaagagttggaaacatctgatcgcactcctcctaactcctccaacaccaagactagtggcgtgcaggaaattgcggcggctgcaagcaaagacgtgcccaccatccactttgtgcgcgtgagctccggcgacacggatcaccattgtcaatcgttgttttcccctcccgcttactgcaattcctactatcccccattgccgccgcagcccgggagcatggcaaccaaccagatagtggcaaggttgatggctcagatgaactacgaggagggcaccggccttggcaagtacggccacgggattatcgatcccatcaacccgaccaaaaagtatgggaaaggaggcgttggcaaattcgagtcgtcgtacgatagcgactcggattatgacacggggccgcctgtagagcccaagctcgagcggggcaccggcgaagcagagccggaagccgttgtcgacgtcgaggaggttcgcgccatggacacgctgcagagagagcgtgaagcctatgccgccgcgcgggcgtgggagcggcgccacgagaaggttcgagcctataacatgcgcaggcaacgcccaccgaaacacgccaccgccgccgacgactgggaggggatggcctccaggtacacggcgatcaagcgtgccttgaagatggtccgggagctgaacgagtcagggaagctcacgttgggcggcctgatccacgagttcgcgggagtgaaggcgaagttcctggaggattacaggacaaactgtgagtatggaggcacgcagccgttgctgaaccgtacacttgtcatggtagaagcgctcaaggacaagctgggggcggacgcatcggcggcgtaccctcgcctgatccacgacctcgtgatggcaccgcccttggatgcgtggtggtggagcgctgaggagccggagccgatgctacggttcgtcaatagatggaagggcctccttccgcaagccaccatggattccatcctagatgaggtcatcttgccgacgctggtagccgcgacggacgtgtttaggctgacgaggccgagtaagctgagcgtctgtgtgggcatgtggattcctcatctcagccacgcccgcctacgaatagtgtacattataagcaggcggctcagagattggctgtgcggtgggatctctgagtacgactacaagcttgcgttgccatggaaaaaggtgttcgatccagcgagctgggatgaacacattgagcggcacgtgctgcctcatctgaggaaggctctccatgacctcgagatctcgataagaatgacttggctacaaaacaacaacttcttccctcttgtaatgaggtgggcatccatcgtgccggtgaagtacatggtgccacttttgatacaagggttcttcaagaaatggatgtacgccaactatcggtacctaatgggcgagaggccccggttggatgaggcgatggcttggtatgaagtgtggaaagggcttttcacgccggaactgctcgcggagaagcgcgtggtcgtgcatgtcgaggccggcctcgacatgatcaaccgcgcgacgcagggattggagataagcgtgccggagcattag

SEQ ID NO: 11353 - DNA, 1876 bp, Oryza sativa
  Clone ID: PAT_MRT4530_17586C.1
atttcagtgttaggtgctagtattagcctgtcattgttccagttgcttctctcatgcagagccccttatataacacaggccggccttaacagggaggcgcacacttcacccaatgctgatcttggcctcggttatttcaatggcctccgtcggtgacgaggggagaaaccaaggtggtagtctttcccacggcgagactaatgcaggccaagagttggaaacatctgatcgcactcctcctaactcctccaacaccaagactagtggcgtgcaggaaattgcggcggctgcaagcaaagacgtgcccaccatccactttgtgcgcgtgagctccggcgacacggatcaccattgtcaatcgttgttttcccctcccgcttactgcaattcctactatcccccattgccgccgcagcccgggagcatggcaaccaaccagatagtggcaaggttgatggctcagatgaactacgaggagggcaccggccttggcaagtacggccacgggattatcgatcccatcaacccgaccaaaaagtatgggaaaggaggcgttggcaaattcgagtcgtcgtacgatagcgactcggattatgacacggggccgcctgtagagcccaagctcgagcggggcaccggcgaagcagagccggaagccgttgtcgacgtcgaggaggttcgcgccatggacacgctgcagagagagcgtgaagcctatgccgccgcgcgggcgtgggagcggcgccacgagaaggttcgagcctataacatgcgcaggcaacgcccaccgaaacacgccaccgccgccgacgactgggaggggatggcctccaggtacacggcgatcaagcgtgccttgaagatggtccgggagctgaacgagtcagggaagctcacgttgggcggcctgatccacgagttcgcgggagtgaaggcgaagttcctggaggattacaggacaaactgtatgccgtacaaggcgatcagcttcgcggcgccgctgctccactcgcagctgagctggtagtacaacgcaggtgagtatggaggcacgcagccgttgctgaaccgtacacttgtcatggtagaagcgctcaaggacaagctgggggcggacgcatcggcggcgtaccctcgcctgatccacgacctcgtgatggcaccgcccttggatgcgtggtggtggagcgctgaggagccggagccgatgctacggttcgtcaatagatggaagggcctccttccgcaagccaccatggattccatcctagatgaggtcatcttgccgacgctggtagccgcgacggacgtgtttaggctgacgaggccgagtaagctgagcgtctgtgtgggcatgtggattcctcatctcagccacgcccgcctacgaatagtgtacattataagcaggcggctcagagattggctgtgcggtgggatctctgagtacgactacaagcttgcgttgccatggaaaaaggtgttcgatccagcgagctgggatgaacacattgagcggcacgtgctgcctcatctgaggaaggctctccatgacctcgagatctcgataagaatgacttggctacaaaacaacaacttcttccctcttgtaatgaggtgggcatccatcgtgccggtgaagtacatggtgccacttttgatacaagggttcttcaagaaatggatgtacgccaactatcggtacctaatgggcgagaggccccggttggatgaggcgatggcttggtatgaagtgtggaaagggcttttcacgccggaactgctcgcggagaagcgcgtggtcgtgcatgtcgaggccggcctcgacatgatcaaccgcgcgacgcagggattggagataagcgtgccggagcat

SEQ ID NO: 11354 - DNA, 645 bp, Oryza sativa
  Clone ID: PAT_MRT4530_17587C.1
ccgggctgcaggagacggcacaggacggcgactagcctcggctaggcgatcggcggcggcggcggcggcttgggtccgggcttggatcctcgtcgagtacttatcccctcctccacctcccattcccctagcttctagagtcttctagccccttgtattacctcatcttccaccttcaaaacatcactgttggttggatttgtgttcattggtgaagttattgttatttggtgatttgggttcctaacaatatggtatcagagctatcgattcgtggggtttctagtgtgggaaagatctgcagtgatgtcccatgcaattcgctgtcagatttggacaaggatggtgctcatggcactaacgcacaccagctgttcgatggaatgccaagccaacatgaagtgtccgaggatgattcgaggatacacgaaaaatccttggatgacgctctggatcagatcatggagaagcttgagttaatggaggctaggcgtaggcaaaatgagaagattgatcggattttggagaagttcaatgagatggagaagaaggaaagggaatccatgcagagaagaacggcatcatggaggagctcagtaccagcatcaaagcgaccactacggtcatcatggctgcatcatcttc

SEQ ID NO: 11355 - DNA, 1164 bp, Oryza sativa
  Clone ID: PAT_MRT4530_17588C.1
atggatcaccattgttcatcgttgttttcccctcccgcttactgcaattcctactatcccccgttgccgccgcagcccgggagcctggcgaccaaccagatagtggcgaggttgatggctcagatgaactacgaggagggcaccggcctcggcaagtacggccacgggattatcgatcccatcaacccgaccaaaaagtacgggaaaggaggcgttggcaaattcgagtcgtcgtacgatagcgattcagattacaacacagggccgcctgtagagcccaagctcgagcggggcaccggcaaagcagagccgaaggctgttgtcaatgccgaggaggtccgcgccatggacacgctgcagagagaacgcaaagcctatgccgccgcgcgggcgcgggagcggcgccacgagaaggggaaggcgggacgtgataacctccgggtacacggccatcaagcgcgtcttgaaggtggtcctggagcagagcgagtcggggaagctcacattgggcggccatggcagtctatgacctatgaaagctatcagatgcccggcctgggggaaggcgggacgttacaggaggggataacctccgggtacacggccatcaagcgcgccttgaaggtggtccgggagcagagcgagtcggggaagctcacattgggcggcctgatccatgagttcgcgggagtgaaggcgaagttcccggaggagtacaggacgaacagtatgccgtacaaggcgatcagcttcgcggcgccgctgctccactcgcagctgagccggcagtacagcgcaggacacgctgggagcggacgcatcagcggcgtaccctcgcctgatccacgacctcgtgatggcacctcccttggatgcgtggtggtggagcgctgcctccttctgcaagctaccatggattccatcctggatgaggtcatcttgcccacgctggtagccgcggcggacgtgtttaggctgacgacgtggtcgagtaagccgagcgtttgcgtgggcatgtggattcctcatctcggccacgcccgcctacgaatagtgtacatcattataagcaggcggctcagagatcacctgtgcggcgggatctctgactatgactacaagcttgcattgccatggaaaaaggtgttcgatccagcaagctag

SEQ ID NO: 11356 - DNA, 238 bp, Oryza sativa
  Clone ID: PAT_MRT4530_17589C.1
ctaaaaccaaacgtgaagctcggatatgagtgggattatccaatacaaaggaaagcacctataatttcaccttgctaaaatattaacagatcacaaagattcaccactcataccttcatacaaaatacaaataatttagctaaccaaatccaaaattgcagaactgattatacagcgggggttacaaggacatcgtacatataatcattcgtcgatatcctctcttgataaccataca

SEQ ID NO: 11357 - DNA, 4047 bp, Oryza sativa
  Clone ID: PAT_MRT4530_1758C.1
atgtcgtattacgtagatcctcgtaccagcgtaccccaataccctctatatccagtctacgggtatcccccgtcgacagtggcgcgccaggtagggggacttggtgctcaagattctactactgtgacatccagcttcgtcgacaacagcgtcaacaccaacctcaaccaaggagttcctacttcaacgatgctagtgtggactcaagtcggcgaaatcgtcttcccggtttacaccacggtgccgatctcagctggtccatcaatggccggaaacgagaacgcagtggctacaacccagaacgattccatgtcgaaggatcctcccgctgaagcggagatcggaacgtcgacgacatccgagcccgagaaggatcctagtgcggccaaaccttgcctttccgacaagaatcacgagccgacgaggatgacttccgaggtgacaaggtcctggtgtcctatccacaaaaccagaaaacacaccttgcaagcctgttgggtttttctcaacgtccacgctgaaattcgtgcctgcaaagagcgtggaattcagcgtacttctccaactcgtgatgtctattgtcctattcacaagacaaataatcacgacctctcaagctgcaaggtctttctcagcgccatgaaaacgtcacctcctaaggtccagcagtcacacatctccctcagggatgaggacaaggaacaaggagcgacgctgatttcagatcgaatggttggggtaatcggcatcgatccccacgaaccatcagtcttgtacctgctcgaagactatggctcatcgtcaacgagtacgccgcgcgaggtattggctatcgacgagaccggcacatcagcgcgcgccaatgcggaagcggagaatcaagtgactacaccggcccagcacatcagggccgtcaacgtaatactgagggaaaccccctacgatcccgttctgaacgacgatcttgcacgatggacagaacggttacaggaatcagtgaccaacccggaacagccaccaactggcgatgctaatggtgaaaaccctgaacagcgggaatcgcctcatcgagtcacccctccacctcgcggcaccggcgatctccgcgatcacctgaatggccgccgagaggcgcgacgcacacgagacaacgagaaccgttcccgacatcgcgtctcttcacagcgtcacgataacgaagaacgaggaggccgttcgagcgaagaccgagaccgtgataaccgccacgatcatgacaatcgcgaacggcgggtgctgggcgatactgacctgtggcagcagttcgtcgccaacttccaaggaacttacaagcgccacacgatcgaagacgacctacatgcgttgtcacagaacccggatgaatccttgagggattatgttcggcgctttaatgagtgcaggaatacaatccccgagatcaccgacgcttctgttatccgcgccttcaagtccgaatacatggaccctcccaagcgcccagacccacaaggcagcgacacgaagaaaacatggtgccctatacacaagtcagacagacactctctagaagattgcctcgtcttcaaaaagtcgctcgcaaaacacatggcattgaaaaaaggcaaacgagtacgtgtggtcgagaaggacgctgaggcggctactcaggaatcggactcagcatacccagactccgatctccatgtctcgcacatcttcggaggttccacggcatactcctcaaagcgagaatacaagaaggtggaacgtgaagtctattcgacgtggcagggggctgcgcccaagatgaagtggtctgagcagaagatagaattctcagaagaggaccaccccaagactgctgtcatcccagggcgatatccgatcgtggtcgaacccactattcggaatatcaaggtcgcacgagttttgatcgacggcggtagctcaatcaaccttctcttcgccagcaccttggacgcaatggggatcccacgaagcgagttgacacccaccgatcaacccttccatggaatcactcctcagtcatcgtccaaaccattgggcaaaattacgttgcatgtgactttcggccaagcaaataacttccgaacggaacagatcacctttgatgtcgctgaattcgatacagcatacaatgccatcattgggagaactgcactcgcgaagttcatggccgcatctcactacgcgtatcaagtgctcaagatgccgggaccgaagggaacaatcactattcaagggaatgctaagctggcagtgcaatgcgacaagcggagcctcgacatggtcaagcacacgcccagcccacccgtcacagctgagccacccaagaaaatttgcaccagatcgaaaacaagcatacgagaagagctcgacaagcttctcaaagctggtttcatcagagaggtactccatccagagtggctagccgacccagtcatggtgcggaaggccaacgggaaatggagaatgtgtgtcgatttcaccgacctcaacaaggcgtgtcccaaggatcacttccctcttcctcgaatagaccaactggtggactcaacagccggttgtgagttgttgagcttcctcgacgcttactccggctaccaccaaatcagcatggcgaaagaggacgaggagaagacggcattcatcacgccgttcggggtattctgctacgttaagatgccgttcggactaataaccgcaggaaacaccttccagcgcacagtccagggtgcacttagcgaccaactcggaaacaatgtcgaggcctacgtcgacgacattgttgtcaagaccaagacaagtgactcattgattgacaatctgcgggaaacgttcgacaacctccgacggtatcgcctcatgctcaatctagagaagtgcacgttcggagtaccatcgggcaagctactcggcttccttgtctctggcagaggaatagaagcaaatcccgagaagatcaaggcaatcgagaacatgaagtcgcctacaagactcaaggaagtacagaagctaaccagatgcatggcggcactaagcaggaagccgaagagccattcattgcactcaagcgctacctatcaaatccacctgtacttgttactcaagcgccactactttcaagcccacagggtcacagttgtatcctccttccctctcggtgaagtagtgagaaacaaagatgttgtcggccgcattgcgaaatgggtagtcgagctaagccagtttgatgtccactttgtgccacgaacagccatcaaatcccaggtacttgccgacttcgtagctgattggactatgcctgataacaggtcagacaaccaaatcgataacgaaacgtggtcaatggcgttcgacgacgcactcaacagccaaggagcaagggcaggattcatcttgacatcacctttgggagatcaattcaagcatgcaattcacctcaacttcagggcaactaataacacagccgagtacgaaggactactcgccgggataagagctgcagctgcactcggagtcaggtggctgatcgtgaaaggggattccgaactagtcgcgaaccaggattactgcatcaggctgggagtcaagatctgtttcgcctcggtttctcaccctcagagcaatgaacaggtcgagagggcaaacggcatagtactacaaggaatcaagacccgcgtctatgacaggctcatgtcacatgacaataagtgggtcgaagaactcccatcaatactatgggccgtgcgtaccacaccgacaacgtctaacaaggagacacccttcttccttgtgtacggctcagaggccatgctccccaccgaattacgacatcaaagtacacaagtacagaaatattccaatgaggatcaggaggaacagcgaaacgacgatgtgaatctactcgaggaacatcgcgaacgagttgccgttcaagcagccagctaccaacaggcccttcgccattaccacgagaagcgcatccgagcacgcacactttcgatcggcagctacgtcctctga

SEQ ID NO: 11358 - DNA, 361 bp, Oryza sativa
  Clone ID: PAT_MRT4530_17590C.1
gcctgtgctttcaaatcacggacaattgcttacttgctaggagaagctggactttggatggacgagggccatataatcgttaccaataaatgatctgggaggccagtaatagccgcaagtgttcattgctgcatgtgctgaaaatttgcatgtacggattgcaatgacatgaacaaaagcctgaagatcattactttgggacagcacgtcatacaatcctacttaccatcaacacgtctgttttagtttgcaattgatgtaaagttgaccatgtcacgttgcaacttgcgactataacatgcgcgtggacgatgtgctgccacacatctgaacactgaacatcttactgttgtaaagcaac

SEQ ID NO: 11359 - DNA, 2445 bp, Oryza sativa
  Clone ID: PAT_MRT4530_17591C.1
aacaacaatgtcaagcgaaatgtggttgttagttcccaccacatagtcactattagtcattcatagtgacaactttgtcggaaacccatggctacctctcgtttgacccccgcttacgatcttaagaatgcggccgccgccgtgtacactcccctgccggagcaaccccattccgcggaagttgagatccgtgaccggaaacccttcaagattatctccgccattatcctctcctcacttctcctgctggctttaatcctcgtggcggtaaattaccaagcaccgccatctcacagcagcggcgacaattctcagccggcggctgtaatgccgccgtccagaggggtgtctcagggcgtttccgagaaggcgttccggggagcctccggcgccggcaatggagtctcgtttgcttggagtaatctgatgttgagttggcaacgaacgagttaccattttcaacctgtgaagaattggatgaatgatcctaatggtccattgtactacaaaggatggtaccaccttttctatcaatacaatccagattccgctgtttggggaaacatcacgtggggccacgcagtttcaacggacctgattaattggctccacctaccattcgccatggttcctgatcaatggtacgacgttaacggcgtctggactggatccgccacgatccttcccgacggtcggatcgtgatgctctacaccggcgacaccgatgactatgttcaggatcagaatcttgcgtttccggccaacttgtcggatcctttgctcgttgactgggtcaagtatccgaataatccggtgatttacccgccgccggggataggtgtcaaggactttagggaccccaccactgctgggacagctggcatgcaaaacggtcaaaggttggttacaatagggtccaaggtgggtaaaaccggtatttcacttgtttatgaaaccacaaacttcaccacctttaagctcttgtatggggtcttgcatgctgttccgggtacgggtatgtgggaatgcgtggacttgtacccagtctcgaccaccggggaaaacgggcttgacacgtcagttaacgggttgggtgtcaagcacgtgttaaaaacaagtttggatgacgataaacatgactactatgcacttggaacatatgacccggtcaaaaacaagtggacacccgataacccagatttggatgtgggtattggattgagacttgattatgggaagtactatgctgccagaacgttttatgatcagaataagcagagaagaattttgtggggatggattggtgaaactgatttagaagctgtcgatctcatgaaaggttgggcatctcttcaggcgattcctaggactatagtttttgacaagaagacggggacaaatgtgcttcaacgaccggaagaagaagtggaaagctggagctcaggggatccaataacccagaggcgaatctttgagccgggatctgtggttccaatccatgtttcaggggcgacacagttagacattaccgcttcatttgaagtggatgaaaccctgcttgaaacaacgtcggaatcccatgatgctggctacgactgcagtaatagcggcggtgccggtacgcggggcagtttgggaccgttcgggcttctggttgtcgccgatgaaaaactttctgagttgacgcctgtctacttatacgttgctaaaggcggcgacgggaaggcaaaggctcatttgtgcgcctaccagacgagatcatccatggcttccggagttgaaaaggaagtatatggtagcgcagtgccggttcttgatggtgaaaactactctgctagaatactgattgatcattcaatagttgaaagctttgctcaagctggaagaacgtgtgtaagatctcgtgattatcctactaaggacatctatggagctgctagatgtttcttcttcaataatgctactgaggcgagcgtcagagcctctctcaaagcgtggcaaatgaaatcttttatacgcccttaccctttcatcccagatcagaagagctgaagttcaaattggagatgaaagatttatagtcacaaaggattggaaaccctcttgggttgggcaatatgtgcttatcaacatctgcagctgccttcccttaaacccagataaagttatgggttcttgttcaatgccgattctttcatttttgcccaataaaattcatcaagtgtttattgcaatttgatctcatatcatatgcaattttagcgtacttgagaatatgttcctcaaagaaatatgttctccagttctctgtaaaataattttttaccttatttttttgaattttgaggccaagtatagtagcaatcatttatggattattcttaaaggtaatattatacttttggtcattcaaaaaaaaaaaaaaaaaaaaaaaaaaaaaaaaaa

SEQ ID NO: 11360 - DNA, 390 bp, Oryza sativa
  Clone ID: PAT_MRT4530_17592C.1
aactaattattatattttttattgggggattttttttttttgacgggtgcaaactcaaccaaaatttttcttcgggatcttttttgactgtttcacaagtactttcagggaaaataatttttccgtaggagacacaatatatgccccaaatacctcctttgaaaagaaccaaatacaacattcacccaacaattttttgtttaccatggggattcaaaagatggtccaccacttcatttcatgcatatgactgaagcaaaacaatttacaatatggtttaagggacaaatggtaagaaacaaaaaaccttattactaccgcttaagaatgtctctttaaacagtaaacttttaaatgtgaacagaaaattttcttcacctttttcaaaaa

SEQ ID NO: 11361 - DNA, 2453 bp, Oryza sativa
  Clone ID: PAT_MRT4530_17593C.1
gctttgggtccatttttattctctctccgcgtcgttgtccttataccatggtgccggtgtccaccaagatctccccgctcctcgaggtggtgaccccgatcccgcaggaggaccacacccgccaggccgacctcaaggaggtgccggccatccgcgcctccgccctcatcctcacctccatcctcgcctgggccctcaccgaggtggagtccccgcacgaggtgacctccggcgaggaccagaccgagccggacatggagatggccgagccgtccaagggcccggacaacgagggcgtgaccgagcgcacctactccggcgtggaggaggccatccacctcgccacctacggcgtggccgaggacggccacgccacctccaccgagtacgtgttctccaacgtgatggaggtgtggaacatgtacgtgttccacttccagccggagcacaactggatgaacgacccgaacggcccggccacccacgagatgggctggtaccacatcgagttctaccagtggaacccggagggctacgcctggtacggcatgtccaccaacaaccacacctcctgggcccacgccgtggactccaaggacctcgaccagtggtacaaggccctcccgtgggccatgtacccggagaacccgttcgacctccagggcgtgtgggactccgcctcctacacccacctcgacccgggcaagctctccgacgccgaggccgacatgtacaccgagggcgagtccgaggacgagtgggccgccctcgtgcaggaccagtgcgaggccgacgccgtgcaggagaccgacccgttcctctactacgtggactgggtgaaggagtccgtgaacccggacatcatttacccgccgccggggataggtgtcaaggactttagggaccccaccactgctgggacagcaggcatgcaaaacggtcaaaggttgattacaatagggtccaagctgggtaaaaccggtatatcacttgtttatgaaaccacaaacatcaccacctttaagctcttgtatggggtcttgcaagctgttccgggtacgggtatgtgggaatgcgtggacttgtacccagtctcgaccaccggagaaaacgggcttgacacgtcagttcacgggttgggtgtcaagcacgtgttacaaactagattcgatgacgataaacatgactacaatgcacttggaacatatgacctgcagaaaaacaaatggacacccgataacccagatttgaatgtgggtattggattgcgacttgattatgggaaatactatgctgccagaacgttttataatcagaataagcagagaagcattttgtggggattaattggtgaaactgatttagaagctgtcgatcccatgaaaggttgggcctctcttcaggcaattcctaggagtatagtttttgacaagaagacggggacaaatgtgcttcaacgaccggaagaagtggaaagctggagctcaagggatccaataacccacgggcgaatctttgagccaggatctgtggtaccaatccatgttacaggggcgacacagttagacattaccgcttcattagaagtggatgaaaccctgcttgaaacaacgtcggaatcccatgatgctggctacgactttagtaatagcggcggtgccggtacgaggggcagtttgggaccgttcgggcttctggttgtagccgatgaaaaactttctgagttgacgcctgtctacttatacgttgctaaaggcggcgaagggaaggcaaaggctcatttgtgcacctaccagacgagatcatccatggcttccggagtagaaaaggacgtatatggtagcgcaatgccggttcttgatggtgaaaactactctgctagaatactgactgatcattcaatagttgaaagctttgctcaagctggacgaacgtctgtaagatcccgcgattatcctactaaggacatctatggagctgctagatctttcttcttcaacaatgctactgaggcgagcgtcagagcctctctcaaagcgtggcaaacgaaatcttttatacgcccttaccctttcatcccagatccgaagagctaaagttcaacttggagatgaacgatttatagtcacaagatctagactgaatgactgatcgtttaggtatatgtgcttatcaacatctgtaatgaccttcccttaaacccagataaatgggttcttgttcaatgccgattctttcatttttgcccaattatattcatcaagtgtttattgcaatttcgtatttcgtgtatggctgtgtcatatgcaataatagcgtacttgagaatatgttcctcatagctgtgactgtcattctccagttctaataaatctttttttacctaattttgcaaaatattatacttttggattcattcaaaaaaaaaaaaaaaaaaaaaaaaaaaaaaaaaa

SEQ ID NO: 11362 - DNA, 235 bp, Oryza sativa
  Clone ID: PAT_MRT4530_17594C.1
atgacgagattaattaagtaacaggcctatagaggagcagagtggtggcggttgatgggacatctaaaaactattaataaaccaccaaataaaatcctaatgacgattaaaaggaaggacgacgggcatgtcgtgaagtaatcggtcaaggcggttgtgacagtaaagaagggcggcagcgggcgagccgcagaggagtatagtgacaaagttgctgacgttttggcggaattct

SEQ ID NO: 11363 - DNA, 504 bp, Oryza sativa
  unsure (1)..(504): unsure at all n locations
  Clone ID: PAT_MRT4530_17595C.1
tccaaattgccgagacgaatcttttgaccctaattacnccatgattttaccatatgatgctacagtaaacactttgctaataacagattaattaggcttaataaatttatctcgtagtttcctggcagaatctgtaatttgttttattattggactacgtttaattccttcaaatgtgtgttcatatacttcnaaatttttacacctaaacaactaaacncggccataatagttatataactaatataaatcttttttttcggaagcttaaagtaactataggaatcgaagtaaaaaaagcttgagatggaaatgaccnaacaaaccacatgcaccagaaaaaaggaaaaatagaagggtattaggattagttttgtgtaaatggaccaaaaacaagatttggtttgtgtaaacagacaaaaaagttggaaacggacaaaaaaaaaaaatccatcggacagaaagagagaaaaaaagtgaaaagggacaaaaaaaaaaaaaaaa

SEQ ID NO: 11364 - DNA, 267 bp, Oryza sativa
  Clone ID: PAT_MRT4530_17596C.1
aggaggtgaagtgccacacgtatcgatgcttttctgcttgctgcttgaagcccttgaaccgattcgccactggagaaggagattcctagccctatggtgccaccagccacagtaagaaacttgcctgtggacgagaatgttgatttcttcttcttttcaggggtggttgtaccatttgtggactgtgaaagttatggcagttataaataatattaaaaagcatcaatgtgacagttttgcaaatttccagccaaaaaaaaaaaaaaa

SEQ ID NO: 11365 - DNA, 2550 bp, Oryza sativa
  Clone ID: PAT_MRT4530_17597C.1
atggcgctggagctgagcctggtgtccgcttcgccccctggtgggctggcggcgagcccgcccccgcccgccgccatcccggggaaggagcagcaggtggccggggtggggatcctgctgcagatctccatgctcgtgctctccttcgtgctcggccacgtcctccgccgccaccggttctactacctccccgaggccagcgcgtctctcctcatcggtctagttgtcggtgggcttgctaatatttcaaatacagagaccaacactagaacccaatcaggattcagtctatccccaaaaccattctttgcaaattttggggctattgtaacttttgccatccttgggacattcattgcttctgttgtaacaggagttctcgtctatcttggtgggttgacatttctaatgtacaaacttccatttgttgagtgcctcatgttcggtgctcttatatctgcaactgatcctgtcactgtgttatcaatattccaggagctgggcactgatgttaacttgtatgctcttgtgtttggagaatctgttctaaatgatgcgatggcgatttcgctttacaggacaatgtcattggtcagaagtcaagcagcagctggggagaacttctttatgatggttttccagttccttgagacctttgttggttcattgtcatcaggttgcatcacagctcagaatattctcaactatttcaaagggacctttggcattgtggtgttggagttggatttatctctgctcttatatccttttcctaagttctacatggaaactctgtttgcaaaacatgaaagactatgcatgcttagtattgaccatgttaaattgcaatatttatgtattactatttaccatttactcattgcttgttttacggtaaattattttatttactacttgatcttgtgcaaccttgaccactctgtgtacctgtttaagtatgctggactggatattgacaagtatatgttagcagaaggacttgggttgtcaggaattgtttccatactattcacaggaatggttatgaagcactatacattttccaatctctcaaacaactctcagcgcttcgtttctgccttctttcacttgctgtcatctttagcagaaacatttgtggcagtaaatgtcttttcttgtgcatatttggttaacatgtcacggccagaacatcgacgcatacctctaaagcatcagaaagcactttggtttagtgggcttagaggggccatggcttttgcacttgctctccaatctgccaatgaacttcctggaggacatggaaaaacaatattcacaaccaccacagctattgttgttttaacggtacttcttatcggaggatcgacgggcaccatgctggaagctttggatgtaattggtgatgaaaacagatcaatagaaaattatgacgacaacaatggttacatccccccaacgtatgaggaaggttcatcatctggaggaggattaagaatgaaactgaaggaattccacaaaagcacgacatcgttcactgcccttgacaggaactatctgactccatttttcaccagtcaaactgatgaggatgatgatgtcttcgaaattggccattatgccactcccaagagtgggtttcgccaaaatgccattctgccgaatggattcgttaaaatgccatgtacaagagataccaaacatttgttttgccatttgcgccaattctctccatttttacctaattttgcatctgggctgaccaaaataccccttcgggctggttcaagaccagtactccgcaacacctcctccggctgtgccgccgccgccgcctgcgcggaccagtactccgccgcgacgagcccgaagccaagtgctggaaggaggatgctgacaatgagggtagctccggcggcatgggcggcggcgctggcgggaagccggtgcgcaagccgaggcttgtggtgcacacgctgagcgacatcgacatcctcgacgccggcttccggtggaggaagtacggccagaaggtcgtcaagggcaaccccaacccaaggagctactacaagtgcacgacggtgggttgcccggtgcggtagaggtgaacaaccccaaaaccagagacgcggattctatgaccaatagcttggatgagttgccacctgacagccacatacacgatacttagcatggtagcatgtgatgagattggaagcgatcgtaagtatacaacttctcatagttgaatagcatatgaaagagcataccgtaggatagatatcataacacaacttgattcgtcggcgatgacgaaagcatgctgcttcatgtatatattttaggcctcgattagtacgtggtggagctgtaatgagacaaaaatgattgtaagggaaaaaaaactgagcccaagcccatgtcatgagttagaatgattgcaataacccagagctgatcattggcagcttactgtcaagttggaaaagcatgttaaccaaatcaccagctgtgtcattggctggtcttgaagttactaaaaaacacaaa

SEQ ID NO: 11366 - DNA, 1023 bp, Oryza sativa
  Clone ID: PAT_MRT4530_17598C.1
atgggcccaagatcgttcaagctcgtgtcaatcacatatctacggaggaagctcaagcagcaccagaagtggttttggtattatttgattctagcgctacacattcatttatatccaagaaatttgttggtggtacatgggttaagaaaagtggaacttagtgctccaatgaaagttaatacaccgggtaatagcacaagattggttagtttttgtccctctatgatgatagaaatccaaggatcaccttttttagccaatcttatccttctggagtgcaaagacctagatgtcatactaggaatggattggttgtcaaggcataaaggagttattgattgcgcaagttgcactgtcaccttggttgatgagaaaggggaagtggtaataattcagttcccaatgactcagaagaaaggagtagtcttgaatcaaatggaaggtgaaaaacaggatgaagtcgagaaagatgttcagaagttggaaaacattcccgtagtctgtgagtatcctgaagtttttccggaggatttaacgactatgccacccaagagagatatagagtttcgtatcgatttggtaccagaaagaatacattcgtccaagcacgtcgccttgggtgctccagtaatttttgttgagaagaaagacaagactaagaggatgtgtgctgattacagagcactcaatgaagttacaatcaagaataagtatcccttgccgaggatagatgatctgtttgatcagttgaaaggagcaactgtgttttcaaagatagacctgcgatcagacggtgaggtccccttcaccaccagatttggatgcaagctcgccggatctagctgccttgagctcgccttcactagatgtagcttccggagagcggccgtgctcgggtggcgcgttgctgccgtcacctccatgggaggtggctgcttcggctcctccacatcggcaccgcagctcacctctcctccagatgacgcggcatggtgggatggtcatgccttcgggccagcatag

SEQ ID NO: 11367 - DNA, 237 bp, Oryza sativa
  Clone ID: PAT_MRT4530_17599C.1
ctacaaatactctaaaaacctttattttggcggggctacatgttcacaaatattgctcacatatcattgttcacaacatgacaacaacacttatttgctacttaaccatcaaaaggagcatatagttcatcgagaggatctttatgacctaatctcatatttgttatcataaatgctttaatgcattggatattcgacatctttttacactatgacaacaccgtttaactatttacc

SEQ ID NO: 11368 - DNA, 4476 bp, Oryza sativa
  Clone ID: PAT_MRT4530_1759C.1
atgcaagcccgagccgcccgagccgccgccgccggtgatgacgtcaccgctgacgtcatcgtcgccctctcccctcctggtttggaatggtacattcctggtttggagatagaactgtgcagccgggatggttgttcagaatggttgggcctatacaacaggatgccgcgctacaagcctgagtacttgtttggtgttgagggttttgtccaggagttgcgtacgatattcctcatgatcgtcatgaagagaagtgccgagtcaaaagtcaccttgaacagtaatagtgaagatatcccctcagtgatgttcgaagctggaggaagaaactgcatccatgcatgtcaggaggtggcaaggattgccataggagagctccgcgatcgctacagtgatcagttggccgacactgagtatcgctatcatcctcgtcaaccccagggaagtgaccgtggcaactatcttgagactgaaggaattgagaatgatgctaccacaaggcatttggttgagatgctgtgggctatggatgaaagtcgtgcggagactgtgttagcggctcaagatcatgaagatcggaatcgtggtaagatttgcaagttagaggacaaggtggatcgtttggaaaaggagttagctgcgttgaagggagaagcaccgctgcagaaggccaggattcgtctcaccgcaaggaagagagctctatttgtccctcgctatcaattggcgccaaaggtccgtgtggtggagaaagaagttgccccaaccctagcagatcctccggtcatcatcataagtgaggatgaagaagaagaatccaagcgcaaccattccaagtttcccccggtttctcttcttgtgccctgtccatgccagatggtgaacactcgcagcaacgggaatggcccaagtaaccataacaatgaaggaaacccaacccttgctcaagttcttgctcaacagactcagcttatgaacatgatgatgcaacaacttcagaatcagcagaaccagggaaataaccatgcacctccccagaacaagttagcagaatttcttcatgtgaggccgcctattttctctagtaccactaatcctgttgaagctggtgattggctgcatgccatagagaagaagttggatttgcttcagtgcactgatcaggagaaggtctcatttgcatcacatcagttgcatggccctgcctctgaatggtgggatcacttccgtttgaataggactaccgctgaacctatcacttggcttgagttcaccgctgcttttcggaagacgcatatatcatcgggagtggtgtctctcaagaagaaggaattcaggtcgctcacccagggatctcgctctgttacggagtacctgcacgagttcaatcgtctggctcgttatgctccggaagatgtgcgcaatgttgaagagcgccaagagaagttcttggaaggacttaatgaggagctttcttacccactcatgactggagattattctgatttccagaagttggtggataaggctattcgtcaggaagacaagtacaatcgcatggagcagaagaaacgtcggattgctcaattcaagacacaacaggggaataatcagaagccgcgtcttactttaggaccccagtccatgccacatggaggttcttcgtctgttgttcgtccgcagcgtcagttcttcaacaacaatgctggcaacaacatccgtaatcaagctccacgtccagttgcagctccagcacagcaacaacctgccaagagggagcaaggcagcaagcccgtggtgtgtttcaactgtggagatccaggacattacgctgacaagtgtccgaagccccgacgcgtgaaggttgtccctgctcagagcaactctgccgtaccagcgtcaaaggcccgtgtcaatcatgttgctgctgcagaagctcaagatgctccagatgtgattttgggtacgttccttgttaacttagttcctgcaacagtgcttttcgattcaggtgctacacattcattcttatctatgagttttgcgggaaatcatgggatggaagtagaagatcttagacgtcctttgatggttagtactccaagtaatcaagcactctctttgcaacgtagcccctctgtcagaatagaaattcaaggggtaccatttctggccaatcttatcctgttagaatccaaagaccttgatgtcatcctagggatggactggttagccagacataaaggtgtgatagactgtgccaacagaaaagtaactctcaccagcaatgatggtcgagttgtaactgttcatgcattgtcttctgcgtctttaaggtcaagactgaaccaaataactttggaagagattcctatagtccgggagtatcccgatgtgttcccagatgatttacctggtatgccgcctaaaagggatatagaattcagaatagatttggcaccaggaacaactccgatccataagagaccttatcgaatggcagccaatgagttggcagaagttaagaggcaagtagatgatttgcttcagaaaggatacatcagaccgagttcatcaccatggggagctccggttatttttgtggaaaagaaagaccatacccagaggatgtgtgtggactatcgtgcactaaatgatgtgactatcaaaaataagtatccgctacccagaattgatgatttgtttgatcagcttaaaggtgctactgttttctccaagatagatcttcgatcaggatatcaccagttgaggatcaaagaggaagatatacctaagacagtttttaccactaggtatgggttgttcgaatgtactgttatgtcttttggacttaccaatgcccctgctttcttcatgaacttgatgaataaggtgtttatggaatacctagacaagttcgtggtggtctttattgatgatattcttatctactcccgaaccaaagaggagcatgaagaacatcttcgccttgcattagagaagctacgagaacatcaactgtatgctaagtttagcaagtgtgaattttggttgtctgaagtgaagttccttggtcacgtcatctcagccggaggagttgccgttgatcctagtaatgtggaatccgtaaccaactggaagcaaccgaagacagttttagagatccgcagtttcttaggcctcgcaggttattatcggaggtttatagagaatttttccaagattgctaagcccatgacacgactgcttcagaaagatgtgaagtacaagtggtcggaagaatgtgagcagagttttcaagagttgaagaatcgcttgatatcagctcctattttgattttacctgaaccaaagaagggtttccaagtgtattgcgatgcatccaaacttgggttaggttgtgtactgatgcaagatgggaagatggttgcctatgcatctcgtcagttacgtccgcatgagaagaactaccctactcatgatcttgaattagctgcagtagttcatgcgttgaaaatttggcgtcattatcttttcggtactcgtacagaggtgtacaccgatcacaagagtttaaagtatatctttactcagccggatctaaacatgagacaacggagatggttggaattaattaaggattatgacatgggaattcattatcacccaggaaaggctaatgttgtagcagacgctcttagcagaaaaggctattgcaatgctacggaaggacgacagttgccattggaattatgcaaggaatttgaaagattaaatttgggaattgtcagtagaggttttgttgcagccttagaagcgaagcccactctaattgatcaagttagagaagcccaaattaatgatcctgatattcaagaaatcaagaagaatatgagaagaggaaaagctattggtttcttggaggatgagcacggaactgtatggttgggtgagagaatctgtgtccccgacaacaaagatttaaaagatgcaattctgaaagaagctcatgacaccttatattccattcaccctggtagtaccaagatgtaccaggatctcaaggaaagattttggtgggcaagtatgaagcgtgaaatcgcagaatacgtagcagtatgtgatgtttgtcagcgagtcaagacagacggacaaaccgaaagggtgaataagattttggaagacatgttgagagcttgtgctttagatttcggtggaagttgggataagaatctaccttatgcagaattttcgtacaacaacagttgtcaagctagtcttcaaatggctccttacgaagcactgtatggtcgaaagtgccgtactccgcttttgtgggatcaaacaggagaacatcaggttttcgggacggatatcctaagggaagcagaagaaaaggtgaaaatcattcaagaaagattgcgtgtggcccagtcgcgtcataagagttatgccgacaatcgcctagagatttga

SEQ ID NO: 11369 - DNA, 768 bp, Oryza sativa
  Clone ID: PAT_MRT4530_175C.1
atgttcgacggcggcggcgagcagcgaaggaacaactgcgctgctcgccctgtctccaccaatgtagatccggggagtcaccatgttgaggaagaagtacaaccagctgctcctgctatcccagccttagccgatctgttctctttagatattaaagattactttgatgagacagaagaagaaaccacgagcaaggctctagcccccttggatgacactgtcaagaaaacacttgaagacatatccattcggctagaatcttcattggataatctggtggctgattgtggtttgatccgggcacgatttgctgaaatccaagcctcaattccggacgatctggcaaacaccattactccagccgtgtaccttgagcaacaccaattcaagctggagaaggccaagcaacggatagccgattggcgagaacagaaggacattgaagccactatccaagccaatcggcagcttgtgcatgaagagaaggctaagttagatcaactctctgttgggcctattcagtcgaatatagatcggcttgaagctcgcaagattgatttaatagctcaactcgaggaatgcaacgccgagctggatcttgaaaaacaaaagctagccgatcttccaaatgttgttgaagaacagaagtccagattgagatcggctatcaagaacgtggctgacatgactaagtctctcaaggtcatccccggaaccgacgcccaagacatccaggccatcgaagaaatagatcaaatcaggcaatga

SEQ ID NO: 11370 - DNA, 548 bp, Oryza sativa
  Clone ID: PAT_MRT4530_17600C.1
atggggtcggcgctcgccggcgtgatgttcgtgtggagcatgctgagcccgctcctgccgcggcagctgttcgagcacttcgtcggccgcttcctccggcggcacgcgcggcggctcgccgggctcgtggacccctacctcaccgtcaccatcagcgagcactgcggcgagaggatgaagctcggggacgtctacgagcaggccaaggcgtacctcagccaccggtgcgcgcgccgggcgcggtcgctgcgcgcggagcgcgccgcccgcgacggcggcggcgacaggttcctgctcaccatgggcgacggcgaggaggtctacgacgtgttccagggcgccaccgtgtggtggaactccgtctcctccggcggcgggcggcgctacgagtctccctggttcggcggcggcggcgttttctacgactacgaccgtcgcgcgtaccggctcctgtttcaccgtgccgccgttatctggtgtgcgtcttctgcctcccgtatcgctgccgctttgtgccgttctttcgcgctcgtcttctttcgcctggg

SEQ ID NO: 11371 - DNA, 439 bp, Oryza sativa
  Clone ID: PAT_MRT4530_17601C.1
aaaaagaaatcttttttattcttccttcaaaccaaaaggaaatttggaatttatagtttttttaaactaaaaaacccctcataaaatatttaaaaccagttttagttggctaaaataaaccctccccatcccataataaaaaaaattttggatggatatgacatattataggggaaggaatctaaaaatccggttttaccttatggaacggaaggagaaattcctttttacctatcccatataaaaaaaaatccccccggggggtaatttcccaccaaaccaccaggctgacttgggcggccacattgtcgggggaagggggccccggccccgattccaaatgcgtgaggggcaaataggcggtggccggaatccacccggtagggggagcgggccccggatcattttacgcccttgggggacgaaaaggcaacggaat

SEQ ID NO: 11372 - DNA, 441 bp, Oryza sativa
  Clone ID: PAT_MRT4530_17602C.1
agccttccggggggggggggggggccaaccagaccccaatgggaatccaacggcccaccaggaacccgaacttttcccgggggggggggttttttcttcagaaaacggccccttcggtgggcaacttcttaacggggaagaattttttctttccctttttttttcctggaccaactaagggttttggggccttggaacctgggtcctgggtcggattccaattccaattgaaagggctcttcttaatcaacgcgaaaaatgggggccattttgaatgtagttagctaattccgcttccgcggcccgtttggccaacttggccaacccttaatccgcggccgcggttgctttgaagaactgacaagtttggcctaaacctggtccgaatcttaatagcctagaacctttatcttctggtcatcgcataaaataaatggaaaa

SEQ ID NO: 11373 - DNA, 324 bp, Oryza sativa
  Clone ID: PAT_MRT4530_17603C.1
aataaccatacatcattaatccaatcattcctttaatcccctctacgggttacgttaaatctttatccaaagaagcaaacatcttaacaaacctaattaatcaagcttgcaatatactatatccatcacacacacacacacactattaatgatcatacatacatgcacttctgtaactccaactatacattcacatcttatatactactactctacacataaaacattaattaacaccatcataacctttccatttcctaactatccgttcaccaacctgaactcatatacccactcgatattccctaccccttatgaaaccta

SEQ ID NO: 11374 - DNA, 405 bp, Oryza sativa
  Clone ID: PAT_MRT4530_17604C.1
atgtcgtccatccgcgcggcctcctcaagaacgcggagcaagttttggctacgagttcctcgtctcaggtggcgggacccacacgtgccagaggagaaaggggagaggagcgaggaggaggaggaggaggtgagggcggggccgacggggaaagaggagcggcggcaccggccatgccgccctccgatctgcgccggccgggcgctgcccctcgatctacgccggccagggctcgccaaccgtgccgtcactccgcctggctccgcgaaaggcgctccatccggctccgcacgaggacgagctcgctcgcgccggcgctccgcccggctccgcgcgaggacgaccgcactgctgctcgctgcttgggccgcccaggcgtcgctgcttgagtcatatctcttctga

SEQ ID NO: 11375 - DNA, 1592 bp, Oryza sativa
  Clone ID: PAT_MRT4530_17605C.1
aattcctgaagtcctaagctatagctagcactagcagctagttgctccaaagcccaaaccatgcagcactcaccttcaaacgaaatgaccctccttctccttctcttcctccttggatgcacacactacggtcacgccggctcagaccgtcccaagatcgactccatcttcagcttcggcaactcgtacgccgacaccggcaacttcgtcaagctggcggcgccggtgttccccggcatccctttcaacaacctcccctacggcgagaccttcttcggccaccccaccggccgcgcctccaatggccgcctcaacgtcgacttcatcgctgagggccttggagtccccttgctcgccccgtaccatggcgagtcgcaggacttcagccatggcgccaacttcgccgtcgtcggcgccacggcgctcgatctcgccttcttccagaagaacaacatcaccagcgtgcccccgttcaacacctcactgagcgtgcaggtcgagtggttccaaaagctcaagcctaccttgtgctcgacaacccaagggtgcaaagactacttcgagagatcgctcttcttcatgggcgagataggcggtaacgactacgtcttcctctatgccgccggcaagaccgtcgacgaggccatgtcatacgtgccaaaggtcgtccaagccatctctgccggcgtcgaggcggtgatcaaggagggagccaggtacgtggtggtgccgggccagctgccgacgggctgcctcccgatcatcctcacgctgtacgcgagcccggccgcggcggactacgacgccggcaccggctgcctgtggcggttcaacgcgctcgcacgctaccacaacgcggtgctgttcgcggcggtgtcgctgctccgggccaagcacccgtcggtcgccatcgtcttcgcggactactaccgcccggtgatcaagttcgtgcaaaacccagacgaattcgggttcagcgagtcgtcgaagctccgggcgtgctgcggcggcggcggcggggcgtacaactacgacgtggcggcggcgtgcggcttccccggcgcggcggcgtgcccggaccccgacgcggcgatcaactgggacggcatccacctcacggaggcggcctacggccaggtcgccgccggctggctccgcggcccgtacgcgcatccgcccatcctcgcggccgtgcaacgatctgacgaaggaaaccccatccaaatggctacgtcgatgcctgcctctttctgatacgctctccttttgagtcactttgtctctgttattcttaatccaagagtaccccagctgttaattgtatatgctcctttaaaaaggagtccataagtgacagttactggaagtcggagctgcttcatcgattgcgatgagtttggcagcgatatataaccggtgacgagtctgagtagttgcgttgttctggggttttgcttatgctttctgtgtggtttttgctggtttttcataaatgaaccgtgtggttgtatggttctgtgcaaaaaaaaaaaaaaaaaaaaaaaaaaaatgatcatgtagaatatcttaaaattaataaaaaaaaaaaaaaa

SEQ ID NO: 11376 - DNA, 330 bp, Oryza sativa
  Clone ID: PAT_MRT4530_17606C.1
gcagctgaaaattcatgagctaatacatatagaattgagttcttgttccagcatagaaacagcaggtgaactgaacatccatccaccaagagaggagaagggaggaggtattacatgattttacagaaggcttctcacagaacaaaaactttcttatacacaaaaaaacaagtaaagaagcccaagcatgaaacacctcctgacaagagaacaaaaggaagaacagatcgatctggagtgtacagggtatgaaacaatctgggtgaagaaacctaaaaatcggctctaataaaatcccaaggaccgaagagatttgcacactcctggctg

SEQ ID NO: 11377 - DNA, 1338 bp, Oryza sativa
  Clone ID: PAT_MRT4530_17607C.1
tctgtgatatctctatagcgcgcgcgctcttttttttttttttttttttttttgctactaaatcgacagttggtgcaggtcaataaacacccagcacctgtcccttttctgaatcatttggcaatttgccagagcagaagtgccaaacaagtagttaaacatgagaaaaccatcttccccaatatctctttttaattctgtatatacacttattacaacaaacaatgcgattacgcagagcccagccctaataaggagcaatggtgtcgtcgtcttcgccattgacggcatggcatttcgctagccagactcaatctgcagaggatggtcggctgcccggaacacgtactgaactctgaatctcaatatctttcagaagaggagagctgagcttcgtcagactaggtagtcgtagtacaccagcaagaggttgtcagggactatgaggggcaggctgtcgatgaagctgtggaagtgcctcacattctccttctccagcgtcacggtgtcgatcacgtcgtcgtctccggtgagcacccagaggtcccttgatcggactctcttcaggctcccgcggcagaacgggcatgactgagatcttgtgtaccagtctcgataacagttgatgcacatggcatggttgcaatttggaaggaccatcttggtgcaagtctccaagcaaatgccgcactcatcttccctctcgtcgtccttatcgtcggcgtaaagcttccggccgccgccaccggaggccgcctccttgcaccatcctttctcgttgcagtctttctccatcaaattcccctcgagttgttgcaagaatggatatattacagcatagaattccttgaggcttgctctcctttcaatgttggtggatatagaggcatcctcatcaacatataccttgtacacaagaacctcaaggagacctaggtaactagggagggtatatgaaagggagcagctgcaatccatccactggatgaggttaaggatgattggagccatggagctgtaagacagcctcatctgcacacaggcacccccataggccctgtgtatagcatgcgccagggtgttggcatggtggatatcagcttcaagcgccttgagagagcccctgagggacaaaggcctgccaccatgaaacatgacttctgtcaagaacccaaaaccagaccctatgctttgcttcacccttatgctgaagtctgccacaaaaacacagacttgggcaaggaggagaggggctcaagaagcaacaaacaatcaagcaagcaagcaagctgctttggtttggggtctctgggaaaggagctttgggggaaactggga

SEQ ID NO: 11378 - DNA, 1741 bp, Oryza sativa
  Clone ID: PAT_MRT4530_17608C.1
ccggccgggactgtttttgctgccgctgctacttcttccactagggttcgtcttgctgctccctccactgctcgcctcgcctccgccaccatctgaaatcgagtgagtgggagctaaggcggcggccccgtcgagatggcgctcgtattgcatactttcgatggaaacaagaatgcattcaaggcactcattgctgccgagtactctggtgtcaaggttgagttggcaaagaactttcagatgggtgtctccaacaagactcctgagtatctcaagatgaatcctattgggaaggtccctattctagagactcctgatggtcctgtttttgaaagcaatgcgattgcacgatatgttactcgctcgaagtctgacaacccactctatgggtcttcactgattgaatatgcccacattgagcagtggattgacttttcagccacagaggttgatgctaatactggaaaatggctcttcccacgtcttggatttgctccttatgttgctgtcagtgaggaagcagctattgctgctttgaagagatcattgggtgccctcaacacacaccttgcatcaaacacataccttgttggccattcagtgactcttgctgatattgtgatgacatgcaacctctacatgggctttgctcggatcatgaccaagaattttacttctgagttccctcatgttgagaggtacttctggaccatggttaaccagccaaactttaagaaagtcatgggtgatgtgaagcaggcagattctgtcccacaagttcaaaagaaggctgcagcaccaaaggagcagaagccaaaggaagccaagaaagaggccccaaaagaagctccaaagcctaaggcagctgagaaaccagaggaggaagaggaagcaccaaagccaaagccaaagaatcctcttgatttgctccctccaagcaaaatgatccttgatgagtggaagaggttatactcaaacacaaaaacaaacttccgtgaggttgctatcaagggtttctgggatatgtatgacccagaaggttactccctgtggttctgcgactacaaatacaatgatgagaacaccgtgtccttcgtgaccatgaacaaggttggtgggttcctgcagcgaatggacctgtgccgcaaatatgccttcgggaagatgcttgtgatcggctctgagccgccattcaaggtgaagggtctttggctcttccgtggccccgagatccccaagttcgtcatggatgaggtctacgacatggagctctatgagtggaccaaggttgacatctcagatgaggcccagaaggagcgcgtcagcgccatgattgaggaccttgagccatttgagggcgaggctttgctggatgcgaaatgcttcaagtgaggcgtcgttggagcaaggataccgtggaaaaatgagctatttaggttttggatttaccgttcgaaaatagttcatgattctgaaaaagaaaacactatcagcttgtggttatattagtctatattgagtgtgctctcgtttctgtgtgctgtttttaagagttttggcccttctatcttgtagttcttagttgttaaagacactatccatcgaatcatcatcggaaacacaccattccttgtgaatcggctgctgctcatatgataaacttggcaattctgatgttttcgaattgttatgcaagtaaaagaggtacagtgatgttcatgtttgtcaaaaaaaaaacaca

SEQ ID NO: 11379 - DNA, 1813 bp, Oryza sativa
  unsure (1)..(1813): unsure at all n locations
  Clone ID: PAT_MRT4530_17609C.1
ccggccggggctgctacttccactagggtttcgtcttgcttctcccgctgctcgcctcgcctcctcgacgatctgagatcatcgagatcgattgagtggagctaggcggcggctagggcgagatggcgctcgtattgcatgctggcagtggaaacaagaatgcattcaaggcactcattgctgccgagtactctggtgtcaaggttgagttggtgaagaactttcagatgggtgtctccaacaagacacctgagtttctcaagatgaatcctattgggaagattcctgttctagagactcctgatggtcctgtttttgagagcaatgcgattgcacgatatgttacccgctcgaaggctgacaacccactctatgggtcttcactgattgaatatgcccacatcgagcagtggaatgacttttcggccacagaggttgatgctaatattggaaaatggctctacccacggctaggaattgctccctatgttgctgtgagtgaggaagcagctattgctgctttgaagagatcattgggtgccctcaacacacaccttgcatcaaacacataccttgttggccattcggtgactcttgctgatattgtgatgacctgtaacctctacatgggctttgctcggatcatgaccaagagttttacttctgagttccctcatgttgagaggtacttctggaccatggttaatcagccaaactttaagaaagtcttgggtgatgtgaagcaggcagagtctgtcccaccagttcaaaagaaggctccaccaccaaaggagcagaagccaaaggaagccaagaaagaggctccaaaacctaaggcagttgagaaaccagaggaggaagaggaggcaccaaagccaaagccaaagaaccctcttgatttgctccctccaagcaagatgatccttgatgagtggaagaggttatactcaaacacaaaaacaaatttccgtgaggttgctatcaagggtttctgggatatgtatgacccagaaggttactccctgtggttttgtgactacaaatacaatgacgagaacactgtgtccttcgtgaccatgaacaaggttggtgggttcctgcagcgaatggacctgtgccgcaaatatgctttcgggaagatgcttgtgatcggctctgagccgccattcaaggtgaagggtctttggctcttccgtggccccgagatccccaagttcgtcatggatgaagtctatgacatggagctctatgagtggaccaaggttgacatctcagatgaggcccagaaggagcgcgtcagcgccatgattgaggacctggagccatttgagggcgagtcgttgctggatgcgaaatgcttcaagtgaggcgtcgttggagcaaggataccgtggaaaatgagctatttaggttttggatttacccttctacaatagttcatgattatgaaaaaaaaaatactatcaccatgtggctatattagtcaatattgagtgtgctggtcttttctttttgtactgtttgctagagttttggccctttttaaccttgtagttaagttgttaagacacttatccatcgaatcatcgtcagaaacacaccattcgaatctgctgttgctcatgtgttaaacttgccattctgataatgttttggaaataggcaacaaaacgagttatggtgctgggttattttatgtatttttaattctgttgttcaaaaaaaaaaaaaaagggcggccncaccccggtgggagctccagctttttnttccctttagtgaggggttaattccgcgtttggntaatcatggg

SEQ ID NO: 11380 - DNA, 272 bp, Oryza sativa
  Clone ID: PAT_MRT4530_1760C.1
gtaaagatgttgccgttaaaatcacttgccttcataacttgggagtttttttagcctataaattgtgagttacatgacaagttacacgcccagcgcactgggcaaacacttctcttgattctttggtaaatctacctctacagtcggaaacaaaatgagaacgtaccaaggtgatgtcacaaaaatttggaccaccttcctgcaaaaatcatttgcacagaaaaccttggccaacccaacgaccacaggtccacaggtgtgaaggaaacccc

SEQ ID NO: 11381 - DNA, 408 bp, Oryza sativa
  Clone ID: PAT_MRT4530_17610C.1
atggcggtggagaagaacacgaacacccgcgccgcccacagcatggcgctccccattacgcatgcctgcaggtgccgtccagcggcagcgcaggtggcactgtgcctgcaggcgtcggcgcgcgcgtggtcgcggacaagcaaggtgctggacctcgacgcgctgtcaacccacgacgccactgctacgggtctttatgatgctcagggattcatagtgcgatcaatcatgaatgccaacgacgaccagaagctgcacctagagacagaagcttcacacgccaaccttggatgctcggaagttgatgaggtggagatatgctcatgtgaacacagctctggccagatctacagcaacctcgccactggcttccggcgagaccagcttcaggagaagtccccatcctag

SEQ ID NO: 11382 - DNA, 3355 bp, Oryza sativa
  Clone ID: PAT_MRT4530_17611C.1
gatccccgggctgcaggaatcggcacgagggtcttgcttctcccgctgctcgctcgctcctcgacgatctgagatcatcgagatcgattgagtggagctaggcggcggctagggcgagatggcgctcgtattgcatgctggcagtggaaacaagaatgcattcaaggcactcattgctgccgagtactctggtgtcaaggttgagttggtgaagaactttcagatgggtgtctccaacaagacacctgagtttctcaagatgaatcctattgggaagattcctgttctagagactcctgatggtcctgtttttgagagcaatgcgattgcacgatatgttctaagtcactgtcattttcctgaagttacccgctcgaaggctgacaacccactctatgggtcttcactgattgaatatgcccacatcgagcagtggaatgacttttcggccacagaggttgatgctaatattggaaaatggctctacccacggctaggaattgctccctatgttgctgtgagtgaggaagcagctattgctgctttgaagagatcattgggtgccctcaacacacaccttgcatcaaacacataccttgttggccattcggtgactcttgctgatattgtgatgacctgtaacctctacatgggctttgctcggatcatgaccaagagttttacttctgagttccctcatgttgagaggtacttctggaccatggttaatcagccaaactttaagaaagtcttgggtgatgtgaagcaggcagagtctgtcccaccagttcaaaagaaggctccaccaccaaaggagcagaagccaaaggaagccaagaaagaggctccaaaacctaaggcagttgagaaaccagaggaggaagaggaggcaccaaagccaaagccaaagaaccctcttgatttgctccctccaagcaagatgatccttgatgagtggaagaggttatactcaaacacaaaaacaaatttccgtgaggttgctatcaagggtttctgggatatgtatgacccagaaggttactccctgtggttttgtgactacaaatacaatgacgagaacactgtgtccttcgtgaccatgaacaaggttggtgggttcctgcagcgaatggacctgtgccgcaaatatgctttcgggaagatgcttgtgatcggctctgagccgccattcaaggtgaagggtctttggctcttccgtggccccgagatccccaagttcgtcatggatgaagtctatgacatggagctctatgagtggaccaaggttgacatctcagatgaggcccagaaggagcgcgtcagcgccatgattgaggacctggagccatttgagggcgagtcgttgctggatgcgaaatgcttcaaattcactaacatctatatgaatgtgaagaatgctagaaagtcttataacctgaaacggagaaaaaatgcccaaggcccgtttcgatccaacgggctcgactggaaggggccagagtgccagacgaatgcccgcctacggagtggttggatctgctctgcgccgtccgatctgtcgcaaggcttactcatcggacggccgagatcacccgcgcgcaaccctaggcgagatcatctgaaatcgagtgagtgggagctaaggcggcggccccgtcgagatggcgctcttgatttagtggagaagcttggcatgatgcggtggggtgtagttttttttttttcattttcaaattgtagcatctgtggattgctgtatgagtcttctgtaaagcatatcgtttttttctgcacgatcagggttgatttggtattgcatactttcgatggaaacaagaatgcattcaaggcactcattgctgccgagtactctggtgtcaaggttgagttggcaaagaactttcagatgggtgtctccaacaagactcctgagtatctcaagatgaatcctattgggaaggtccctattctagagactcctgatggtcctgtttttgaaagcaatgcgattgcacgatatgttctaagttcctctcattttcctgaagttactcgctcgaagtctgacaacccactctatgggtcttcactgattgaatatgcccacattgagcagtggattgacttttcagccacagaggttgatgctaatactggaaaatggctcttcccacgtcttggatttgctccttatgttgctgtcagtgaggaagcagctattgctgctttgaagagatcattgggtgccctcaacacacaccttgcatcaaacacataccttgttggccattcagtgactcttgctgatattgtgatgacatgcaacctctacatgggctttgctcggatcatgaccaagaattttacttctgagttccctcatgttgagaggtacttctggaccatggttaaccagccaaactttaagaaagtcatgggtgatgtgaagcaggcagattctgtcccacaagttcaaaagaaggctgcagcaccaaaggagcagaagccaaaggaagccaagaaagaggccccaaaaagaagctccaaagcctaaggcagctgagaaaccagaggaggaagaggaagcaccaaagccaaagccaaagaatcctcttgatttgctccctccaagcaaaatgatccttgatgagtggaagaggttatactcaaacacaaaaacaaacttccgtgaggttgctatcaagggtttctgggatatgtatgacccagaaggttactccctgtggttctgcgactacaaatacaatgatgagaacaccgtgtccttcgtgaccatgaacaaggttggtgggttcctgcagcgaatggacctgtgccgcaaatatgccttcgggaagatgcttgtgatcggctctgagccgccattcaaggtgaagggtctttggctcttccgtggccccgagatccccaagttcgtcatggatgaggtctacgacatggagctctatgagtggaccaaggttgacatctcagatgaggcccagaaggagcgcgtcagcgccatgattgaggaccttgagccatttgagggcgaggctttgctggatgcgaaatgcttcaagtgaggcgtcgttggagcaaggataccgtggaaaaatgagctatttaggttttggatttaccgttcgaaaatagttcatgattctgaaaaagaaaacactatcagcttgtggttatattagtctatattgattgtgctctcgtttctgtgtgctgtttttaagagttttggcccttctatcttgtagttcttagttgttaaagacactatccatcgaatcatcatcggaaacacaccattccttgcaaaaaaaaaaaaaaaaaacccgcggcc

SEQ ID NO: 11383 - DNA, 628 bp, Oryza sativa
  Clone ID: PAT_MRT4530_17612C.1
atgaggtcatcggttgaaaccatccatgtgctgaataggtctcaagataggagcaagttccgcaagacgtgcattggacacagccgtcgcatcgctcctctgcagcagatccacgcaccggccaccgccttcacaacatgatttggaggtggagaagcttggtggcccctcgaacgagttcttccacaaatttactaccctcgaatgaatggcccaggccgcggcggctttgtcggcttcttcgacaacactaatgtctaccttgccaacaatatggatgcactggtgtttttatatttggatctcaagccctcgtatctggttctccagctgaatgtgttgatgcgatgactgcagcttaccaatggatgactctgtcatcttttcgctggcttgaagaactctggcagagaagcagaggtaggatatgttgacatcaggtgcttaactggaaacccgaatagaatccatttattttgacttcaaactgatgttcagatctgacatttggtgcacaacatgcagttgggggttttgacgtttcttaagtttttttcattgaacttgatcagccaaataagctattttagacgtgattcaaaaaaaaaaaaaaaaaaaaaaaaaaaaa

SEQ ID NO: 11384 - DNA, 392 bp, Oryza sativa
  Clone ID: PAT_MRT4530_17613C.1
atgcggcgacgggtacaggcgatcggtggtgcgcacgcggccggcgcggcgcggcacggcgtgcggcgcagacaggggattcatttcggccatctacccgcagacgccgcagctgcagcaaccggcgccgcgggggcctttggtccccccaccctctcccctcctccgatcaccgtccccccgcggggcaaggcagcgacgcgagatggcctggccgtcgccttctcggtctcccgacacaagtcaaagcctctccccatgcacccgcaccgcccccgtatcagcaatttcgccgcgcgcgcgggggctctcgcgtcatttcaccgcggccgccatccacgcccccacggccacttcgcgcctgggcctgccgccgcggcgctgctgctcat

SEQ ID NO: 11385 - DNA, 180 bp, Oryza sativa
  Clone ID: PAT_MRT4530_17614C.1
atgtcgcgccacctcaaaattccttcgttgttgtggtccgctgtcggtctcgccatggtcacaatttccaagcggctgcagtcgagcttttgggaggtccagatgaagagaaatgaaaatgggtcatacagtccagctctagctccacctctcctagagctggagctcagctccacctag

SEQ ID NO: 11386 - DNA, 758 bp, Oryza sativa
  unsure (1)..(758): unsure at all n locations
  Clone ID: PAT_MRT4530_17615C.1
gcatcaaccacacttgaatcgttgaatggtacggcacagagactgaccaaccctaccaactgcgtcgttttttgtgatacaatcatgaacaactgaacgttaaatactacttatgccacttggtacaatggtcatatttagagagactgatacagcatgtacaaatgcaagcccaaaataggatagggaaaaaaaatggaacaaagaaaacccaaagaattaacataatcatgaatctgtgctatacaggcgacatggatggtcaaaatcatttggagggcactgaatcatttcatagacttgaagtttgataggcagcagaaagtgtgaatgcggctcaaacatactgcttcttgacgtgacactattcagccatgatactgtttagcatggaagcgatttttgctgtcttatagtcgtccctgagttgaatgaaccgcaaggcatctttccggatactgggggttccttcaaataaggaagctagactttcaggagcaacgatgaatacattggccatgattccaagcagttcaaacttttcatctatcgatggggcattgaagctacgaacgaattccccgtactcagtgatatcacgtttcagccgtaacccaccactgggactaaatgtgaacttctgccaatgattgagtagccccttatgcaagcgatttcccagctcagtcaaaaaggactggttattgagaccttctagagcactggaatgcaacctcgagaacacgagatagataggn

SEQ ID NO: 11387 - DNA, 2246 bp, Oryza sativa
  Clone ID: PAT_MRT4530_17616C.1
acgagggccgaaagcccacgcgagcccatcccctgcagtagaagaggaggcggctcgctcgtgcaccaccgggccgcacgctgcgcggccgagccgagcagcgccgcggaggcgtcgtcgtctccggtgggttgcaggaggcgaatgcgatggggtccaagacgaaggggtgctgcgggtggctgatcgtggcgctggtggcgtcgctggtggcgacggcggcggtggtggccatcatgaagaagaaggtcggcggggggagcgggcgcaagctcaagccgctgccggtgcccggcccgcccggggccatcgactccaagtacggcgacgcgctcggggtggcgctccagttcttccaggtccagaaggcggggaagctggagaacaaccagatcccgtggaggggggactcggcgctggatgatgggaaaccagcggggctggatctttccaagggaatgtatgatgctggtgatcatatcaagtttagtttcccgatggccttcacggcaacggtgctctcgtggtccatacttgagtatggagatcagatgagcgccacgaagcagctggaccctgcgcttgatgctctccgatggatcactgatttcctcgtcaatgcgcatccatctgacaatgtgttctacattcaggttggtgatcctgatctagatcacaactgctgggaaaggccggagactatgtctgagaaaagaccactcacacagattaacacaaagtctcctggatcagatgttgctgctgaggcagcagcagctatggcatcagcatcaattgttttcaaatccagagacactacatattctgattcacttcttcaacatgctcagaagttgtttacttttgctgatacttataaaggcctcgccagtgacacctatccaaagctccaaaactactataattctactggttatcaagacgaactcctgtgggcagcgagttggctctatcatgctacaggagaccaaacatacctcagttatgtgactgtagagaatggaaaagcttttgctgattggggaaggccaacatggttcagttgggatgacaaacttgcagggacacaggtgctcttgtcaagattaaatttctttggatccaaacagacatctaatgctgaaaacatgggactcaaaatgtacagagacactgctgaagccgtcatttgtgggctcctaccagattctccatcagctactgccagtaggactggtgggggattggtgtggataagtggatggaattctctccagcatgccacaaatgcagcattccttgctgttgtttacagtgactacatgctcacatcgcaaacagcagcagtgcaatgcagtggaaagtactacagtcctacagatatacgcaattttgctatatcacaggctaattacatcttgggagacaacccaatgaagcttagctacctggttggatatgggagcagctacccacagcaggtacaccacagaggggcgtcgatccccgctgatgcaaagacaggctgcaaaggattccagtatcttcattctacgagcccaaacccaaacgtcgccatgggagccctcgtgggcgggccgttccagaatgacactttcgtcgactctcgggacaatgctgttcagacagagtcaagcacttacaacagcggcaccctcgttggtcttctttctggtctggtcacaacttcctctgtggcgcagtcgttcacctagagctctctcagagtttgggcaatggctttgaccaaccgggaggatatacatgtagccatgtacaatgagagatttttggcgtgaccaaaggcaatgtgccatcagcgaaacgccttcacggtgttcttcgttgttcatcttttgggtgatgggtggttagcagtagtagttcttgtgccatagtgctattgtttatacaaatactgctgcgtagttgcatccggtttgctggtgtactatctgatactacgagtgttgtatttgtaggacggattccatttgttgattctaaaatgatctctggtagcttgtattgatgatctgtaaaatccctcccaagatgaacattgcactgaacatgtgagatcacatggggagagggaagtattaatccagtttgttcagtatgttcatacataaattggacatcttttcagtaaaaaaaaaaaaaaaaaaaaaaaaaaaaaaaaaaagggggggggcctcgtgccgattcctgcagcccggggg

SEQ ID NO: 11388 - DNA, 429 bp, Oryza sativa
  Clone ID: PAT_MRT4530_17617C.1
tcattgcagggaggattgatgccgccgtcgccatcgagaagccggctttccatggacgccgcttctaccaccacctccagcgccaacattgtcaccaagaccaccacgaggaagatgacaacaaacagcgcgaggagggtgcgcccttgccaccatgatgaggaggaggccaagacgagtcgttgccagatccgccgcctccgcctccctcatcgccggatccaccaccctcgtcggagaaccgtgtgccacggccgggggagcaccgccgctgctcccttcccttccaacactaccgagccccgccgttgctgccgttcggcccttttaagccatctgcctgcaaaaatgggaataggatattcccaggcggtcggccattggactcctctccacacaacgtacaactacacaggtgggcaatcgtag

SEQ ID NO: 11389 - DNA, 141 bp, Oryza sativa
  Clone ID: PAT_MRT4530_17618C.1
tttgacctgtcgtcctttttttaaagtccgaagtctggggggaaaatccatatactataaccgggaaagcatgccgattaacataatttgatacagagcaggacaacctaggatcacatgaattaacagtaccagaaaaca

SEQ ID NO: 11390 - DNA, 2553 bp, Oryza sativa
  Clone ID: PAT_MRT4530_17619C.1
atgaccgtctccggcgagccccgccgcgtcgtcctcctcgtcgacgtcgaccctctcctcccctccccgaaggcgagtgcccccaccgcccagcccctcgcctcccactacctcgccgccgtcctccccgccgccacctccctcctctccgcctccccggccgcctccctctccgccgcgcggctcttcttctcctccctctccccgatcctctccttctccctcctccccgggccgctccccgccgccccggccccgctctccttccacctccacggggaaaccctcgcgtccctcgccccgctccgccgactcgcgctcccggcctgcgcgcaccgccgcgtgcccccttcctcctccatcgccaagtccatcctccagctcgagcacgactacccctgggacgacgaccccgagtccatccgccgccgccgcgtcttccagcagacgcccaatctggtggtcctcttcacggccgccgcggaattcgaggaattcgggggagacgcggacttcggagggaggtttcgtggggttttcaggccggtgagggaccggctggcggcgaggggcgtgcaggtttgctgggttgccgtcggcggctgcggcgagggggttcggagggcggtgacggagctggggtggtggttcacggccgccgatgcggtcgcattgggatcggcgattgcaactccggggcttgtgtggggatgccttgggcttgggggtgaggaaggtggaagccgtggggaggtcgtgctcgagatcgccgatgtggagggcaagccactggtctgcaagggttgcgaggtggaggtgattggctctacgccatggcgattgaggggtgatagtgtgttcaagatgcatgtgaaggcagtgtgtgaggtggggaattgggagcagttgatcaccggggatggtgatgctgtcatggtgcgtggttgctttcaagaggccggtaagattgacggtgaagaggctgcggaaaaggagttcttcgcacataagattgtcgaattgatgctcggcgatgataaggataagcttgggggaggcaagccgatctggcagcttattctggtgtttcttcataggaagaactattgtgcaatggtttcaatttccgatggggatgggaatcctttagatggtgttatcgtgcctctctcgatgaactatgcgttacttcatgttgcgaagaatggtgctggttttggtcaggtggttgcaaaaggccctgcattgttggatagttgcatgtctgatacatcaaaggagcagagtgcgaggaagaagagaagcaagctggtcagtaagctatttgaggcgaccacttggatctccttctgtgatgtgctcctaaaaagtgctgatggcagcatgccggtggtggacttggaagacttgtatttcagcaggtatgctgccacatctaaaaagatgcggtttttgaaatgttggatgaaacaagtgaaacagcaatgtcttagtacttcgtcaagcatagttgcagttgcagaagaagaaaaacatctttcctcaaaagatgaggcagaaacaaaaagtccagttttagaggaggatgcttcagcccctcttgtcaatttttctgtggatgaattagtttgtgacaaagaggacaaaccaatggatgaaataaattgcaacaaagtggataaaccagtgggtgatgagacttcagacttttcttctatggaagatttagaagcatttcttgatagtgtccctcagaagattgagcaaagtctttgttctgaagatgcagatttggggaatttagctggacgcttggttggcttatctgttcatgcactgatgattaagcacggaaagatctcagtgaggtactctaatcgtggggaagtagaagatgtttctgatggaaaaattgcctgtgaagcttccggtattctgttgtttattgatatcaacctccaaggggattcatttcagtccaatagtattcttgagtttgccgaaaagactattaagatcaggtacatcgaatccatggaagatgtgatcaagaagatctacaccgagatggagttcgatctgttcgacgacgaggtggaatgctccgagtccctccccagcagcagcaaccacgacgtcgacgggagcaacagccgccgtcaccggagcaactccgcacctcacctgctgcgacgcgatcacggcggcggcagcagtcacgaggagcggctggcgagggcggaggagaggaggaacagggaccgcaggctctcctcgttcaccagctgggtccccgacctccgccgcgtctgggcgctcaagcaccccgggaaggaacccgccgccgccgcgccgccgcagtcgcggcagggggcgtccaagcggaggaagcgccgccgcgctgcgtgcaccgacatggtctgcgagacgccgatgacggtggccgcctcggggaagaggaagccgggcgacgccgccgggtcactcgcgacggtgtccaaggccctcttccacgacgacgaggcggcgggcattagctcgagcagcgtctga

SEQ ID NO: 11391 - DNA, 467 bp, Oryza sativa
  unsure (1)..(467): unsure at all n locations
  Clone ID: PAT_MRT4530_1761C.1
attnaattccaccaaccacccataatttccattggcatccaggntccagcaacctgtggcaccagcaaatcaccaccactcaccggtgtcaccagcatctccaccctctctcccaatactctgtnacatcccatcccacggggggcccaccacgcacatcactgtcaccatctcatcacgggcaccactgtcactgtcaccatctcactgtggcaccggtgtcaccacccacccactgcgcaccactcctcctttgtggcagacagacactgtgccatcggttctgtccacaccctcagacttagctatcagcattgcacagtggcgcatagcgntctgccccagtgtggcagcccactgggtcgtgtggtggtggggtgggggctcacanatatgggcctgggtggcactcgcacagattgtgntgtgctgtnagtgccccccaagtngcgtattgtttngttatt

SEQ ID NO: 11392 - DNA, 926 bp, Oryza sativa
  Clone ID: PAT_MRT4530_17620C.1
cccgttcttcttcttctttttcggtcagtgccaaatcccatctccattttcctctctttctcgttgcgatttgagaattcaccttcttcttcctcctctcgcctcctacctcttgctgcagcgcacggcgccgcgccgtcatctcgtgcttgtatccttgttcttcatcttctctcaccttcccttgagaagatttgttattactagtttaatatttctaggaaagaggagaagaggagaggagaggagagggtggtaacgcagcgttaggtgggggcgtgctagggagtcaagaacagaaggaagggaggcccaactgctccatcctccctttccccaaatccactccttcctttcgatttgcctccttccttccttggttcattcattgatttttgcaccgcatttgaggaagaatgtgcccgctgagggtgatcctaatcttcctctccgccaccatcgccggattcttcctcatccggggcctcaacgccgatcccgacctccacgacgatgccgacgcctccgaatccccaagggaaaggccccccgtgcccctccattccaaggttgggtcggctttgaaaacaggattctggacgatggtggacatggcaagtgggaaatacctttggcgcccagtgatggagttctgatatttatatcatacttagttgatttgggaacactgatgtaacccctattgtggttagattctgttgttgaagtgtagtacgatggcaactgtaacatgaggattacatcttgaagtaaatgtacaaaatagttcacgtttgagccttttcgtgtaacctaaaacaatgagtggagaattgggggcaatgctgggagtatagatttattaatacatgagatttggactgaagaaaaaaaaaaaaaaaaaaaaaaaaaaaaaaaaaaacaaa

SEQ ID NO: 11393 - DNA, 481 bp, Oryza sativa
  Clone ID: PAT_MRT4530_17621C.1
ggttcattcattgatttgatttttgcacggcatttgaggaagaatgtgcccgctgagggtgatcctcatcttcctctccgctactatcgccggattcttcctcatccggggcctcaacgccgatcccgacctcctccacgacgatgccgatgccgacgcctccgaatcccccagggaaagggcccccgtgcccctccattccaaggttgggtcggctttgaaaacaggattctggacgatggtggacatggcaagtgggaaatacctttggcgcactcttgtttcaccaccgacaaaatgcgaatctgagaaggcccagtgatggagttctgatatttatatcatacttagttgatttgggaacacagatgtaacccctattgtggttagattctgttggtgaagtgtagtacgatggcaactgtaacatgaggattacatctttgaagaaatgtacaaaatagttcacgtttgagccttt

SEQ ID NO: 11394 - DNA, 300 bp, Oryza sativa
  Clone ID: PAT_MRT4530_17622C.1
atgtcggccatggagaccgacatcaacgcgccgccgccccccgcccccgcccccgccggcgccggcgagggatcctcctctgccgccggcccctcctcccgcaagcccaacaagcgcttcgagatcaagaagtggaacgccgtcgcgctctgggcatggggcatcgagtgccaggcgaaccaggccagcgccaccagtgaggagtgcactgtcgcttggggataccaggtgtctgtaatcatgcttttcacttccattgcatcagcaggtggctcaagactcgccaagtgtgcccgttag

SEQ ID NO: 11395 - DNA, 1259 bp, Oryza sativa
  unsure (1)..(1259): unsure at all n locations
  Clone ID: PAT_MRT4530_17624C.1
aaccaacactggacaatgtagatgagtagtcgacaggataaaccggccgacgacattcacaggctcgattccatgtcctgganagctcagaaaagcaatcaagagcatgcactggactaaaaaggggaccacagcttaaggcaaaatagagagagaaccgctgaatacaataatagcaagttgatatgtgacccacagaacattaatatgaaggatcttatgccatacagtaccctctctacaaatcatccaaacacaatccctgtatgggacaagtacgcacgataaacgtccagcgatagatgtaaggcatcaaaagaagctaacgatggagctgttcggcagatgatacggcttgtgtttgtagcgcagccgtggcaacaaacaagcgcagacagcaggtggggatagcagaaaaaaacttagtaaatacgaactgctgcttgatttcagcgaaaataagtttgaggagattcgctgagctaccagcatgatatgtttctaccgaaaatacaagcttctgaaacattaacaatgcagcctacccatcgtaatcattagttatcacttagtgctaatacttgatacgagaaacttgaagccgcttttgctcccgaaagagaattgtctagtgaccatacttctggaactcccactcgctgttgtctagagggcacacttgacgggtcttgagccaacggctgatgcagtggaagtggaatgcatggttgcaaactccccaagcgacggtgcactcctcgctggtggcgctcgcctggttcgcctggcactcgatgcagaggtccatgatgtggttgcggcagatggcgcagttgtccacgacgatgtcccaggcccagagggagacagcgttccacttcttgatctcgaagcgcttgcccttcttggccccggaggaggaggcgccggcgatggaggggggcacggccacggcgacgtcgcccttgtccatggcgaaccctagggtgggaggggagcgcgaggaggaggagtagattgggacgagacgagaagcgaccgcgcgacggcgttccacttcttgatctcgaagcgcttgttgggcttgcgggagtaggggccggcggcagaggaggatccctcgccggcgccggcgggggcggggacggggggcggcggcgcgttgatgtcggtctccatggccgacatcgtgagctctcgatcgacccggattcaggaattccaccagaccaggttgggattggaagatgagatttttt

SEQ ID NO: 11396 - DNA, 471 bp, Oryza sativa
  unsure (1)..(471): unsure at all n locations
  Clone ID: PAT_MRT4530_17625C.1
tcgtgaagagagagcctttgtgttgaagttctctgcgattgaaatatataatgaagttatacgggatcttcttagtgcggaaaatacccctcttagactctgggatgatgcagagaagggcacctatgtagagaatcttacagaggttgtattaagggattggaaccatctcaagggacttatttctgtgtgtgaagctcaaaggaggacaggggagaccttcttaaacgaaaaaagttctagatcccatcagatacttcgattggtttgttctttactcaaatctatgaattactccctccgtcccaaaataagtgcagccatggttttctgcgcccaactttgaccgttcgtcttatttgaaaacttttttaaaaaaattaaaaacagaagtcacgagtaaagtactatntatgttttatcatctcataacaataaaaatgcttaatataaaaaaattcaaataagacg

SEQ ID NO: 11397 - DNA, 126 bp, Oryza sativa
  Clone ID: PAT_MRT4530_17626C.1
atgcctttcctcctccagtcaaccgctgacagctttgttttcgcattaagaaccgagttcgaggaagctccggacgccgctttcgaaggagaagacccgcaccctgtgcaaggcaaacccctttga

SEQ ID NO: 11398 - DNA, 1566 bp, Oryza sativa
  Clone ID: PAT_MRT4530_17627C.1
atggctgctgttggcgcctgcttcctccagcagcttgctgtcgttgccctcttggctctgtggtgctctcatggcgccatcgcctccgatcctggccttcttcaggacttctgcgtcgtcgacaagatgtctcaagtgcgtgtaaatgggttcccttgcaaggacgccaaggacgttgtcgccggcgacttcttcttctccggcctccacatggccggcaacaccaccaacaagcagggatccaacgttaccaccgtcaacgttgcacagatcccgggtctgaacaccatgggcgtctccctcgtccgcatcgactatgcgcccaacggcctcaacccgcctcacactcatccacgtgccaccgagatcccgaccgttctcgaaggatctctctatgtcggcttcgtgatatcgaaccccgagaataagttgttcaccaaggttcttaacaagggtgatgtgtttgtgtttccacaaggattagtccattttcagtttaacaatggaacaaacaatgctgtggctcttgctgctctgagcagccagaacccaggggtgataaccgtgggaaatgctgtttttggatcaaagccatctatctcggatgatatccttgccaaagccttccaagaaatgttcaaatttgagtgtgattcatctgaaagaaactttggctatgttgccccaagtcccttgagattattgacaatcacattgagccttccatacatgtcattcacactctcatcggttctcataagctatctcaagattgctaattctatcaaaatcctcttggttcaaggagttgaacaaggcatttatggcttgggcattgaattggagattgcgatggtcaacattcttcaagttgttgccggtgatagcaaaacatacatcaacaatatttcaaatgtggaagctcatagccttaaaccattggtctaccagtcagatcggtcgcagcgcggtcacactggtgtcggctctattagctctggatcaccaaacggaggccatcacaccggctcactggctgcccgcccgattgaatgtggtgggttgggcataatgaacctggagtttttcggccaagcacttcgactaaaatggctagcacaaagactagagcagaaggggcggccttggactctggtgaactcaagaccaacaaccgataagcaagatcttttcagggctgcgagcactttagagggtttggagaatgctgacaggatagttggaggtgcagttcctactgctagaagaagggatcgaagggctatcaaagtggtggcgacaagcccggctaggttatggctacagggaggccttcgactcgttgtgcatgcttgtttgctgggtggtttggaaagaaaggaatgtcaggattttcgagcacaaaaactgcatggcggcgtaggtctacagggctatccaggaggaagtcctcgtttggagagaagccgacgtgttcaaagaatgagagtaaagctcagggaaagcttttttgttttattttggggtctttggtttcccgctgatctccctacttcgactgtttaa

SEQ ID NO: 11399 - DNA, 597 bp, Oryza sativa
  Clone ID: PAT_MRT4530_17628C.1
agagagaagatgtcgcacgaggtggggaaggctcccatatataatggaacaaattattatacttgaaaaaataagatgtttactcactttaaggctatgagcttccacatttgaaatattgttgatgtatgttttgctatcaccggcaacaacttgaagaatgttgaccatcgcaatctccaattcaatgcccaagccataaatgccttgttcaactccttgaaccaagaggattttgatagaattagcaatcttgagatagcttatgagaactggaacatggagcgtaaaatttatgagggcacaagtgagtacaaggatgccaagcttcactttttcaagattcagtatgagacatttgccatgttacccgatgagagtgtgaatgacatgtatggaaggctcaatgtgattgtcaataatctcaagggacttggggcaacctttcaattttggctttagtcagatatagtatatatcagttccaaaaaatatagatagtgtatatacatttgttttgaacatagaggtttttgatgccaaccccgcctttgtctttaggggaacaaacaacaatgaattgtatattgttaaatt

SEQ ID NO: 11400 - DNA, 534 bp, Oryza sativa
  Clone ID: PAT_MRT4530_17629C.1
gaaggcaaaaaaaaaaacaagggcccaaaacaagaaccccaaaacaaggttaaccacccaaaaaatccccccacaaaaattcggcttgggggggttggccctacctacccgattggggccaacccagaagggaaaaaaagccccccaacccctggaggggcccaagccggggtccccccccaaaggataaacccatttttggaagggaactttttaaggggccaaaaaataaaaaccctcctaaagtttttacgggacggggtaacacaaatggccccacaattaacctcctggaaccacagtgggccaagggagtttggaagttccccagtttggaaaaaacttattttttgggacggtatataaggccactcaggccccatattggaaaggtcccacccccaccagtcctttcccctttataaaaccccctcacaatagcccaaggatccaaaaaatcccaggggaagtcaacaattttatccctataaccagcaggttaaaaaaaaaccccagcaggggcgggggggattt

SEQ ID NO: 11401 - DNA, 423 bp, Oryza sativa
  Clone ID: PAT_MRT4530_1762C.1
atgggcggtctcttcaagactgccacattacctgaacagcgcacgaatctgggcgagccgatttgcttcgcctggagatatggtgatgacgggccgctgcacctttcggcggggccgatcctcttcgctaggggccgcatctccagggcgctcttcctccgagaggcagcgcggggcgccctcggcttctgcgccgacgacctcggggtcggagggcgacaggcgcggccttcccgcagtggccccgaggctatcctgacaccgtcggacaagcaagtccgggacgccgccgaccacatcgtccacagcttcgagggtacggcccctcggctcgcgttcgccctcgactccgacgaggagggcggtgacggtggtgcggacgacagcgacgacaaggctggtgacccgggcgcgtcagagtga

SEQ ID NO: 11402 - DNA, 6369 bp, Oryza sativa
  Clone ID: PAT_MRT4530_17630C.1
atggccaagccgggtagcggcggtggcgccgaggcgcacgcgcgttcgaggaagtacgactacgtcgagaactcgaacctcgtgctcggctccggctccggctcgcgcccccgtggcggcgcggacgagcacaccggcgagcccgagacgctccggggcaggatcgacccgaggagcttcggcgaccgcgccgtccaggccaagccccccgtcgagccgccgcgcaggaggaaggcgcgcgacgccgcggaccacgacatcggccaccgcctcgacgccaagcgcaggcgccgcgccgcctccgcctgtaccgcgcagcgcgaggtcagcgtgctcacgctcatcgacgacgtcgtgtacaggccccggaccaaggagacgcgagccgcctacgaggccctgctcagcgtcatccagcggcagctcggcggccagcctcctgacgtgcttggcagcgccgccgacgaggtgcttgccatcctcaacaatgacaagatcaagagccctgagaagaagagggggatcgacaagttcctcgaccccatctccgaccagatgttccaccagttcgtctccatcggtaagctcatcacagattttcatgatactgcagtttgtgattcagctagtgaactggatgaaaatttcggcgttgctgttgagtttgaacagaacgaagacgatgagggaagtgattctgatcaggtactagatgatttggatgaggacgacggcgacaccatgctgaatgctgctggtgccatgcaaattggtgatgagttagacgatgatgatatgcataactccaatgaggagctggccataaacgcacaagacattgatgcttactggcttcagaggaaggtatcacaggcatatgaagatattgatccgcaggttagccaggagctttctttggagatcatgagttttctttctgagagtgacgacaaggatgttgagaatcggcttgtcacgctattgggctatgacaattttgatttcatcaaattgctggtgcggaaccgactcaagatattctggtgtacttgtttggcaagggctgaaggtcaggaaaagcggaagatgatagaagagaatatgctgagtgacccaacattaagtccaatattggagcagctgcatgcaacgagggtgtctgcaaaagataggctgaagaatatggagaaaagcatcagggatgaggccaagaggcttaccgaaaaacaaaatgctggcattaatggtgcgagggatcaaagggtagttaagcgggatatggagagtggatggttgaaaggccagaagcagctgcttgatcttgagaacctaaccttccaccaaggtggtctcttgatggttaacaagaaatgtgaacttccaccaggatcatttagaacccctcataacgggtatgaggaagtccatgtgccagcactgaaagctaagccatatgaaaatggagagaaggttgtcaagatatctgatatgccagactgggctcaaccagcttttgctgggatgacacagctgaataggattcaaagcaaggtttatgatactgcccttttcaaaccagataatattattctctgtgcaccaacaggtgctgggaaaaccaacgtggctgtgcttacaatccttcagcagattggcttgcacatgaaagatggagagtttgacaataccaaatacaaaattgtgtatgtagccccaatgaaagctttggttgctgaagttgttggaaatttgtcagcacggctgaaagagtacaatatcactgtaagggaactcagtggagaccagaacttaaccaaacaacagattgatgaaacacagattattgtcactacacctgagaaatgggatattgtcacaagaaaatcagagggcctgttctggagagcattgtttagatcagtcaggcagactgaaacaaccaaggaacatatccgtctagttggtctctcagcaactcttccaaactatcaagatgttgcagttttcttgcgtgttcactctggtggtctcttccattttgataacagctaccgaccttgccctcttgctcaacaatacattgggatcactgtgaagaagcccttccagaggtttcagttgatgaatcagatttgctatgagaaggttatggctgctgctggaaagcatcaagtgcttatatttgtgcactcgaggaaggagacagccaaaactgctcgtgccatcaaagatattgcattatctaataacaaactgacctgctttccaaaggttgagagcgcgagcctagagattcttgccgatcatgcaaatcatgtgaaaagcaatgatcttaaagatcttttgccgtatgggtttggtattcatcatgctgggttgacaagggtagaccgtgagctcattgaggggctttttgctgataaacatttacaggcgctcgtttcgacagcgacccttgcatggggtgtcaatttgcctgcgcacactgtaataataaagggtacccaggtttacaatccggaaaaaggtgcttggacagaactgagccctctggatgtcatgcagatgcttggtcgcgcgggcagacctcagtatgatacacatggagagggaataatactaactgaacaaagtgaattgcagtactacctgtctctgatgaatcagcaactgcctattgagagtcagttcatatccagattggctgatcatctgaatgctgagatcgttctggggactattcagaatgttcgggaggcatgcacctggcttggctacacctacctctacatcaggatgctccggaatccaacgttgtacggtttaccagcagatattatggaaacagacaatactctagatgaaaggagagttgacttggtacacgctgctgcaaatatactggattggaacaatttgataaagtatgacaggaaaacaggatattttcaggtaactgacctgggaaggattgctagttattactatgttagtcacaggactatctcaacatacaatgagtgcctgaagcctacaatgggtgatattgagctgtgtcgactcttttcactgagtgaagaatttaagtatgtcagtgttagacaggatgagaaaatggagttggcaaagcttttcaattgtgtgcctattcctgtgaaagagagcttggacgagcccagtgcaaagatcaatgttctactgcaagcatatatttctaggctggaactggagggtctttcccttagttcagatatggtctacatcagacagaatgctggccgtctcctacgagcgctgtttgagatagttttgaagagaggatgggcccaactagcggagaaagcgttgaatctttgcaagatgattgataagcatatatggaacgtccaaattcccctgcaccagtttccaagtattccaaaggaaatcttaatgaaactggagaaaaaagaattggcttgggagaggtactttgacctatcatcacaggaaattggtgagctaattcgtaacccgaagatggggatgcagctgcacaagtgcatccaccaattaccaaagctgaacctttcagcccatgttcaacctattactcctacggttttgggttttgaactgactataacagctgatttccaatgggatgatgaattgcatggatatgtggagcccttctggcttattgttgaggacaacggtggcgataacattcttcaccatgagtacttcatgcttaagaaacaatacgtggatgaagatcatacacttaacttcacagtgccaatatatgagccactgccccctcagtactttatacgcgtagtatctgataagtggcttggttctcagacaattcttcctgtcagttttaggcatttaactcttccagaaaaatatgctccaccaactgaattgattgatctgcagccactacctgttactgccctgagaaatgcacgatatgaaagcctttactgtgcttttaaacatttcaaccccatccagactcaagtgttcactgcctcgtacaacagtgatgacagcgtgttggttgcggcgccaacaggcagtggaaagaccatatgtgcagagtttgctattctaagaaaccatcagaaggctgtatctggtgacagcaacatgcgtgttgtgtatgtagctcctattgaagctcttgcaaaagaaagatataaggattgggagagcaaatttggagaattggcgcgggtagttgagctaacaggcgaaacagcagctgatttgaagcttcttgataaaggggagattataatcagtactgctgagaagtgggatgcactctcacgccgatggaaacagcgaaagaatgtgcaacaggtcagtttatttatttttgacgagctccatctgattggatctgaaaatgggcatattctggaaatcatcatctctaggatgaggcatatggcgaatcatattggtagtaacattcggattgtagcgctttcagcatcccttgcaaatggtaaagatcttggagaatggattggcacctcctctcatagccttttcaacttccctccagcagtgcgaccactgccgttagaaattcacattcagggttgggatgtagcaatttttgaggcaaggatgcaggcaatgtcaaagccaacatacactgctataacccagcatgcaaagcatggtaagcctgccctggtgtttgtaccaacacataagcatgcaaggttgaccgcagtggatttgtgtgcacactcaagtgctgagagtggtggaacacctttccttcttgggtcagaagacgagatggatactttcactagtggtgtcaatgatgaagcacttaaatacactctgaaatgtggtgtaggctacttgcatgagggcctgagcgacttcgatcaggaacttgtaactcagctctttcttggtgggaggatccaagtgtgtgttgcaagcagcaaaatgtgctggggaagatcattgccctctcatctggttgttgtgatgggaacccagtattatgatggccgggggaacagccatactgattatccagtcactgatctgttgcaaatgatgggccatgccaacaggcctcttcaagatgactctgggaaatgtgttatattgtgctatgcgcctcgcaaggaatactacaagaagttcctttttgaggccttccctgttgagagccatctccagcacttcttgcatgatcatatgaatgccgaggtggtagctggtcttatagaaaacaagcaagatgccgtggattatcttacttggaccttcatgtaccgacggcttgcgaagaaccctaactactacaatctgcaggatgtgagccacaggcatgtatcagaacatctctctgagctggttgagacagtgctgaacgacctggaatcaaccaattgtttggctatcgaggaaaatatttacctgaagaccctcaaccttggtctcattgcctcgtattactacgtcacctacacgactattgagcgattcagttctatgctaactcagaagaccaagttgaaaggcctcctggagattctagcttctgcctcagaatatgcagatctccccagtcgccctggtgagcaaaaatccattgagaggcttgttcatcaccagagattttctgtcgagaagaaagtcaggtatgacgatccacatgtcaaggccaacgcactgctgcaatgccatttctcaaggcgcacggtggaaggtgaccttgcagctgaccagcgggagattctccttcctgctcatagattgctccaggcactgatcgatgtcatctccagcaacggatggctcaccctcgctctcaacgcaatggagctgagccagatggtgacacagggcatgtgggatcgcgattccgtgctgcttcagcttccacacttcaccgaggagttagcccggagatgccaggagaacgaaggcaaggccatcgagaccatcttcgatctggctgagatgagcacgcatgagatgcaggatctgctgcagctaccaagctcccagctgcaggacatcgtcggattcctcaggcggttcccaaacatcgacatggctttccaagttcttgaaggcgatggtggcagtgtgaccgtgcaggtgacgctagagcgcgagatggcagacctgctgcaatctgaggctggtccagtccatgcccccaggttcccaaagcccaaggaagaaggatggtggctggtgattggtgatcgctccaccgaccagttgctggcaatcaagagggtcaagctccagaagagggctcgagtgaagctcgagttcgctgcccctgccagaagcagggagaaaagattacatggtttacttgatgtctga

SEQ ID NO: 11403 - DNA, 336 bp, Oryza sativa
  Clone ID: PAT_MRT4530_17631C.1
atgaccatggtggcggcggcatgcatgcacaggagtggcatatccgccgctgacgggcttgtgaccaatggatcctccctcacgtgcggtggagatgaggcgaaaggcagcacggcgaccacaaccacggtggcaacatgcggactcaggagcagcggatccgccaccggtaggctccagaatggtggatccaccgccagcaacaggggaagcgaaagagccgaagagcgcactttgcggttgcactgcccgacggcggcggcggaggcaggagcgcggcgagacggcagcggcggcggcgggggcgaaggaggcgaggcggtggcggcatcatga

SEQ ID NO: 11404 - DNA, 1032 bp, Oryza sativa
  Clone ID: PAT_MRT4530_17632C.1
actttggcttactctacgcggcggggcgctctataacttcccccccccgcgtccgggctttgacacaagtcatcttactgatagcaacaacactagctggaacacttgggtacacgagttcagggatctagccagagctaattaagcggagagttattagcttttaatttgcttgagaggatggacaactaccaggggcagcacggctacggcgccgaccgcgtcgacgtgtacggcaacccggtcggcgccggccagtacggcggcggcgccaccgcgcccggcggaggccacggagcgatggggatgggaggtcatgccggcgccggcgccggcggccagttccagccggcgagggaggaccacaagaccggcggcatcctccaccgctccggcagctcaagctccagctcgtcgtctgaggacgacgggatgggagggaggaggaagaagggaatcaaggagaagatcaaggagaagctgcccggcggcaacaagggcaacaaccaccagcagcagcagatgatggggaacactggcggcgcgtacgggcagcagggccacgccgggatgaccggcgccggcaccggcgtgcacggtgcggagtacggcaacgccggcgagaagaagggattcatggacaagatcaaggagaagctgcccggccagcactaaattaataagcttatataattgacagccggggcaacacgtcgtcatgtgtgtagtagtatctatcgttttaatctgcggaataaatgacgtgcactgcagtgtatagcgtcctcgaagagaatagtactactgtttgggcgttcgcacgtgttgggttgtacctatagcttgtgatgccattgcaagctttgtatggtgtgtgtgtacacaggtttttagtgaagtgtgtgactttgttttggaattttcatgtgaatttcgtaatattctacggtacgccatgcttcgagtcatcactttttgattggaactcccaatgtgtaagtgtttcttgattataagattaatttggagcct

SEQ ID NO: 11405 - DNA, 857 bp, Oryza sativa
  Clone ID: PAT_MRT4530_17633C.1
aagacactagatttttcactgatagaatagcaacacttgggtgagagatcagacgcgtgtttgagaagatggagaactaccaggggcagcacggctacggcgccgaccgcgtcgacgtgtacggcaacccggtcgccggccagtacggcggcggcgccaccgctcccggcggaggccatggcgtgatgggaatgggagggcatcacgccggcgccggcgggcagttccagccggtgaaggaggagcacaagaccggcggcatcctccaccgctccggcagctcaagctccagctcgtcgtctgaggacgacgggatgggagggaggaggaagaagggaatcaaggagaagatcaaggagaagctccccggcggcaacaagggcaacaaccagcagcagcagcagatgatggggaacaccggcggcgcgtacgggcagcaggggcacgccgggatgaccggcgccggcaccggcaccggcgtgcacggtgcggagtacggcaacaccggcgagaagaagggcttcatggacaagatcaaggaaaagcttcccggccagcactaaataagctcgaccgggtcgtcaccaaatatgtcgtgatgtacgtgcagttttatatgttgttgaataaactagcgtgaaatgcgagtgatggtgtcttctgccttgggacggatgacacattgtctgttgtgttctcgcgtccgtgtcggttttacccttgaaatgtaatatggtgtgtgtacacactaaggttttattgaagtgtgactttgtgcttgtgttatttggccgtacgtctgtggtgcttgaaagtagtttttcttcccattgaaatttctaagagtacttgactct

SEQ ID NO: 11406 - DNA, 168 bp, Oryza sativa
  Clone ID: PAT_MRT4530_17634C.1
tcgccgctgccgctgcgtccacccttctggctattaaccacccatgatggatatcttttccttgtagaatttgcacctcacttgtcatatttgttaaagtaggtttacagttaaatttgtcatttttgttacgaattatagaaatcgaatttaaatttaaaaatatta

SEQ ID NO: 11407 - DNA, 313 bp, Oryza sativa
  Clone ID: PAT_MRT4530_17635C.1
cttttaggccgtgctggtcgttttctggaggcaattcagattatagagaggatgccatttatggctgatgattctgtgtggggtgcacttcttggggcttgcaagatccatggcaatatagagctttctgcccagatcagggagaaactaatagttcttggtggtcagcaacctggacggtatgtgactgttaggaacatgtatttagaagaagggaactggtatgctgccactagaatgggagaggtgatgcaggacgctggtattaagaaaaaagtgtgtgtcaacagtgttcaacttaattgagttaatt

SEQ ID NO: 11408 - DNA, 370 bp, Oryza sativa
  unsure (1)..(370): unsure at all n locations
  Clone ID: PAT_MRT4530_17636C.1
ctgcgtcattattccttttgtccgaacccttgaacattgagggccacccccctgtgtatatttagaatagagatatcataaaagtgtttatacnatgataaactgctgtgaccaagaaaaaaaaatttccaacacgcacatccttcaatgaactaacggacgaagggattcctggagcctcttaaaagggaggttactaacataatttacgttgctcttactgcttgatatacagggctgaaagccttggaaaattatgctttaactattcttccaaatgtcccaagagaggcgaataaacaattgcgtgaaatcttggtgcggcaaaaactaactgaggttgctaagaatctgatgaaactccaaagat

SEQ ID NO: 11409 - DNA, 345 bp, Oryza sativa
  Clone ID: PAT_MRT4530_17637C.1
gaagcagcaaaccaaagctttattgggggttggttccggcccacaggctaacaccggcccttacaaccaatgcacacgtccggctagcgggaacaagagcacttccaggaagactgtggagagagtccccatagagttcaccctgggaccgtgttacggcagacagactgcatgcactatcgatcatgcgttgagctgtgtgcatagcccgtactggacctcatatcttatccacgatgcatgatggaactcaaaaaaccaggtgttaaaaccaactaagctgccgcacggccagatccatcaatgcactgatcaactgatcactcagctgatccttcaaacaag

SEQ ID NO: 11410 - DNA, 527 bp, Oryza sativa
  Clone ID: PAT_MRT4530_17638C.1
atgattatgatcgagcatgggctagaggtggcctcatgtggagtggcagacgacgggctcaagcggagccgcaacggactgggcattaccgggctcagcaacaacaatggcgacagcgactacggtgccataatgggtggatccaccgccatcggccctacgataggcagatctggtggatatgtgccgccaccgtcattggggtacggaggggcagtgatggaggcacaaggaggggtgatggtggtgatgagctacggggactcggcgacggtgaccacgatcggtggcagactgtggcaacaacgtcaccggcggatggaagcttagctaaggcaaacaacataagcacccgcccacgaaaatttgattttcgcgtgcagatgagccacccacatgaaaaactaacgattttgcatacacctccgggtagacggacggctcaaccaccacatggtcaaaaagccatttcggtcaaaatcgctgtcaacaccatttatccagggccatggagaaagaggctcgac

SEQ ID NO: 11411 - DNA, 563 bp, Oryza sativa
  Clone ID: PAT_MRT4530_17639C.1
ggacgtgtcatcacaagcatcaaaccaatggcaactcaccagcagaagatgcagatgccgccgtcgtccaaggacgacgagccggcggcggcaacacgcccgccaccgccgaagcgggaggagcgcgccgagaaggcgccggagatggagaagaaggtggtcgtcaccgtcgtgaacggcgaggaggaggacgacgacagtgggtccacggacaacgggcgccgccgctgcgtctgctccgccgccggccagccggccgggcacttccggtgtgtgtgcgcggagacggacggtgccgacgagcccgacgagtgaattaccgagaaggtgttttcacgtgtgcctttgctacgagttttgttttgattgatgtatggagatgagggtgcacgaacttatgattgttttaattttggttgtcttaattgtcgtagtattttgttgcaagctagcaataatcataaatgggcaaaagaagagtatctcttttttttttacctcatgttccaatgttgtgtgttgttgtttcaaataaagattacaaaaatgttgtgtgcttagct

SEQ ID NO: 11412 - DNA, 880 bp, Oryza sativa
  Clone ID: PAT_MRT4530_1763C.1
tcgtcctgctcctcgcgctgccgaacgacccgtccaccggcgtcgcgcacgccgccgtgttcttcttcatggggttcgccatctcctggaacgcgtcatccacaaacaacccaatcttcgcggagattgtaccggagaaggcgagaacaacggtctacgctctcgacaaatgctttgaagcggtgttcgcttcattcgcgccaccgatcgtcggtgttctagcagagcaagtgttcggctacaagccggtctcctctgacgcaagcgtcgaaacggacagagaaaatgcggctgcattggccaaggcagtgtacacggagatcgccgtgcccatggccatctgttgcctgacatacaccttcctgtactgcacgtatcctcgggacagagatcgtgctcgaaggaacattctgatggcatcggatgaccagctctgccaagaagcaggtgagagtgactcaagtgagatttgtacccaggaggatgaagaatttgctgttggttccataaaccagaggttaatacatgcaagagagtagcatcagaagaggggcagcctgttttacaaaggtctcgcaatcttccagagtctgcactctgttgctttccattttcagattctcaactattggagagctctgcctgagcagaatcgcgctcatcaactagtattggaagatatatatagtacccgagagatgtaatttatacaacatcctgtgaataagtgctgcaattgattgttttcaggagctaccaaaaaaaggaggaaaacagtgtaatggcttattggcactcagaaaaaaaaaaaaattaaacaaaaaagagatccactagctctttaactaccagatgttctgacgaaaaaaaaaaaaaaaaa

SEQ ID NO: 11413 - DNA, 201 bp, Oryza sativa
  Clone ID: PAT_MRT4530_17640C.1
atggccctacccccgtaccccgcggatcgcaggagcggccagggggcctcggggtgccacgtcgtgcccctcgggccctcgcccgttttgccccgaggcctcgggcgccccaactgccccctgccgcattcaatgcggggtgtcccccgtgtcaggcaagggacggcgctgaaccccactcaaggacaatccgtggcttag

SEQ ID NO: 11414 - DNA, 1593 bp, Oryza sativa
  Clone ID: PAT_MRT4530_17641C.1
atggctgaaattttcgtcgaaatcgaaattgaaatccatgcttggaggtgcacactgcagatgggtgctcatctagtggaaacaaactgttgccgagaaagggtctggagatatgcaatgcacgggagctgcagtatagacatccaacgtctcgccgccgatctcgagacaaagctatgcaatgtggatttggacggcggccggcgatggcgccgctcgccggagtgcctcatttccaaggtgaagccgcaggtccgccgcgtcgacgactcgcagtacaccccgcaggtggtgctcgtcggcgcctaccaccacaaaccgctggacagcacggaccagctggcgaagtggacggcactccgccgtgtcctccccgacgacggcgagcagcgggcgtccacgctgaggcggtgcctggaggcaatcgccggcgttgaggacgaagcgaggagctactacgaagacggcgccaagacatggagggagaatcagatgttcgtgcagatgctgttgctcgacgcgtggttcgtcctcgacatcttcaacgtcggcggcgaggcggctgcggcggtgggtagccgcggcgggagcgcggtggactacatcttcgccgtgcgcgacgtgttctacctgctcgagaaccagatacccttcttcatcctcgagaaggtctacgagctggtgcgtgtcggaaattccggccaggatcaagatcaacgcacgcaaacgtgtacttctcctccgcctcctcagcctccgggagctacagccatcgccggcggcggcccgtcgtcctcctccaccgttgttgtggatggattcttgcgccatctccggtcgctgctccaggaccagggctactcgaatgtggaggtggacatcaccagcacacgcccctgtcacctcgtccacttactccacatgcacttcacacccatggcgatgtcgccggccgacgacaccgacgacgctgccgctgtccccaacaggcgcgcgcgcgccaccgtttaccggtggcgcggggcgacgcagtaccacgccgccggcgtgaggttcaagaaacgggccctcggcgccgccgccggcgacgcgcggtgcgtcctcgacgtggagctccggcggctgacgacgctgcacgtcccgacgctgacggtggacaacaacacgtggcgggtcctgcgcaacctgatggcgctggagcagaacaacccacacctgggcagccacgtcacggcctactgcctcttcgtgtcgcagctagccggcacggcgagcgacgtcgcgctcctggcgaggaaaggcgtggtcgtgcacttcatggccaccgacgaggacgtcgccgacgggttcgccggcctgtgcaggggcgtggcgctcgacgtcgacgacgcgcgccggaactacctgcagccgacgtgggagaggatggagcggtggtacagcagccggccggtcaactggatggcgctgctgcggcggcggcatttgagcaacccgctggtggcgatcgcgctgctcgccgccattactggcctagtctgtgaagttgtgcaggccgtatatgcggtcaagacctacaggcctacaatctag

SEQ ID NO: 11415 - DNA, 486 bp, Oryza sativa
  Clone ID: PAT_MRT4530_17642C.1
agcaggcacgcgtgcatgagccggtatgctatacagcggtcgacctacgcgttcggtggtgcgtatccaaatcacatcaactttattaacccggatccaatctgcggaatcagccgtagttcataccacaatcagaagagacatccttagataaggcgcgttcagtgaacaccgaaggcgagcttattcagttcacctaagatccgaaaaatgagacgctgcacagggatatggcgggaacgcggatccactgctaccctgcgcctgaaaatatgtacactgcccgttgacaaagcggtaatcgcgattgctgtgctccacggaaacggcacatgacacactgtctatgctgactcctacatttcggattcagcccgaacggactgaagaaagtatcccgacggccctgatgacgtgggcctagctcaaccagaatgacaaaccctacatggtttgtactgctagctgacaacacagatagatgaa

SEQ ID NO: 11416 - DNA, 660 bp, Oryza sativa
  Clone ID: PAT_MRT4530_17643C.1
atggacgtggaccagctgatcctgttcgtctttgtgtgctgtttgtcctcgaggtttgctgatgcgtatgatccggtagatccgaatgggaacatcataatcaactgggattttcagagcatcgagaacgtctacacggtcatggtgagcgtccacaatcaccagctgtaccgccacatcgagcagcccgggtggcggctgagctggaggtgggctggcaacgagatcatctggggcatgacgggcgcggaggcgacggagcagggcgactgccaccggatccgtggcgccacccggccgcattgctgcgagaagcaaccggtcatcgtggacctgccccccggcacgccgtacaacaaccaggtctccagctgctgccggggcggcgtgctgtcgtcgctcacgcagaacaaccggacgtccaccgcggcgttccagatggtggtcggcggcttcaggcgcgccacgtaccacgacggcgacaggggccccgcgctgccgtcacgcttcggcgtcggagtgcccgggtactcctgcagcaacgccaccaaggtgaacgcgaccaggtcaccgatcggcaggaccggcacgtccagtctctgcgtaaggcttctcccctttctttcttatcgcggcgcgtgcgttgagcgggagttctga

SEQ ID NO: 11417 - DNA, 1237 bp, Oryza sativa
  Clone ID: PAT_MRT4530_17644C.1
aatggaataagtcatgtgccatgatccaattctctatttattaccctaactttttattatagtatggaaaggcattctttttctttgcatcgattgcgatctgcaacactatcggagtaaaaaaagggttctaaggaagaacgtaggctaaactttttgattttttattagtaacaagtaaatactttgtttggacgtaagaaacttgcaatattgggggggataaataccaactaatcaagagacgcgagacaatccacaaagcaattgatcatgatcaaatttgtaagcccccttggatattgagcatttacccataagagtaggattcttttcaatgaatagttgtaggtgcaacttcggaaaatagaatctgataaagcttttcttacttagagccattgagccattatataccttattctattatggatcttctacggttttatttctttcattcttgctcgagccggatgatgaaaaattctcatgtccggttcctttgggggctggatcttaaagaattcacctatcccaataacaaagaaacctgacttaaacgatcctgtattaagagcaaaattagctaaagggatgggacataattattacggggaacccgcgtggcccaacgatcttttatatatttttccagtagtaattctaggtactattgcatgtaatgtaggtttagcggttctcgagccgtcaatgattggtgaaccggcggatccgtttgcaactcctctggaaatattacccgagtggtacttctttcccgtgtttcaaatactccgtacagtacctaataagttattgggcgttctcttaatggtttctgtgccgacgggcttattgacagtaccttttctagagaatgtcaataaattccaaaatccatttcgtcgcccagtagctacaaccgtttttttaatcggtactgcagtagctctttggttaggtattggagcaacattacccattgaaaaatccttaactttaggtcttttttagggatttttcagtttgattcattcaatcgtgaagtaccgtgcataggtatctaggaaatagttacttccaagtgaatcttccctagatacctataatctattttattatgatccatttcgcgaaaatatagattgtcccaaagatgcaaaattgttttattttttctttttattctaactcgaaaaagaagaagaggaaaaaattgcaatggatttaaaactag

SEQ ID NO: 11418 - DNA, 219 bp, Oryza sativa
  Clone ID: PAT_MRT4530_17645C.1
atggcgtgtggggccacatgtcactttgagtttggcccaaacagcgagttggtgagggcgctgcacacggaccagcccacctaccccgcgcggtcgtgcggcggcaagccgcagatactgccaatgctggtgagtgtgcgccgcacgcggccgggacgtggcaggactgccgagtgccgaccacacgcgtcgtgggcgtcgatgacacgtacagactag

SEQ ID NO: 11419 - DNA, 1149 bp, Oryza sativa
  Clone ID: PAT_MRT4530_17646C.1
gatccccgggctgcaggaattcggcacgaggcccaatcctccgtgtccgttggctcaactcgaccaaacaaccgcctttttttttagtcgccactctctccacttccccccctccattgccgccccgtttctctctctcgatcggcaaaaaagtggatgctccggctgctcgaccgccatggtgaggtctctcgacagctacccctccatcaaagatgtcacctacagctgcggatactgcgggtacgcgctgaacctgagctcgtcgacgcggaacacggcgaacatcgggtccaagtacgggaagcagatcaagaagggggtcgtctccttcttcgcggtggacgagagccggttcacgcaggccgacgaggtcacctgcgtgccctacttccactcgcggcgctcctgggggctcttccggcggaggtcgcggctgctgtgccggaagtgcggcggccgcatcggcagcgcctacgaggaggacgaacccgccgccgcggcgctgcccgcgtgcgacggcccggacgacctgcgcaccacgagctccgggagcagcggcagcgcgtcgagccagaagaactacgtgatcaagatcaacgcgctgcagccctcgtcggacgattctgatgctgttgcctttaccctatgacgattctgctgtagcctgtcatctcttccggcccggttgaatttgctgctgcagtcttggaattcgcattgggagtgcaaaaagggtgatattgcagtcaaggaagggatcgccatggcagtgagcttttggaagggtttgataccatcatgatcttgagtcacctttgctgtctgtagtagactagtagtgcttttcttttcttctgtgaattggtgggagtatacactggttgttaatttttggatctgttaatattggaaaatgacaaagtttgctgtatgtggcttggccctattgagtttgtaccatctcatgaggttcataggggttgcaattttgagtcatcttgctttactggtatgtcttaagtttctctacacggattcttcattagtcttctaagaaagcatgggttgttgcattgtgtcagttactgaatataaattctctgttaaactttaaattacaaaaaaaaaaaaaaaaaaaaaaaaaaa

SEQ ID NO: 11420 - DNA, 417 bp, Oryza sativa
  Clone ID: PAT_MRT4530_17647C.1
atgaacgccaccgacgccgccaacacctgcttcggcttcttcttcttcggcctcggcctgcgcccgcgcggccgctcctcctcccggcgaggcttcttggcgctgtgccgcacgaacgccaccgagtccctcacgtcatccttcgccgccgcgcacgacaccggcggcgactgcagcttcttgctcggcgacggcgccacgacggcgtcggccacgccgtacgacctgcagctcagcgaccgcacccacgccgtcgccattggcacgacggcgaacgcacacacgcccaggacacggacctcgccggcgacgtcgtcggcagcggcggcggttgagctcggcgtggacggattggtggtgatggccgcgagctctggcttagctctgggcgttattatgggggagggacctgtttag

SEQ ID NO: 11421 - DNA, 1229 bp, Oryza sativa
  Clone ID: PAT_MRT4530_17648C.1
tcgcatataaaaaaaaatccccacccgatttctctcttttttttttcctcctcttccgcgagctcttcccccctctcttctctctttttctcccctctccccggggaaacgcggcgaccgccgatcccgatcccccccaccgccgccgccgcccgatccgaccaaatccccactacgcgtcccaattccgggccaattcgaccccccgagcgaccgccatctactcacctcccgatcgattcggatccccaatctagcgggcgcggggcggggcggggaggcgggattgggctagggttttgtgggggattggtgtattggattaggtgatggcggagaagggatgcctcaagcgcctccagaaggagtaccactcgctctgcaaggagccgccgccgcagatcgtggctcgcccgctgcccaacgacatattggagtggcattttgtacttgaaggtagtgctggcacaccatttgaaggtggatattattacgggaaactcaaatttccacctgattacccttttaagcctccaagcatcagcatgacaactcctagcggaaggtttgcccctcacaaaagaatatgcctatcaatgagtgactttcatccggaatcttggaatcctatgtggtctgtggcaagcattctcacgggcctcctttcattcatgatggatgatgctctgacaactggaagcatcaggagtacagagggggaaaagagacgtttagcaaaggcttcccttgcctacaactgtgagagcaaaaattgccctcacttcaggaaaatgtttccagagtacgtcgagaaatacaaccaacagaaacagatggagcaaaccgtagcggaaccagaaactcaagagaaccctgccccagctccatctcctgcggtccaacaacaggctgcagtagtagccaataaggcgaaacctgcggcggaggccgcaggcgagcagaagcagaagaagcgagtgcccttctggatgatgctggttatgttttctgtttttggtgcggtgatggccttgcccctgatgcaactctgacaaataaaataaaaagaggctataaaagtgtgataccggggggtaatttttgtatagttttcccaaggtttgcgtaactcgattcttctgtggactctcttcactttggtgatggtaaaatctgtagaaccatatcctctctttacagaatctacagaacagctttgtttgagtcgt

SEQ ID NO: 11422 - DNA, 357 bp, Oryza sativa
  Clone ID: PAT_MRT4530_17649C.1
atggcgaaggcgtccagattggtggtgaatccctctagttttgcccagcaggttcgccttagatggtttgcctatggcgaaaccctgaggacgcagctgaaagggttcgccatcatgtccaaaggacccactggcaagtcttcacttcaggcgaagcaggaagggttcgccagaagatgtgaggccttcgccaagaagcctaaggatcagaacggcccgagaaggccgttcaccaatatgggtcgggcccaaaagcccatgaaaagaccccttaaccaaatggacattgtttgccctcgtaaatgtccctatcagaagggtatccatgtaaattcccctgcaaacattaaaccctag

SEQ ID NO: 11423 - DNA, 1083 bp, Oryza sativa
  Clone ID: PAT_MRT4530_1764C.1
atggcgcccccaatcgtcgggaacggccgcgcttttcccggccaccaaccatggccgccggccgccattcccgtcgccgttccgccctctcccgtgcttggctcgcttccctccgctataaaatgcaaccccctcgttccgttctatcgttttagccccctcccgagcctccccgtggtccctagccatctccccgccgtcctcctctctctcctgtgccgccggccgcctccagccgcctctccctcctcgccggagcgccgtccggtcgcgccgtcgcctcctacagcatcgcagccgcctcctctcccacggcctaccctccgtttcccgcggagacccccggagctacgttcccgccgtcgcccttctctttccttcgcgccggccgcctccagccgcctctccctcctcgcccgagcgccgcccggccgcgccgtcttctccctcggcctcgcagccgcctcctctccctcggtcagccctccgtttcgcggggaaaccaccggaggcgcgtccccgccggcaaccggtggcattgccgccacccactccctccagccggctgctgttcctcgtcggaacgccgatcgacgtcgccgtctacttcgtcgacgccgtggcatcgtctccttcctcgtccacccctcggtttcgcccggaagccgccgcacatcgccgcgaacctctccatccgcctcgccggagttgttcggccgcccgtccctcctcacccgtgcaccggtcggccgcacctccaccaccttcggcatcgcagccgcgacgtcgtcctcggcatcgcttccccttcggtcgaacaccgccggtccgctgccggctgccctcgccgtctcctcgccggccccggtcgtcgtcgtcgtcgtcctcccgtcgttcccggtcgtcgtggcccccgtcgtcgtcttcgtcctcggctccgcgtcgtcaagccttgtgccggccgcgtctcgccttcgtccaaggatcgccgccgaagccgtcccctcgccgttcgtctccgtcgttcccggccgcctccgccgcgcccgttcgtcattgtcgttccctcgcctcgttgcgtag

SEQ ID NO: 11424 - DNA, 949 bp, Oryza sativa
  Clone ID: PAT_MRT4530_17650C.1
gtacaatgttataggtatgtgtgcgagtcttgagggagcattttgtaaacttttggatagcttttctgtttgtggcaccttactaaaagatgtagaatcaatggactttcgtcatttgaccatgctgattaaatatacaattgttccattggtaaaaagttgtcctcctgatctttgggtggagtggatagatatgcttctaccaccagtgtttcactactgtgaagagacactatacagttcatggtgcagtcttctgtataaggatatagtgtcggttcctgataaattctgtgaatctttctcaaaagaaatggttgagaaagcgggaaagggacttctttctgagttgactcgtgaagcatcatatttgcttgctgcaatggcactgccagaacaaaatggatctattgtcagcacagcagatttggaatctacttcaagctcgcttgttgggtatcttttatgccatgataacattagatcttcaatactaaggttaatcaattatatctttggctattggaaggatggtgaagcaaggattatagctgcaccattttgtcatagtttgatccaacttgctattgctacgcacaatgatgaacttctatattttgttcaagatgatatacttccaaagattgtacaatgcttaaccctcgagccgaagtcagataacaatgctctttatcttctttgtgaagatgcataccattgtatgcagagccagggatcagcacaggaaggtgaacgcaatggaaacactgcagaaatatttgaagattggctgtcaaagcaaatgatagtggctcgttataaatacacatcttctgatgaacttcaagacatggtgtggatctgggagattgaagaagaatttatagcttatcttcatacctatgttgatatgttgcacaaagtggatgaaattggtgatacaatggag

SEQ ID NO: 11425 - DNA, 165 bp, Oryza sativa
  Clone ID: PAT_MRT4530_17651C.1
acgtaaggccacacagaagtgccagtcagtcgtcttgttaatttaagttggaggtacgtacccaccaagtaagccagcaccatgtccagaagccccgccaagtcttgtctggttctctttggccccagtcttttggtagtgccagtccccccgttaagtggtggt

SEQ ID NO: 11426 - DNA, 204 bp, Oryza sativa
  Clone ID: PAT_MRT4530_17652C.1
atggaggcgacgacgaacctcaagcggtacgtcgtccttgagaggagcgtggaaatgtacaagatctacatcttaagattgaaggctaaggaggccaggcagcaccgcctcttcctcaagcgctccaagtgttttttcggcgtcacatcagtggcctacctgggccacaccatctccggggaatgcgtctccatggacaaatag

SEQ ID NO: 11427 - DNA, 168 bp, Oryza sativa
  Clone ID: PAT_MRT4530_17653C.1
atgtcgacgaccgtggtggggctgacgagcgtgagcgaggatggggatgctaagccgaaggatgagagggaatggggcggcggtggcggtggcggtagcgtgggccgtggcggccagagatggggcaagagagggatgatgacagtgatgccggtgagggaaggctaa

SEQ ID NO: 11428 - DNA, 529 bp, Oryza sativa
  unsure (1)..(529): unsure at all n locations
  Clone ID: PAT_MRT4530_17654C.1
gattgtttgaagttggcttgcattgctgtatttgattcttgaggctgattgtgtgctatttcaaatcataaacaggcatacacaaacctagatggggagaaatcacatatagtcaatactgcatgggcaatgttggcactcatgaaagctggacaggtattacttctctcagtaagaatttgaaatggtcaaattgcaaagaacggcaatagtaatgtgcagtcaatgtatgtttagcccagaataattcaaccaattgtgtagcttaaagactcatattatattggagtataattcaatgcatttaagtatttaaccaacttttcttctgagttcaggtagagagagaccccgctcctctgcacaaagcagcaagacttatcatgagcatgcagctcagtgatggtgactttccacangaggtgactgctacatgacatttgtattatacaatttgatgttaactcttgactttccatcgtataagaaatttaagcataatggaacaantattaaagagatctgagtg

SEQ ID NO: 11429 - DNA, 1251 bp, Oryza sativa
  Clone ID: PAT_MRT4530_17655C.1
ctcttgattccctccctcatctcgaccagttggatgctcttgttatggtcttcgcttggagtgatgaatcatccttccttactctccagaactgggtttctagtgttgatgttcagaggtttgaaattctgttgtgcattggaaataaagcagatcttgtgcttggccatggtgcacacgtagaatataggaggcgtatgcaaaagattggcgagtcaagtactgatccacatcctgaatatttggattttgggataaacgaaagtgaaggttgtggattgttatcagaggaagaaccacaaatagagatcagagactccgcttcacattggtgcattgaacacaatattgagtatgtcaaagcttgtgcttccaatgctgactttgataaatgtctatcggtgaatggagatagtcaaggcttagagcgactccttggagccctttctgcacacatgtggcctggaatgattctgaaatctggaaacagaataaccgttccatccttggttgagaaagaagaatctacagatgatgaatccaattacgaatttgagtacgaagttctgtcccatggatctgatgaacaatgggaattcattggtgagtcaagtacgtcaagagacttggagggattgaatgaagatacagctactcatgataaaactaatcaggttgtggatgctgatgctaattcagtggcatccaatcctcttccaaatggcagaatgacagaaactgctgaggaaaaactggtacctcagagccacaaaagcgaggttagtaatgatatggataacacacaagcagatgcttcagagaaactgcaagctggtatcccagagggtaacaagctatttgaagatgagcattacggtctagatgatctggagcggctaatgtcagagattggcaacatgcgctccaatttaaggctcatgcctgacttccaaaggaaagagatggctgccaagcttgccatgaaaatggcaaccatgtttggtgataacgacgaagagggctctgaagatatctgattcaattcacggagcccaccttttgcatgtcttcaaacatatgttcccagtttatggcgtgctgatttgtacaggcagatgggccgcaggccgtgtaggcatttccatcggctatcataattcccagtgaaattttgtaccttagtagttccatatttaccattcttactgctgtaagttctatactgtattatttgaaattaaagttctctgg

SEQ ID NO: 11430 - DNA, 2912 bp, Oryza sativa
  Clone ID: PAT_MRT4530_17656C.1
gtcgaacacatcgcctgcgtcccccatcgccaccacctggcccgatccagcccggcgatctgcggcgggatggagggcgacgacttcttgccggagggcggcaagctccccgagctcaagctagatgcgaggcaagcgcagggcttcatctctttcttcaagaaactgccgcaggattcgagggctattcgtctcttcgatcggcgggattattacactgctcatggagagaatgccacattcattgcaaaaatatactatcacacaatgtctgccttacgccaattaggtagcaactctgatggactctcaagtgtcagtgtgagcaagactatgtttgagaccatcgcccgcaaccttttgttagagaggacagaccgtacattggaactctatgagggaagtgggtctagttggaggttaacaaaatctggaacacctggaaatattggcagttttgaagatattctgtttgcaaacaatgacatgcaagattctccggtaactgttgcattgtttcctgtgttccaggaaggacaactatatgtaggtcttagttttgttgatttgacaaacaggaagcttgggttgtctgagtttcccgaagatagtcgattcacaaatgtagagtcagcccttgttgcattaggttgcaaggagtgtcttctcccagcagattgtgagaaatctatagatttgaagcctcttcaggatgctatcactaactgcaatgttctattaactgaaagaaagaaggttgaatttaaatccagagatcttgtgcaggatcttggtagaataatcagaggtcctgttgagccagttcgtgatcttgtatctcagtttgactatgcattgggtgcccttggagctctagtttcatatgctgagttgctagcagatgatacaaactacggaaattacacaattgagaaatacagtttggaccgctacatgcgtcttgattctgctgctgtgcgagcattgaatattgccgaagctaaaactgatgtaaacaagaacttcagtttgtttggtttgatgaacagaacctgtacagtaggtatgggaaagagactgcttaacagatggctgaaacaacctctgctagatgtaaatgaaatcaataacagattagatatggttcaggctttcgtagaagatccagagcttcgtcagggacttaggtaccaactcaaaagaatgtcggacattgaccgtctgacacatgctctgcggaagagaacagccaatctgcagcctgttgtcaagctctaccagtcctgcattagagtctcatacatcaagaatgttcttcaacaatatgatggcagtttttctgcgctgataaggacaaagtttcttaattctttagatgagtggctgacagaggataggtttggtaggtttgcttctcttgttgagacagctattgaccttgatcaacttgagaatggtgagtataggatatctccccgatattcttctgatttggctgtgctgaaggatgagctttctgaagttgaaaatcacatcaacaatttgcacaagcatacagctgctgatctggatcttactattgataagcaattgaagctagaaaaagggcagcttggccatgtgttcagaatctcaaagaaagatgaacagaaggttaggaagaaactcactagcaattacataatcatagaaactcgtaaggatggtgtgaagttcacaagctccaagcttaaaaagttaggcgaccaataccaggcactgcttgtgataaatcttaaattcttgtcacaggtatttgaaaactttgctgcgatactatctgagttggatgttttacaaagttttgctgatttagcaacaagttccccaattccttatgtaagaccagaaatcacagcatcggttggtgtgaatgtcctgatggcacaagttggatcgttcgttccatgtgatcgggcgagcattagtgtgagagattgtatttttgctcgtgttggtgctggtgattgccagctacgtggtgtttcaacctttatgcaagaaatgcttgaaacagcatccatcttgaaaggtcttgcatgggctatctgtgagcatcttgtggaagtgactagagcacctacgttgtttgccacgcattttcatgaattaactgcattaggacacaaaagtggtgatgagcaccaacacgttccaaatttgggaattgcaaattaccatgtgggtgcacatatagacccatcaagtcggaagttaactatgctttataaggttgaacccggtgcatgtgaccaaagctttggtatccacgttgcagaattcgctaattttccagaagctgttgttgctcttgcaaaaagcaaagcagaagaattagaagatttttcaactgcgcccaatttttccgatgattcaaaagatgaggttggatcaaaacgcaagagggtatttagcccagacgatgtgactagaggagctgctcgcgctcgccttttgttggaggaattggcctcattgcctctagacgagatggatggcaccaaggccgcagaaaccgtcaccaaactgaaatccgacttcgagaaagatgcagctgataatccttggcttcagcagttcctttgaaggaaatcattcactgcttgaatggagattttgttttgcaagttagaatcactgaaagtaaggctgatgcaaggatcatctgatcctctttttgtccatatccatcagcagattaccatatatgtaaattatctaggcttagcatcagatctatgctatggaaaatgatctgccaactgccaagtgcttcagctagcacactgcgagtaaacatagccactgtatctgtacgtattatcttgaggtaaagcaattgatgagcttgtcttgcaaaaaaaaaaaaaaaa

SEQ ID NO: 11431 - DNA, 333 bp, Oryza sativa
  Clone ID: PAT_MRT4530_17657C.1
gaaaaaaaatttttttttttttttttttcccccaaagtttccagtgccaaatttgggaattttgggcctttttttaaatttccaacccctttttttttaaaaattttttaaaaaacccccccagggggggaaagggtttgggggcccccttttcccctgggggaaaccccttttttaaggggccctttaaaacccaacaaagtttggctttgacccaatttccgttcaagggggaatcccccaacctttgggagtttaatttttttgaccccgggggggccccctgggttccccccggaatttctggccgggtccttgtgggggtcccatttt

SEQ ID NO: 11432 - DNA, 3956 bp, Oryza sativa
  unsure (1)..(3956): unsure at all n locations
  Clone ID: PAT_MRT4530_17658C.1
atgggtgacaagatgatcacaagaaaattatcattcaatcaaaaggacatggatgtcacagagattgatttgcaggattacaaggatgtggatagcattgcgttctaccaggttccgacaaacgtgggatctggaatgtccatggaaagcgagagattggtaagagttcatgcatgtacagatcacaatggtgtcagttttttgcacaagttgcttcatcgtcttttggagcacaaggagatgtatagcaatgtggtgaacctcctatttcatggtattgaatggcaaactgagggggtgcaactcctgtgttcatttttaggccctggttcaagtgtgaagcaggtagaattccaaaagaatgtctttggcacaaaatcatcagctgctttagtcccactatcagaaatgatccaaaggaataacaccatcaaggcaattgttttttctgagtgtagaattggagcatctggagtcaaactgctagcttcagctttggcatacaacaggagcgtggaagaggtccagctattggatgattccataggtgctaagggagccgaagaattctcaaagatgattgaggtaaattgtgtgttgaagctgttggtcatccttgacaatagctccattgcagcagccccgattttctctgctgtgcttgcacgcagccgcagggtggaggtgcatgtatggggacactgtcgtgatactagaggtggcatgaacagttgtaaaattgctgaatttcaggctggaactggaagcttgaggatttacaacaatattaattccacaggtctacaaaggattgcttgtgctatggcatggaacaccacagtgacaacattggacatgtcaggtgtaccattgaagtccaagtggaccaaagagctcagaggagtccttgagcggaataggatgctgaaaactgtcaagctcaccaagtgttgcctcagggacaaagctgttgtgtatatagctgcaggcctcttcaagaacagctatttggagagcttgagtttggatggaaatcgctttggtggagttggtttggagcatttactgtgcccactgagtacattttcaccacttcagagacaagccaatctcactttgaaggttttgagttttggtggacggcaaacaaatataggaagatatggcataacagcaatcttgcagatgttggagacgaaccagagcctacttcagttggccatatgcgatgatgtcaatccttggattgaagaaattgacctgcatgaaacgcctctgcatgttgctggtaagaccagagaaatttatgagaaacttggtcagaatgggagttcggttgtaccaaatgatttgctcgatttgccactaagtgcacctacttgttgccaagtttttctctgtggtcaagaattatcaggtaaaagcactttgtgtagctccataaagcactgcatgaattcaatgaaattgcctcgcatggatgaaataagaacttcaaagactccaattgagcaaatgtcacacaccaatgagtatgggatgaatataattttcgatggcaacacaaaattgactatgtgtaatattggtggacctgaggaaagtattcccttgcatgatttcatgtttgttgtgcatggtggtccaaggattttcatgattgtatctagtttgattggaaagcctgctgataaatatccaaaaagcatagatgtgattgaacaggagctgatatactggttgaagtttgttgcttcaaattctaggagaagagtgtcgcactcatttataccctgtgttacgatagttctcacacattatgataaggtatctcatctagcagaagggctacaattgatcgttgcagctgtacaaagactcagagaagacttctgttcatatgctgaaatttaccccaccgtttttgtggtagactcaagatcacaggtttcagtaagtaagctcacccatcacttgcgaaatacaacaaagacagttctccaacaagctcctcaagtttatgaagtatgcaatgatttgattaggtatttgcataattggagattgaagaatgataaatcagtggtcaaatggtctgagttctgcgagatatgtcagctcagcattccagtgctaaggttgagatcaaggcatgataatgccgagaaattagacacaagaagacatgctgttgcaaagtcactgcatgatttaggtgaaataatattttttgaggagcttggagtgctgataatgaactgcgaatggttctgtcaagatatactcagccaactaggtgcattgaaatccatcaagatagaaaatagtggttttgtccgcaaacaagatctggagaagattctgcaagagaagctgtgtaatcaaattcaaagatcaaactggagagctggtgcatccttgcaatctggtgatatcattaatatgttgttgaaacttgaactgtgctatgaacaagaccctgggaacccaaacacattacttctagtaccagctatgcttgaggaaagcaaagaagggattcaacggtggcagttaaccatgccagagtgcagatatgctggaaggcatatggaatgtgaagatacacacatgtttctgacaaatgacttctttccaaggctacaggtacgtctgcacaataaaatcatgtgccctggaaatcagcaaggagcagtctacaacttggagaaaaaccttatttatacggtgatcgatggtgtccatgtaagggttgagctgggattagatcatgctagagatcttctatcagacgatgacttccatgatgttttgcatcgtaggtactatgatctacagcatcttgcaactgaacttgcagtgaccccagacaatctgcaacaatccgaaactattgctgaatcggatgcagttgatccctccatactaggcattgccaaaggtgttgagatggttctccaaagactgaagagaatagaacaaggaatccaggacttgaaggaggaaattgcaaggctgaggtactacgagtatcaccttgtgactgaactccacaggaaaatggactatgtaatgaactacagcattcagctggaggatagaaaggttcctcagctgttctatcttgtaagcttggacagccgttccaagaagcttgtcacaagaatactgcctggcatgcggtccctacgggtacacatgctgtgcgagttccgacaagaaatgcatgtgttggaggatcaagtcgggtgcgatctgattcaggtagataaccgggcagtgcaatccttgctgccttacatgagcaagttcatgaaactgttgacttttgctctgaagatcggggcgcatttcattgtcgggatgggggagatgatacctgacctgagcagggaggtagtgcacttgctggactcgtcagtcatgtatggtgcaaccacatcagccttatcattgggggcattaggcgcagcggcaatgtatggaaaagcgaggaataacggcagccagagtggcacaaatgacatggaggatgatatgaaaacggccagacagtggcttgttgatttcttgaaaggtcaagggattttgacagggatggacatagcacagagatttggtctgtggcgcgttaggtacagagatgacggccacattgcatggatctgcaggaagcacattgttgcgagagcagacgagatctttgaactgccactctgaaccatccagggtgcagttggtttcacggccacaaggtgcctatctgatgtccctgtccttctgtactgatgatgacaactgacgagcttgcaattgtaagggatggtgccattnctgattacaaggatcgcatatggtaggtaccnatcatatgcnctgttccagtttctatcactctgcttctgtcaatggngtgtttttacattttncctctttactcgttgttgtggattcac

SEQ ID NO: 11433 - DNA, 574 bp, Oryza sativa
  Clone ID: PAT_MRT4530_17659C.1
aacctctgcagaaggggtacactttacccacacgacgttactaaccccgaatcacccagccgcatttcgaaagccgactcagggtcatcttatgccaactggaggggtcccacggaccaacaccaggttaggtcccagaccatactgtgccaggaagcccaggggtcctccccgacaccaccccagcgaatccacttgtcccttggcagcaagatttccctggcctagctaattactcagccaggggcgtcccatatcacccatgtggtcgtacttgacatatgctcggatgtaattcccaaggaatcggtccttagagcgagaacggacagaccgtacctccaattttagagtttgaggggagtctcgatattcgtacgcgaggtgcgaataccgagatttcacctgacgggtgtcaagggtgttagtgacttgccttgctcgagatcttgagcttcttcctcgaaatccgcgcactgcgggtcttcgggctccgagactacacgcagaacgagacgactcaacaaagcgataaaaagaagccctattaaagaccattaagcatgccattgga

SEQ ID NO: 11434 - DNA, 1358 bp, Oryza sativa
  Clone ID: PAT_MRT4530_1765C.1
gcagccggggacctgcccgccgagcccctctcctcagtgaactccgcctcagccgtcgccacccgccgtcccgttcctccctgcgacctctgcttggacagcttgcagctcggatcctcggagccgctgcctcgatttcctcctactcggtccactcgctgttcctcctgcaaccttccccttggcactctgctctatggtgcttccggcttcatcgccgcctcaccaaccactgctttctggtcccctcacctccggctggaagatttggccagtgtaaagcatttgcaaattttggcgactttctttgatggggattatatggatctagggattactttgatgctgtccagttaaccacatttggttgattcaagcgggtctcctcacttccggttggaagatttggccagtgctagagcatttgcaaattttatggattttcttcgatggggagtatatggatctgaggatttctttggtactatccatttagcctcatattgttgattcatacaggtcccctcatctactcctgctggaggctgctgctgcggttttcttgatggattttatcaaactctctcggatacttcccctctttcttatttcttacaatcatttatatgccgatcagtttttgtccaaaacatatgtttattctcatgcatcgatctgcgatgccaaatctatgcttcgatcttttaatttgctacagctttccctgcttctctaatcagtagcattacagatttgtctctgtgagactgtgactgcttattgtactttcagattgctttacagtgcatgcacaagttgttgcctattttaataccaaccaaccaatatatagctgttcccaacaaacatgaacatttcagctttcagtatatgatcttcaggaatgaattgaccgttatctggcttgcaaccgttccatggtgcaaatcaatcagtttggatatggaacacgcattgtacgggttgctgcttatagataaaaatgtcacacatcattatgtgaaactggaccatctccagatgcattagtgatcaacctacaagttgctttcatcttttagggacggaggttcaacgaaggtacctgcattgctctaacttcttaggtggcaaagaaagaggggttgtctgtgattctgcccagccactttggtttggaagaaagaaattggtgactgaatcaatgaagctgctagtggcaacgttgcctgtatagaaggtttggtctatcttacttttggctatcaaattgtaccatgtgctcatatacctatgattgatttaagctgacatcaataaaagttacaccaataaaaaaaaaaaaaaagggcggccgc

SEQ ID NO: 11435 - DNA, 573 bp, Oryza sativa
  Clone ID: PAT_MRT4530_17660C.1
aacctctgcagagggggtacactttacccacacgacgttactaaccctgaatcacccagccgcatttcgaaagccgactcagggttatcttatgccaacgggaggggtcccacggaccaacaccaggttaggtcccagaccatactgtgccaggaagcccaggggtcctccccgacaccaccccggcgaatccacttgtcccttggcatcaagatttccctggcctagctaattactcagccaggggcgtcccatatcacccatgtggtcgtacttgacatatgcttggatgtaattcccaaggaatcggtccttagagcgagaacgggcagaccgtacctccagtacaaagtttgagggggagtctcgatattcgtacgcgaggtacggataccgaggcttcacctgagggtgacaagggtcaaaggttacttgccttgctcgagatcttgagcttcttcctcgaaatccgcgcactgcggttcttcgggctccgagactacacgtgaaacgagacgactcaacaaagcaataaaagaagccctattaatgaccactagttgtgccactaga

SEQ ID NO: 11436 - DNA, 1617 bp, Oryza sativa
  Clone ID: PAT_MRT4530_17661C.1
atggcccatgctgttgactctggacagacaggtgggccatggggaggagcggctttgcttaccgatccgatccgattcgccggcgtcggcggcggcggcggcgagatggatttgccggcgagccgcgggcggtggcggaagcggagcgcccggtcgcacgcgcccctcctcgtggccgtcctcgtgctcctcatcccggcctccctcctcctctcctcggcctactcctcgctgctccgctccatcctccccttctccggcttcggaggcggtggcggaggagggggcagaagatgtgggcggtcgccggagctggaaggggagaggtttctttggtacgcgccgcacagcgggttcagcaaccaggtgggcgagctccggaatgccgccgtcgccgccgcgctgctcaaccgcaccctcgtcgtgcccccggtgctcgaccaccacgccgtcgtcctcgggagctgccccaagttcagggtcgccgacgcttccgacctccgcgccgccgtctgggaccactccatgcagctcctccgggagcggaggtatgtatccatgggtgacataattgatctatcgccgataaaggctacggttagaacgattgatttcagggtgtttgtctcattgtggtgcggcgtagacatgcgcaagacttgcttctctggcttgtgctgtgctgtctctggtggtggatcgctgccaggtgattacgatagatgccgatcgatgctgtccggtttagggggcagcgaaaatggctgtgtgtatcctgtccaggacgattgccgaacaacagtctggacatatcaagagaataatgatggggcgcttgattcatttcaaccagatgaagacttgaaaaagaggaaaaagatatcatacgttaggaggcgcaaagatatgtacaaggctttggggcctggttctgaagctgaggatgcttccttgttggcatttgggacacttttctcaggaccatacaagggatcagagtcatattttgatatccacgaatcgccaaaggatcgtcggctacagactatacttgagaaggttgagttcctcccttttgcccctgagatcattgctacagggaaggagttcgctaggaaaaagatcaaggagccatttctttgcgcacagctaaggctgttagatgggcaattcaaaaatcactggaaagctacattttctgcactcaaggagaagttaaaggctgttgcgttggaaatgaagaaaacccagggtagtggtcctattcacatgttcatgatgactgatcttccaccagcaaactggtcaaagacctatcttgcagatattgcaaaagatgggagatataaattgcacaccctgaaggaaagtgatgaactggtggcacagaccgcagagcggcttatggctgctgaacatggtgtgagatctggatttattcccaaaaacatagcaaacacgaggaaggattgtgatccagttcaactaccagaaattttgttatatgttgaagaatctgtctgtagctgtgcatcactaggatttgtggggactgctggatcaaccatagcaggaagcatagaaacaatgaggaagaacaatgtctgccaattgtag

SEQ ID NO: 11437 - DNA, 297 bp, Oryza sativa
  Clone ID: PAT_MRT4530_17662C.1
tcccctcacgctgtccccgtcgcagcgccgggctccactccccctcgcgccgccgtcgcgtcaccgccgagcgccccctctgcctcccaatcacgctaccacctccgcctcccgccatccccattgccgaacgcctctgcctcgctctgccacttccgccgtcgcagagcactgccgcagcaccgccctccactgccgccgccatcgccgagcaccgccactgcgtccttcgccgccatcgccgacggctactgctccgccctctgttgctgctgccatcgaagaaacggcggtggt

SEQ ID NO: 11438 - DNA, 360 bp, Oryza sativa
  unsure (1)..(360): unsure at all n locations
  Clone ID: PAT_MRT4530_17663C.1
tccagatccaccagcaccctctcctactcccttccaacaggcagcggcggttgctccngcngcgtttctcnggnngcggggcncggcgctccaacagcagcgtgtggcggcgacggcgacagaacgtgtggcggcgacggaaggcgagcgcgcgcggtagcacggtccctccgnctctctccctcctnccttctctctncacggccgccagcctcccttctctctccaccgccgctagcctcccttcactccccaccgctgtntggggaaggangctgcggcgggggaaggaggtgnggcagttagcacgggtaagagggttgcggcgngttctcagcggtgaggttgcngatctaggct

SEQ ID NO: 11439 - DNA, 1176 bp, Oryza sativa
  Clone ID: PAT_MRT4530_17664C.1
atgggcggcgccatcgagcgcgacggcgcgctcctcggggcggcgttggtggagccggaggcggcggagctcatcccggggttgccggacgacgtggccatggagtgcctggcgcgcgtgccgagccggtcgcaccgggcggtgcgccgcgtgtgccgcgggtggcgccgcgcggccgcgtcggaggcgttccgccgccgccggagggcggccggggcggccgaggacgtcgtgttcctcgtccaggccacgccagcgcgcggcggtgacgacgggaaggggccgtcggcggcgacggagtgcgcgctggccgcggcgaacctcaccacgggcgagtggcggcgcgtggagggcgcgggggagggggaggaggaggcgtggggcgggggcgtgccgttcttcgcgcggtgcgcggcggccggggacggacggcacgtcgccgtcgtcggcgggtgggagccggccgcgctatgcctgacacgcgacgtccgcgtgctggacgtccccgccggtgtgtggcggcgcggcgcggcgatgccggactcccggggcttcttcggctgcaccgggagcggcggcgtcgtctacgtcgccggcggccacgacgagtccaagaacgcgctccgctccgcctacgcgtacgacgtcgcctccgacgcatggcgcgcgctcccggacatgtccgaggagcgcgacgagccgcagctcgtcgcaaacccgggccgcgtgctcgccgccagcggctacccgaccgacgcccagggcgcgttcaagaagaccgccgagcgctacaccaccaccacaaccggcgacgcaaccgcctggtccagcgagggagacatggcgccgaacaccgcggagacgtgccttgccgcggtcggcggcaaggtgtgggccgtcggcgccgggaagggcggcgtgcgggagtgggacgggggcgcgtggagggacgtggcggacgggccgccaggcatgaaggcgtgcgtgaaggcggtcggcgcgggcgacggcgacggcgccgccatgttcgtgttcgtgttcggcaaggtggaggacggcaagcagtacgcggcgtgggtgatggaggacgccggcggcgcggcgcggtggcgcggcgtggccgtgccgccggggtttggcgggttcgtttactcgggcgctgctgtgcgggtttag

SEQ ID NO: 11440 - DNA, 372 bp, Oryza sativa
  Clone ID: PAT_MRT4530_17665C.1
gttggtatagtatactcttacaatgaccgggtggttcagatcgcaaggaaaatgtcgagtttcggtcttgtttcgtcacaaacgcagcatttgatcgctaaaatgttatccgatgaagagtttgtagacgagtttatccgcgagagcaaattgcggttagctgcaaggcacgctgagataaccaccggtttagatggtttagggattggttggttaaaggccaaagccggtttgttcttgtggatggatttaagaaatcttttgaagacagcaacgtttgattcggaaaccgaactatggcgtgtgattgttcaccaagtgaagctcaacgtgtctccaggcggttcgttccattgccatgaaccgggatgg

SEQ ID NO: 11441 - DNA, 210 bp, Oryza sativa
  unsure (1)..(210): unsure at all n locations
  Clone ID: PAT_MRT4530_17666C.1
gttttattttcaaccaccgcgcactcacacacactctccgacgatatttnccttctctgttttttttttccttcgccatcaagccggattcgaggacggagggatcaatggaggaggagggggagggcctctncnagatcgnncggttnccggaggagctcctctccgccgngatctnacgngtctngncgtggnangtcttnnacgacg

SEQ ID NO: 11442 - DNA, 1008 bp, Oryza sativa
  Clone ID: PAT_MRT4530_17667C.1
atggcgaatgggggtgtctgcctctcgtgctctgcacttgtctgcgcgctggtgtttctcacggtggatggtgatttcgtggacattacttacgtagcgagcgctgtggccaaaggcgcagtctgtttggatgggagccccccggcctaccatctcgcccggggttttggctccggcgtgaatagttggctggttcatttcgagggaggaggatggtgcagcaatgtgacgacctgcctgcaacgcaaacgcactcggttaggatcatcgaagcagatggcaaagcagattgccttctctggaatactgagcaacacccctgattacaacccggatttctacaattggaacaaggtcaaggttcggtactgtgatgggtcatctttcaccggcgatgtggaaaaagtagatcctgcaacaaagcttcactacagaggtgctagggtgtggcaagcagttatggatgatctgcttgcgaaaggaatgaacagtgccaataatggatcagcgaagaatttaccttctgcttgcacctccagattgtccccaggcatgtgcttttttcctcagaatgaggtgaaacagattcagacacctttgttcattctcaacgcagcgtatgattcctggcaggtaaggaacatcttggtgccaggatttgcagaccctcatggtaaatggcatagctgtaagcatgatatagatcaatgtcctgcatcgcaacttcaaatcttgcaaggattcagagacgattttctgaaagcactgaaggaacaagggactccctccaccagaggattgtttataaactcatgcttcgtgcattgccaatctgagacgcaggagacatggtttgcatctggttcccccatgcttgaaaccaaaacaatagcggatgcagttggagattggttctacgaccgcaatccgtttcagaagattgattgcccttacccttgcgattcaacctgccacaaccgaatctacgacgacccctcagaagcatag

SEQ ID NO: 11443 - DNA, 1064 bp, Oryza sativa
  Clone ID: PAT_MRT4530_17668C.1
ttccggctcgtatgttgtgtggaattgatcatcccatgctcaacctcccctcctctctcgcacggaagctagcgcccatctccgcacaccctctccaccgcactcccatcctctctctctctctctcttgcactcacccagaaaccctatgcccgcgcccccttctccaccatgctgccaccaccatcgaatccctctccacactcgccgccgccggcaacgccaactccggcggccagccgtacccgaacgccccgccgccgtagccgtcgagtccctcgtcgccgtcgccgccgccaccgccccggtggcgccgccaccgccgatctcggcctcgagcgaccggatcacgcggctcagctgatcggcgtcgccgtcgccgtcggtcgttgccgccggcgacggcgagtagtcgtcccccatctcctcctcgccatcaagaagctccatgaggagcaccactccgtcgtcgtcggacgtcgccggcgccgccacggccatctcctggtcgacgaggccgccggcgccggtgccgccatggtagtagtactggtactcgccggcgacaccgccgccgccctggctccctccacttttctcgcctgatgcccaaccctcgcggcactttcccccgccgccgccgccgcccgagacgccaaaggccgaactctgagccgccgccgccaagcgccgaacgcagcgccaccgtcgctacatgccggaccttcagacgccgaatgcagatctgcgtctagatgtattcaccgcctccaccaccggacccaacgccaacaggcacaatgccgccatccccgtatccatgtttttcagaaaatgacgtatccccgtatcgacgtatcgcgtatccgtatccgtatcccccctcccccgccccagcaaatccactggccctctctccgtctcctctcccttctagcttcgtctctcgcttgtcctacctcccctctctctcgactgcgaatcggtcagcgacgggagtaggaggtgtcaacaagccctgggagtggcggagcgacgatgggcctagcggggagcggtagata

SEQ ID NO: 11444 - DNA, 185 bp, Oryza sativa
  Clone ID: PAT_MRT4530_17669C.1
ggagacctttttaacttctagattagagtagtgaagaagagtgggaacttgttgatttgaaggttgttttccgcttggttttgaaattttgatagaagtgatatgtacagtgctctttttttttctgtataaagaattctgattgggaattttgacctggactgctgcttaaaaaaaaaaaaaaa

SEQ ID NO: 11445 - DNA, 1701 bp, Oryza sativa
  Clone ID: PAT_MRT4530_1766C.1
atggaggtggatgaagtcgggggtcgatggacattctccagggcaaatgaaggctacacgagctgcggcccggtagtcgagatgtcatggcacagggccggtgtcctgctgctaggggctcagtcctgcctgcctgtcccgggggttccggccgtaggtgggattgggtcggtactcttgtctatggctaggatgggttggaaactatgtcacgtcttccgtctgtataccgtggtgaagaggagttccaggaggatgaaggcttcggtgtctagctcgtgcctgccgtcaagcgcctgtggtcgtcgccctagtcttccgctgtttctcgtttgtctctgtctgagcggcgaagccgtgagacatcgtgtcggccaggtgatgatcagtggcccgacgacggcgagcaatgtccccgttcccctttgcgagaagggggcggccaaacgcaacgctgccatcaatgttgttcctctgactgatatcatcgagccgctcgcggaccatcaggtggcggcgtcactgaaagagaaagtcgccaaggaggtgtccgatgctgctgctgttgctgccacaacaagtggtggcgacgttccaacaaaggggaggaaattctcctctgtaatcggacatcgtcgaaaggcacctaccccctcgccttctcgtagggcggcgcgggcgaaggcggcgcaagacgagtctggagggacttccggcgcgcctccttctgtaacctcgacggatgtcgtggtcgtgcccggaagccgcgaggcgacaccaagcggcccagccagcgatctcgcggctggtcgtggtccaccggctgccgtcctcacctgggaggagctccaggttgaaatggggcgcctcctcgaggctagtgctcgcggcattggtcacgagattatggaggcgaggtcggcggcggcatcggcgaacgagcgcgccgaccggctggcgcacgacttggcggaggctcgtgaggacctcaagaagataagggagttggtggctggcaatgagcgacaacggcaggggcttgagcaccgcatgtcggagctcgggaacaacttgtcggaaatccgtggctcgttgcgggtcacctatactggtctgcaccaactcgctggggaatgcggtatcaagtctactatcccggcgaatcccgatgagttcttgctgacatcttctcttgcggagctggcggcggtgatggaggagattccctccaagcatgcggccagcatcggagaggagacatccaacgggatctacaccggggcgtgccacgtccttgcgtgtttgaggctgacgcaccctgaactcgatctgcgcgagatcttggatcagggggcggctagcgacacgcgtaaggaggtgatggaagaagtcggtgacctgggggaatatgttctccccctttttaaagaagatgttgatgacgaggatgtccagcagcgtgggcagcctaagtcgccggcgatcattccggctcttgcgtttgagccacacgcgtcgccggacgatgtagatcagattttagccgcgaggacgaagatggcgacgacttccttagatctcgagagtgctcttgctggccaagatcgtcgtatccaatattggaagacgaaatttgaagtagcggaactcgagagaactatgctggaagtaaagaaagagcaagctgtggaaacgctctga

SEQ ID NO: 11446 - DNA, 705 bp, Oryza sativa
  Clone ID: PAT_MRT4530_17670C.1
cttgggtcccttacccggagaggggctaacactgtgatatatatccacggatttccataatttactctatgcacatcaacctatttccctaatttctacaacaattcatcgatttattcatatttattgctcccacaaggggctgcacgcttgctcatcaatggagccatctccatagtacaaatgctcgtcgtcgtacacgcaccagctcgccgccgccggcaacgccaactccggcggccagccgtacccgaacgccccgccgccgtagccgtcgaggtcgtcggaaaacatgtcctccagccgtctgatcccagctgctgctgcgccgtcgtcgtcgctcgccggcccggcggcggccatgctctcgtcgctgtccctcgtcgccgtcgccgccgccaccgccccggtggcgccgccaccgccgatctcggcctcgagcgaccggatcacgcggctcagctgatcggcgtcgccgtcgccgtcggtcgttgccgccggcgacggcgagtagtcgtcccccatctcctcctcgccatcaagaagctccatgaggagcaccactccgtcgtcgtcggacgtcgccggcgccgccacggccatctcctggtcgacgaggccgccggcgccggtgccgccatggtagtagtactggtactcgccggcgacaccgccgccgccctggctccgcatcatcttgtccat

SEQ ID NO: 11447 - DNA, 274 bp, Oryza sativa
  Clone ID: PAT_MRT4530_17671C.1
catacatcttttttttttttttttttttttccttttgtttaatttctagtttttttacccggctcgaactgaaaatgggggggttccaaaattcaaaaggtgggggtagataaagaatccatttcccagctgcataggggggattaattacccctaaaattcagaacagccaacctggttccgaggtggaacactggaaccaccgggattccgacggacttccttccacgcgttggcggccttgcggttggggggagccgcacatctgcatact

SEQ ID NO: 11448 - DNA, 161 bp, Oryza sativa
  Clone ID: PAT_MRT4530_17672C.1
gtcctcccgtggaaggaacaagggcagtgctatggtactggtcaatgccatgctcttggggcacatggaccaggtgcgacaatcgctattattaggcagggagaggtggttgcactgatgcaagcattgagctaaaaaacgaaagccccaatggacaagac

SEQ ID NO: 11449 - DNA, 246 bp, Oryza sativa
  Clone ID: PAT_MRT4530_17673C.1
ctcgctttctttttgcatagttttcttcatgctccatgtaaacaagcaagaaaagagaggaaaaggaggcagctcggtgcaattctcgaacgacccaaaaccttgaacaattcaatccttcttcagagagattcagagttgggttcagaatatatatacactagcacgagtgaatagtagaggagacagagatagatagagaggagagatgggcagcgaggtgaagccggcgaagttggcctccag

SEQ ID NO: 11450 - DNA, 206 bp, Oryza sativa
  unsure (1)..(206): unsure at all n locations
  Clone ID: PAT_MRT4530_17674C.1
agtcatcatctgtagatgcgggtaaagcgaagaaccggacagagcatctaatcacatatgggtcacaggttngggtttgtgggggtcgggnttcttggggtctggggngcggcgctgcggggcgtgcggagtcagcngtgcctgcgtgnngaagaaacgtcannaagaaggaggcggaggagngattgaggagcgaacggggcgag

SEQ ID NO: 11451 - DNA, 410 bp, Oryza sativa
  Clone ID: PAT_MRT4530_17675C.1
tttgttttaaaaatgtggacacaagagttggaacacaaattttgacaatttgactctttccaaaaactaattttacaaatgaatcgtggccaaaacttattttaaaaatgacactttttgtttagcgtcaaatcgtatgtcgctaaacttagacacctcagtgctacgtcaattggcgcagaatatcgtgtcaccgcggacgagagactgagtcggcgtgccaacgtgcattcagcgtcgttctatttggcgttgaggtgtctaatttcagcgccatacgatttgacgctgaacaaaagcgtcattttttaaataagtttgggcacgatttatttgtaaaattagttttcgaaaagggttaaattgtcaaaaatttgtggaagttggaaaggcggaggttaggacacagc

SEQ ID NO: 11452 - DNA, 189 bp, Oryza sativa
  Clone ID: PAT_MRT4530_17676C.1
atggcgggggagacgccgccattggcgctcactctgaccgagctgagcatgcggatcgaggagatgggcggtggtcggttcgacgggcggcgcagcctggtggtgctgaaggaggcactgggatgctgtcatcggagcggaaacctggaggaggagattcaaacaccaccattaaggcgtaatggatga

SEQ ID NO: 11453 - DNA, 421 bp, Oryza sativa
  Clone ID: PAT_MRT4530_17677C.1
ggatgtatctattccattaatctaaggggatattattcaaattagggcctactcaaaattggatacacattttcactcttgaatgggcatataaactcatgagattgtttgcaaacagacatttaaacccacatttcaaggaaagaactactgatggtaacaagactacattttgtgcaaggcaatagaaaaattatcttgcttgacctcacataaaaaacacacgtttgcttcaacacgaattcattttattcacgcgctgcatagggaataaacccgccatgactatcatcgctttttttttttgacaacttccgaaatccgtcttaaatattaaccgcctatcttcattttcctctgacgcaaaaatactattatatataacagttgcataagtactattgttaaagcacacatagcc

SEQ ID NO: 11454 - DNA, 210 bp, Oryza sativa
  Clone ID: PAT_MRT4530_17678C.1
atgaaaatcggcaacgctggccgctacggccacatgcaccgccgggctccagccatcgctgacgtcgagagatctgtgacactgacgtcgccgaggccccgcagcctggcggtggcagatcagtgttccctatggcctagcggcgatggatctgtgctcctcaccatcgccttcccgacccgccgccaccttcccgagcaccgtcgctga

SEQ ID NO: 11455 - DNA, 1909 bp, Oryza sativa
  Clone ID: PAT_MRT4530_17679C.1
acccccccacacatcttcagataggtaggtttcatgtttcagtctaaactaaagttcccaaggatggtcggatccttgtcagatcactctccacttgggctatgggagttattgattaattattttttttcttattttgttttttttttttttttttgtaaaagtgaagtactcgcctctggagagactatggctgtttattctgtcaaaagattttacaacaggagaaacagaaagaggtctcaaagtattatacatggctggccgtccagaagcaaataacgtgtgtataaatattacaacaacaaaggggctaatcctctgcagactgaagtcatcatcatcgcacatgattaaaaaaaatacaatgggacgcatcatctcttagcccgcgagatgggaaaccccctcagaaattgtactaatcgttccaaattcatcagcacacaccgttaattacttactacttgtatttatgtatttatgtatgtatatctcacaacggatacacgtcgaatctttattacttgtgtccttcaccggcagtcccctgatattcttcagcaagcagcagcagggaagcagtagcctcaggcgtcatccttgtctgcaaagatgtcaagaagggagagcgcctcggcgacgctgagctccagcctgaacttggggccgtcgtagtggtggaggatcggccggaaggcgtcctcctccagcgggtcatagatcttcctcgtcgcaaccttcacctgtgcagggaagcgcgactcgccggggcacttcttgtcctcccacgccgtcggatcgatgtttgttccgccaaagctcgcagcctcgaagatgccgtggagctggtgggtggagtagttgtagaggaagaggggcagccctggcctgatcgccctcactgaatccctgtatctcgatggaagcccgaagagctgcctcttgaggttttcctccatggtgtcgttgttgcagacgaagatgtagccgccgatggcctcgtcccgggggagcgcctccgacgccggcagcgtcttgaacctcttgtccgacgcctgcgcgccgctgtcgctgttcttggcgtgcttcttcttcccgccggcgccgtcgccgcccttcttgccgtagtacccgccaccgccgttactattgttgttgttgttgttgctcgccggcctcccgaccgacttgttgaagtagctcttcacgtcgccgccgttgccgccgtagttgccgccgccgttgctgctgttgttgtaaccccccatcttgttgaacccgaaggcgttgacgttgttgttgttgatcttggcggcgccgccgtaggacttgttgttgttgttgttgtcgacggggaggttgacgctgttgtagcggtcggccttggtggcgccgaaggcgagcttgccggagccgatgaggcccgggccatccaggtttccggcgacgccgttgatgttggcgatggcgttcttggcgggggagggggaggagaagtggtggtactcgccgtcgaaggccggctcgttgcggcggtcggagggggaggaccagatggagtcgccgagggagaggccggagaagctcgccgtctgcagccgcagctggtcgctgaactggtagaactcgcggtcgtatccctccatggccgctgctgctttttttctcttgttttctcgtgtgctcgtgctgcttggctagggggcgcggaatgccggccggccggagtaatactggtgatatccaaatctagtgtaagaacaaatgactagccgatcctggcttccggagttcacacatggcaggaacctaataaaggcaatggctttttgttgatagcaatagcaatgtttgccacttctccggttatgctagattcaattggataatggttaggtcagtcata

SEQ ID NO: 11456 - DNA, 1399 bp, Oryza sativa
  Clone ID: PAT_MRT4530_1767C.1
atggcctgcgacggcgccgccgttcccctttcatctcgacctcgggcacgcagctcgcgtcactcgccgtcgtcgcttcccagcgaggccatccacggccaccgtcgcttcttcccggagaccgccgccatctccccacccccgcgtgacaccacttcttgccctctccatctagggttttctcgggcctcgaatcgctaaagcatgttccgctgccacggaggacagggatgcccctgtgcttctattatctccaccaaggaggctgttgcattccagatctccctgtcgggcaagctcgggaggacgctacattgagccatgatgactgcaatacttctaggccttgagaagaggatttggaccactggtggttctgaccaagatttaacgttacaccttcagttgaccactcaaccaaggtatcgatcagttttggtccaaaacatatgtttattctcatgcatcgatttgcaatgaccaaatctatgcttcgatcttttaatttgctacagttttccctcacgctctaatccacgcgtccgcagatttgtctctgtgactgcttattgtactttcaaattgctttacagtgcatgcacaagtctgttgcctattttagtactaaccaatatatagctgttcccaacgaacatggtaaaaatattatctctgcaattctttgcttctatagattctcatgcttacgatatctaatcgatatccataccttcttttgcatggttttcattttcagaacatttcagctttcagtatatgaagttcatgaatgaagtgaccgttgtccggcttgcaactgttccatggtgcaaatcaatcagtttggatatggaacacgcattgtacgggttgctgcttataggttgtttggatatcacttaatggatcaaactagcttgtcatatttgtttatatacatgtgctatttggaattaagtgcagtggttgtacgggttgattcagagttgatcccagcttatatcagataaaaaggtcacacatcattctgtgaaactggaccatctccagatgcattagtgatcaacctacaagttgctttcatcttttagggacagaggtagcaagtacctgcattgctctaagcctctaactacttaggtggcaaagaaagaggagttgcctgcgattttgcccagccactttggtttggaagaaagaaattgatgactgaatcaatgaagctgtgagtggcaacgttgcctgtacagaaggattggtctatcttacttttggctatcaaattgtaccatgtgctcatatacctacaattgatttaagctggcatcaataagaattacaccaacaaatatcttcatataaaaaaaaaaaaaaaaaaaaaaaaaaaaaaaaaaaaaaa

SEQ ID NO: 11457 - DNA, 1616 bp, Oryza sativa
  Clone ID: PAT_MRT4530_17680C.1
atggcggtcgccagggagaggagccgcggcacgggcggcggggtcatgacgcgggcggaggagcccagcacaggcggcggcggcgcgggtggggagcggcgcggtggtcgccgggtggagcagcggcgcgatcggaggggcaacgcggtcgtcggaggagctccgagcagctggaatggtggggatctccaccttcagcaccttcctcgctgccagatccgctgcctctccgcgctctactccagtgatctccaccttcagatccggccggggacacacttcctaactgctacctctcacgtctcacccacacctacccaatctcccggtgcgcagcggcgagcgacatggagctccgcgagctcggcgccacgggcctccgcgtcagccccgtcggcttcggcgcctcccctctcggccatgtcttcggcgacgtcccccgcgacgtcgcccgcgccgccgtccgccgcgccctcgacctcggcatcaacttcttcgacacctccccgtactacggcggcacggtgtcggagtcggtgctcggggactgcctccgcgccgcgggcgtgccgcgggaccggttcgtggtcgccaccaagtgcgggcgctacagggaagggttcgacttcagcgccgcccgcgtcacccgcagcgtcgacgagagcctcgcacgcctcggcctcgactacgtcgacatcctccactgccacgacatcgagttcaccgacctcgaccagattgtgaatgagacgattccggtgctccagaagatcaaggagagcgggaaggcgcggttcatcgggataaccgggctgccattgagcatctacacttatgtgctcgaccaggtgccgccaggttctgtggatgtgattctgtcttactgccactatgggatcaatgataccgcgcttgtggatttgcttccctacatgaagagcaaaggtgttggcgtgatcagtgcttcacctcttgcaatggggcttcttacagataacgggccacccgaatggcaccctgcaccgaaagaactaaagttggcatgcagggcagcagcagatcactgtaagaagaaggggaaaaacattacaaagctagctatgcagtacagcttgatgaacaatgagatttccacggttcttgttggaatgaactctccagaacaggtagaggagaatgtggctgctgcaattgaattgtctacttccggtattgataaagaacttctgcacgaagttgaagcaattcttgagcctgtcaagaacatgacctggtccagtggcattgagcaagcctgatatctggcagcagcctggctcattataattcattcatgtattcattgagtcaattgtttgcattgcaatatttcaatggtgagcaaaggaaagtcatcatcggaaattcgttggtatgttgtctgtatcaatttagaagtctgtgaatagacaaacagccaaacatggatgctgataataatggaataagttgtgcccatgcaccttgctgtaatgaggcttgtatattgcttcaactacaaactgtaccaaaaaacaaattgcaaaccaataatttgccgatgcaaaaggaaatatcacaaaaaaaaaaaaaaaaaa

SEQ ID NO: 11458 - DNA, 283 bp, Oryza sativa
  unsure (1)..(283): unsure at all n locations
  Clone ID: PAT_MRT4530_17681C.1
attcggctcgaggttgatttgatacatgatagcacagnaattcctggtagattatagaccaagaaaaactctttagtgaaaaccttaaaacagatatagatttaaatggcttatccgaagaatttgtttttggaaaggctttggtgattgttttatgccctcgaattagcactgtacattaaataaaatagtttaaatttaaaaaaaaaaaaaaaaaaaaaaaaaaaaaaaaaaaaaaaaaaaaggccagcaaaaaactaaaaaaataaaaaaaaaagggggg

SEQ ID NO: 11459 - DNA, 157 bp, Oryza sativa
  Clone ID: PAT_MRT4530_17682C.1
atgcatgatgagaaaccaagggagaaagcaaatgtcatcccaaggcatcaaagtcctacccacctacagctgcactgcaagaatatctcattgccaattcactactgcttcgtcaggaatgacatatcttccattgataactcagctcagctgtgcg

SEQ ID NO: 11460 - DNA, 1004 bp, Oryza sativa
  Clone ID: PAT_MRT4530_17683C.1
atggccggccgtgcgacggcgacggcgacggcggcggggaaggacaggtccagcttcgccgtcacctgtagcctcctcagccagtttctcaaggagaagaagggcggcggcggcgggctgcaggggctcggcctcggcttgcggccggcgccggcggcgccgcccgccgcgggagctggaggtgctttccggccgccgccgaccaccatgaacttgctgtcggggctcgacgcgccggcggtggaggtggagccaaacacggcggaaacagcggccgacgagctgcctctcatcaaggccccggccgatcagcaaagcgacgaaagtgcaagtgaggcagctggagagaaggctcaacagctgaccatcttctacggtggaaaagtagtcgtctttgagaacttcccgtccaccaaggtcaaggatctcttacaaatcgtaagcacaggcgatggcgtcgacaagaacaccggcaccgcggcaacgcagagcctgccccgacccgcacacaacagtcttcccgatctgccgattgcaaggaggaactcgctccataggtttctcgagaagagaaagggcaggatgaatgcaaatgctccataccaagctaactgcaccgctgcaccgtccaagcaagctaacggtgacaaatcttggcttgggtttggccaagagatgacaataaagcaggagatatgatatgacctcttagcttacagttcactgtcaagtgtcaagtgatctgtggggaagagatgcgtggttggctggttgctagtgctagtgtattcccccgtagcttcaaagcatgaataattactcaatactactacattactactagtaagaacttaatcaatactaggaatcaagctggtggttaattctgcctgaccattggcatctggaatatatataagcacacacacgggttggttgttctccacattgtttgctgctggagccgtatgctcactgcagtttatatctgtctagctgggtac

SEQ ID NO: 11461 - DNA, 926 bp, Oryza sativa
  Clone ID: PAT_MRT4530_17684C.1
gacctggccacccgggcatccctgtaaataggagcatacatctctctctcttccaccgggcagaaagccatataggagcatacatctctctctcttcctagtagagagcttctagagagagtgagagggagggcaagatagaggggagggtgcgcaggaagctgatgaggctcctgtcgttcgtgccctgcggctgccgtgctggaccaatcgacgacgcgccgcccgccgcgctgccggcggcgaccgccggcgacggaggcgccgccgccaggaggcggcggaggagggccaggtccctcggcggctcgccgcagtggcgcccctcgctcggtgacatctacgaggagtacagcgccgccggcgccgccgacgccgcagcagccaagctccgccgccccgcctccgccagagccggccggtccgccgcccgcgacgccgccagggttctcccccgcgcacacagcgatgaatacaggcacatcgagacggcggtgtccatgccggcgtttgcgccggcggcgttcctcttctgaacgcggcggcgtcgggtggccggcgatgatgacgaaaagtagagcgacggcgaactgtatcaaacatatatatagactattattttctacttactgcaggactaaggatttatatatatgaatccaggaaataatggtgatcgatctctagctacttgtatgtaattaatatacttgtgtgtgttgaaagatacaatatggaattgcatctgttgtatatagtgtatatacgtcataattaacatcacaattgatgcatgaacatgtcttgtaatcgaatatcttgatataaatggacatatggtgtgtaaaaatgtcatgtacaaaatgattgtcaatgtatatatatgtatatatagtggtgataattaaattataatactacccctc

SEQ ID NO: 11462 - DNA, 198 bp, Oryza sativa
  Clone ID: PAT_MRT4530_17685C.1
atgaacgtgggcttcggcgagatatggcagagggtgaagggtgggaggaagggagatgccaggagggacgcggcgagcatggacacaacagccatgcggaggagggatgcgccggtggagattggaaagacctggatccccctggcaccacgcgtcatcgttccggccgccgtcctcgcccttcgtgcgcaagggtaa

SEQ ID NO: 11463 - DNA, 186 bp, Oryza sativa
  Clone ID: PAT_MRT4530_17686C.1
atggagatgctcaccggcgcttggggagaagcgggctccggcggtggacttcgacggaggagggatggactagtggctgagatagcccccgcagcggcgaagctagcggcggcgagcgcacggcgtggtgatggctttagcaacggcggcgtgcgaccggagctcggcggcgagtggcggcactag

SEQ ID NO: 11464 - DNA, 1321 bp, Oryza sativa
  Clone ID: PAT_MRT4530_17687C.1
tccaccccctgctactaccagtctctctgccttccaagaaatggccaccgcgaagccagcctctccctcgccgccgccgagcaccgccgtcgtcccggccgccaataccgcagcagccgcggacaagccggcggtcgagcagctcctggaggtggcggaggacgaggtcgtcatcgacttcaagcccaacgccaagtgccgcgctgacctccgcctccgctcgctgcacccgtccctccccgtcgccttcaaggtccagacctcctcccctctcaagttcctcgtcagccccccgcgcggcgccgtgcagccgctctcgtcggcctccctccgcgtcgtgctccgcccgcagcagcacgctcccgcgtccttcccgcgctcccgaggcgaccgcttcctcgtgctctcctccctctccgccgcgcacctcgactcctccgcctcctccagcgccgctaccggcggcaccaccgccatccgcctccgcgtgttcttcggcgggccgtacctgctccgcctcgcggcggaagccggggacgccgcggccgtgcgcctcatcctgcgccggcagccgcacctcctgccgctcctggagcccgaggcggcggtgcccgacggcgccgagcagtgggcgccactgcacgcggtggccgcgaggggggacaccggggaggtgaggcgcctggggccggactcgatgggagcgcgcgaccgtgaggggaggaccgccctccacgttgccgccgcggccggggaggcggaggcggcggcggcgctggtggacatgggcgccgacgccgcggcgaccgacgcgcgcgggaggactccactggacgtcgcgcgcgagaagggctatcaagaagtggtggacgtcctggaacggtgggaactggtcatgacggcggcgaggcgaggcgacctccagagcctcgagtccctcctcagcaagcgcgccggcgtccggggacgtgaccagtacggcctgacggcgctccaccttgctgccatcaaagggcactgcgacgtgatcgcgctgctcgccgggtcaggctgcatggacatcgagtgcgaggacgtggaagggcaccgcccgctgcacctcgccgtcgaaggcggcagcgccgaggccgtcgagctgctgctcgacatgggcgccgaagtgcacgccgccaccaggcggggcgcgacgccgctccagatggccgtgacgatggggtacgaggccatcgcgctgctgctgcgaggccgtggcgccgacgaggcggccgcgccggcgttgtgcatcgcgtcctcgtcttcctcctcgatatcgtgtgcgtag

SEQ ID NO: 11465 - DNA, 734 bp, Oryza sativa
  Clone ID: PAT_MRT4530_17688C.1
aaagttgagcatctgtctaaaatgtttggatgcatggtaggagacttgccttttacatatctaggcataccaatgggtatctctacacccaaggtaatagatttcagtcctctggtggatagagttgaaagaaggttgtctgctacttctgctctcctttcttatggggatagactgactctggtcaattcagtgctttcttttttgcccacatattatatatgtactctttcattgccaaaatatatcattctatctattgatagggtaagaagacattgtttgtggagaggatctgatatcaattctagcaagaaatctttggttctttgggatagagtctgtcagcctaaatctaaaggggggttaggagttattgatctcaggctacagaacaatgccttactaattaaaaacctgcataaattttataatagacatcctatcccttgggtcaccttgaggtcctcttactatgttgataaggtcccacatgctttataccttaaaggttctttttggtggagagatgttcttcaatttgttgatatctttaggggtctctctcaatgcacagttggtgatggcaaaacctgcttgttttgggttgatctctggaacaactagataagacagaccagttatcctagagctttctcttttgcaaagaatcaaaaggattcagttcatatgacctccctaaaggacttaccttgtcagaacaggcatatcag

SEQ ID NO: 11466 - DNA, 425 bp, Oryza sativa
  Clone ID: PAT_MRT4530_17689C.1
atggacgtgggccgaaggcgtcggccatggcattgctcatcggcgcatggtgaaaaggggcttacggaggcggattcggccgaacggacggcggacacggcggctcgcggcacggcgaacgcggcggcgtcgacagcgaggcccagcgcggctgctagcagccgccagaggcggttaaaaggcgacggtgggaggggcggggagctcggacgtggccgggaggagcacgaaatggccgtcgaagtggggcagtggggcgcggggaaagcggggcatgctcgttcgttggcgacgtggctcgggaggggcgaagaaggtgggagaggcggttgcagcatgggcgtcgacggcgtccggaggttgtggaaggacctgacaagtgggccctacctgttggtgaccccgggagagaaaggagggggcac

SEQ ID NO: 11467 - DNA, 2322 bp, Oryza sativa
  Clone ID: PAT_MRT4530_1768C.1
gacaaacaaccagctgattaatcgttattggcaacaaaagaaggaagaaaccatcaaccacttacaagtaatcaagtagtacaacttaataatacagataaactagtccatgtaagtttgcaaccagttaaatactttagggaacatatgcactatacaaacacccaattaatcttgcctttccttgctggaccaaaaatggttttgcaagtgccaagactacaacttcttcactgaccaatcaagcttcttatttcaattgcacggcataacgatctggattaatataaaattgtattctccatgcttgcctctaaattttccattgatttgaagtcatcagagtgtctagctcctgttccaaaaaacaatagtctagcttcatgtgtcgactctgcatttattccctttttggcacatcgtgcactttccttttcttcataaaaattaaaatcgtccagaagtgacgtttcctggtcataatccttgaaaattttcaacattttcagaccctggagtaggccaatctcctgagtgtccctgctgaaagtaacaattctgttgtcattattttcaagagttatatgtttgaagagcctattcggaatgtcctttataatgtgccaggttacagggaaaaagccattccatctatctagtttccaaaagtccatggtcttcttgaaatcaacagggcctaatatctcagccaatcctacaaactggccactggaattaaccgaaaagaataggaagacagggcactttttgcccttttccttaattaaaatctgagcttcacgaaaagctgcatccagcttattgttcccatgtggtgtacttgcccaaacattgtatttgatacctttatgaatatcatcttcactatatgactttatcataaagaacttggcttgttcatactcaactataaagtctggtctgttaaactgatccctacggaccaaaggacttctgatatcttcctgtatcttggatcttgttgcattttccaatttgtttgcacggggaccacgaacttgctccaatgtatcatcagaatgtttgcatacattatcgttcttaatagtcctatgatgatcagatcttgtgacagtatgtttgcctgtgcccatcttgaacctctgattagtagcaatactactgacaaaactgtctcttgagtaacgattgccatgagaagcacctcgcccgtagtttagctgtggatgtgcctcagcatcatggcaccattgacgatgatgcaaaggtatcctatcttggtagcactgatagtcagagttagacagcgatggaatctcatcaccgtaattttgtctacttgagcgtgcgttacaatggcgagaaagtgatggaatctcatcaccataactttgtctacttgagaacgagttacaatggcgagaagaaagcgatggaatctcatcaccataactttgtctactcgcgtagttacaattgcgagatagtgacggaatctcatcaccataactttgtctacttgaaagcgaggggattctagcaccatagttctgactagacagagaagggatctcatcaccatactgcatccctcttggcagtgaaggtccccaattgtcaaaactccattgacttgaagaggaagtagtctcatccatggaattggcctgtctaggtatgtcaactatgtgtttttcagataaaacttctgctgcatacaaccttcttatgtcaggactagcagaaggatatgaagcaatgtgatctggccttcgctcaaaggttttgcttctgacgctcatgttcccaactacatctcctgacccgtctggagtacttgacactgattctacttcagaagaacttctccaagaacaggttgatgaagaaaagcaagactgctgcctacgatacccacttcccgatgacatttcttccttagaatctgtatttgacccatgggaaatagcatggttggattctgaaggcggctcttgacaatccgatgccaggtttgatacatcctcatttgcgagagacataatttgggtaccatctttgcatttcatactgttacatggctgatatgaagaagtcgaatcttccccaccaactgcatcatcattcctatcgttgtttcttgtgaagccggaagaatcaccttctgtgtgcgataacgctgacatgggcggatcggaaggttccttcatctacctggagcctcaacggtgggttgctgaggagacgctccgagacggcggcgatgcggaggcggcgatgcggcggcggcgacggggagtcgcctggtgttaggagggg

SEQ ID NO: 11468 - DNA, 3385 bp, Oryza sativa
  Clone ID: PAT_MRT4530_17690C.1
atgtttgggctgcaggcgagcggcgccgcggcgtcgtgggtggtggggcggatgggcaccgacgcccacctctacgacgaccccgacgacgcctccatccccaccctgctcgactcccgcttcgatgccgacaagctcgacgccctcaagcgcctcctcgccctcatcgcccagggcgtcgatgtcgcccacttcttcccgcaggttgtcaagaacgtggcctcgcaatcgctggaggtcaagaagctcgtctatctatacctcctccactacgctgagaagcgccaaaatgaagctcttctttcaattaacatatttcagaaggacttatctgatataaacccattagtgagggcctgggcactacgaactatggctggcattagactacacgtcgttgctccacttgtgttagtggctgtaaagaaatgtgccagggatccatcagcatacgttcgaaaatgtgctgcctatgcactttgtaagctgcacgacttacttccagatgaaactacatctttggaggacacggtagatgttttgttcagtgacaattccccgggagtagtgggagctactgctgttgcctttaactcagtttgcccaaattgtttacccttgatatcaaagcatttccaaaggctatgtgagacactcccagatattgaagaatgggctcagattcttctaatcgatatcatcttgcgatatgtaatagctagacatggattggtgaaggattcttcaatttttgcttcaaatttgactttgaagagccagggcagtggagattcagcccttattggcaatgaaacttgtggcactacatcaaccatcacattgttccgacattacattgaagaatattcggaatgtttagaaggtgacataatcaactgttcatccgtgaccagtagcacaaacaatgatgttgcactacttttgaaatgtacatcgcctcttctgtggagccgaaacagtggagtcatacttgcagcagcaagtgttcattggatcatggctccagttgaccaactgaatagagttgttgggccaattttatttactctacgctcatctcctgatgcaacatatgtgatgcttggcaacatactagtttttgccaagacagccccacaattgtttgctccgttctatgaagatttcttcatatgcacttcagatccatatcaaactaaggctttgaagcttgaaatactgaccaccatagccacagagtcctctattccagcaatttttgaagaatttcaggattatattaaagaaccggataggagatttgtggcagatacagttgctgctattgcgctgtgtgcccagaagcttccctctatcactaccagttgccttggtgggcttttggcactagtattttatgaatcatctataagtgattctgctaactttgatggagaagctgctgttttagttcaagcaattttgtctatcaaagcaatagtgagaacagatccagcatctcatgaaaaggtgattgtacgcttggtccacagcctggacaaaattaaggagcctgcagcacgatccctgattatttggatatttggagagtatagttccataggaaatatcattccaaagataactcctgctgttctcaagtatcttgcatggtcctttgctgctgaaatgcttgagacaaagcttcagatcttaaatgctgctgcaaaggttatcatacattctcctgaagaacacttagaagaattcaaaaagataatggcccatgtcattaagctggctacatgtgatttgagttatgacgtccgtgatcgtgcccgttttatatcaagacttttgccatacagcacaacctatttaaatggaaacaactcctcatgtcaatcacataatgaagatatgtttaaggaactggctaatcatatatttgatgggaagatgccatcaacattccatccaaccaataactaccggatttatcttcctggttccttgtcacaggtgattcttcatgcagctcctggttacgcaccacttccaaagcctcagagtatggaattaattcataagaccatggaaccaaccagaggagtaggcaattcttctgaaagcattaattctgatgctgaatctggatcttcaacatatgatggtggttctgtttatgattcagagagtgaagttgatggctcatctgacaggaatgctgctgattctaacacaaaagataatcaagaagatcccctggtccatgtttatgatgcaagtgtagatcaaggtcagacggctagggatgtcgaggataattttgcatctctcatcactactgatttgactgaattaatgtctaagtcagccttggaaacatggcttgatgaagctcctgctgaaccagttcaggtttctacacaagcatcctctgctagagtgtcttttaccaatcggagctttgagcgaaaacctaaattgcacatgttgttagacccatctaatagtaatggtctaagtgttctttatgccttttcatctgaggtttcacccgtatcacgcttgctagtgtgtgtagacttgttatttgagaatgtttcaacaaaccaactggcagatataacaattaaatccgaggaggcttctggtagtgaggatggcttggaccaaacattacaaggatctgcaagtgttccaactattgttcttgataaagagatacaattattggctcccgaacaaacggaaaagatggttcttcaggttcacttccatcaccatctattgccccttaagttgtctgtgctctgcaatgggaaaaggcatccagcaaaacttcatcctgacattgcttattttgtgcggccactgcccatggacctaaatgcttttctatgcaaggaaaaccaactgaggggaatgtttgagtatgctagaaggtgcactttcaaagatcatcttcagaagcttgagcacaacgatgatagtgaagagcacactgataagaaccttctgatagcccagagcctcgcgtcaaaaatactcagcaatgccaacttccacttggtttcaatggatatgccagtgaccttcagcattgaggatgcttctggcttatgctggcgattcagcagtgagatcctgagcacttcaaacccttgcctaattaccatcctcgcggaagggcatatctcggaaccacttgacctcactgctaaggtgaactctgaagatacagcgtttggcctaaacctcctaaacagagttgtagcaatcatagaatgaagctttacgttttaacacctgtgcatttagtcttaaatgtcactttgtggatactgtaaattgttgtacattatttgcaagctatgaaggttttatagtaaaggtatccagc

SEQ ID NO: 11469 - DNA, 233 bp, Oryza sativa
  Clone ID: PAT_MRT4530_17691C.1
tcggtttacgggaccaagccggcatcctcacgcagggtctgcttacccgctcggagggagaagataacacgaagaactaacaccaggaggaagaagccacgctaagacgaagctgattgaggaccacctcactgacgaccatagacgacgagttcaaggaggccttcagactgctggaaaagacatggcatggttggatcacaaccctacaatttggaacacaaatacctgca

SEQ ID NO: 11470 - DNA, 1152 bp, Oryza sativa
  Clone ID: PAT_MRT4530_17692C.1
atgcagctcctcggggctcctccgcctgtactcccgagcggctcggcggcgccgaccaataccccggctacggcggcggcggaggaggaggaggaggaatccctcctcgaaggccacaaggcagcgcgcgagtgggcccaggtgcacgggcagcacgaggggcgcacctgggccgtcggatcaggcgcagcagccacgttgggccaatccaacggacgagatgcgcccgctcgggccgaagacggaagctttgggttggttttactactttttgtgccccacctcctcttgcatgcaaggctttggctcctcccacccacttttgcttcgcaaccacaacaattttcacaagtcacaagcgcagcggaatcgcggagagttgaactagatctagatgcgaccacgtcattctttggtgtttatgatggccatggaggagctgaagtagcaatgtactgtgcaaaacgatttcatactatgcttcttgaggatgtagactatatcaacaatctgcccaatgcaattacgtctgattacgttccgccgtcatatgaaggtagcacagcatgtgtggtaatcattagaggaaatcagatcattgttgggaatgttggtgattctcgttgcgtgctttcaaagaatggtcaggcaattagtttatcctttgatcacaaaccacaccatgaagctgaacgcgaaagaattcaaagagcaggaggacatgtatttttgcaaagaattctaggaatgttagccacgtccagagcgattggtgattttgcatataagcagaacagaaatatgcctccttcacagcaaatggtgacatgtgttcctgacattcgcgtcgaaaacataactgatgatactgaatttcttgtcatagcaagtgatggtgtctgggatggcatgagaaataacaatgttgttcagtttgtgcgtcaggaattacgtccgggggaggaaaatctacgcgagacttgtgagaagcttgttggtcattgcttgcactcaaatgacaacgcgactgccatactggttaagttcaagcccattgaggaccccgatgaagttgccagtgccagggatgaacatcaacacaaccccgagggcggtgatgaaaaacttgacatcaacaatgacaatgactaa

SEQ ID NO: 11471 - DNA, 2694 bp, Oryza sativa
  Clone ID: PAT_MRT4530_17693C.1
atggggcacagcgcgaggaagaagaagaagaagaagggcgggggcgggcggaaggcggccaaggaccacggggggcagctcgagggcgaccaggccgccctcgccgacgagctcacggcactgggttcaattttccttgaggacttcaaagtgacatcagaatcacctcagacccgttttactatatgtatcaggtgttttgctggttacccccacaagtgcccaaagttgcgggttctacctgaaaagaccttatctagagaagatgctaatcggttgctttcccttcttgttgatcaggcaaacatttattcccgagaagggcgtgttatgatattcaatttggtagaggctgcccaagagttcttgtcagaaattgctccagctaatgattcaacaagcatgttggcacatcatgcttttatcgaatatattgtgaactatgaagaactttgttgtaatgatgtgtctcactttcacagtgtttacgtcttggtctcctgcatttgcttagctgtattaattaaggctccttggttgggttcaggcaaagtacagcaaacaactgatgtagacgtgaaagttaagcttgacaatggttcttaccatggagttgcttacatgcataactcatttgacctgtatagtcaattatatgatggaggtagttggagcatgcaaggtccagatccagcaactgatagtgctgggaaaattgttggttctcaagtcaaatctaatcttaaaagcaagaggaagacaattattgaaaaatcccgtgtttcttctgatgaggttaatgttgcaaagggtttattaccggataatgctggtcagaaaaatataatgaagcatgatgttattcgggagacagttcccagtttgcatgtcgttgcagaggaaactgaaaatgacagcaaaactgtttctacgagcaacagagaaaatacatcaggtactccagagaggagttttagcagtgtgcatcaacttgaggactctgatctttcagacgaagattggaatgatgaagattctggttcaggctctggattttcaaataccccatcttttgacatgtttgatgatgcttcacggaataagaaaaaagatttaattctggtacacttgcttcgtctagcttgtgcatctaaggactctctttcagcttctttgccagcaatatcatcggagttatgcaacatagggatcctttctgaatgggctaaagatttaatttcgaaatctcctgctgtctttggggaaacttttggacacttttttgggccacaaatgacctcttcagagtgctctctattttggagagctgacaattcatcatccaggccaaattctcgttatttgaatgattttgaggagcttcgttcacttggccagggtggttttggtcgtgttgcactgtgcaagaacaagttagatggacgtcaatatgctgtaaaaaagatacgtctgaaggatagaagtcctcaagtgaatgaaaagattctaagtcttctgcaatgtgaggccaatgtccagaccatcaatattgttcatgtagctgtagatgcaatgttactcatggtcctcagagaggtagccacgctttcacgactgcaacatcagcatgttgttcgttactaccaggcatgggttgaaactgagtatggtcaacatcatgttttgaatgctgctgggtcatgtactgctgagagctctatgtacagttacgacaacatcagcttatcagatgcaggtggtggaaataagcaggaatccacgtacttgtacatccaaatggaatactgtcctagaaccttgcgacaggattttgagacatatacttcatcttttagagttgatgatgcatggcgcctatttcgacaaatagtggaaggactagcgcatgttcacagccaaggtatcatacaccgggacttgacacctaacaacatattttttgatgttcgcaatgatatcaaaattggagattttggtcttgccaaatttctaaagctggagcagttagatcatgaccaatatcttcctagtgaaggaatgggtgtttcaatggatggaacaggtcaagttggcacatatttttatacagcgcctgaggtagaacagaaatggccacatataaacgagaaggttgacatgtacagcttaggagttatattctttgagctttggtatccattttcaacagcaatggaaaggcatcttgttctttctgatctcaaacaaaaaggcgattctccattgtcatgggcaacacagttccctggccagtcaaacctattgaggcgcctactgtctccaagtccatctgaccgtccatctgctgttgaacttctgcaaaatgatctacctcctcggatggaagatgagtggttaactgatgtacttagaatgatacagacgccagaagacacatatgtttatgaccgagttatatctacaatatttgatgaggaaaggctgattgccaaaactcaatgccagcttgaaggcagtaaaaaatccacttgtaaaagtgataacagtgaacttctagactctatcattgaggttagcaaggaggtttttaagagacattgtgctaaaagattccagatatcccccttgcatacactggaagggaaattcactgaaaacaggtgtgtttggttcctacacctttcagctgattag

SEQ ID NO: 11472 - DNA, 415 bp, Oryza sativa
  Clone ID: PAT_MRT4530_17694C.1
gagaacaaatccagaaggtgcatagggagggaacaccatgtgttgcggtaatatgcaccaatcgataaacaatcaaaagaccaacaccatcacatagaaccaacataaaacactggcccaaaacgttgatcgatgactattcaactttacttaaccatagtccaaacggaacatggagcaataaacttagtaactcacaaaggcaggaaccgacgataaactaactgtagaacgcaaagcggcactttgctgaacattaacagttagctcgaccgtcgccctggtggatgtcgatatatcaacacttaaatgcctacggtgattcatccagctggggctgggtttagccgtggagggaggaggaagagccaaccttggctgcactcgcccttaggaagtactggtcctaggtggc

SEQ ID NO: 11473 - DNA, 187 bp, Oryza sativa
  Clone ID: PAT_MRT4530_17695C.1
ttttgttaatttaattttatcaacagaacgtctatctttctgtacattgacatctgtatcagattcatccttgatggcatcagtgaaaagcccttcagttgattcaaaccatgacagtattgaatcaactgaaggctatctcgatcgactgatcgcatcaaggatgaatatgatcgagagatcggaa

SEQ ID NO: 11474 - DNA, 1565 bp, Oryza sativa
  Clone ID: PAT_MRT4530_17696C.1
atgcagctcctcggggctcctccgcctgtactcccgagcggctcggcggcgccgaccaataccccggctacggcggcggcggaggaggaggaggaggaatccctcctcgaaggccacaaggcagcgcgcgagtgggcccaggtgcacgggcagcacgaggggcgcacctgggccgtcggatcaggcgcagcagccacgttgggccaatccaacggacgagatgcgcccgctcgggccgaagacggaagctttgggttggttttactactttttgtgccccacctcctcttgcatgcaaggctttggctcctctcacccacttttgcttcgcaaccacaacaattttcacaagtcacaagcgcagcggaatcgcggagagttgaactagatctagatgcgaccacgtcattctttggtgtttatgatggccatggaggagctgaagtagcaatgtactgtgcaaaacgatttcatactatgcttcttgaggatgtagactatatcaacaatctgcccaatgcaattacgtctgtatgcttcagacttgatgatgatttgcaacgatcaaatgaatggagggagtcacttaatccctgtgctaatcgcaattgtctcactaacatttgtgctaatctccaccatttcacagaggattacgttccgccgtcatatgaaggtagcacagcatgtgtggtaatcattagaggaaatcagatcattgttgggaatgttggtgattctcgttgcgtgctttcaaagaatggtcaggcaattagtttatcctttgatcacaaaccacaccatgaagctgaacgcgaaagaattcaaagagcaggaggacatgtatttttgcaaagaattctaggaatgttagccacgtccagagcgattggtgattttgcatataagcagaacagaaatatgcctccttcacagcaaatggtgacatgtgttcctgacattcgcgtcgaaaacataactgatgatactgaatttcttgtcatagcaagtgatggtgtctgggatggcatgagaaataacaatgttgttcagtttgtgcgtcaggaattacgtccgggggaggaaaatctacgcgagacttgtgagaagcttgttggtcattgcttgcactcaaatgacaacgcgactgccatactggttaagttcaagcccattgaggaggaccccgatgaagttgccagtgccagggatgaacatcaacacaaccccgagggcggtgatgaaaaacttgacatcaacaatgacaatgactaatcactggccctccaatttagtgcaccttagttcttgcaaggatcttagctagctgcagggagttttggggttagatcaggaaaagaaggtccagagagtcctatttttgtccaaggcgacgttgatgggatgccactaagtacgtagtatgatgccatcagtccattagcataggagacagtccgttacatttgtgcctgagagtcacttggattcgtttaacgcacctttatcattgtactctggattactgaagattttggtcgatgtagtaaaaaaaaaaaaaaaaa

SEQ ID NO: 11475 - DNA, 610 bp, Oryza sativa
  Clone ID: PAT_MRT4530_17697C.1
aaaatccatcgaaaccccactttattagcaccaaccccgtctccttcctccattcctccgccgctagaaccttctagaagctctcctcctcctcccatggcggcgacgatcgtgtccgtcaaggcgcgccagatcttcgacagcaggggcaaccccaccgtcgaggtcgatgtgtgctgctcagatggaacctttgcaagggctgcagttcccagtggtgcatcaactggtgtctatgaagctctcgaattgagggacggtggatctgattacttgggaaagggtgtttccaaggctgtcgacatatcaatggaaacgatatctcgaagcatggaagtatggagctggcttagattatcgccaaggggaataatcagcttcttttggaattagtctatatttcattgagaaagaaatacatacagataaaggaacatatataccttttctattaggtcaaatcactgtacagtgtagatacaaagaaaatttctttcttttttcagaccaagacagtgaataacatgttagttattgagaacaagtaatatgcggttcacttgtaagtacatattattaactgaagtgaatatgtaatgtctacattttc

SEQ ID NO: 11476 - DNA, 231 bp, Oryza sativa
  Clone ID: PAT_MRT4530_17698C.1
ataaagtatttaatggcaatgatgacttaaaagctaatctcgccctgcaattaaaagacgcaggcagtcagccgattatggcaaatcagctggcgttaccccttgaagaagtcgagaaaaatttaaatgcggtgcaggagaaatttcatcaaaaaacgaccgctctttccgatcacgaaaacgatgtgaacggggcttatgtggtgctaaaagagcctgtggttggcaaag

SEQ ID NO: 11477 - DNA, 837 bp, Oryza sativa
  Clone ID: PAT_MRT4530_17699C.1
atggcgcagaaatacttctggtatattatggttacagagttcatccgcaagcgcacggatataccattgacgacgagcgcgcagcggccggcggatggggagcggcagccagtaggcggcggtggcggaggcggtggaggtatgctgttccagcccgtgaaccccgctccggcggagaagcccacgtcggcggcgtcgacgtcgccccagtgctgctccttgcacgcctcgtcgtacgcctgcataggctgcatggcggcgcgcggccgccgcggtggcgccgtgcgcctccagcacggtggcgagtgccgcactgtccgagaagctcagcgtggacgtcggcgagtcaaggccatgagccgctgccgccgccacggggggagccgggaggccgcgagcgcctacttcctgctccgctctttctctatcatagcttcatggaggaggcggcaccagatctttctcgccatacacgcagctcaccttctgctcgagtcttcacttccagaaggtggcaacgatagcggcggccttccacaagcctcccctggccgagctgtcccttctgctctctccggcgaggagcaagcatgcaagaatgtgcccggtcgccgacaacgcggcgcccgtggcggcagcacaggaagcaacaaacatgcctacgcctccgccgcccgccacgtcgagcgccaacggcagcctgccccaggagccgcctcgccactgctcttctcccctgctggtcgctggtcgctggccgccggacctcctcctctcccacaccaagtcggcgccgcatcgcctgtcaacggccaccagacgcgaggagaaaagtga

SEQ ID NO: 11478 - DNA, 686 bp, Oryza sativa
  Clone ID: PAT_MRT4530_1769C.1
ccggccgggatcctaatccagcatcagtcccagctcgatctccctacaactcgcaaggaaaatcctctgaatctctcccatggaaggcatcatcccgttcatcttcaaggcggtagcgcagtacaaggagggagggcacgtatccctcagcgacatgatctccgacaagccgtcgccggcgtcgtacgtgctcctgccgggggactctgacggccgacacgccgatgacaagacccagccacttcgtcttcaggcttccaccggctccgaggaggaggtcaccacctgcaccgcccgggcgtcgcacctccggtgctccacgctgcgccggcgagcttaggatgccgtgaactgctacgccgatcaaactgcaggtgccagtcgttcagacaatttgaggtttgtggtgctgtgcttgtgcagtgcagacagtgagagatgtaaggagcctagtactttagctagtttgggcttttcagcctatagcatctataagcgacctttacttttttttttagctgtttatgctctgtaacgaggtgcagatctccaaagggaagatttgtgcgtcgaagggcgaaacgctttgtatcttgagaaaaacgaatttgtaaaacaatactgtgcgtgtaactgtataaatttggtgataggttctgtatgaaaaaaaaaaaaaaaaagcggcc

SEQ ID NO: 11479 - DNA, 136 bp, Oryza sativa
  Clone ID: PAT_MRT4530_176C.1
atggtggatggggataatgccagggtgcaccagcacaggtgtgaccgccggcgcgccacgtggcgcgccgcgtatggtccggtcctgatatggcagtgccagaacgttatcctctggggattttcagtggacatga

SEQ ID NO: 11480 - DNA, 417 bp, Oryza sativa
  Clone ID: PAT_MRT4530_17700C.1
accttctcctccggctcttcttcagtatcgaatcctctcttctgctcgtgcccaccaccaccaccgtagcaatggcgggcaacgggccgatcaacaaggaggacccgttcaactggggcgcggtggcggccgagatggccggcagccacctcgacgaggtgaagcgcatggtgtcgcagttccgcgagccgctggtcaagatccagggcgccaccctccgcgtcggccaggtggccgccgccgcccaggccaaggacgccgtcgggttagtcgccgagctcgacgaggaggcctcgccccgtgtctgggtcagcagcgagtggatccctaactgcatcgcccacggtggacgacattacggggtgaccaccggcttcggggggacttactaccgacgtaccaaggacgggccctccc

SEQ ID NO: 11481 - DNA, 332 bp, Oryza sativa
  Clone ID: PAT_MRT4530_17701C.1
tttttgttttttttttttttgggttttttttttttttttaaaaaaagggctcactcttttgtattggcattgttgcatcaaaatccatataatagctaatcatatcagctccaccaagatgaaacaccagctccaagaaagaacccaagatgattgtcctacctccgttttaggttataagactttttagcattacccacattcatacagatgttaatgaatttaggcccacatatatgtctagattcattaacatatatttgaatgtaggcaaatgttaaaaagtcttataatatgaaacatcgggagtagttgcgaggggccgttaattg

SEQ ID NO: 11482 - DNA, 991 bp, Oryza sativa
  Clone ID: PAT_MRT4530_17702C.1
gcacgaggctaccttctcctccggctcttcttcagtatcgaatcctctcttctcctcgtgcccaccaccaccaccgtagcaatggcgggcaacgggccgatcaacaaggaggacccgctcaactggggcgcggcggcggccgagatggccggcagccacctcgacgaggtgaagcgcatggtggcgcagttccgcgagccgctggtcaagatccagggcgccaccctccgcgtcggccaggtggccgccgtcggccaggccaaggacgccgccggcgtcagcggccagctcgacgaggaggcccggccccgtgggaaggcgcaaagcgagtggatactaaactgcttgggccacgggggggacatgcacggggtgcccacccggttgagaagcaccttaggaccgtcgaacccagggcgggccgccacctcgaatggcatgcggagaacctcgttaccgccggatataggagccttggtcgttgggcacgctgtggccaggggggcggggaggagtgactagtggggccgcagggaccgcgagggcagtctctaaaccaccgcgcattgtgcaccgtttgggcggggcaacggacggcaacgggatggtgcgtggtgccagcacctagaaacctcgcgccgtgtcggttggtagttttcacgagccattatgcgcagagcgagcgcgtccggaccgatcgagggcgatccctacgacggagcggtgtctatgatcattgggcatacgcactcgtgctcgacggactagatgccggggcgggaggtgcaaatgagggaccagagagtgtataactgtcgtcgtgtgcgtcgtcgggcagacgccagtctaagcccgctgtgggccaaggtcttgggttcaccctcatcagagcaagacgggatatcttggccgagggcgcttcgaatgaggacggacgagtatacgttgacagcgcagtacgcgttgaggcttacgcctgctctatgggtct

SEQ ID NO: 11483 - DNA, 465 bp, Oryza sativa
  Clone ID: PAT_MRT4530_17703C.1
tcatggacgaccggcggtggcgatgacaaacctcatagcaaccaacagcgtgtaacgtcgtggcaacgaagctagcggatgaccggcgacggcgacgaaaccttgcagacaaccggtatagcagccgtggcgaccaacctcgcggacgaccggcggcgtcacggcatggcgaccaagctcgcagtagcagtagcacagcatcatccaccatccattttgctttagaattcgtgctccagccgccggaagatgctgcgaccagcggcggcggcggcgggcagggccatccggcgagccgcgtaccactccgacggcgcccctcctccccgcaagctccggggcccccgattcagccctctcaacaggcacaaccacgaggtacctcagatctatagccttgttcgtgcacccatgaattagtcccaaatcctcctggctcagaaacccagtccctccttgtgtcat

SEQ ID NO: 11484 - DNA, 124 bp, Oryza sativa
  Clone ID: PAT_MRT4530_17704C.1
atggtcatttttggtgagctagagatattggcgctgtcatccaacagggcaacgctaccacctctagtgtcgtccctgcgccaccgtggcaccgtgttggctagccgagctgacctggcacgag

SEQ ID NO: 11485 - DNA, 439 bp, Oryza sativa
  Clone ID: PAT_MRT4530_17705C.1
ccaaaatgcaccagcagaagaagacgattagccgtggaccacgcgcggagaaaaaaaaatgctgtcctccaccgctctgcggccgatggcagcagcccgccacggacacggtcacggccaccggcttatcagcctcacggacgtgccgccgtggttgggcggtgcggtacgtaggccggggtagagggtcgcgcggagcgcaactacgactcgctcccaaagcgggagcccttcatctcgagcgcgagcgtgctgaacgagttgctgaggcaagagaagactgtcgtgcatcgcaccaaataccatatcacagattattgcacaaccctagaaagagatgagtgctgcatctgatgagatgcttactttgaactcaactgacttgagcgagaactgcccacacaagaaatcgcaaggatggtgcaggactccaagggat

SEQ ID NO: 11486 - DNA, 196 bp, Oryza sativa
  Clone ID: PAT_MRT4530_17706C.1
gaaagaatcacaaattttttgaaagaaccggtggaatcccagttccccccgacaaccttttccttgaacccacaggatccggagcaaatcccatggacccccttgggacggaaaagaaagggacccccccgcctccatgggcaccaaggggaacgctcccccgccaagcttttggcccggcctaacaaacgcggga

SEQ ID NO: 11487 - DNA, 228 bp, Oryza sativa
  Clone ID: PAT_MRT4530_17707C.1
atggagaggcactggcaggtccgactcggcgtcggtggtgggtccgactccacgacgatgaccactgctactcggctgctggatccaaatgacaaatctaaggatagcgctggcattggtggtggggcgacggattgtgcggagttgcagctaaagcaccgtggtggcgtcgatggcagtcatcctaccatcctctcatgcttggtcgttacggatgagcagctatga

SEQ ID NO: 11488 - DNA, 1424 bp, Oryza sativa
  Clone ID: PAT_MRT4530_17708C.1
ccggccggggtcgcgcggcggcgcatccaatccctcctcgctcgcatcgaaagcgataaaaccctcgcgaaaatctcgaccccgaggcgcgccgatcggatcgcctctcctctccatcccctctccagatcccgatccaccggggagcctcggatctctcgccggaggccgggcccggagcgcgcgcgcgccctttttcgcgggcagatgcgatccacgccgcgcccccgccgccggagccgacgacgagtcggctgacgccgccgccattccctgcttccgattctgccccgcgcgccgccggttcgatgggctcccgcaggttcgccgcggttgtcgtcgtgctcctcctggctttggccctgattcccggccccgcggcggcggcgggtagggccctgcagggcgagaaggcccgccccagcgaggcagctcctgcacctaccgtcgctgcaggtggatcacataaagaatcggcgaaatcgtcaaatggccagaatcctgtgaccaaggagacgcaccaccaaacgccaccgccggcaaagccgccgaaggatcaaacaccaccgccgccaccagctgtgtcggagagcaaggggcagaagggggatgccggtaataactctgggcacccggtgccaccgacggatgcgcataagacgagtcccccgcctgaaggtcccgggccaactggtgggaaggagcaggaaggaggagcgggtggggagaagaagaatccgacagaagaaattaagaaggtgttgagttgtgaggatgcagcggagaaatgttctgttccaggagaaattaccgcttgccttcaggtttttaaggatggttcaattaggccatttgttgtagtccagaatgaagggcagaatgatgttaaggtcgatgttgttattgatggtaaaatgctgccattacagctggccaagggcttctccagacaggtaaacataacctatagcaatccaaatggtgtagaaattacagtaaaatctgggaaggggcagtgttccttacacaccaagcaaacagtttttgattggcaacaacagtttcagcagtttgcagcttatgcaacacgcgcgaatccaatctacggagcctccttccttgttttcactgttgtcttggtgggagtggtctgtgcttgttgcaagtttgcaagaaggcgtgctagtggagtcccatatcagcaacttgagatgggagaccaagcccccaactcatcaggcgtggaaaacactacaagcactgtggatggttgggaagatggctgggatgatgactgggatgatgaagaagcggcagcaaaaccttcagataagaaaccatctggaagtatctctgcaaatggcctttctttgagacctcagaccaatagcaaagatggctgggatgtagattgggatgactaa

SEQ ID NO: 11489 - DNA, 420 bp, Oryza sativa
  Clone ID: PAT_MRT4530_17709C.1
atggcggcggcgggtatcccggtggctcatgcgggcgaggcggcgaggttgacggggctcgtcatcacggcggggtcgacggagctcgtcggcgcggcggggtcgatgatagaggcggagcggcgctccttgctgtgcgccggtggaatttggctcggcatgcgggccggcgaggcggacggctatcggcggcgggaggccgcggcggcttcgacccccgtcccagtcgcgtgcgacccgtcggctggcttttcaagggcgaaccgacgacggaaagccgatggcacgattccgcggccatcggtgaagcgggtggccggcgacgcgtgctggcggcggcgagggcacgacggcgcatgctggcgtcatcggctcggtttcgtcgtcgtcaacttcaggaggacggcggcgctggcatga

SEQ ID NO: 11490 - DNA, 690 bp, Oryza sativa
  unsure (1)..(690): unsure at all n locations
  Clone ID: PAT_MRT4530_1770C.1
gcgcttttccgtcgccgccgccgcatcgccgcctccgcatcgccgccgtctcggagcgtctcctcagcaacccaccgttgaggctccaggtagatgaaggaaccttccgatccgcccatgtcagcgttatcgcacacagaaggtgattcttccggcttcacaagaaacaacgataggaatgatgatgcagnaggtggggaactttcgacttctgcatatcagccatgtatgtgccatcgtaattagtttccaaaactccccgctagtaataatttctgaatagctcagacagtcaatttgtgttctacttctactctgaggacaatttctttctcattctgcaggtaacagtatgaaatgcaaagatggtacccaaattatgtctctcgcaaatgaggatgtatcaaacctggcatcggattgtcaagagccgccttcagaatccaaccatgctatttcccatgggtcaaatacagattctaaggaagaaatgtcatcgggaagtgggtatcgtaagcagcagtcttgcttttcttcatcaacctgttcttggagaagttcttctgaagtagaatcagtgtcaagtactccagacgggtcaggagatgtagttgggaacatgagcgtcagaagcaaaacctttgagcgaaggccagatcacattgcttcatatccttctgctagtcctga

SEQ ID NO: 11491 - DNA, 617 bp, Oryza sativa
  Clone ID: PAT_MRT4530_17710C.1
atggtggcggcgagtatcccggcggctcatgcgagtgaggcggcgaggttgacggggctcgtcgtcatggcggggtcgacagagctcgtcggcgcggcggggtcgatgacagaggcggagcggcgctccttgctgtgcgccggcggaatttggctcggcatgtgggccggcaaggcggacggctatcagcggcgggaggccgcggcggcttcggcccccgacccagtcgtgtgcgcgtctctgcgggcggcggtcgtcgacggcgagtgcggatggtcgattgaagacccgtcggctggcttttcaagggcgaaccgacgacggaaagccgatggcacgattctgcggccatcggtgaagggggtggctggcgacgcgtgctggcggcagcaagggcacgacggcgcatgctggcgtcatcgactcggtttcgtcatcgtcaacatcaggaggacggcggcgctggcatgagattctgcggccataggtgaagggggtggccggcgacgcgtgctggcggcggcgagggcacgacggtgcatgcgggcgtcatcgactcggtttcgtcgtcgtcaacttcaggaggacggcggcgctggcatgaggatttgggccga

SEQ ID NO: 11492 - DNA, 129 bp, Oryza sativa
  Clone ID: PAT_MRT4530_17711C.1
atggcggcgtcgccgtacgccaaagtgcgggaggagtacgtagtacggaggcgcgatgatgttggtgacaagcaaggacgatggagatggccatggggtccggagaagccgctatctatcgcgttctag

SEQ ID NO: 11493 - DNA, 423 bp, Oryza sativa
  Clone ID: PAT_MRT4530_17712C.1
atggcggtggcgggtatcccggcggctcatgcgggcgaggcggcgaggttgacggggctcgtcggcgcggcggggtcgacgatagaggcggagcggtgctccttgctgtgcgccggcggaatttggctcggcatgcgggccggcgaggcggacggctatcggcggcgggaggccgcggcggcttcgacccccgtcccagtcgcgtgcggtagcgcgggaggcgtgccgcggtcaattgaagacccgtcggctggcttttcaagggcgaaccgacgacggaaagccgatggcacgattctgcggccatcggtgaagggggtggccggcgacgcgtgctggcggcggcgagcgcacgatggcgcatgctggcgtcatcgactcggtttcgtcgtcgtcaacttcaggaggacggcggcgcaggca

SEQ ID NO: 11494 - DNA, 1533 bp, Oryza sativa
  Clone ID: PAT_MRT4530_17713C.1
atgacgcgggcgtccacaattgatttcgggcggaagacacataatgatgtcctctggtcagggccattgcgtcctgcaaacttcatcagaaataaattccctacatacaagaagagtttgaatgggatagttatcaaattgacagatgatcaagaaatgccatctctgaaagaggctgttgccaaggaaacagcagacctacttcatcggagtcagcgcctttcagtccgtgagcttgctatgaaatttgagaagggtcttaacactgccacattgttgtctaatgaggttaaatggagacaagctgctttattggagcgagacatccttctgaaaaatctaaagagtgtattagaatcgctgagaagtcgagttgcagggaaacataaggatgaaattgaggagtccctttctatggtggatgttttaacagttcagctgtctaaaagagaagacgagttgctgcagcaaaaggcagaggttgccaaaattgcaacctcattgaaactggcttctgaagatgccaggagaattgttgaagaagaaagatctaacgctcgcatagagatagataatgctagagctgctgtacaaaaagttgaacaattagttaaagagcaagaaattgatcctcaaataaatgggaaacaggatgaggatgaacttaaggaaaaggctcaagaagcacggagagtgaaaatgctgcattgtcccagcaaggcaatggacattgaaaatgagattgaagtcctacgtgaacaattagctgagaagtcctcaaattgtgttcatcttttgaaagagttacacctgcatcaaagctatgaggaaaacgatgtgtcctcgtatgagctggagggccttgaaagcttaggctcaatgttgcgcatagtttcccagagtgatggatatgttgatttatcaagaagtacaatacagtggttccgtgtgcagcctgaaggaaacaagaaagagataatttcaggtgccataaagcaagcatatgctccagaaccacatgatgttgggcggtatttgcaagctgagatcaaccattgcggtgaaatctctgtcgtgaagactgctggccctgtggatcctgctgcaggattggtcgattacgtagagactcttctaaggaatcctgaaactgaatataatgttgttgttcttcaagtgaatggaatcaaacagcctaccgattcaattcatgttctttccatcgggaaactgcggatgagactcgcaaaagggaagacagtaattgcaaaagaattctactcctcaacgatgcagctatgtggtatgagaggcggtggagatgctgcaccccaagcgatgtactggcaaccgaggagagacctgagcctggtgctgggcttcgagacggccagagaacgcaactctgcaatcatgctcgctcgcagatttgccatcgattgcaatatcatacttgctggtcctggggataaaactcactggtgattgatgaagacgaactgtaccagctaacctcttgtacgagctcagaac

SEQ ID NO: 11495 - DNA, 276 bp, Oryza sativa
  Clone ID: PAT_MRT4530_17714C.1
atgacgggcgtcgtcgtactcaggacggtgggtgtcgatgcacttgaggcgacgggtgagggtgaggttcagatcaccctcaatgacaggggaaggatcggtgtggaggagagaagcggcagcgacaccggcgccgcctccgccgctgctgcatctctgttccagctgccacgacgcgcctccccggtctcccaccagctgcgccgcctcctctccccggcgactctcctccccgccagccgcgccgcctatcctcagccaaaccctaggcactga

SEQ ID NO: 11496 - DNA, 381 bp, Oryza sativa
  Clone ID: PAT_MRT4530_17715C.1
atgggagagaagagcagcgggctacagatctgtagccagctgcagcatggacttcaagacacaccatctgtcaaatgcgaagtccttgttattttggcaagtggcgacagccgacagccagctcgtaattttgtttccgtcgacaacggacgacgcatggtttgtacggataagcacgagacagtgtcaaaggcacagagagtagaattagagaaacttccttaccaaataaaaaagtctgacctgcgaaaccatgcacgaagactacagttagctgaaaagtacagctgggacacgtatcctgaaagtggttgggtgcaccaaacatcactagcagcaacatggaagctagctatagcaaggaaggtagagaggagttag

SEQ ID NO: 11497 - DNA, 423 bp, Oryza sativa
  Clone ID: PAT_MRT4530_17716C.1
atgcggcgcatgaaaacccccttcttcgccgacggcgcctctggcggcgacgcggggtcgggctttcaggcggcggccatcgcggagggtcagaaatttcaccccgcgttgctccgtttcctgcccgagcgcgctgctcgtgaatcccccagaaccaccaccgccgccgcttggaagggggccgataccgccgctcggaagggggctgtcgccgtgggactccggtggggccgccgccgtgggccgccgcgcgcgcgcgtcaagatggccatattggccatgccggcgcgagctgaggcgagcagcggccggccactaggcctgccctcgtgcggtggcggctgcggtggaggccgccgagccagtccaggcagtcgtggtgatctgcagccgtaccggaccggcctcatttttcttctgtga

SEQ ID NO: 11498 - DNA, 412 bp, Oryza sativa
  unsure (1)..(412): unsure at all n locations
  Clone ID: PAT_MRT4530_17717C.1
acaatattgaaaaaaatattttcaaatattgataacaatgttacaaatgcagcatgcatgcgatatccatgcgcatcacgcacttattacatatatatcatgggnaattatccaaaatataaataaaaaaaattttagtggtaaggggatatatagcctaagattgaagggtatgattcgatcgatcaattcattggctttattggcattttgaggaggtcgcgattggctgttggctcgttgagtcaggttcttatgaccccaaaccggttgggaaacctttcttgtacacccgtactttgaacaggatcaccttatacttgcactttgctcgtcgggcttatacgtattggggtcttccaaaattcttggttccacttgggcaccgtttccaggttcctccttactgggt

SEQ ID NO: 11499 - DNA, 225 bp, Oryza sativa
  Clone ID: PAT_MRT4530_17718C.1
atgactatttttcgatattgttactgcgagaaagttgtcatgttactacacgatgactgctatgttactgcgaaattcctgcgagacgtgaacaaccaagtgatatccatctcgacgatcggcgacggacgaccgtttttcaacacctgcaagattcgactgatcatgttcatatcgaggcccatcgtccatcgatcagtgctagctgggccacacgagcaaccc

SEQ ID NO: 11500 - DNA, 318 bp, Oryza sativa
  Clone ID: PAT_MRT4530_17719C.1
atggacatattttgtaattctcaggatcaaattaactggtacgctagcatacctaaagacaagtttttgacctgcactggagttaagcagatctcccaggcctcgtattttcacatcaacgagaacgagaaaggagagccaccgctgccgctgcctgcggcggcagcgtgggttcatcccctggctcggttacctagagtatcacgatcaggtggaccgtacaggtgcaaggacaagctggctgccgccggcggcagtggcggcgccggtgccggcaagacggagggcaagcacccgtgcaatgtgtgcgggaaatag

SEQ ID NO: 11501 - DNA, 192 bp, Oryza sativa
  Clone ID: PAT_MRT4530_1771C.1
atggcgtcctcggccttggcgagcagcaagccagcaacagcagcgatggcgttggcgagaaacaggtgcggtgtcctcgtcctccacgagcaacaggcaacaggagcggcggtggcgtcatgtcctttgcgagcagcgaacagtggcgtcgtttctctcgtttccatgcttcttggctcggatcggatttga

SEQ ID NO: 11502 - DNA, 834 bp, Oryza sativa
  Clone ID: PAT_MRT4530_17720C.1
atggtgagcagtgcgaggaccacggcggcggcggcagcggaggtgaccacgatgacggccttgggcgtgtcaccgcctcccctacgcgcctacgggtctggcttgctgggtgacgacaacacgttggcggcggcggcgcggggagcagccgggctgctgttgtccacgtgggacaaaaccactctggattgggtcaagggggttaattcgtccggtattgaaagttcaggtactatggacagaaatgagcttctcgtctatggatttactcatgttatgaacaacacaatgacatctggccacacgacgccatatgctgatcgatatggagaaaagagaggtataggactgctgtcaagggggaacctcgccgtcatcacagactacggtgccgccaccgattatctgttcccacatcaccgtgaacagctgcttcgcacccacacaacctccttccctaaattgaagttccaagtccactatgggacaacacaaccacccacttccagcacgccctggtatgcagcagccaccttttgtgatggtagcaggatgaagagcggattagtacaggtgagagatgaggatgacacagtggtgttggacaagtctatatctccgtatcttgcttgcggtggtcgattgcatcaaggggaaacttcattggagggtgtcagctgtcatggatgcaaacgtgcaccattgatcagcggcaagaaggtagggctcctttccactccgaacccatctagaagactcccccccctcgagatgccggttctttgcctggctggtcgcaatgaggcgctgttggacggtggaccgcctgtgttc

SEQ ID NO: 11503 - DNA, 838 bp, Oryza sativa
  Clone ID: PAT_MRT4530_17721C.1
gttttgtggttaggcacagtgccccccacgctgcgagcactagagacctctacccaggcaccgcgaccaggacttcgctcgtgctgtcgtcgactgcaacaggatcatcgttgacgcttcaacgacgatccaacgtttaggcgcgaggattggagtacccgtagaggagcacctgacgacgtacacgcggatagtggactcagcgcgctcggttctcggactgctcacctgtcgtgctgacgatgttgctcaggcagacgtagcaccacagcggccaccccgaccgactggtcctcgtccagctgcgcatgttcctagaccgactcccccctccccacggaaggtttcgtgcaccgttcaccacccgccttccacgagtacgcctcctgttgtgccccccacaagttttgcccagtttgatacgacataggccgcccacttctcccaggctgcagggtcagcgtctcaggtagctacgtcggcctcgcactatacgtagttctggcggtacgctggggcttcgtcacaggcagccggcacgtcgagtcggggtccaccactggaccatgccgggacctcgtcggagtacgggttggcttccgccttgctcttcgacatcagcgactccaacttccaggtctcgacagaggacgtcatcgggtcctcacagctgggaggcgcgccgccggtgcagacgcaggaccagccgccctctactccgccgccagacactcgtgctacccgtgctgtgccatcggattgtatcacgtactcccaggaccacgtgcgagcacaggcccggaggaccaagcgtggtcgcggtgcggggcagggccag

SEQ ID NO: 11504 - DNA, 185 bp, Oryza sativa
  Clone ID: PAT_MRT4530_17722C.1
cgtccggtctgatatgcgtgcgagtcgacggggggtgaagcctgggatgcacaaggaagctgacgagcgggaggccctaacgcgccttagcgatagatggatttctgaccccaccatatgttttgcatttctatatattcctttaaaagaccttttcatagtccttacagttttttttttttttc

SEQ ID NO: 11505 - DNA, 358 bp, Oryza sativa
  Clone ID: PAT_MRT4530_17723C.1
gttctatgttggccccgcaatttgagccactggactaaaaaatggaaataggcccttctggacaaaaaaaaggaatttacggccctgtcaggggctctttgaaaccccaatgggggggttacctacccaaccattcgggaaaagattccctgcccgggggtaatacatggccttatgatcttatattaacaagaaagtttcagtttttgggtacccattttcctccttggacagaaaaatttttttttggggccaactaaattgccccactggaactaatcccggggcacctcatgcaaaaataggggtgggtgcgcaagtagaaaaaccccccatggtcttgcccattttcattttg

SEQ ID NO: 11506 - DNA, 4113 bp, Oryza sativa
  Clone ID: PAT_MRT4530_17724C.1
atggcggtccaggtccaggagtcgaagcgggtggggaggcagctgccccctcaccggccaccgcgatccgtctccctcgccgcttccatttccttctcctccgcccgcaagcctcccgagccgctccgccgcgccgtcgccgactgcctctctcctcgaaaagatattagtgcaagtgcatggtgtaaattccttcgtccggatgcatgcacatgcctctgcagttcctacttgtttattataggatctgaatcacctgtcacctgcaagctgattacaggatctaagcgttgtggctacctcaatgaagtatgactaagtttgggcgaggtgcgcataaatgcgactctgcaattttgtagccaaccattaagattgagccagcgcaagtttttgagagggatgctgggatcaataatagtatgtgtgtttatttgcagcgttgttcccacgaaagtaacaagggtgtacatgtttgcatgctagtgttatttgctacctggaagaaacccaaccttgcagatatcagtgaacttccagacaacttattattgttttcttctttttttttggaaaaattaacttgtgattcttagattcgtattgagagttaacattgtaaatgcgtagggtgaaacagaaaaattttgcttatggtaattgaatagtacatctcctgtacaatatggagtgtaaaatttactgctaccagttttgttagttgctaataatatcaaatatatatcctttgacattttaaactggcgatggcatgtatatggtgaaagacaagcatcggcttctaccaaagaaagcagcaatgattttgcggaccttcaagattttcatacacagggttttcttgaagttggtgctgcagctcttctagttggagatatggaggcgaagattaatgatcaacaatggaaatattcttttatccaggactttcctgatattgatctgttgcaaccttcaacttctacagcaagtacttttgcatcatcacagagtcacttgaaagcaataactgcctcaaaacgcatgaaatcaggccctaatcaagtttggatgaacatacctgcaaatactttccagcctcgagcacgtcccctttttcagtataggcactacagtgagcagcaacctttaaaattgaaccctgccgaaatttccgaagtcatagctgaagtttgctcagaaacaacttcaaactcaaatcagttcagtgctccatcaagattgaccacccagagtcgccaaccttcagcagatgtggcattcagtgtccttatcaaacttgttatcgacatgtatatgatggactcggaggccgctgcccctctaacactatatatgcttgagggtatgttgagctctcaaaaatctcctgccaggacaaaggcatttgatctgatactaaaccttgggattcatgcacacctgctggagcctatgatagttgagaatgcaccacttattgagaaaagtgaaactgtgaatcattcttatatgaacaacgaatatggatcaagtatggatgaacagagggctacagaatctgaacaagagcagagggttagtcctgctattgatcagtttgagtcgtggcttctgaaaataatgtttgaggttcttcttctccttgttcagatggaggagcggcaagagattgtatgggcatcagctttgagctgtctattttattttgtatgtgatggaggaaaaatcattaggagtagacttggaggtctggacataagggtaatcaagactcttcttgagataagtgtggagcattcgtgggcaaaagtagtgcacagcaaacttatttgcatgctgacaaatatgttgtatcaagtatctgatggagctccaaacggtgccattgatacacattttcttcctgaccagatagatcgcgttggtggagttgactatatctgtctcgagtattcacgagccaactcaagggaggagaagcgggatttgttctttgttctatttgactatgtattgcatcaaataaatgaaacattcttggctggcggcctttcgacctacacttatgatgatgctcagccccttgcttcccttcttgcatgtgctgatgctccagaggccttctatatttctgtgaagcacggtgttgaaggcgttggagacatgctgagaaaagctatatcatcagctttgtcacagtcaacagaatatgagcagttgaatgtgcttctggacaaggttatcaggaaacttgatggaacagtcagcacattttctaggattgacactgagtttgcttatatgatccaagtaacaaaatcttacaagtgtttcagcagcattagagatggacatgaagatgctgatgttgcacttagagcaaggctttgctgggctactttgcactcacttcttaactcgcagatttcatcatataggcatcatggatatatttggttagttgaattgctcctttcagaaatcagtgaggaaacagatggttctatatggtctaaaatccaaaagctccaagacgaaattgaagttgccggaagccaagatttgtcatcctcagaagtttcattgcctgtttgtctgctatgtgggcttctgaagtcaaaacataacttcattagatggggatttctatatgttctggacaaatttttgatgcgttgcaaattattattagatgacaatgacatgcaagagcacacagttgctgatcatagcaaacatcgcctggacaaagcttttgcggttatagatattatgaacagtgctttgttgcttgtggtccaaaataatgagacagaccatattaacatcttaaagatgtgtgatatgttgttttctcaattatgtctgagactgccatcttcaaatgtgatgcatatgggtgggcttcaatcccttggtcaactttttggttgtacaactaagaacatcgagagccatctggaaactcttgcgtcgcatcaaaatgttggaaacaagaacttttgcaggagtgagacattgcaagacataagcgtaaatcaaactgctcaaaccactttactctccgagacatcaatggcagcactacttctgagaggccttgcgatagctcctatgcagcttgtagcacgcgtaccaacttcattgtttttctggccattgatgcaacttgaaggggcagctagcgatgatattgcattgggtattgctgttggtagcacaggtagaggcaatctccctggtgctacgtcagatattcgagcagcgcttcttttactcttgattggtaaatgcacagctgaccaggaagctcttaaggaagtagaaggcaatgaattcttcaggggtcttctagatgatacagactcaagggtagcatattattctgctgcttttctcttgaagagaatgatgacagaagagccagatacctaccaacggatgcttcaaagtctcatctcaaaagctcaacagtgtaacaatgaaaaactgctggagaacccataccttcaaatgcgtgggatactgcagttgtcaaacgatctaggagttcaataatcactcgaatgtgctatttctgtggatagaagcatgggctaaattggtactttcaactatgctcattgcagtataataatctgtggctgtgttcctctgctccagattgtagaaagatattagtgcaagtgcatggtgtaaattccttcgtccggaaacatgcacatgcctcttaagttcttaattatttattaaaggatctgaatcacctgtcacctgcaagctgattacaggatctaagcgttgtggctacctcaatgaagtatgactaagtttgggcgagcgttgttccaacgaaagtaacaagggtgtacatgtttgcatgctagtgttatttgctacctggaagaaaccaaaccttgcagatatcagtgaacttccagacaacttattacccttcccttcttttttttttggaaaaattaacttgtgattcttagattcgtattgagagttaacattgtaaatgcgtagggtgaaacagaaaaattttgcttatggtaattgaatagtacatctcctgttccaaaaaaaaaaaaaaatccccacaac

SEQ ID NO: 11507 - DNA, 210 bp, Oryza sativa
  Clone ID: PAT_MRT4530_17725C.1
atggcgctcatctcgagagcttctgttcttgtgatggccatcgtcgccatgctcgccaccttggtgaatgctcaggcccctgcaccagcacccaccagtgatggaacaagcgtggaccaagggatcgcctatgtgctgatgttcgtggcacttgccctcacctacctcatccaccccttggatgcatcctccgcctacaagctcttctga

SEQ ID NO: 11508 - DNA, 3830 bp, Oryza sativa
  unsure (1)..(3830): unsure at all n locations
  Clone ID: PAT_MRT4530_17726C.1
atggcggtccaggtccaggagtcgaagcgggtggggaggcagctgccccctcaccggccaccgcgatccgtctccctcgccgcttccatttccttctcctccgcccgcaagcctcccgagccgctccgccgcgccgtcgccgactgcctctctcctcccgctccccacacccacacccatgccccgccacccgccgcttcctctgcccccgccgaggcctccagaaccctccgggattatatcgccaacccatcaaccatcgatatggctacaatgtcctcatcgaccatgctcttgctgaaagagatcgtagatttaatatcatcagcaactgaaaaagctgatgggggagagcctgccgatgataccaaatatatatcctttgacattttaaactggcgatggcatgtatatggtgaaagacaagcatcggcttctaccaaagaaagcagcaatgattttgcggaccttcaagattttcatacacagggttttcttgaagttggtgctgcagctcttctagttggagatatggaggcgaagattaatgatcaacaatggaaatattcttttatccaggactttcctgatattgatctgttgcaaccttcaacttctacagcaagtacttttgcatcatcacagagtcacttgaaagcaataactgcctcaaaacgcatgaaatcaggccctaatcaagtttggatgaacatacctgcaaatactttccagcctcgagcacgtcccctttttcagtataggcactacagtgagcagcaacctttaaaattgaaccctgccgaaatttccgaagtcatagctgaagtttgctcagaaacaacttcaaactcaaatcagttcagtgctccatcaagattgaccacccagagtcgccaaccttcagcagatgtggcattcagtgtccttatcaaacttgttatcgacatgtatatgatggactcggaggccgctgcccctctaacactatatatgcttgagggtatgttgagctctcaaaaatctcctgccaggacaaaggcatttgatctgatactaaaccttgggattcatgcacacctgctggagcctatgatagttgagaatgcaccacttattgagaaaagtgaaactgtgaatcattcttatatgaacaacgaatatggatcaagtatggatgaacagagggctacagaatctgaacaagagcagagggttagtcctgctattgatcagtttgagtcgtggcttctgaaaataatgtttgaggttcttcttctccttgttcagatggaggagcggcaagagattgtatgggcatcagctttgagctgtctattttattttgtatgtgatggaggaaaaatcattaggagtagacttggaggtctggacataagggtaatcaagactcttcttgagataagtgtggagcattcgtgggcaaaagtagtgcacagcaaacttatttgcatgctgacaaatatgttgtatcaagtatctgatggagctccaaacggtgccattgatacacattttcttcctgaccagatagatcgcgttggtggagttgactatatctgtctcgagtattcacgagccaactcaagggaggagaagcgggatttgttctttgttctatttgactatgtattgcatcaaataaatgaaacattcttggctggcggcctttcgacctacacttatgatgatgctcagccccttgcttcccttcttgcatgtgctgatgctccagaggccttctatatttctgtgaagcacggtgttgaaggcgttggagacatgctgagaaaagctatatcatcagctttgtcacagtcaacagaatatgagcagttgaatgtgcttctggacaaggttatcaggaaacttgatggaacagtcagcacattttctaggattgacactgagtttgcttatatgatccaagtaacaaaatcttacaagtgtttcagcagcattagagatggacatgaagatgctgatgttgcacttagagcaaggctttgctgggctactttgcactcacttcttaactcgcagatttcatcatataggcatcatggatatatttggttagttgaattgctcctttcagaaatcagtgaggaaacagatggttctatatggtctaaaatccaaaagctccaagacgaaattgaagttgccggaagccaagatttgtcatcctcagaagtttcattgcctgtttgtctgctatgtgggcttctgaagtcaaaacataacttcattagatggggatttctatatgttctggacaaatttttgatgcgttgcaaattattattagatgacaatgacatgcaagagcacacagttgctgatcatagcaaacatcgcctggacaaagcttttgcggttatagatattatgaacagtgctttgttgcttgtggtccaaaataatgagacagaccatattaacatcttaaagatgtgtgatatgttgttttctcaattatgtctgagactgccatcttcaaatgtgatgcatatgggtgggcttcaatcccttggtcaactttttggttgtacaactaagaacatcgagagccatctggaaactcttgcgtcgcatcaaaatgttggaaacaagaacttttgcaggagtgagacattgcaagacataagcgtaaatcaaactgctcaaaccactttactctccgagacatcaatggcagcactacttctgagaggccttgcgatagctcctatgcagcttgtagcacgcgtaccaacttcattgtttttctggccattgatgcaacttgaaggggcagctagcgatgatattgcattgggtattgctgttggtagcacaggtagaggcaatctccctggtgctacgtcagatattcgagcagcgcttcttttactcttgattggtaaatgcacagctgaccaggaagctcttaaggaagtagaaggcaatgaattcttcaggggtcttctagatgatacagactcaagggtagcatattattctgctgcttttctcttgaagagaatgatgacagaagagccagatacctaccaacggatgcttcaaagtctcatctcaaaagctcaacagtgtaacaatgaaaaactgctggagaacccataccttcaaatgcgtgggatactgcagttgtcaaacgatctaggagttcaataatcactcganatgtgctatttctgtggatagaagcatgggctagaattggtactttcaactatgctcattgcagtataataatctgtggctgtgttcctctgctccaaactatgaaaagatattagtgcaagtgcatggtgtaaattccttcgtccggatgcatgcacatgcctctgaagttcttaattgtttattataggatctgaatcacctgtcacctgcaagctgattacaggatctaagcgttgtggctacctcaatgaagtatgactaagtttgggcgaggtgcgcataaatgcgactctgcaattttgtagccaaccattaagattgagccagcgcaagtttttgagagggatgctgggatcaataatagtatgtgtgtttatttgcagcgttgttccaacgaaagtaacaagggtgtacatgtttgcatgctagtgttatttgctacctggaagaaaccaaaccttgcagatatcagtgaacttccagacaacttattattgttttcttctttttttttggaaaaattaacttgtgattcttagattcgtattgagagttaacattgtaaatgcgtagggtgaaacagaaaaattttgcttatggtaattgaatagtacatctcctgt

SEQ ID NO: 11509 - DNA, 1500 bp, Oryza sativa
  Clone ID: PAT_MRT4530_17727C.1
atggggtgggtgcggatgcgggtgcgggtgcggagcccgccggtgatgcagtcgaagctgctctgcctctccctgctctacctcctcaccacgctcccgctcgcgctctacgtctccttctccgacccggcctccgccgcctcgcgctgcctcgtcttcctccccttccgttcctccgctccttcgtcggcggcgtcggcggcgctgttcgagtacccgcgcgagtacggcgagcacaagcacgcgatccccgccacgcgcgcgctctgctccgaccccgccgtcttctcaggtcgatccctctccgtccgggaaggacactataagacggtcttagaagagatcaacaaattctgccgcaacctctcggcgtctccttatgcaaaaccagcattgcggtaccagaatgggaggaggaactcgttcgcgggaaatttgtccaccgttgagcggagatccttcttcaaccacactgatagcgcagttgaaattccatgtgggttcttcaaggaattccccgtcagagaatctggtgatttctttggccaattcgcatttttcatagaggagaaaattcttgtggcacacagattggccatggagaagtgcaatggcgtggtggtggcgtcggcgatcttcaacgaccacgacaagatccggcagcccaaggggctcggctccgagacgctccggacggtgtgcttcttcatgttcatcgacgatgccacccacagagtcctcgcgagccacaacatcctagccggcgagcgcggcgaggccggcacgatcggtgcgtggcgcgtggcgaggcttgtcgccggcgccggcggcgaccaccggctcccctacgagaacccggccatgaattgcgtgatcgtgaagtacctcctgcacaggctgttcccgaacgcgaggttcagcgtctgggtggacgccaagatgcagctcaccgtcgacccgctgctgctggtgcactcgttcgtcgccgggaagggtgcggacatggcggtctccaagcacccgttcaacctccacaccatggaggaggcgatcgcgacggcgcggtggcgcaagtggggcgacgtggattccatcagggagcagatggagacgtactgccggaacggcctgcagccatggtcccctatcaagcttccatatccgtcagatgtgccggacacggcgatcatcatcaggaggcacggcctcgccagtgatctcttctcctgcctccttttcaacgagctggaggcgttcaacccgcgcgaccagctcgccttcgcctatgtccgggaccagatgagccccaaggtgatcatgaacatgttcgacgtcgaggtgttcgagcaaatcgccgtcgagtaccggcacaacctaaagcgtggcaatggcggggcaggagggaagcagggcatcaccaggatggcatcctcgggagacatcgcagggagcagctgcgagagataccttctgaagatgtggggggagactactgaataa

SEQ ID NO: 11510 - DNA, 282 bp, Oryza sativa
  Clone ID: PAT_MRT4530_17728C.1
gttcttggagggctttatttaaagatgaaatgtgggactattcaacaatctcccccttcatacattggtgtccctcagccccttcaccgccccttcaccgtatccaggccccaccggcccacggtccatcaggatcgtaaatggcctttcccaccccaaaagctagccattgaggtgaggggctcccccacttatatctttaagtcctttgcccttcgacaaccaatgtgagactattcaacattactagtactagtcgccaacccgtgcgttccacggcta

SEQ ID NO: 11511 - DNA, 647 bp, Oryza sativa
  Clone ID: PAT_MRT4530_17729C.1
tttgtgtttttttttttttttttgacgtataagatttatccacatcaccacaaataaaacttttactcgtgatgacatggacaaatctctcacattcacttcataatcagacagtttgtcttacatataaagtttgcgctacatatttccccaaggctcccctcctactaatattatacacaacaccaccagatggcacacaatgaatatgaatcaatggcaatcagcaatcagtacatgtaaatgtcatgcctggattggacctacttgatttgtgtaggacgcagcatatacaaacacaacaacgttaattatagcttccaccatttcttgttctccattgatttcgcaagctcctgggccagggaagcaaaattctctgctccactctcaagctccgcggttcgttggcttattctctctagtttctcctgtcgctgcatgagcttatcttttgcatgagcagccgccgccgccgcatccccgccaaacttatatttggtgagaatttcttggtgagttctcattcttggcatttcaacattgcttgatccttcaaatagctttgctctctcctcctcagctgttgtttttttattcacatgagatgtgcgtgatgctggcgggggtgctagtggaatttcatc

SEQ ID NO: 11512 - DNA, 1018 bp, Oryza sativa
  Clone ID: PAT_MRT4530_1772C.1
cccacgcgtccgggaggggagcgggggctgtggtggcggcggcaatgcggccggcgaaggcggtggcgtcgccggcgaaggaggcggccggggaggtgaacggggcggcgtcgggggggttcgcgaggcccgacgcgttcgggaggttcgggaagttcgggggcaagtacgtgcccgagacgctgatgcatgcgctcaccgagctcgaggccgcgttccatgccctcgccggcgacgaagatttccagaaagaacttgatggtattctcaaggattacgtcggccgggagaccccgctgtactttgcggagcgattgactgagcactacaagcgcgctgatggcacaggccccatgatttacctcaagagggaggatcttaaccacactggcgcccacaagatcaacaatgctgtcgctcaagtcttgcttgccaagcggcttgggaaggaacgtatcatcgccgagactggcgccggccagcacggtgttgccactgccacggtgtgcgcgaggtttgggctgcagtgcatcatctacatgggtgctcaggatatggagaggcaggcacttaatgttttcaggatgaagcttcttggagcagaggtgagggcagtacattctgggacagcaactttgaaggatgccacctcggaggccatcccgtgacttggggtcaccaattttgaggacaatcactacattttgggatcagttgctggtccacacccatacccgatgatggtgagagagttccataaggtgattggcaaggagacccgtagacaggccatggagaaggggggtggcaagcctgatgtcttggttgcttgtgttggtggtggatcaaatgccatgggtctcttccatgagttcgttgatgatcaagatataagaatgattggagtggaggctgctggctatggtgtagacactgacaagcatgctgccactttgacaaagggagaagtgggagttctccatggatcattgagttatgtgttgcaggatgatgatgg

SEQ ID NO: 11513 - DNA, 272 bp, Oryza sativa
  unsure (1)..(272): unsure at all n locations
  Clone ID: PAT_MRT4530_17730C.1
gaaagtaagaaagaaagaaaagaaaaaaaaaaggaaaatcgtgtctcgtctcgtctcgtcttcgtctcccccnattcccgagcagcttctcgaaaccctcgcggcctcgattccngcgatggcngaccaatcccgcaagtggagagggaggtggaggtggaggaggtgaggnggccgaagctgaggtacttggagttngtncaggttgcngcancatngcnaccgatctncctcgcggggctctacgcgcttgccaaggaccacgccgtccc

SEQ ID NO: 11514 - DNA, 210 bp, Oryza sativa
  Clone ID: PAT_MRT4530_17731C.1
atggtgctcttggcgacgacaacggagatgatggtggctagggcgacaacggtaatgaccacaatgagatcgggaggagtacatccaccaccgatgggctcaaaaggggacgggggaggagtgacgatgttcgagaccggtggaggcattgaattaggaactcgtcgtggaggcgtcgacgaccggcgatcacagccttccactgactag

SEQ ID NO: 11515 - DNA, 1723 bp, Oryza sativa
  Clone ID: PAT_MRT4530_17732C.1
gcaagaggttggttttcccataggccttaatttggcaaactatggcaagttgtgattggcaaagccctaagttaaattattttgctctacaatgaaacaggcatgttgtacaataggctgcttgctatgcacatggaccactgtctctgccaatagacccgcatcatccttttttgtaactcagaacggagtaaaccgcctggatgacggtgcagacgaagatgacggccgccgccgcgaggccggcggcgagccacgggttggcgaagtacttctgcttcagccacgccatccaccgccgcggccggctctggaaccgccggtcgagcacctggcacaccggcctcaggtagttctggtcggcgtcgtccacgtcgaacacggtgcccttgcagagatcggcgaagcgcttggcgacctcgccgttgttgccgaggccgtgcacgatcacgccccgccgcgacagcagctccacgtccatcggcgtcgacgccagctgcgacatgaacacgcagtacgccgtcacgtggctccccgcccccgacgggttgctctgctccagcgctatcaggttgcggagcagccgccacgtctcgccgtcgatgttcagctgcggcacctccagcgtgccgccgccgccgccgctcaccttcacgtcgaggatgctgagggcgccgcccttgctgcggcgattgagaggccgtctcttgaacttcacgccgacgaagtagtactccatcgccgtgcgccatcggcccacgggcgcaccgccgccaccgacagcggcggcggatgtgagtacggtgggcgtgaagtgcatgtgcagcaggtgcagaagattggccggctccggccgccgttccggcggccccaccatggtcggcgtcgcgacggagtactgcttctgctccaagagttttccggcgaacctcgcgatggcgtccagcgccggagtaccgtggtccagaaacgtcatctggcggaccctctcgacgacgaagaacggaacctggttcgccgcaaggtagaacacgtcgcggaccacgtcgaggatatactgccggtcggcggcggatgctctcctcctctccaccgacggcacgacgcggttcccgccctgcacggcgccgttcgcgctcgccacggccgccggcgccgccgggcgtgggcggcgcccgacgacgtcgtcgacgtcgccgaagcggacgaggatgtagcatgcgtcgagcagcagccagcgcaggaactccttgctcggcaccacaccgaacgtgtggcggtagctgctcctcgcgcgggcctcgaggagctcgagctcggcgacgaagtccttcagctgcagcggcggcgcggtggagtacgccgccgccgcggcgaggacctcctgaagcgtgcgcagcttgtcgtcgtcgtccccggcgaggtcggcgttcctcatacggctgtacggcccgatgtagacgtggtgcggcaggtactcgtgcgggtcgacgttgcgagtccgttcgccgacctcgtcgatgatgatcggcggcgtcggagaagggtcgccgtcgccggccaactccgtcgacggtggcttcaggctagtgagttcagtactcagttcttgcgccagtattgaagggacgtcaatgacatgttcatcttgcatctccatatgtgcagcacaagattttttttcttctggtgttctgaagtatacagccgcaagaagatgagc

SEQ ID NO: 11516 - DNA, 993 bp, Oryza sativa
  Clone ID: PAT_MRT4530_17733C.1
atgaccatgattacgccaagctatttaggtgacactatagaatactcaagcttgggaggtgcaccacatggacgtcaagtcagcgttcctcaacacagctcagaacatggagtctacacacgtgccaccgccggcaagcgactgatcgtcggtgttggctgcatcacgcttggccaatctgcgtacgccaccaagatattggagaaagctgggctccaagactgcaatccaagtcagactccgatggaggtatgtctcaaattgagtaagaactccgattctcctttgatggattcgactttctactgcatcctcgtcgggagtcttcgttacctcgtcaacacccgccccgacctggcatatgcaatcgggtatgtcagcagattcatggagactcctagagaagagcatctctctgctgtacggcgtatacagcgctatgtggccgggacgaggaactggggactcacttacctcggtgggaaggaagaaaagcctagtctgctgggttatagtgacagtgacctagcaggcgacactgacgatcgccggagcacctctggacaaatcttcttcaccggtggaagcccagtcacctggcaatcctccaagcaacgagtggtggtggctctgtcttcttgcgaagcagagtacattgctgctgcggtagcagcatgccagggagtgttgttggcgcgactcctgactgatgtgctggaggctgatgcgcctgctccaaaactgatggtggacaatcagtccacaatttctcttgtcaagaatcctgtgcatcacgaccggacgaagcatgttgacatcaaatttcattatctccgggagtgcgcagaacaaaagctaatcgaggttgcgttcgttggcaccgctgatcagcttggggatatcttcaccaagtcactcggcagaaccaggttccacgagctgtgttccaagattggtgtttctgatcttcgtcaaaggagtagcaagaattag

SEQ ID NO: 11517 - DNA, 386 bp, Oryza sativa
  Clone ID: PAT_MRT4530_17734C.1
ggggcactaatgttcatcatttatttgaataaatccaaacttttagcaatttgacaatggccatatttacactcgagaaacattaaaaattgagagtaaaccaacaatattacaaaatacaagactttaagaactgcaaaaaaaagaaaaccttaaatatataaggcgtgcgcattacattgcaagtccacattcgggagaaaaaaagcgtttatctcaggccagtgctcctttgatatcttactttaaggatgtgcgaaaaactaatttaaaaatgaaagagaacatctcgtcaagcttattattaacctgaccggtgactgggttgaccgaaggctatggactggagctgcccatctggacaaattcaaaagaatgagtacccg

SEQ ID NO: 11518 - DNA, 349 bp, Oryza sativa
  Clone ID: PAT_MRT4530_17735C.1
cggttccaaaaaacccccaacccccaaaaaaaaaccacggggggctgtaggaaaaggccgccgggcccgggggggccgaaaattggttaggtgggccctcaaaaaccccaaaaaggggggggttaaccccccggaacaaggggagccccgtgtgcacgggccacccgttaatctccccggggcccaaccacgcaaggggatggtcccaacgcgggacggcaaacctctcttttaaaaaagcaaaagggggagcaaaaaaaaacaggaaaacccccccccccacccaccaccgggaacaaaggggcccccgatgaacgggggggggggaaaagggcccccgaaaaggggg

SEQ ID NO: 11519 - DNA, 4026 bp, Oryza sativa
  Clone ID: PAT_MRT4530_17736C.1
atgccggtgaacttgtaggcacaaggcctatggtctgccgtggagccaggagacaacgaccgcgtcgaccgtcaagcgctcgcggcgatactccgcgcggtgccgcctgagatgctgtccaccctcgctatcaaggagacggtgcaggaagcatggcaggccatcaagatccggaggattggcgtgcggcgcgtgcgcgaggcgaatgagcagcagctgcggcgcgagttcgccgacatgtgtttcaaggacggggagtccgtggacgacttctcgctgcgactctgcggccccgccaacaatctccacacactcggtgacgaaatcactgaagcagaggtcgtcaagaagctgctgcatgtcgtgccggagaacttgcagcagatcgccatctcaatcgagacactgctcgaattgacgagatgtcccttgaagaggtgactggccgtctgcgttccgtcgagcagcgcaagctgcggaagggcaacggcgaccacgtcgatgccaacggccggctactctacacggaggaaaaatggctggctaagttccgtaagtctgcttctttgctggatggcggacaaagcgggagctcctcctctggcggcaatggcggccgccagggttgaggacgtgggaagaagaaaacaatggcgcttccaaagagacccagcccaagtcaaacgacgcgggccgcaatcctggaaattgcacctattgtggaaagcggggtcactgggccaaggactgccgcagcaagcccaagcctcaacaggcccatgtggcccaagaggacgatgaagggcccaccttgcttcttgctcgtgcagttcctgttccgccactgcctcgcgctacgccggcgaccccgccgcagtctaagccgctggaggttgtgcaagcaaaggtcttcgcgtcactcgacgacgcagcagagcgaagccagcggagatggatcctggacaccggcgccaccaaccacatgacggggtccagatctctcttcgccgagctggacacggcaatcactggcaccgtcaagttcggcgacggcttggtggtctccatcgagggacgcgacaccattctcttcgcttgcaagacaggcgagcaccgggcgctgaccggcgtctacttcatccctcgcctcacggccaacatcgttagtctcagacagatcgacgaagctgggagcaaggtgttgatttaccacgaggtgctgcggatttgggatccacaaggccgcctcctcgtcagggtagatcggggcgttacacgcctctacaccatcgacctcgatgttgatcgcccggtttgcctcgccgcacggagctcggaaccggcatggcgctggcatgcaaggtacggccacctcaacttccaggcgctgcgcaagctatcccagaagtcgatcgtgcgcggccttcccatgctggaccaggtgaacaaggtctgcgatgggtgcctcgtcgggaagcagtgacgcgcaagctttccgtcctgctccaagtaccgcgcgaccacgcacctcaacctcgtacatggtgatttgtgtggcccagttgaacctgcgacgcccgccggcaatcggtattttctccttttggttgatgatatgagccgctacatgtggttaacactgatcaggagcaaggacgaggcagcctctaccatcaagcacttccaggcacgcgccgaggtggaaagtggtcgtaagctgcatgtcctgcgcaccgaccgcggcggcgagttcaattctatcgagttcggcgaatactgcgttgatcgtggcgtccatcgacaacttacggcgccctactccccgcagtagaatggagcggtggagcaccgcaaccagaccatcatcgccaccgcaaggagcatgatgaaggccaaagggatgccgggcctcttctggggggaggccgtctccacagccgtcttcctcctcaaccgctcgccgacaaaatttctcgctaacaagacgccttaccgggcgtggtatggcgagcgccccgccgtccactttcttcgcacgttcggctgcatcggccacgtcaataatgacaagccggggctgaaaaagctcgacgaccggagcgccccgatagtcctgcttggctacgagcaggggtcaaaggcctacaggctctatgatccggttggtgaccgggtacatgtgtctcgtgacatcgtctttgacgaggacgctgcctggagctgggatgccgcgagcatgggctcgccgaataggagccgttcaccgtcgaacacgcggtgagcacgaccaaggaagaagtagtgacgcccgcaagctctcccccgcgatcgcaatcgccaccaacgccggtttcaccgactccagaacaaggtatgcaagcaacggaggcggaagtggagcacgcctcgcctccatcgcacgactccatcctcgacaccgacgccgaccccgagaaacgcgagccgcgctaccgcacgctcgacaacatcctcgggccagcttcaccgtccggcatggcgacgcgcctgctcgaacaactcgagctccatgccgtgagcgccgaggagccatcgtcgctggctgaggctgaggctgaggttgacccaaactggaagggggcgatggaagacgagatgaaatcgatcgaggagaacaatacttggagcctcactgatttacctgcagggcacagggcgatcggtctcaagtgggtttacaagttgaagcgagatgaacagggggctgtggtgtgccacaaggcgaggctcgttgcaaagggctacgtccagcgacagggggtggactttgatgaagtgttcactcctgttgctcgcctggagtcggtgcacttactcctcgccgttgctgcacatcaagcttgggaggtgcaccacatggacgtcaagtcagcgttcctcaacagtgagctccaggagatggtatttgtttagcaaccacccggcttcatcaacgccaacgatcaaggcaaagtgtacaagctccataaggtgttgtacggtctccggcaagctccttgagcgtggaacgccaagctagatagctccttgttgtcgctgggtttctgttgcagcagctcagaacatggagtctacacacgtgccaccgccggcaagcgactgatcgtcggtgttgatctcggaacactcaaatactacctcggcatctaagtgactcaacgcagtggctgcatcacgcttggccaatctgcgtacgccaccaagatattggagaaagctgggctccaagactgcaatccaagtcagactccgatggaggtatgtctcaaattgagtaagaactccgattctcctttgatggattcgactttctactgcatcctcgtcgggagtcttcgttacctcgtcaacacccgccccgacctggcatatgcaatcgggtatgtcagcagattcatggagactcctagagaagagcatctctctgctgtacggcgtatacagcgctatgtggccgggacgaggaactggggactcacttacctcggtgggaaggaagaaaagcctagtctgctgggttatagtgacagtgacctagcaggcgacactgacgatcgccggagcacctctggacaaatcttcttcaccggtggaagcccagtcacctggcaatcctccaagcaacgagtggtggtggctctgtcttcttgcgaagcagagtacattgctgctgcggtagcagcatgccagggagtgttgttggcgcgactcctgactgatgtgctggaggctgatgcgcctgctccaaaactgatggtggacaatcagtccacaatttctcttgtcaagaatcctgtgcatcacgaccggacgaagcatgttgacatcaaatttcattatctccgggagtgcgcagaacaaaagctaatcgaggttgcgttcgttggcaccgctgatcagcttggggatatcttcaccaagtcactcggcagaaccaggttccacgagctgtgttccaagattggtgtttctgatcttcgtcaaagg

SEQ ID NO: 11520 - DNA, 134 bp, Oryza sativa
  Clone ID: PAT_MRT4530_17737C.1
ctcccataagaactcgaaaaataaaccgctctaaaggtcaaatcccacaattttgaggcaactcaaatacttttattgaatcttttctaatacaacctgacacaaacctgggaccactatttgtcctattgcat

SEQ ID NO: 11521 - DNA, 327 bp, Oryza sativa
  Clone ID: PAT_MRT4530_17738C.1
aaagggcaaaaaaagcggatcccctttttgggggggctttttgggggacatttttgggggggcccccccttctaaaaggggtttggttccccccggggaacccggacccaaagggggaaaaaccggggaaaaggaaccaaattttttttggggccaagggcctccctagggggaaacaagggtaggaaaacccccattggtcaagcaaataatttttcccaaactttgggcccaggggcctttaaaaaattgggggggtggcccggaaaaacaattgggcccctaaaaaaaaccaacgggccccttaaggttaagggttaaaagggc

SEQ ID NO: 11522 - DNA, 2999 bp, Oryza sativa
  Clone ID: PAT_MRT4530_17739C.1
cgcgcggcgggcccccggctccaggacgcccattcccaactcttcggcggctcactcgatcagcctctcctcctctctacctgcctggacaaagcggaggagggccagtcttcggagcccgccgattccggcggcaccagcccaggatgacagtgtgcaaactgcatctgggcataattcgcgaaggccaaacctttctttgcaaataccagctaggaccctggataaccaaataggcacttcagcgagaattaatatatcccctagccccagctcaacgagagcaggattgcccccgaggcctaattcaactagaacaaaatcttctctgaagagcatcattccgcaacagagtttcagggcgagaagttcagcacaggaaggtgatcgggcgatccttctggttcctgggacaccatcagaagggcagcaggataatacatcaacgttgagatcattttcttttagaaaagtcataaactcattatccgcaaaacgtacacattctttgccagtcacacctatagcaacttcagacaaaacttcttctccggcaaatcagatcaacaacctaccaaccacagatgatcaagatgttcaagcaagaattaggcgctcactttcagtaccaggaaatcgtaaaaacaggagtttgaggagggcggattcattaggtgtcatccgtgtgattccaacaactccccgacctatcccagttaatacaactgcatcaagtgatgggattgaggagacagtggatgaattggttcactttactgaattcttgacagttcctggagatggaggcaaagatatccctgaagaagaggcagtctgcagaatttgtctagttgaactaaatgaaggaggggaaacacttaaaatggagtgcagctgcaaaggggaacttgctcttgcacaccaagactgcgctgtcaaatggtttagcatcaagggaaacaagatatgtgatgtttgtaagcaagaagttcaaaatttgcctgtcactttgttgagaataccaactcaaactgctaataggcgagtaacaaatggtgctcatcaaagagcctctcaacaatacagttataacagattttggcaggacattccaattttggtcatggttagcatgcttgcatacttctgcttcttggaacaacttctgaatgtcccactctgctttttcttagcttgtgaaacctctctaaatggtgttgattctttaactgaaacagtaaccaagagttatctatgggcctatgcttcgttccagtttgctattgtgatactgtttgctcatatcttctacaatgtgttaaaagtaaatccagtccttgcggtcctactatcctcattcactgggtttgggattgctatcagtgcgaactcaatgctagtggaatacttgaggtggagatctaggaggaatcaacagctagctcaaactgtcgatgatggtcagcgacaagaacctggaagtaatgctgtaaatgaaaacaatggtgatagacagcaagcgcagcatcgagaatctggagataacatttgtaagtttagtagttctggtcgtctggtattacaaaattacatcacgaaaaatgtaggattcataggactgggaaatatgggtgcccatatggcgaggaacctggtaatggctggatataaagtgactgttcatgatgtcaatgagaataccatgaagaaattctcggatgatggaattcccacaaaactgtctccacttgaagtgtccaagtctagtgatgtcgtaattacgatgctgccttcgtctgcccatatgtttttcaggtattagatgtatacaatggacggaatggtttgcttgctaatgggggctgccttggaccttggttgtatatagattcatccacagttgatccacaaacatcaaggaaaatatccatggacatctcaagatgcactttgaaagaaaagaaagcctatgctgaaaaaccgatgatgctggatgctcctgtttccggaggtgttcctgctgcagaagctgggaaactcactttcatggtaggtggttcagaagaagcatatctagcagcaaaacccttacttctctcaatgggcaaaaaaacaatatattgtggcggggctggaaatggctcggttgcaaagatttgtaacaacatggcaatggccatcagcatgcttggagtcttcgaagcttttgctcttggtcagaatctcggcatcaaagctagcgttcttacagacatattcaactgctcaagtgcccgctgctggagcagtgacacatataacccagttcctggagtaatgatggatgtgccatcatcgaggaactatgatggtggtttcacctccaaactaatgaccaaagatttggatttggccatggcctctgcatctggagttggcttcaattgtccctttggttctcaggcacttgaaatttaccgaaagctatgtgctgatggctgtgaactcaaggacttctcatgtgcatttcgccacaactatgctggcaaagatgaaaattgatcttgtagctctgccacctaacttgccacctgttaaaataaataaagcaataaaaagttgtgtgattgaagtgtactcaggcaaagttggactatcctttgtaaagtgaattatcttaattgacgcctttcagcctgtaaaatcaaatccattggctcaaagcaaagctttctctgacatttgtactaaattgattttactgaggtattgtccctcttgtattttcagggctgtgtcaacataaagtgtactcttgctgcattcggaccaagtattccatactatgtgtaacaatgtaattagacataggcatcaagttctgtatgtatgatcagaaaatgtacaccaaggagagccctgtgctgttgtgcacatattgacatattgtacaaagaaatgtagcaatcgcattgccaagcaaatgacttgatgaataagaacatcagatttggcagaat

SEQ ID NO: 11523 - DNA, 173 bp, Oryza sativa
  Clone ID: PAT_MRT4530_1773C.1
gttttatccaaagggtcagcttctcttccacgtagaggatgatcatttaagaatgggggtatcctccagacaccaccggctgtgtttgcgacagacggttcgaaaagatcggacgaactaacctagctgaagaagcaccaacagcagacgtccattacagtggaggatgccag

SEQ ID NO: 11524 - DNA, 1507 bp, Oryza sativa
  Clone ID: PAT_MRT4530_17740C.1
cccgggctgcaggccggccgggccgggatcacatcgcgtcggagaatccctctcctcccgtcccgccgccgccgccgacgacgacgacgacgtccagccctcctccgtaatcccccacttgttgggcctgcaccttgtggtagccactctttaatcaatggagagcacagagcccctacaggatatcatgtgcgagtttcgtgcgggtaagatgtcccttgatggaacacgagtgatcccagacacacgcaagggtcttgttcgcataggaaggggtgaagaaggcttggttcattttcaatggcttgatcgtggacagaatctagttgaagttgatcaaattgtcttccctgaggaggctgtctttgagaaggtaacacaatcttctggaagggtttacatcttgaagttcaggcacgatagcaggaaattcttcttctggatgcaggagccaagtgctgatgacgactcacaaatatgtcgccaagttaatgcctacataaaccgaccattagatggtgaggcagtttctattgaagctgaaatgtcacatgaagacacagctgatgatgacatctcctccagagctgggaatttagttgatcagagcatgactgctgatttagctggtgaggtgacatctgctgctgggccagtacggttggaagacctgcagagaatactgagtgctatacagccatcagatgctgtggcagaccctgatgctggattaggattaggagacatcttgaagcctgatttggtgttaccactcatggaaactttgcccattgaacagttggcatcatatcttccagagggcccatggactgctggtgatattcttgaactattgcaaagtcctcctttgcggcagcaagtagaagcgtttacccatgtgctgcggactgggcaaatagatctagcacaatttggagttgaccctagtaaatataaattcacagtagcttcgttcctggaggctcttgaagactccgtggcaaaagcttcaggagctggagacaaggattcagagtcccagagaggcggtggaaatgatcccatggatgagagttaatgtcaaaatggtttggtttgaaaacttgatgaaacacaaagcgggactggacttatgttggcacgcacaggcctatttctagtcatttgatctgattatagatgcttgataggtggcatagacattttgaagctggctttattctgcactgcctgtgctgttatgtgtatacagggaggatacggtggtctagcctattttgcactggtgtatgctcagtagagtattaaaggtactggaccattgttaagtgtacttgggcgtcgtcgtcatataatggatggatggatcggctgatcgatcagctgggttgggcgtacgtctgcgcactgctcctcccagttcaagtacaaaaaaaaaaaaaaaaaaaaaaaaaaaaaaaaaaaaaaaaaaaaaaaaaaaaaaaaaaaaaaaaaaaaaaaaaaaaaa

SEQ ID NO: 11525 - DNA, 1506 bp, Oryza sativa
  Clone ID: PAT_MRT4530_17741C.1
atggcagaaactcctgctgcagcagcagccgtggaattcgggcctcatcctcatgacatgttgacgctcgacggggaacttttgcgagtgctcatcaccggcgacagggtccgcttggaggagattttgagagaagcgggtagctatggtggcgacggtgaacaccctggggatggtggcaatggaggatcaccacctcatgaagttcctccattggtggacgggcaccgcgaccctcgaagggatggcccggagctgatcgcgattaacttacccgatcatgcggcaccagccgtggtggtggaggcagggttgtcgttgagcccaaggagatcttacggctatctgaagagtggcgcctgcagcgcgacacggagcgggctgccttctcggagtgacgagcaacgggaacacggcctgcacctcgtcgccagccgcggccacgccgagctcgcggcgctcatccgcgtgagggcgccctcgctcgtcgccacgcgcaaccggtgcctcgacacgccgctccactgtgcggcgaaggccgggcaccgcgaggtggtggcccgcctcctagatacgcgcaccggcgtggccgaggctgaggtggagttggcggcggcggtggcggaggcggctctgcgggtgaggaactgcctgggcgccaccgtcctgcacgaagccgtccggcatggccataccgaggtggtgcatctcctcatgtcaagggcgggcgcggctgagctggcctccgtagcatccgacgacggcgtctcgccgttgtacttggcggcgacgaccggctcggtgcgcatggtccaggagctgctgcttcgtccggcggatgacgggagacgacgatcatcggcgtcgttcactggccgggagggacagtccaccttttcactttgtcctctgtacccgcgggaagggcacgttatcccgcacaacccaaccgctgtgacgtacatagttcttggcggcttcggccggggcactaggacgtccatcttcttccacttccgttatgatgtgccgaccctcaagcttcttcgctgcacctcgttgcccgcgtgccctcttctgtccaacggagggttgactaccactagcctcctcctcctggttcccctccacatccctttccacgtgcccctgctggttcccctccgcatccctctccacgttcccttcctcgttcaagtactgcgcttggcgcggcggcgtggcgacggcggcggcggcgtggcgttgcatgcggcggcggtgttgcgcggcggcgaaggcggtggtgtggcgtggcggcggtggcgttgcgcgcgtggcggcgaaggtggcggcgtggcgtgccggcggcggcgtggtgcggcgtcgtcgtggcgcggcgtctcgtggcgggcgagatgcggcggcggtggaggaggcggaggcggcggcgaggacgatgagctcgagacgacggcgagatacggcggcgtcggcgcggggatttgccctaggcagtggcggtga

SEQ ID NO: 11526 - DNA, 549 bp, Oryza sativa
  Clone ID: PAT_MRT4530_17742C.1
atggcgtcggcgccgaccggatccggtgccgtggtggccgaatccggtcccccagcgacaggcggtggcgtcctggcagctcggcggcgaggaggaggcaacgacgcctctagtcaaatctggctggcggtggttgtggctgccgacggcggcagtgacgggcggcggctgtggcggcatcgactgtggcgactggctggcgaggcagcggccgtggtggtcgaggcatcgtggaggcggtcgcgcggcctcgtgggcggcgaggcctgccgtgcaggcgtcgtggaggccggcgacgtgtggctgtcgtggaggccagcgttgtgcggcagcgggagggcgtcatggagaccggcgggagtgtggagtcgcggccggcgacatggagctcgcgggcagcgacagcgggtgctggtggctgcaggctacgacagcggacggcttgcggcgatggccgtggcgaccgtggacgtggctgcggcggaggaggtgaggatggcgatggcgaggtggctgggcatttggcagcagcggctgcgatggtggtga

SEQ ID NO: 11527 - DNA, 630 bp, Oryza sativa
  Clone ID: PAT_MRT4530_17743C.1
atggcgtcggcgccgaccggatccggtgccgtggcgtctagatccggtgccgtggtggccggatccggtcccccagcgacgggcggcggcgtcctaacatctcggcggcgaggtttggcggtggttttgggcggcggcgacctggagcgactggtcggcggcaacctggcgggagacgctgctggagctgcctccgtgacggcggcggcggctgtggcggtatcgactgcggcggctggctggcgagacagcggccgtggtggtcgaggcgtcgtgaaggcggtcgcgcggcctcgtgggtggcgaggcctgccgtgcaggcgtcgtggaggccagcgacgtgtggctgtcgtggaggccagcgttgtgcggcagcgggagggcgtcatggagaccggtggcggtgtggagtcgcggccggcgacatggagctcgcgggcggcgagagcgggtgctggtggctgcaggccgcgacagcggatggcttgcggcgatggccgtggcgaccgtggacgtggctgcggcggaggaggtgaggatagcgatggcgaggtggctgggcgttcggcagcagcggctgcggtggcggtgaccgcggtcaccggaggcatggcggcttcggacggctag

SEQ ID NO: 11528 - DNA, 147 bp, Oryza sativa
  Clone ID: PAT_MRT4530_17744C.1
atgccgggcagggcatcggcggcatccggggacaatcgccgctccggggaaaatttctgcttcggggacaagcacgacaatgccgatgcctccatcgtgcatctcctgcagcagcaccggccgggaggagctaggcagcgtggctaa

SEQ ID NO: 11529 - DNA, 1286 bp, Oryza sativa
  Clone ID: PAT_MRT4530_17745C.1
atgtgggacccctgtaccggcgtcccccgctggccagccttcgtgcgtcgaagaccgcgctacacccaccggcagcttctcacacagaggtcgcctcatccaccgccggccgcgcctcttgtgccaagccagcctcctccaccggacgcgcctctcgcaccaatccggcctccctccatcggctgcgcctctcgcgccaagccggcctccatctccgccgcccgtgcctctcgcgccgagccggccttcgctgccatcggctgcacctctacgccaagccggtctccgatccctcctccaaacgatgccatgccggccagatgcaaccgtctgccacgccctcggctagccgtccgaagccgccatgcctccaatgaccgcagtcaccaccatcgcagccgctgctgccaaatgcccagccacctcgccatcgccatcctcacctcctccgccgcagccacgtccacggtcgccacggccatcgccgcaagccgtccgctgtcgtagcctgcagccaccagcacccgctgtcgctgcccgcgagctccatgtcgccggccgcgactccacactcccgccgccacacgtcgccggcctccacgacgcctgcacggcaggcctcgccgcccacgaggccgcgcgaccgcctccacgatgcctcgaccaccacggccgctgcctcgccagccagtcgccacagtcgatgccgccacagccgccgcccgtcactgccgccgtcggcagccacaaccaccgccagccagatttgactagaggcgtcgttgcctcctcctgcatcgccggcgtcaccaccggctctcgccgcacctccaccgccgcatctgtcgtccggccgcgcatccgtgctcggtaccggaggcagctccggcagcgtctcccgctaggtcgccaccgcgccaggtcgccgccgcccaaaaccaccgccaaacctcgccgccgagctgccaggacgccaccgcctgtcgctgggggaccggattcggccaccacggcaccggatccggtcggcgccgacgccatgccctgagctcgtgccgtgccgacgtcccgaccgtcttggccgcgagtgagggaaagagagccccgtcgccgccgtccttgcagccgcccggctttgccggcggcggcgaggctggggaggggaggagaaaggcggggacggcgcggcttgttcgccgcctgcgtcgcccccgggatagggcgaccgggcgaggttttccagtccttaccgacgttttcaaaagagaaaagatgccacgcaatgc

SEQ ID NO: 11530 - DNA, 507 bp, Oryza sativa
  Clone ID: PAT_MRT4530_17746C.1
tgcatggcaggcctcgccacccacgaggccgcgcgaccgcctccacgacgcctcgaccaccacggccgctgcctcgccagccagccgccgcagtcgatgccgccacagccgccaccgccgtcattgccgccgttggcagccgcaaccaccgccagccagatctggctagaggcgtcgttgcctcctcccgcatcgccggcgtcaccaccggctctcgcggcacctccaccgccgcatccgtcgtctggccacgcctccgtgctcggtactggaggcagctccggcagcgtctcccgccaggtcgccgccgcctggtcgcgccaggtcgccgccgcccaaacccaccaccaaacctcgccgccgagctgccaggacgccgcctcccgtcactgggggaccggatccggccaccaccgcaccggatctggatgccacggcaccggatctggtcggcgccgacgccatgccctgagctcgtgccgtgccgacgtcccgaccgtcttagcc

SEQ ID NO: 11531 - DNA, 1375 bp, Oryza sativa
  Clone ID: PAT_MRT4530_17747C.1
atgtgggacccctgcaccggcgtcccccgccggccagccttcgtgtgtcgaagaccacgctacacccaccggcaactcacaccgaggtcgcctcctccaccgccagccgcgcctctcgcgccaagccagcctcctccaccggacatgcctctcgctccaatccagcctccctccatcggctacgcctctcgcgccaagccggcctccatctccgctgcccgcgcctctcgcgcggagccagcctccgctgccatcggctgcgcctctgcgccaagccagtctccgacctctcctccaaacgatgccacgccggccagatgcaaccgtctgccacaccctcagctagccgtccgaagccgccatgcctccggtgaccgcggtcaccgccaccgcagccgctgctgccgaacgcccagccacctcgccatcgctatcctcacctcctccgccgcagccacgtccacggtcgccacggccatcgccgcaagccatccgctgtcgcggcctgcagccaccagcacccgctctcgccgcccgcgagctccatgtcgccggccgcgactccacaccgccaccggtctccatgacgccctcccgctgccgcacaacgctggcctccacgacagccacacgtcgctggcctccacgacgcctgcacggcaggcctcgccacccacgaggccgcgcgaccgccttcacgacgcctcgaccaccacggccgctgtctcgccagccagccgccgcagtcgataccgccacagccgccgccgccgtcactgccaccgtcggtagccgcaaccaccgccagccagatctgactagaggcgtcgttgcctcctcccgcatcaccagcgtcaccaccagttcttgcggcacctccaccgccgcatccgtcgtccggccgcgcctccgtgctcggtaccggaggcagctccagcagcgtctcccgccaggttgccgccgaccagtcgctccaggtcgccgccgcccaaaaccaccgccaaacctcgccgccgagatgttaggacgccgccgcccgtcgctgggggaccggatccggccaccacggcaccggatctagacgccacggcaccggatccggtcggcgccgacgccatgccctgagctcgtgccgtgccaacgtcctgaccgtcttggccgcgagcgagggagagagagccccgccgccgccgtccttgcagccgcccggctttgccggcggcggctcgggcggcggcgaggctggggaggggaggagaaaggcggggacggcgcggcttgttcgccgcccgcgtcgcccccgggacagggcgaccgggcgagttgtagccgtggctggaccttctctgcggtagtagtggctaccaatttctgc

SEQ ID NO: 11532 - DNA, 648 bp, Oryza sativa
  Clone ID: PAT_MRT4530_17748C.1
gtggatccccgggctgcaggtgaatctcaactttttggatgtgtatacgagtacttgtattgtattttgaaaaaaaaaggttgtatccagagtactatgggcttgttcactttgctaccattttcaacattaccaaattttgataaatttaccaaaaaagtgactacatttagtttgatgctaaattttagtaactatataagaaatcataccaaaattttggcaactatactaaaattttggcaatgccaaaatttggtaaggttgaaaatggcatcaaagggcctgttcactttgataccattttcaacattaccaaattttggtaaagttaccaaaaaagtggctacatttagtttgctgccaaattttggtgactatataagaaatcctgccaaatttttggcaagtatgccaaaatttagtaaggttttttttttgcatcaaagtgaacaggcccaaagactggggtgagtgcagtattctcacgatatgtggaccccatagattcttggatgtacatatcagtactacacgtgtagagagttgtataaacatgatacacgttcctcttatgtttacttggattttttgtttaccgctttacatttagagaaaaaaaaacttggtagtacttcataatttcta

SEQ ID NO: 11533 - DNA, 1630 bp, Oryza sativa
  Clone ID: PAT_MRT4530_17749C.1
caaaaatcagtctgaacatctggagcatataaagttggtgatgcaagcattggcagcaaaccaactggtggtgaggctgaagaagtgtgattttgggctggacagggtgaactacctgggacacattatctcagaagatggagtgtccacagatcccaaaaagatctgtgcgatcaaaaataggaaagctcctagaaatgtgactgaagtacaagatattaagaggagttatgaagaggatgttttggcacacaagattttaagcctgattgatactgatggtgatccagaacgaaactataagtgtgaatctggattgttgaaattcaagggcaggatctatgttggggaaacaactgagattagacaactgctgctggaagtctaccacacctcatgttttggaggacattctaggatcagggcaacatatcatagaattaagcagctgttttattggcctagtctgaagaggcaagtagagcattatatcagggagtgccccacttgtcaggttactaaggcagaacatgttcacattccagggttacttaatcctctagaaatacctgatatggcatgggctcatatttccatggactttattgagggactaccaaaatctcaggggaaggatgttatcttggtggtggttgacaggttaacaaaatatacacatttcttagcattgtctcatccttatactgtggagcaggtggtacagatatttatggataacatacataaactgcatggaatgcctatcgccatagttactgatagagatcgggtatttaccagtacatttttccaggagatttttaaaatacataaggttaagctcagatttagcactgcacatcaccctcagacagatgggcaaacagagagggtaaatcaatgccttgaatcttatttgcgcagcatgacctttcaggaaccacagaaatggttttcttggcttgcattggcagaatggtggtataacactacatatcatacatccatccaaatgactccatttcaagctctgtatgggtatccccctccacaaattagtgagttttctattccctgcaatatttctgaagaagccagagtaactttagaagataaagcaatgatcctgcagaagttgaagggcagtatgggagaggcccagagaaggatgaagttttatgctgacaaggggagaactgaaagaaccttagaagtgggggatatggtgtatttgaaactacaaccatacagacaagtggctatgggaatcaggggctcattgaagctcaggtccaaattttatggaccattcaaggtcattgagaagatgggttcagtagcttacaagttgcagttgccggagggagctgggattcatcctgtttttcatgtaagccagctgaagaaacatttggggcctagagctataccaatgcccaatttacctgcagtaggacctgatggccaaatcaagactgaaccagctgctatcttacaaagaagaatggttcccaggcataatgaacctgtgatacagtggctgattctttgggagaatttaactcctgcagacgctacctgggaggacgcatcatacattcaagctgtgtttccaaattttcaaccttga

SEQ ID NO: 11534 - DNA, 279 bp, Oryza sativa
  Clone ID: PAT_MRT4530_1774C.1
atgggcaaggacttggcagtgggtggtgaatcgtggcgtgagtacggatcggaggcggaggcggaggcggttggttgtcggaggagatcacaccatattattgaatgtgacgacgccgaatattggcaccatattaaaattgaaagatcgacggcgtcggggacatatgggaagagagggtacatgtcagaggcagccagcagcaagcatgtgatggagaacaccggctacgaagaacgtgaattgattccaaagcatctagcacagaagaataaataa

SEQ ID NO: 11535 - DNA, 2506 bp, Oryza sativa
  Clone ID: PAT_MRT4530_17750C.1
tcagactgggaatgcattcttctcttctgatcttttgctgttttcagcatcattcatcctaccacctgagaagcccgcgatactcaactccagagattcggatgaatccagcatagagcccctaaaccctgaaatactggggtggaaagcttgcaattctaattcgttagtgttaatatcaaccatttccagataataaatagttgactgtgcctttttgatcttgatgagtacacgacctaggttcagataagtaaacgcagttccattgttggaggtgcttgctacaccaaaacctgtattgaaattctttgacacgaaaaatgcaatgtcctcggaattcttagacacatatactcttgaataatacaatgcaaatatccgtgcctcatctccggagatagggttaaatccacatagaatctcccctgcatgttttacattgggtgataaagtagcatattgctcaccatacaaaattccacttgatctttgagactctttctccgctgaatgaacagccattctccttggattgcataatttcagtcctggactttcattgtgctctgtctcagactgcgaatgcatgcttctcttctgatctttcgcagtgttgaagtacttcgacacgaaaaatgcaatgtcctcggaatcttcaaccttggaccacaacggattctcatcgaggaggttacacttgtagaccactatctcataccttgtccaggtagtgacccgtaaaatggcgccgacgaggtacaactcgccatttatgtccatgtagctacgctggcagatatgtgccggcggaggcatcaagagcaacaggctcgccgtgagaggagctacaccatcagtgttatcgacgctaaagattgagatctctccgagggagccaatcgcgacaaacctgtcccggcagtgcaccacacacgtcactgggtactcgagcttcgaatctaccagtgtccatctggcgtccccgagccggcagaaggcgaccaacgtcgagctcgcgagcacggccatggccatgcaatcgacacctctggagttccttggcgacgcagacaacacgatctcacggaagaagacatccctcatgttgctcaacttgatgggcttggtggcaccagaaatgtagtgcagaatccacgccccgtcgaccatggacaccgtcttgtaggacgccatggcgacgttcctgtcggccggcgggagcgcgacggcggcgccggtgaacgggttcagcagcgtgacggccgcggcgccgtccatgagcgccagccacccgtgggacatgccgcaggcgaccttgccgcgtacctcggggaggcgcaggtcgatggtggcctcgtcgtcgtcgtccatggcgcagtagaaggtgaccacggcggcgtcgccgtccggtgagtccggatcgaaggggagcatcagcatcgggtagaacgtctccagcggcagcgcggcgcaccacggcgagcagaccaggcggaaggaggcggcgtcgcgcccggacggcagcttcttggcgatgaactcgagcagcttccgtgggaggcccgagctccagtccggctccgatctcctctcagcaggcgcagccatggacaagaacagtatgatgcccaagaagatgctcgccgtcgccatcctcacctcctccgccacagccacgtccacggtcgccacattcatcgccacaagccgtccgccgtccgccgtcgcagcttgcagccaccagcacctgctgtcgccgcctgcgagctccgtgttgccgaccgcgactccacaccgccgccctccacgacgcctgcacggcaggcctcgccacccaagaggctgcacgaccgcctccacgacgcctcgaccaccacggccgctgcctcgccagccagccgccgcagtcgatgtcgccacaaccgccgccgccgtcattgccgccgtcggcagccgcaaccgccgccagccagatttggttagaggcgtcgttgcctcctcccgcatcaccgacgtcaccaccggctctctcggcacctccaccgctgcacccgtcgtctggccgcgccgccgtgctcgggtactggagccagctccggcagcgtctcccgccaggtcgaccacccaaacccaccgccaaacctcgccgccgagctaccaggacgccgccgcccgtcgctgggggaccggatccgggcaccacggcactggatctggacgccgccggtcggcgccgacgccatgccctgagctcctgccgtgccgatgtcccgaccgtcttgaccgcgagcgagggagagagagccccgccaccgccgtacttgcagccgcctggctttgccggcggcggctcgggcggcggcgaggctgggagggggggggaagagaagggcggggacggcgcggcttgttcgccgcccgcgtcgcccccggacagagcgaccgggcagcactgagcaagtgtgtcagtttatgcgataagtatggacaaaattgttttgtt

SEQ ID NO: 11536 - DNA, 702 bp, Oryza sativa
  unsure (1)..(702): unsure at all n locations
  Clone ID: PAT_MRT4530_17751C.1
ccggccgggctctccttcgctctcatcagctcgagccccgacagcaagtgtgagctactgaactcgagaccctcctgtcgcgcggcgcggcgcggcgagagtggccttttgatccgacgaagctagatgtcggaacagcaggatagtactagtaaaagctctagctcaagcatcagcagcagtacacaggagagcgaggaggaggtatctataacaataggtagcctcctcgcccaagcaaagaacaacagtgggcatagtcttggaaggcgcctctctcaattgggttcaatcccgcacactcctcgagttaatggaaaaatccctaatcttgataatgcaactttggatcatgaaagattgtcggaaaggttgggaaattatggtttggccgagtttcaaatagagggtgatggaaattgtcagttccgagctttggcagaccagatatttcgcaaccccgattatcacaaacatgtgagaaagttagtcatgaaacagctaaaggaattcagaaaacagtatgaaagctatgtacctatggaatataaagtctacttgaagaaaatgaanagatctgggnaaatgggggggatcatctgactttacaagcagctgcagaacaggtttggtgccaaaatttgtttgctgacgtcattcagagacacctggctaattgagatagtccccagggatgtgact

SEQ ID NO: 11537 - DNA, 1195 bp, Oryza sativa
  Clone ID: PAT_MRT4530_17752C.1
aattcgccccgacagcaagtgtgagctactgaactcgagaccctcctgtcgcgcggcgcggcgcggcgagagtggccttttgatccgacgaagctaccttttatcagtctaagaccctgccaatgtccatttggagataggatgtcggaacagcaggatagtactagtaaaagctctagctcaagcatcagcagcagtacacaggagagcgaggaggaggtatctataacaataggtagcctcctcgcccaagcaaagaacaacagtgggcatagtcttggaaggcgcctctctcaattgggttcaatcccgcacactcctcgagttaatggaaaaatccctaatcttgataatgcaactttggatcatgaaagattgtcggaaaggttgggaaattatggtttggccgagtttcaaatagagggtgatggaaattgtcagttccgagctttggcagaccagatatttcgcaaccccgattatcacaaacatgtgagaaagttagtcatgaaacagctaaaggaattcagaaaacagtatgaaagctatgtacctatggaatataaagtctacttgaagaaaatgaaaagatctggggaatggggggatcatctgactttacaagcagctgcagacaggtttggtgccaaaatttgtttgctgacgtcattcagagacacctgcctaattgagatagtccccagggatgtgactcccacaagggagttgtggctaagcttctggtgtgaagtgcactacaattccttgtacgcaactgacgatctcctaacccgcaaaaccaagaagaagcattggttgttctagggcgtctcacctcgagcttccttgagcttctgctgctgcagttcttttcccttcaagttagcagcatctgtggtgcttactagttttactaccatggcaacccagccggcactgcaattccctaacctgaaagaagagcttatgtacagtttaactttcagtagtatgtttcgcaaggtacaaacctggaactgtgcaactttcagatccatgagtcccatgttctacccggcgagatgtagttttgtttttgcatagtatattgtgatctatccaggtgcttgctttgtaaaatcatcatgtgagctggctagattttttaccatatataagcttcagttgaattctcgaaaaaaaaaaaaaaaaaaaa

SEQ ID NO: 11538 - DNA, 361 bp, Oryza sativa
  Clone ID: PAT_MRT4530_17753C.1
atggcgcagcaacatgaccattcaaccggtggcagcggcggcgaccactggcgagcacgttggaggcgagacggcgaccgcgggctagcgcggcggcggcgaccgcaggccgacgcgcaggaggcgaggcggcgaagacctctggccggtgcgcaggaggcgagacggcgacggcggtccagcgcggcggcggtgaccgctggccgacgtgcaggaggcgaggcggcgaccgcgggcctgtgcggcggcaaggagtgctggccggtgcgcaggaggcgagacggcgaccgcgggccagcgtggcggcagcgaccactggccggcacgaagggaggcgcggcggcgaccgcaggccagtgtg

SEQ ID NO: 11539 - DNA, 327 bp, Oryza sativa
  Clone ID: PAT_MRT4530_17754C.1
atgtggccactcaagctcgatgtcggcgccaccgctactcggaaggagataaggtcaccgacaccttggctcttccaccggacatcgccctatagctggatcctaccctcccaaggtcgcctgttagacccggtcctcctgtggccgcgagcgcctcctccatttccctcgacttccccgaagcagcagcagcaacatacgacaactgtgacgatgagggagagaggaggttgcgatggtggtgttgaagcaaaagcagcaataggcagtggctgcagcagcgagggagaggaggttggggcatcaaaacaacaggtgagcgactag

SEQ ID NO: 11540 - DNA, 577 bp, Oryza sativa
  Clone ID: PAT_MRT4530_17755C.1
ccacgcgtccggactctttttacactcaatctctactaacaacgtctgcggcggatcgacgtcaaacggcttacgggagaggccagtggaaacccccacaccgtcgtcctccgccgctcgtcgtacattgcatccgagggagggggatacatatgcatgcatgctcgcatatcgactttaattggtcaggaggtgcacatattaatattttggggttacgttagtagctgcgttggtattatcgaaggtataagtactcttgaaactatgatacttcgcagatgctagatacgagcacgagttgtatgtaccatgggaccctgtgcttcctacggatgctgttgagcagagaccaccatctctgtgctataccacgaaaggatgaagagctcgaactaaatcccgatgcactcgtgctagaggcgcccactcatccgatgggcgatataagaggacacttgactgtcttatgaatgatgcatgccgctcgtgatgcgacgtcatcatgccatggagaaaaacacgttacaaaacattgcacctgacacagcagcctaggcgccacagacagagggat

SEQ ID NO: 11541 - DNA, 1212 bp, Oryza sativa
  Clone ID: PAT_MRT4530_17756C.1
atggagcaggaagctgccgtgagagaccaggtggagctcaccatgcgcctcttccaccccctcctcttggaggacgagcacggcaccaccaccaacttcgccttctcgcggcggtcgttccacgccgccttcaccctcttggcctcgggcggggctggcgccacccggaagcagatcgtcgctttcctgggcccagccggcgcagacgcccacacggcgctcgcgtccaaggaggcttcggtgggcgtccacaatcccgaggtccgctccgccatggccgtctgggtcgacgcctctctccgcctcaaccccgccttcgccgacaccgccgcctccgtgttcaaggctgccgtgcggtcagccggcaaccccgcggcagcgagggccgagatcaacgagtggttcagtagccagaccggcggcttcgtcaaggacatcctctccaactccatcgacgacgacgacgacggcagcggcggcggcggcggcgccatctccgcctcggtcttcctcgccaactcactctacttcaacgcctactgggaccaccccttcttcccgcacctcacggaggaaggcgacttccacgtctcgccggaccacgacgtccgcgtgccattcatggcggggagccaccagcacgccttcatggacgtcggctgccacccgggcttcaacgtcctgcgcatgatgtaccgcacgggcggcgccgccggcggggacaagatgttcgcgatgtacatctacctccccgacgaccgcgacggcctcccggagctcgcgcgcaagctcgcctccaacccggccgcgttcctgcgcaggacgatcgtgccggcgcagcctgttgcggtcggcgagctcaagatccccaaattcgaggtgtcgctcaaggtggaggcgtcgcgtctcctccgggaattcggcctcgacctgccattcctccccgccgccgacaactcgttctcggggatgctgctggacccgcctcaggggacagccgtctcgtcccttctccaccagtgcttcgtcaatgtgaatgaggaagggaccgtggctgctgcgggcaccgtcggggagatcatgggcttcgccatgccggacgatcaaatcgtcgatttcgtcgccgatcaccccttccttttcttcatcgtggaggaggtgagtggcctcgtggtgttcgccggtcaagtcgtcaacccattgctccattga

SEQ ID NO: 11542 - DNA, 111 bp, Oryza sativa
  Clone ID: PAT_MRT4530_17757C.1
atgaggtctggcactcctgaacagcaaccagacaaagactttaaccttcatgtatactttgctggaccagatccatgggagggttactgctggctgtatggaccaaaatga

SEQ ID NO: 11543 - DNA, 3222 bp, Oryza sativa
  Clone ID: PAT_MRT4530_17758C.1
atgcccgccgacgaggaaacgccgctggtcgaggaatccaccgccgcaatcatctcccgcgccggggccgccgccgtcgcccgatcggcgtgcttcctcctcccccgcgcgggcgccaccgccgctgctctccccggctgtgccccctgcgcgggcccggttcttggcgacggccaccgcgtcgagttctgtgggtggccgtgctcgtccgccctgtggcggcggtgggtggagaggctccggccgcggcacgagccgctgtggcgggaggttgggatcctggacgccgtgctcgccaccgccgccgcgtgcccggtgcgccgggacggctggttggtgctccagctcgccgcgttctggtgtggggcgacgagctcgttcgccttcccgtggggggaggcgacggtgacgctggaggacgcggccgtgctcggcgggctgccgctgctcggcgcgcccgtcaccgcgcggctgccgggcacgctcgccggcgacgacgccgcgctcgaggccgtccgggcggcgctgcaccggagcaagtgtaagaactccacgtattccacgtggctccaccacttcctcgggcgcgacggcggcgacggcgacggagaagacacggaggcggaggcgcaatcgctgctcgagcacggcgcgttcctggccacgcggcccggccgctggtcttccccctcgccgcgcggccagagcgtggcgctcgcgcccgccgcgctcgccagcatctacaacgacctcaccgcgctcaagtgccacctcgcctccagcaccaagtggcgccacccgttcgtggcctgggcgccgctgcacgtcgtccagctctgggcctgggagcgcttcccggagctacgccccgacaaggcggcgacctctgctcacgccaccgccgacggccatggcgcgccaccgccatgggctgcccggtggcacaacgcgcgaacggagctccagccagcgcacatccacgcggtgctcatgtcaccaatggagtttgagtggaggccatacggaagcagtggcttcgcattgcagctcgacaaggttggcatctggattcatggccgggacattgcccggagtagggaattgttgtcgttcgcgcattgcctgcgcccctgcgagcttgtcggcctgcgctgcgtcgagcactacctcccgcaccgtgtcgcaaggcagctgggcttcgatcaggacgttcccgggaacgtcccccgtgccagctcaaattcaagtgttgcttgggcaacatacaagatggagcctcaggatgttaagttcactcttcctcgccatgaacccggtgtgacggttgagtatgcgcaatggtgggagccgtattcgtcggcgtgtgcggctgctgttgctaatgctgcaaagatgaagcaacttgatggtgttgattgtccaagaaaaaggaaggctgaaggttttgttgatggagactctggcaaaaggcggcatttggagattgcagaggatccagaggatgagatccctctcattgacagacagaacagtatcaccatgatggtgaacgggagttccaatcatgtggaaattgttggaattgggaaggattcgatggcaagctgggcaaggaatggtggaaatggatcacctctccataaaagtactcagcaagcttggtctgatgcagaggcagttttggagactacagttggtgaagatgaagcatcagaccatgttatcgcagaagataagaaaaacagcaatacaggagatggtgaatcagaggtctgttgcctcgtcgaggatgcagcaagcgacgacagcaacaaagccattggacctgcagcttcagttactcggaagtcaatacccaaagacgtcatggtgatcagtgatgatgaattcgatgaagaactctcaagcaaggacgatgagatgaatactatttatctgagttcagacccaatggaaacaacaaaatgtaccttgcaaaaattggatgtgaaaagggaggtggttatcacaggaaatggtgagcagggtagtccactattgaaggaagtaagggttcatagcaaatgttatgacatcatagagatcaatgatgatgagtctattgaagttacaagaaaggaagatgaggcgatcgcaatgcatgtgaattcagacccaatggaaacaacaaaatgtaccttgcaagaattggatgcgaaaagggaggtggttatcacaggaaatagtgagcagggtagtccagtattgaaggaagtaagggttcatagcaaatgttatgacatcatagatatcaatgatgatgagtctattgaagttacaagaaaggaagatgaggcgatcgcaatgcatgtgaattcagacccaatggaaacaacaaaatgtaccttgcaagaattggatgtgaaaagggaggtggttatcacaggagatggtgagcagggtagtcctctattgaaggaagttagggtgcaaagcaaatgttatgacatcatagagattgatgatgagtctggtgaagttacaagcaagggagaggaggcgatcacaatgcatttgaattcacccatgttggacaaaatagcatccacattgagagaggcaaatgaggaaagcaagccaggcaacacaagtgataagcgggaaaactcagtgttgaaggacatgccgcgaaacaattgcgattccgaggacgctaccgttctaaacgatatcaccctcagaaaagaactggctgaagtaactcatgtctctagtgctcaaattaatattgatacctcagaagcatccactaaagaaatgagggcatgcattacttcaggggaggcagataagagaggcaagctcaacaagaaaaggctagctgctttggaaggtgatgaaaaagaaaatgaagatatgtcagtatcaaaccaagaaataggatctcacatggattgccaagaagtcaataagaaaggaaacaatgaaagttcttctagcattctggtggatggaaatgctgatcatgtcaagaaaacagtttctactaagacgccctgcaaaaatgcagatcaagaaggtttccaccaaagcagcgaagtcggaatggaagaaatggttagaggggcatctgaagctcaacaagcacaaaaggctcaactggaagcagcaatcgatggtctcaaggaagagattgcaatgctagagaggcaggtcagggatactaaccctaggaaagcttga

SEQ ID NO: 11544 - DNA, 288 bp, Oryza sativa
  Clone ID: PAT_MRT4530_17759C.1
atggcggcgtcggctgccaagcgccgccatccacgtcgactgctaagcgccgccatccgcgtcggtgtcgacggccttggagcttgcagcggtggcggccaaggggtgggcgacggcgtcgacgcggcagcggtgttgacggccaggggtgcggccaaccgcgtcggcgtcgccatcgacgtcaagggcggcacatgcaccgtggcggcggctgcattcctcctcatctcgcgtttgccgtcggtgcccaacccgcccctgacccgccccgttgacaaccctaggtag

SEQ ID NO: 11545 - DNA, 164 bp, Oryza sativa
  Clone ID: PAT_MRT4530_1775C.1
cgtcctaatatacctattccttcaactccttttacattcatatttccatcctctccaccaaacccagcaagattttacttccatttacaattccccctacaaactcaaatccttcctctacaacatcaacttcaacctcttttaactatcgcttcatactcccc

SEQ ID NO: 11546 - DNA, 757 bp, Oryza sativa
  Clone ID: PAT_MRT4530_17760C.1
atggcgctgatcagtgtcaatttaggtataatgaatttatttccaattctaccgctagatggtggccaattagtcttgattgctacagaagccataaaagttgccaatggcgttattgcggcaccatttgtagtaaaagatattcgcattgatggtgttcaaacagaaactggcaatgcaattattgcatctctaccggttaaagttggtcaaactgcaacagatggagatgttactaatattgtaaaacaactttttagtcaaaaccgttttgagaatgtaagtgctgcacgtgaaggccaaacattagtcattaaagttgctgaacgtcctttgattaacaatttaactattaaaggaaacaatgcaatccctaaaaatgcattagaacaaaacttaaaggcaaatctaattgtggcaggtgaagtatatgataaagcaaaattagaagcgtttaagcaagctttagtagatcattatcacactatgggccgttatcaagcagatattcaaaccattaccactcccaacaataacggcagtataaatgtagaattaaatatcactgaaggcgagattgcctatgtcaaaaaaattaattttgaaggcaataatgcattcagttatgatgaattaattaaagaactagagattaaacctaatgcgccttggtggaatatttttgaaagtagcaaattccaacaacaagaatataacaaagatatagaaatcttacgcgatttctatatggatcacg

SEQ ID NO: 11547 - DNA, 416 bp, Oryza sativa
  unsure (1)..(416): unsure at all n locations
  Clone ID: PAT_MRT4530_17761C.1
acatgtatgccaaaaatatgatatgtgtccaattccataagtttgcatgcatgtacaattttaataattaactccattttgtacagctcatcagcaaactccatacacgtggcacgtagcgattggtctaacggtgtcgcgcaaggtagcttacctactcagctagcaacacgtctccatgccgccggctcgccacgccggccgccgtgggcaccggccgccggcggctcgggcttccgtatacgataatatctacggccgtgggccttgcggcggcggcggcggtgaccgtgatggtggtggccgtgatggtggtggtggtggtcgacntcnccgccggcgtcgtccgcggcgtcgtcggcgccgcgggtgctgtggcgtcgcttcatgaggaaggggatgcggaggtgggagtg

SEQ ID NO: 11548 - DNA, 1216 bp, Oryza sativa
  Clone ID: PAT_MRT4530_17762C.1
tcgtcctgattatcaagtacttagatcagcttttgttcagaggcactacccaaaccgtcctgattttgatttccacaagtacatggttcgtgctcttgagcatgattttaaagaagtagttggaatcagctggtacctatggcttttcgttattgtcttcctgctactgaatataaatggggtggcacacatacttctggctgtctttcttgcccttaattctcctactcattgttggcacaaagctggagctcataagcactaggctggcacaagaggcagcagactgcccagatgaagcaacaggaaacccctggacaaagccatgcaaggagcacttctggttcagcaagcctaggattgtcctccatttgatccacttcatcctgttccagaactcctttgagatgggttttttcttctgggttctggcaacatatgggtttgattcatgcatcatggagaacaagatttatgccctccccagacttgctattggaatcatcgtccaggtgctctgcagctacagcacgctgccgctatacgccatcgttacccacatgggcggggacatcaagctgcaggcgttcggcgagacggtgcacgtgtcggtgcacagctgggcgacggacgtgaggaagaagaaggcggcgccgccgccgcactcccacctccgcatccccttcctcatgaagcgacgccacagcacccgcggcgccgacgacgccgcggacgacgccggcggcgacgtcgaccaccaccaccaccatcacggccaccaccatcacggtcaccaccaccacgaggggagctccgcggcggcggcggcgccggacctggaggagatcgtggcgacgacgtcgggcggcgaggacgggcacccgccggcgccgccgccgccgccgcaaggcccacggccgtagatattatcgtatacggaagcccgagccgccggcggccggtgcccacggcggccggcgtggcgagccggcggcatggagacgtgttgctagctgagtaggtaagctaccttgcgcgacaccgttagaccaatcgctacgtgccacgtgtatggagtttgctgatgagctgtacaaaatggagttaattattaaaattgtacatgcatgcaaacttatggaattggacacatatcatatttttggcatacatgtactcttctgtgttatagtacaattaatgcaaattaaattgg

SEQ ID NO: 11549 - DNA, 202 bp, Oryza sativa
  Clone ID: PAT_MRT4530_17763C.1
gagcggccgatttttttttcgattcttatactccaccacaacaggggagtctcatggtaaattactggcataaggcctccagccgtagcatatatacgcaatggaccaccagctatggccctctagccttaaagaacaaattggtcgtaaccgttctagagtgaggctcctattgtacttgaggactatcatagggaacaaa

SEQ ID NO: 11550 - DNA, 500 bp, Oryza sativa
  Clone ID: PAT_MRT4530_17764C.1
ctgggctaggattcccgccgcgccccacccgtaccttgtattctctatagcggccgccctttctttttttcttttttttttcacctattctgtcctgacacttgtgtttgctttgcgtttagcttatcatgctgctctagcaggatgttattttagctattgaaacagttcggaggtcactttgttcagaagaattctacgccatttaccagtgctatgaatatattggtgtaaattatatcataaaatgttcacactgttttgctaggctagaaggtggtttttattggcccacacgcatgatgtgaaagatgctgttttggttaaatgttattccgatgataactgggtttactgaaggagcatcctacttacttaggttgagaactgtgagtagagctttttctgtccttacttctatgaggacaggcactcgggatatccagtctatatagcataatatgtatcactctcatgcatgcatatactggtgtaagctc

SEQ ID NO: 11551 - DNA, 784 bp, Oryza sativa
  Clone ID: PAT_MRT4530_17765C.1
atggagcacctttctattcaaaatctttatgctccaagggctgagttctgtgaggcaccattttctacaaaacttatccgttcatctggctatgaactccatcctaacattatagccatagttcgggaacaacccttctcggggcgcgaaagagaaaactcctaccatcatctatgtttagacaaggagtctgctatgtatctcaatatttccgtcggaggttcattcgcacacaaaacgaggtctgaaggagggaaactcttggatcacatcttggagaacacctccttcgctcattgtgaaaccatcatagaaattgaggatacacatgaggaatcaacgtccgaatcggagtatgcaacctccatatcccatgattcgaacgttgaatcctcacctgaaccacgggaaccgaaggtgatcgagttacccaaaactgatccaccttcacaaccactagttgagctcaaatctcttccttcaggtattcactatgctttcttgcatggtgatatggagttgccagtcatcataagagagaagctttttgatgatgagacctccaaactcacagctgtgttaaaaaaccttcgctctatgctaggttactcacttcaaggcctcaaaggcattagtcctaccctttgtactcatcgcactcctttagacccttcttgtgtgccttctcgagagccacaatgaagactaaataatgcatgttgacgaccgttaaaaaaaactaagctggaaataatcataattaaggataatatcggagtttcag

SEQ ID NO: 11552 - DNA, 2898 bp, Oryza sativa
  Clone ID: PAT_MRT4530_17766C.1
tttttttttttttttttttttttttttttaaatgggcaagaagccaaagcgctgtctcttgcgacatggctgcgacaacctcaggctaggatcgagaacggttgtttctttccttccaaagtgaccagataccaagagtcgcaatagtgtcgaacccactacgtggctccctaacaataatgagccgatgagagcagagccacacaaagagggaatcacaatcaaaggtgaattgcacgggcatcaaagtatagtatgaagtctagatccatctattgcacttgcaaataaaaactggggaagtgtactattccatactgtggaatgcagataattaccttgttgtgcaggtctgtataaaggtaccacaacacattttcatccgaaagaaacaattgctcttgtttgccataatgcatcgagctgttaatgtcaactactattatgaatggcaaaccgatatgggatcagtccaagagttgatgggtcatggtctggatgtggaggaagcaccgatggccagcggaatcgatcagaacctcaccatagacgactggaaggtcgagatcgtcaggcggagatgaaccagcgccggcagcttgcgatgacacctagcccacggtcgaggcggagatgccgaagaggtcggagtgctggcaaggctcaaatccatgctggcgcaaggacatgactacatgggaggggaagggaaaaagggcggcggatgctccaaaccgggagggagagcacgcgtacctcctcacctgtgaggcgctggatccaacagacgatgaaacttggacgacgaacggtggttgcggcaaagaagctcggcggaattagggagttagagggaggaaaagggatggcggcggaggaggcgacgcgcgtgaagcggccgcgctttcgtcgtcctcttgcccggcattgaagaaggccaaggctcgaaaagatagtccaccacagctggagggactcagcgcacctaatcagaatgtaatcgattgtttcttccagttggtcatagaagacacaataggttggataaataattcagtagctcagcctcagatgaaatatcagcagatgagcaataacttcgctcaaaacaagtttgccttttttactaattgttgtatccttgttcatcaggtgctaaaattcaatgggcaagaagcactgttttctgctcttcagagagtcaaagaagagttgatgcttctgggtttcatttccttcctgcttagcgtcttccaaaaatttatcaatcacatttgcatcccggagagtgctgcacatctcatgcttccatgcattactagagagacgtccgagaccacagaagatgcttccaaactttgcaagcgaaagggtgaagttcctatgctatctgaagaggctttgcatcagctgcacatctttatctttgtccttggtattgtccatgttgtattttgtgttacaacattgttacttggtggagccaagatgaaaaaatgggagaaatgggagaaagaaattcaacaaggaagaaccaaggagcgaccaaagaggccaggctggatgaaattcattgttgtaagatgtgccatctcattcttgaagcagttttatgattctgttggtaaacctgattatcaagtacttagatcagcttttgttcagaggcactacccaaaccgtcctgattttgatttccacaagtacatggttcgtgctcttgagcatgattttaaagaagtagttggaatcagctggtacctatggcttttcgttattgtcttcctgctactgaatataaatggtggctatcccctaaacttttcatttgcatccaatgcagggtggcacacatacttctggctgtctttcttgcccttaattctcctactcattgttggcacaaagctggagctcataagcactaggctggcacaagaggcagcagactgcccagatgaagcaacaggaaacccctggacaaagccatgcaaggagcacttctggttcagcaagcctaggattgtcctccatttgatccacttcatcctgttccagaactcctttgagatgggttttttcttctgggttctggcaacatatgggtttgattcatgcatcatggagaacaagatttatgccctccccagacttgctattggaatcatcgtccaggtgctctgcagctacagcacgctgccgctatacgccatcgttacccacatgggcggggacatcaagctgcaggcgttcggcgagacggtgcacgtgtcggtgcacagctgggcgacggacgtgaggaagaagaaggcggcgccgccgccgcactcccacctccgcatccccttcctcatgaagcgacgccacagcacccgcggcgccgacgacgccgcggacgacgccggcggcgacgtcgaccaccaccaccaccatcacggccaccaccatcacggtcaccaccaccacgaggggagctccgcggcggcggcggcgccggacctggaggagatcgtggcgacgacgtcgggcggcgaggacgggcacccgccggcgccgccgccgccgccgcaaggcccacggccgtagatattatcgtatacggaagcccgtgccgccggcggccggtgcccacggcggccggcgtggcgagccggcggcatggagacgtgttgctagctgagtaggtaagctaccttgcgcgacaccgttagaccaatcgctacgtgccacgtgtatggagtttgctgatgagctgtacaaaatggagttaattattaaaattgtacatgcatgcaaacttatggaattggacacatatcatatttttggcatacatgtactcttctgtgttatagtacaattaatgcaaattaaattggatataaaaaaaaaaaaaaa

SEQ ID NO: 11553 - DNA, 895 bp, Oryza sativa
  Clone ID: PAT_MRT4530_17767C.1
ctagtggatcccccgggctgcaggagagagtccatatagaaatacaattaggaaataactaaaattcggaattaaaaataaggaatattagaagtagggtatagactccatatagaaatacaattaagaaaaaaattcggaattaaaaaataaggaatattagaagtatagtatagagtccatataggaatttaaaactaactaaaatttagaacaaacataataaaattaaaagtagagtttagagtccgtataaaaatacaatttacaaataactaaaattcgaaattaagaaaaacataggaagaagagtttaaagtcaatataggaatacaatttagaagtaactgaaattcgaaaataaaaattaaagaatatcgaaagatgagtttagagtccacatagaaatacaattagaaataataaaaattcagaaataaaaataaataatattggaaggagagcatagagtccatatagaaatacaatttagaaatagttgaaattcggaattaaaaaataaggaatattagaagaggagactagagtacatatagaaatacaattaggaaataactgaaattcggaattaaaaataaggaatattagaagtagagtatagagttcatatagaaatacaattagaaaataaatgaatttcggaattaaaaataaggaatattagaagtagagtatagagcccatatagaaatacaattaggaaataactagaaattctcatattaatcggggaaaaagaaaaaaacatagtccatatagaaatacatttagaaatagctgaaattcggaattaaaagataagaaatattaaaagaggagacttgagtccatatagaaatacaatttaagaaatagttgaaattcggaataaaaa

SEQ ID NO: 11554 - DNA, 581 bp, Oryza sativa
  Clone ID: PAT_MRT4530_17768C.1
cccgtttggtggcatgggaggagggtggggtggcctgtgggccaatgctgactgggatgacggatgctgtgtaatgactctaccaaggcgatggttgactgcgatgatgtgctgtgggagagccacatggaaattggctagatggtggtgtgtgctgtgcccaaggctgagttgtgggacaatgcacatgtgcacctgtggaaaggagttgtacagatatggagatgatgtagcaagaagagctgagtgcagacgccaagtggccccaggtggtggcatgtgctgcaaaacctgcctgctgtatgaggagcaatgcttgtgtggtggtggaccaaaagtgtgcatgtgtgtgctgtgccatgctggtgagttggtgaggacctgcggtgacctgtgatggtgtgctgatggcccaaggcttgaccctgatgtgccctggggatgttggagggtgctgttggaaaactgcaaactccttggtgaataagtgtttggtgtggtggaacaatgatgcctgccggcccaaaatgcttgggtggaaatgtgttgcattgctggtgttggaaaaaaaaaaaaaaaaa

SEQ ID NO: 11555 - DNA, 656 bp, Oryza sativa
  Clone ID: PAT_MRT4530_17769C.1
tttttttttttttttttaatgcacaactatgatatcagaactaaatatatatctaaaataatccaaatgctggactcacagcagttgttgaccgtgacacgggcatctttgagttttagatcaagaggtatagcagtgctgtccggctgacgtgttggtgatgtgactacgggtaaagaaaaatgacatactggtctaaatgacaagcaaacataccgaacttgctaccaagggatccttcaaataaaggacagttgattcttgtgcatgcccaattcaaaactctagttcagaggagcatcttcatgctcccttctacgcaatcactcgagcagcttcacgttttgctgcaaattccaattcttctggtgtgaagggaagcggctttgttggggcaggcaggcggccaatgctatcaaccttgtctcgttgcttgggtgggggccttgctgctttaggtaaaagtcggcctttctttgcaaaccactcgggcttgagaagtgccctgaatccaaggttattatagtacaccagtcttaccgttccaccagctgcttcaactgcagcttttgccctagcagttgtccttgatacctcaaggtggatggcatttaatttcctctgtccacggcccattagtcgaatgcacgcgtggg

SEQ ID NO: 11556 - DNA, 2016 bp, Oryza sativa
  Clone ID: PAT_MRT4530_1776C.1
atggctaacaagaccgtccgtgaattcgttgctctctccgctgacaatgtggccattgggccgcagatcaacatgggagacgtggatttcgatccgaagtccagcctcatcatgatggcgcaggctagcccgttctgcagcaagcctaatgaggatgccaatgcttatctgcaacagttcctggagatctgcaacacgtacaccatgaagggagtcagtccatatgccgtcaggctgcggctgtttccgttttctctccttggggaagcgaaactgtggttctatgccaaccgtcctacaatcaacacctgggacaagtgttctacggcattcctatcgaagtttttcctgatgggcaaaaccaacgcccttcgcggaaggatttcgagtttccagcatacaagggatgagtccattcctgaggcgtgggaacaacttcaggaatatgtggccgcctgtcctcatcatgggatggacgactggcttatcttgcagaacttctacaatggactcactcccatgtctcgtgaccacctggacgcggcagctggaggagccttcttctcaaagacgcgaggtatacacaccgtcaaggaaacggaaatacttgttgccaagctggacctcttcatgaagcggttggacgaccacgaaaaaaggccacaaggtaccatcaaagccttggactcacacatcacgtgtgaagactgcggcagcatgggtcactctgggaatgattgtccggaaacccgtgaagaggtgatgtatatgggcaacaacaataacaacgagtatcgtccacaaggaggtcaggggtggaaccagccactcccatactatcaaggagctacattagtacctacaaatgaatctgggaggatcccagggcagcccgaatcctccgttgaaaatgtaaaggtaatcacaatgaggggacgtaagtccactcgggatccgccatatcctaaccctgcagggactagcagtatcaccaaggaagcgccatatagtaattcggctgatgaaaaggttcagccagagaagactatgccgcaggagtaccgcgacacccgtttgctgccgtttcctcaaaggaacaagaaaccgtcagtggacgagcagtttgctcgttttgttgaagtaatccagaaaatccacatcaacgtgccattgttggacgctatgcaagtgccaacatacgcacgttatctcaatgatatcctcaacaacaagagaccgttcccgacaacggaggtggtcaagctgacggagcattgcagcaacgtcatacttcacaagttcctagaaaagaagaaggatccggggtgtcctacgatcacctgctcgatcgggacacagcaattcgaccaagccctttgtgatcttggagcgagtgtcagcgtcatgccaaaggacgtctttgacaagctcaacttcacggtgttggcagcaacaccgatgcgcctgcaactagccgactcgtcagtccgttacccagccgggatagcggaggatgtgccggtcaagattcgggatttcttcttcctggtcgatttcgtagtgctggacatggacacggagaaggaaacaccgctcatcttggggcgtccgttccttagcactgcagaagacaacaatgacatgggaatggggagtatccgtttccgtatcaacgggaagcaagagaagtttgagtttcagccaaggaccaaacaatgctcgatggtcaggatcaactacgggccaaaccaacagaatattcaaatggtcgaagtggagccacccaagacggacagcctggtgaagttcatgcggaatttcctggaaaaggaaacaacgtttcccaggaaccgttattggaagacgccagtaaaatctagtacaccggccaagaagctagagcagctggctcagaggaagccatctccctcaccgaaaccaaagagggtgtggaaggaaaaaccaaagacgcccactccatcacctccggagacaggtggaaaatctgcaaactga

SEQ ID NO: 11557 - DNA, 318 bp, Oryza sativa
  Clone ID: PAT_MRT4530_17770C.1
atgatgccgctcctccccatccgctccggcgccgcctcctatgccgctgctgaacggggtaggttgacacggcggaggtggcgcggcgctggcgttcgtggtggcgagcctcgggaagggcgggtggcggcgctgttccggcgggggttggcggagtggtcgtcgctgcgtcgggtgttcggtgtcgatgccgtcgagagcgacagcttccccttccgcctccgcgacgtctgcgcagccacgtgctcgggcggacggccgcacagccatcaccgcggcttccggcagggtggcggccatgggcaactccaccgatga

SEQ ID NO: 11558 - DNA, 222 bp, Oryza sativa
  Clone ID: PAT_MRT4530_17771C.1
atgagaggcctcgctaatactacatcggataaggccccacaatacagccaggaggagtatatagaccagcttgccccatcccaagctgacaaccgcactccccaagctgacaaccctgagcaagcatgcacagttgtgcctcattacataggcatattccatggtaggtatgaaaccaaccctaaccatatggcctacacgccagcggcaccaaagccatag

SEQ ID NO: 11559 - DNA, 307 bp, Oryza sativa
  unsure (1)..(307): unsure at all n locations
  Clone ID: PAT_MRT4530_17772C.1
taaacagaccatatgaacaataactacaagcaacattatccccccggagggagcactatgaggtacctaaccaccaccactacccataagaggcaacaattccatangactattataccacctaacccataanngtataacnttataaggtaacacgacnaaattcaaacagcnacacatagaagcccaaagccaaataaacaaccacccaccnacnacaccgactcnataataggcacacatagatatatagcccatatanaatataagcatccatataatccataggcaanaacgattagccccc

SEQ ID NO: 11560 - DNA, 424 bp, Oryza sativa
  Clone ID: PAT_MRT4530_17773C.1
ggtccccctcccggcgccgccaccgccaccgcggccgtcaccggcgaggaaagcgaggagacgaagggcggacatgactgtggagaaggtggacgcaaccgtcgccgacttcgtctcccactttgacaagctcttcgtcgccggggacgacgccgagggcaaggtgaagctgcttcttttccttgtcgaccgcgacgtctcctccaaccaaacctggagccccgactgtaacgtgttggtgccggcgatctacgacagggtggaggcgactgctaaagggaaggagaaggacgtggtgctgctgcgcagcgttcgtatgttacatgaccacttggagggacccggtgcaccccgttggaggggttaccccgtgttcaagctcaccggcgttcccacgtttataagtgggagaacggtgccacgg

SEQ ID NO: 11561 - DNA, 645 bp, Oryza sativa
  Clone ID: PAT_MRT4530_17774C.1
atgacaggtatgagtggcactcaaaatcagcaacaccaacaaggtaacaataatcgtgtgcccgatgattcttattctaaggttaagtttaaaataccatcatttttggattattatgatgctgagaaatactttgattgggagatgacagtagagcaaaagtttagtgtctaccttgtgcctgagcaacatagaattcgacaaactactaagaagaaattgctagggcgtgatcaacaaagtcaagaacaaggcgagcacaaggattgccctagtcaacgggcatacattgctatggaagatggctacatcagcatcttcgacgttgaagatgatgaggaggaagagaggaaaaatggagagaaagacctatccatagctatatgcatgcttgaggaatgtttaattgaccaagcgcctataatttctgaagatgagaaagaaggtaatgataatggtgctacaactactcaagataaagataagttcaatacgctccatgacaaggtgaaaccgaggacagtttccaatcaagaaggggaggatgatgaggacacaactagctcggatataaccatgactaccttatgtattgatcaaccaaagaggtacttgcttgggcgaaagaaaagagaccgagcgtaa

SEQ ID NO: 11562 - DNA, 2013 bp, Oryza sativa
  Clone ID: PAT_MRT4530_17775C.1
gacaaagctaactccacagcccaccatggtgagcaccacggtatgccactcacgcggcacatcccaacggcgaagaattggccattagtctgaattctcactggaagacggaggcggcttattgccggagttgaaggagaggcaggcgtagcccccgcgcctcctccaccggccgatctccggcgaccggagccaccgccgctgagctcttaccgccgccaggcagccagctcttggcgatggaaatggcctccgttgcctggacaggagtacggctctgcacgggagcggccggagcaggtgaagagagatcgccggcgacaacgccgccgccgccgccgacgacgaggaggccgccatgagaaggatgcgcttctttgctctcagctcgagtgctcgctggctcaccgaagaagtcgaacgtgtccttcgggataagtttcagggtggaatttgcaaaagtgaaccacgccgcttcttctccatagtagagagggctcttgcggcggcggcgatggcggcgacggcgagcacgtccggcgagtggctgaagggcgcgctgcaggagctgcgggagcggatgggtggcgcgctggagctcgacgcggacctcatctcgggcctcgtctccttctgcgagctcgcgcctccgcccgacgccgctgactacctcgcgaatattattggagtagaagctgctcaggaccttattcaggagtacttgcagaggaggggttacattgatccattgaagggcaatgaaaacctacaatcatcaaatcttcagccttatgtgaagccttctgctgaagctgggcctacccaaaccaagaagcagacacgcacacaaaaagatgcagcagcatcttcttctggccagagttccaagaatcaaccagagactactgaaccccgagttgcctccaagagaggttcaaaaaagaaagcagtaaaggccatctcccttgctgaggcagcgaagggttctattgtcttcaagcaggggaaaccttgttcatgccaagcacgccagcacaaccttgtcagcaactgcttatcatgtggcaaaattgtgtgtgaacaagagggtgagggaccatgcagtttctgtggtgcacttgttctaatggaaggaagcacatatgctggtttaagtgatgttgaaattcctctttcggaagcagaagctgaagctgaagcatatgcaaagaggcttgttgactatgacagaaactctgcagcaaggactaaagtttatgatgatcaaagtgactactttgaaatggaaggaaatagttggctttcttcaaaggaaaagtcagacctaaagaagcagcacggggaagctcaggaagcagctgaaaaggataaagggaaagtggtcgtcacatttgatttggtgggccgcaaggtaattttgaacaaggatggagccaccgtgttggaatccgagcaccggatcttgggaccacctgaagagaaggatcagatccaccgcatacaagccaaccccacaatcagagagcagcccgtgttcatcgaaacagggccagtgaagccaaaaactgacagagctcgacagagcaagagactcaccaagaatggcctgtgcctggaggtaactgggaggctgcagcacgatgacaaggacccccagagcttcctgggtggcaagatgaagaagggtgatcatctggcgtacagttctttcggccaaccccgtgaaggggacgacttcgactgctcccaagattttgattgagcctaatttgcttgtggatggtgatggtcgatgggtgccttccattgtaggtatgtcatccccgattttggttcatactggttgttgagttctcagcttttacccagaggaggcaaaatacagaccaggctgtagaaatgctatcatacacatgaacacatccatatatacccatctccttttttgtaaggataccttggaacctattgaaaatgtgagaatggcacatttggttatctcttgttgccctt

SEQ ID NO: 11563 - DNA, 576 bp, Oryza sativa
  unsure (1)..(576): unsure at all n locations
  Clone ID: PAT_MRT4530_17776C.1
gaggacacacatctcatttgtcgtataacgcattgttcaaagagtacatacgtactccgtagtactttttattgatgcaagaagtttaaaattttatacaagctaaccgtgaacacacacatgcatgagcacacacacgctcatacacagctttatttatttatttatttatttatcatactggaccatatccagaaatacttgcatggacgtacacttgctagatgtatgcctatatcggggtttcagcttaaccgattgtgggggtctttgccactgtgtcgagaccagatgcgaacgcgattctcgtcgaactcttgagtgacgatggtgcctaccggaaccacctcaatcttgagatctggacggtctgctttgatcttctccttggcctccttgatcgtccggcaaactagctcgggccactccgtcttgggggtctcagaggaactcatctttcgncaaggaaacaatcgagatagatccaagttgcttggtaacttgaattgatcgatgcttcttctctgcagtgggttcttgcttcttgcaccgccctcgtgccgaattcctgcagcc

SEQ ID NO: 11564 - DNA, 1615 bp, Oryza sativa
  Clone ID: PAT_MRT4530_17777C.1
atgggcaaaaccaacgcccttcgtggcagaatttcaagtttccagcagacgagggacgagtccattcctgaggcgtgggaacgactccaggaatatgtggcctcctgtcctcatcatgggatggacgactggctgatcctggagaacttttacaatggactcacccccatgtcccgtgaccagctggacgcggcagctggaggagccttcttttctaagacggttcgaggtgccgttgatttaatagagaagatggtctctaatatgggttggagcgaggaacgactccaaacctgtcagcgaggcatgcataccatcaaggagacagaaatgcttgttgccaatagggatgcaagtggggcgggcttttttttcggcccacagtcccgccccacaaaaaagcccgcaaatttgcgggctggccatcccgcgtggaccttgcaaaattgtttggcccatcccgcacagcccattgggcgccacggcattagggcacagactgggagacgcgagacgcagccgcagcggcgcagccgagacgggagacgggagacggcggcggcgagacggcgccgcagcggccgctactctcgtcttcctcgtcgcccatccatccaaatccagcagccgacgccctccagtctcctgatccagcgaaatagcgaatccagtgcattccatacttcagttcttgatagttcttgatagatccatccaatccaaatcctgcatttccacttctcacggcagcatgtagagcgttgaaacctttgcatcctacatcagaggagtctgggatagccaacaacttctcgaaaatgtcagcaaaatctctcatcatcgcaatgaacatgggtgactcgttgtccttgttcacggctcgcgacagcgccggctctttagctattagctccagtgcaaggtccttgtggccgcaccgaatagcatggtgcagcgcattacatccactgccatcttgcttcagaatcacgtcgcccaagccagattcactgcaacatctgagtagttctgaagccaatgcagtatgtccgcttgtcacggcggcgagtagtggcgtctccccgtatgagttgacggcggcgaggagagacgactggttgatctcgagggcgtccttgcagaatttcaggtgaccgtggatacaggctatgtgaaggcagttgctcccgttcttagttgttcgaagcagcacgtctgcttcacgggcagccatgtcctccttcaacgttgtggaatcaccagatttggctgcttccaggagttgtctgtcgatatagatggcccgcccggcacggcctggcccaggcacggcccaccagccatcgggccggcacggcccgatcggcacttcgtgccgggccgtgccggcccatgggctgcgcctcccgcccaggaacgaccaccagccgtcgggccgtgccgggccggcccgaaggcgcgggtggcccatcgtgccggtggagaggcccaggcacggcccagtggttgagccaggccggcacgggcctgacccctgacgggccgtgccgtgcttgggccggaccaaaacgccgtgctgtgtgccgggccatcgggcctcgggcctcttggccat

SEQ ID NO: 11565 - DNA, 626 bp, Oryza sativa
  Clone ID: PAT_MRT4530_17778C.1
ggtggctcatcgaggaggccaggcaactcacacttctggcaagaaatcttggaggtgaaagagagcttttacaaattttgtaataaaattgtaggtgatggtaggaacactttattctgggaagatggttgggggtagacccctgaatgaccgatttcctgagttatataatgtggcagtgacaaagaaggtaactattgcaactttgaaacagaaggggattgattccgtaaagttcaggagatgtttgtattgtgagaaactcagagactggaacaaaattaaaaatagatgggtgatctgcagctgaatgaaaatgatagggataagatttggtggaacttgacaaaagaaggcagattcactgtgaagtccttttatagtgctatgaaaatggaacaagtaaactttccacagaaaaaaaaacattgaagatcaaagtttttatttggctgtttttgatcaaatttcaatgtattttgacggaaaaaaacagttactgaatttccttatatgtcattttgttctgagattttgacatatgcaattaaagcttttgagtagtgttgtttttgctagtattcaattacggataagtaggtttccaaaaaaaaaaaatacggata

SEQ ID NO: 11566 - DNA, 816 bp, Oryza sativa
  Clone ID: PAT_MRT4530_17779C.1
ccccctacccagatccctgggtctcctactggtaaggcttccttggggtaactcccagagccatagggcccgtagctctcttcctgggccttcttgccatatccagatccataccctgatccatagctctcctcctgctgcggcttggtcccataccctgatccatagctctcctcgacctgcggcttgcgaccgtagccggagccgtagctctcctcttcctgctgcttccttcctccaccaccgtacccagatccatagccggagccgtaggtgttctcctcctcggcctgggggcggaagccataggcgggctggggcttagatccgtagccagaggagccgtaggattgctgctgctcgtgctgggggcggtagccggaggaggcgtaggacggctgctgctgctgctcgtgctgggggcggaagccgtaggcgggctgcggcttggagtggtgggcgtagggggagggctcgtcggcggagtagtgcggggcgtcgtaggaggtggagggagcggagcaagggtagcaggtctcgtcggagggcgggagcgggcggccgaaggtgatgaagaggtcgtagccgccgccgtacggcgtggggtcgtactcgtcgaagtcgtcgggctcgtcggcgtggtccctggcgccgccgccgccgcggtagtacccggtcgccatggctgcggcggtggtggtggtggtaggagatctgtgcgctagtgagcgaggcgtgggatggagagggagagagtgaggcttggactttgggaagaaggggggatcggatcggacgcgtgggcggacgcgtggg

SEQ ID NO: 11567 - DNA, 408 bp, Oryza sativa
  Clone ID: PAT_MRT4530_1777C.1
tatcagttaattcctcgcgccacaggccaggggcagctttttagcgcggagttcgctttaagccacacgggcggtgacaccaagtgccgggagccagcttccttctcctggctcccgcctcgccggcgccagagcagacgccggcaaagccgcacggtgacaaggacggcggcggcggagcctactttttctctctcaaggagcacgctggggcaccggcggctctggagcgactgaaggcggctgcggaggagcccgttagatccacgccgctcaggccgaatctggcagtgtggcggttggcggcggtgaaggcgaccgccgcgggggtgacgacggctatggcgaggggccttgggcgacggggacgaagatggcggtcgtcatggagacggcggacaggcttgg

SEQ ID NO: 11568 - DNA, 910 bp, Oryza sativa
  Clone ID: PAT_MRT4530_17780C.1
tggtgactatgatgttactatggatggaattcacgagaactttctgaaacttaattatcatgacccgatgttgcaaaagacgcctcctgttgccataactataagccaactggttgctcaagttgagaaaccaaatattgaatggccaaaatctttgcagaggtgccgaacaatgcttttggaaaagaaggataaactgaagacctggcaaaaccaaatgtcaccgctaatttctaggcacctgtcagtagaatcttttgtggaggacattgcttctcccttcttacatattatttctccatcgagcttgagacctgtggcactgaatttgctgtcagagagagaaaaggatgaacttgtgcagctagttgataccatggtttcttactcaattacatacagaaacacaaagttagagcctcaagaaaggataagtggatctatggtgtctcctgatgttccttcactttctcttgatcctgcaatcaatgatattataaacttcaaggtagagaagcaaaagatcatgaaagatagtgctggcaaattgttgaaccaagccaatgaaggagataagagaaatgaagtttccgtaagtgagaaaaaatctgcattggtttctaccaagagtacctccaagagcaacccgactacacttaagatgcaattaagctcagcatctagtatgagtggtaaagatcctgcacctgcaaagaagcactccaaccacggaattaatttctttgataggtttagaaaagagagaccagtggatgcaaaagctcgaaatgacgcagggcaacaagtagctacaactctaagagactcgcgtccactgatcttcaaatacaatgagggcttcacaaatgctgtaaaaagaccagtgaaagttcgagatcttctgctctag

SEQ ID NO: 11569 - DNA, 1715 bp, Oryza sativa
  Clone ID: PAT_MRT4530_17781C.1
tttttttttttttttttttttttttttttttttttttttttttttttttttttttacaccaatcatcccaagcaaagaaatgataactgacagagtgattgtttagacatgcttcaaacataaaaaaacacgcgcaaagccacaatttattatcagtgttgaagcgacatcatactatcatggagacggataacaaatagtgtccatgagacgaacgatgaaacgactgagcaggagcatcttttattcacgcagagtactatggctggcaagtgatagcagcaatcgatggccccgtagaagataacgcaccggaagcttaatcatcgtactcctggcggcgatggtggtggtgcttctgataacgctgcttcttttcatcatcagagtcattgtcatcatgtttcttgcggccgtagcctccctggtattcgtctcccccgccatagctcggcttgttgtatccaccactctcatacgcaggcttctcgccgtacccatacccataagaaccctgcgtctcctcctgactgtaaggcttcggcttggggtaaccaccagagccataggtcccttcactctcttcctgggctttcttcccatatccataaccagaaccaccaccatagctctcttcctcggtcttcctgccgccatagcccgcggaaccatagctctcctcctgagccttcttcccatacccaccgccaccatactcctcctcaccctgctgtggcctgctcccataccccgatccatagctctcggcctgcggcttgctgccatagccggagccgtacttcgatccgtagctctcctcctggtgcggctgcccctgctcgccggaggcgcagtagccctagggctcctgctacggcccctgccgggggtcgtactgggggcgctagcgctcggcctgctgcggcttggagccgtaggcttaggggtagggctcctcggcgtgggagtggggggcgtcgtcggaggcgtagggctcctcgtcgtggtgggaggttccgccgcaggcggaccgcgatccgtagccggagccgtaggggttctcctcgtcggcgtgggggcggaggccgtaggcgggctggggcttagatccgtaggcgtaggagccgtcggattgctgctgctcgtgctgggcggtggccatggaggaggcgtaggggctgctgggctgctgctcgtgctgggggcggaagccgtaggcgggctgcggcttggagtggtgggcgtagggggagggctcgtcggcggagtagtgcggggcgtcgtaggaggtggagggagcggagcaagggtagcaggtctcgtcggagggcgggagcgggcggccgaaggtgatgaagaggtcgtagccgccgccgtacggcgtggggtcgtactcgtcgaagtcgtcgggctcgtcggcgtggtccctggcgccgccgccgccgcggtagtacccggtcgccatggctgcggcggtggtggtggtggtaggagatctgtgcgctagtgagcgaggcgtgggatggagacccacgcgtccgacgcgtggctacaaaaagacagcatgaactacttagcacggaatagaaaccatctacttctcatcctccggtgtaaagtctacattgaagatacattagaacagctctgcacaacagaagcacaatggcaaatgctcttctgagcctatgaaaattgcatcctcatcagaaaat

SEQ ID NO: 11570 - DNA, 339 bp, Oryza sativa
  Clone ID: PAT_MRT4530_17782C.1
gaacggcccatgtgaactcggcgagagggaggctggctggggacttgcccgctacgccgacgtttctcaggacaacgggctggtgtcgattgcggagcctgagatcctcctcgcggtgagcatggcatccacaggaccttctagggggcgcacaacgtgtgggcggagaccttgatctacatggtccagaacaatgcgatggacgaggtcatgatgttcaagccaagcttgtagacaccaggggtcaagggcaaggacagggtcacccatgagcaggtcttggactacaccatgaggctgctctacagaaggatcaccacggccgtccccggcatcatg

SEQ ID NO: 11571 - DNA, 186 bp, Oryza sativa
  Clone ID: PAT_MRT4530_17783C.1
atgggtggtgtggaggccgcgcggctcagagacggcggcggcggcggcggcggcggcttccggtttagcctgcctgctcggctgcccgactgcccgtgcccgctagtgcctggtccactaaccgtgggccacccaggtcacattgggcctgctctaccacaggcccaactggagccacaactttag

SEQ ID NO: 11572 - DNA, 368 bp, Oryza sativa
  Clone ID: PAT_MRT4530_17784C.1
ctaaaacaaatccagagtttagtatcacttcatttttattttagggttggttggaaccatgccaccctatatacataaatttgagatataccacccgcttctaaatgacttataagacccacatgaatcaataacatagtcgggtgagggtgggctatcacaaatttcgaaatattggtggaacctgggtcataatctcggttttttttttttctgtgacgacggctgagtatgcgtccgaactgtggatatatcacttactgctgacttgccagctcattttccgactccggcttgtgctgactgagagagctgatcgcggttctgaacaattgcaagggtaccaaactgcgcagatccgcgcccgc

SEQ ID NO: 11573 - DNA, 173 bp, Oryza sativa
  Clone ID: PAT_MRT4530_17785C.1
atgcagacgtgcaaggggatacaaggacggcttgtggctatttgcataaaggcgggttcgcccccgtccctagcaggcaacgggcagcccctatctcgtgccgcggtgaatccggaagccgatcaatcggacaccccggccgacccaactccatcacgcccaccctcgtctgg

SEQ ID NO: 11574 - DNA, 386 bp, Oryza sativa
  Clone ID: PAT_MRT4530_17786C.1
tcgcaacaaacaaaagaggaaaaaacacatatacacttatagtgatggtctgatcagatcatcagtggctagcaagagacgatcgttggcagcgtacctcatggcaggcatggcggccatctctagcactcacctgagcgaatcatacatgacggttagggacaggcagtgccaatggaaggtgcatgacagcccgattgactcgtgctcggaagtgctagaccggtaattcaccggtcgtgagagggttcagccgatgttccgtcgtccgagcacgctcggcctgaggatgcatggttggcagaagatgcatgacgtgagcacgaagtgcacgatgaccaccatcagccttatggcgaggagctacgaggagagtatgccgatgt

SEQ ID NO: 11575 - DNA, 345 bp, Oryza sativa
  Clone ID: PAT_MRT4530_17787C.1
gggccagtaaaggaaacattatcatcatatcaaggggaaggccataagtcatacaatacacacacacataaaaaagggctgggctgttgatacaatggggcctacgcattaatttatttttagacaagggcaatttaaaaaaacagatggatgccgggccgcctacttttacttggatctggctaaatcggaaaggggaacatttagaactggaaggctttcttcttggacttcccgtccttttccgggttccttttccttttggttggattttccggcaccatgtcgttgaaaatttccttttggttccggagcttatcctcctccgggggttccttggacttg

SEQ ID NO: 11576 - DNA, 852 bp, Oryza sativa
  Clone ID: PAT_MRT4530_17788C.1
accaccccacgccatcggaggagacgctcaaactaccgagctgcccaatccatggcggcggcggaggcggaggcggccggtcctctccggcgggctctcttcgtcctcgccgtgctcgccttgctgctggtagcggccccggcggccgaggcgtggacgggggagatccgcggccacgtcgtctgcgacgtctgcggggacgccgccatcggccccgaggaccacgtcctcgaaggtgccgaggttgccgtcctctgcatcacgagatctggtgaagttatcaactaccaggccttcacaaactccaagggtgtctacattgttgcggagacgatgccagagagtgaccgttgggagtcatgcttggcaaggcccatcagcagctttcaccagcattgcactaagaggggtgatacacactctggggtcaagttcacatacagcaagccttcaggaaactctcacaccgtcaagacgttcctctacaagcctgccaacgcccctttgtactgtagctaaacgtgttttcatttgtttgcgaaagaaagaaaagaaatatatagaattgatatggcttcctgcctggacatggtacaaacaaactgtaaacaaggtgtaaccgtgtaaagtatggatagctggggtgcttgtaattctcatatggagctcttaccgaacatcagtaactggaagaaaggggattttgcatgtttttgtaactatggatctataagtatgtttatactttataatcttggaccatgttgcgtccgttcaaatcatttcgagcaaagacttgaattctgttaatacaaatgagccacaaggcccaagggaccaggccttgccttg

SEQ ID NO: 11577 - DNA, 1161 bp, Oryza sativa
  Clone ID: PAT_MRT4530_17789C.1
atggggggtggccgagccggaagacaacagcagtcgatccggacgacgcggatgcagaagacgggggcagccgagccagacgacagcggccgtgcggcggacgacgccgccgatgaggtgagattccgcgtcgacgagagcggcgccgcgccggaggggacgaagtgcgacgtgcagccggcggcaacgatgatgcagcggggcttcgagaggacgagaaggcggactgatggaggagacggcgccgaggaacggctgaggagccgcgttggggaagaggcgtcgccccgcgccgggaagaagatggagggatgcgctgccgccgcatcaacagcatcgatcccggccgccgacgcgtcgatccgcgccaccgcttctatccgcgaagatgccgccgctcaatccctgccgctgctgctcgaggaaggggaatgggaggacgggagggggaagggaaagggaggggttgatggccctgcccccgcctccgcctccatagtggcggttctagcgctgccgagcacggatccggccctcccttggccggatctggtgctcccaccggcgggagtcgtgtgggacggtgggatccgccgccttcccggccggcagcgacaacgccgcggcctgccaaggagaggtaggggctggcgcgccctcgccggtgcggagacggcagccgtgacggtgtccgatgccatcatcgggacggtcagcaacggcgggaggccgtgcggcgcggcgaggcagagcggcgcggggcttggcggtgacagcagcgaaatcccccagattcgtgccaactcggctggatctggacggcggctggtggtcgcggctgtgacggcggcagcagctggcgacggcgacagctgcgacggacatggcgtcggggcggctcctagctgcttgctggtggacgttttgctggtggaggccgactcctttccctttgctggtggagggcgacggtgcagcggcagtttgcggaggcggtggctggcgtcggtggcagcagcgacggcggccgtgactgtggaggcggtggcgatgttggtggcggggaaggagtcaggtgcgaggcgaggatggcaacggcgaggtggctgggcattcggcagcagcggctgcagtggtggtgaccgtgtctgcggtcactag

SEQ ID NO: 11578 - DNA, 1674 bp, Oryza sativa
  Clone ID: PAT_MRT4530_1778C.1
ttagtttgagggcggacatacgttcagatgccatttgttgcccaaaagaatcatatattgtgaaacgtagggaacatcacgaaggtttcccagtgcatcatcatcatcatcatcatctgaaaccccaccatggcgcagtggcgatcttccgcagcgcaatgtcatggttcctcacgctcgactccatctcctccatctcggcatcgatcttcttcagcacatccttcactgtcaacatcatggactccagagccttcaccttctccccagcacgagaccgctcaagcttcagctcattgtacttgctacactccgatggatccctcggttgctcggggaggccgagaatatcgtcaacgcgcttgagcaagaacgcaacattcattcccagcaggtcgaatgactgcagcgtcttcttccagatcaggaagtcctcttgcgaggaggtacccgccccgcaggccctgatgccctcagcgatgttgatcgtctccatgatcacccccacgacgagcgtgaggctcagctgcctcagcagatgcctgtggaggaacgacttctgggcgcagcacagctcatagtacgtcctgcgctggtgatcggggaacttgcagtcaatgaccaagccgtccacgacgatgttgaagttactgtagctcatcacgtcgtcaaagctcatctctgagtctgaaaacctgatgccgtctattgcttcatgaactagattctgggtatcatcatgagccactttgctactgactctagtagtctctggatcctccttaggcttggtggcattatcagtagcttctttagatatcttccgtttcttgcaggcgtaaaaactcttgagaccgggtgctctgtcagttgggctgatgtttttatctctaattatatgcacaagctcaaagaccacaacatcgccaaccttgatatcatggttaatcgcaaaacctctccatccagcactgagtccctgcttaccacccaggtaatttgtgttatggttgttcccattctcatcttcgagcacaatgtcagtgtcatgctttgggagatacttgttgcagaagccagctggtagacccagccaaaatccgctgacaacatgtgaatgtaacatatgtttaacaaagctaggatgctctgctggtaacttcgtttgaatctcttgagctctcttcatagcagatccacagaacgcctgaacactagatttttttggaagataacttgcacatttattttggcccttaactggcacttcagtggtgttagtgcgtccattgctagtgttctgggtattgcatgtttgaggaatgccaggaaccgttctttgctcattttccacctcctttggcatcagcattttcaaaggaacaacctccatcacgtcatccgtatcatcttcatcacaatcaattattatagccctcggcccaatatcgtcatccctgtcgctgccactgctgctgtcaagtaaggcgagcctttgatggactagttccatcttctgctccatcttgttcttcgtgttcttggaacctggtggtctccctctctttttgatgggctgatctatcgccatcggccggcggccctcgggttgatctctccgaactcccgctcacctcgattccgaagtttgtggggactttgcggacgcgtggg

SEQ ID NO: 11579 - DNA, 460 bp, Oryza sativa
  Clone ID: PAT_MRT4530_17790C.1
cgcgctcaggctgcggccgctcgccgctgtttcccgcggcggaggtggcggctgcgtcgcccagcttaagcttctccatcagcgattccccgatgggttgctgcggcggcggcaacggctgtttcccggcggcgcgtcggaggatgtcggtggggaacgcggcgtgtggggaggagtcgtcgggggcacctccgggtcgtcgaggcggcggcggcggcggtggcggggggttgttctccgggtcggcgctgaagttgagggtgcggaggaaggcctcgtcctcctcctcctgccgcgcctcgcggatcacccggcgccggcggtcgcccgtggagtagggcctcctgatcccatccgcccctccgaggaggaggaggcggcggagccctccggatctcgccggaatctgcaagctcatcatctcccttctccttctcccgtggcggcggagcagcagcac

SEQ ID NO: 11580 - DNA, 1132 bp, Oryza sativa
  Clone ID: PAT_MRT4530_17791C.1
aaggattagcgagggagaagcagacaatttgttgagccgaacgagggattaggaatgtcgtcacagctctttgggcggcgttacagacatgtaatgtgtagcatgggctataagcaatgcaatggggatcatacaatattctatcgccataagaggtgtcacactagtatccttgctgtgtatgtggatgatatgattatcacaagggatgattctatcgagatagcaagactaaaaaaatctaaggaatttgaagttaaggatttgtgtcggctgatatacatattaggcatcgagattgcaagatacactaaagggatagtactttcaaaaaaaaatatgcattggatatgctcagtgacacatgtatgcttggttgtcgaccaacctctacactaattgagcaaaaccataagttgtgtgctgagtccgaaaatccagtgaataaagagatatatcaaaagttggtgggaagactaatatatttgttccatacacgaccagatataacatatgctgttagtgtggtgagccgatatatgcatgatccaaaaagtggtcacatagaggctgtgtataggatcctaagatatttgaagggaagcccaggcaaaggactatggttcaagaaaaataaacatctaagggtggaaggttattgtgatgcagattgggctagttgtccagattatagaaggttaactttaggctattgtgcttttgttggtggtaacttggtgccttggaggagcaagaaacaacctgtgatgtcttactcaacggccgaagctgaatacatagccatgtcagtgagtgtaagtgaattaatatggttaaagaatttgttgattgagttgaagctattgaagaatgccccctccccccaatgaaattttagtgttacaacaagtcgactattaacattgccaataacctggtttagcataatcaaacaaaccacctagagatagatcgtttcttcatcaaagaaaaattggataaagaaactttagaattatgttatgtagtgtctggagaataagtggctgattgtctaacaaaagctctaggtgttaaagagtgtacatctttatgtaataagatgtgtatgatagatatataccgcctttga

SEQ ID NO: 11581 - DNA, 3359 bp, Oryza sativa
  Clone ID: PAT_MRT4530_17792C.1
atggtggcgaccgggttctctttcttgctcacgctgctgctccttgcaactgctgttccaccagctcccacgaccagagctcagcctgccaccgaccaccttgcactgatggccttcaagtcgcaaataacccgtgatccgtcgtcagcaatggcctcgtggggtggcaaccaatcgctccatgtctgccaatggcgaggtgtgacgtgcggcatccagggacgctgccgtggccgtgtggtggcgctggacctcagcaaccttgatctttctggcaccattgatccttccataggcaacctcacctacctgagaaagcttgatctccctgtgaatcatctaactggtaccatcccttcagagcttggtcgtcttctcgacctccagcatgtcaacctgagctataattctctgcaaggtggcattccggcatcactgtcactatgccaacagcttgagaacatcagtctggcattcaaccacctatcaggagggatacctccagccatgggtgatttgtccatgctgcgcacagtccagttgcagtacaacatgcttgatggagcgatgcctcgcatgataggtaagctgggcagcttagaggtccttaacctctacaacaacagccttgcaggaagcattccgtcagagattggaaacctcaccagtctagtaagtcttatcctgagctacaatcacttgacaggttcagttccatcttctcttggtaaccttcagaggatcaagaatttgcaactgagggggaaccaactttcagggccagttccaacgttcttggggaacctatcttcactaaccattcttaatcttggcactaacagatttcagggggagattgtgtcattgcaaggactgtcatctctgactgccctaattttgcaagaaaacaaccttcatggtggcatcccttcttggctaggaaacctctcttcactagtttacctaagcttgggagggaacagattaactggaggaattcctgaatcattagcaaaacttgagaagctatctggacttgttcttgctgaaaacaatcttacagggtacaatcagttcgagggtgccattccaacttggatgtgcaactcttctatgcttagctcattttcaatagaaatgaatatgatttcaggagtagttcctccttgcgttgatggcctaaatagtttgtcagtcctgacaattcaaaacaatcaactccaggcaaatgacagttatggttggggattcctttctagtttaactaatagtagtcagttggagtttctagatttcagcagcaacaaatttcgagggactctaccaaatgcagtagcaaatctttctacaaatttgaaagctttcgccctaagcgaaaacatgataagtggcaagatccctgaaggaattggaaaccttgttaatttattgtaccttttcatgagcaacaattcttttgagggtaatattcctagctcacttggtacactctggaagctgagtcatttagaccttggattcaataatctattgggccaaattccacctgcccttggtaatctcacatcgttgaataaactctatcttggacaaaattcacttagtgggcctctgccatccgatcttaaaaattgtactttagaaaaaattgatattcagcacaatatgctcagcggtccaattccaagggaggtttttctcatatctaccctgtctgatttcatgtacttccaaagcaacatgttcagtgggtcactaccattggaaatcagtaacttgaaaaatattgcagacatcgatttctctaataaccaaatttctggtgaaattcctccatctattggtgattgtcaaagcctgcaatattttaagatacaggggaacttccttcaagggccaatcccagcatcagtgagtcggctgaaaggtcttcaagtacttgatctttcacacaacaacttttctggagacattcctcaatttctagcaagcatgaacggcctagctagtttgaacctctcattcaaccattttgaagggccagttcctaatgatgggatatttctcaatataaatgaaactgcaattgaagggaatgaaggcttgtgtgggggtatacctgatttgaagctgcctctttgctccactcactccaccaaaaagcggtctttgaagcttatcgtagcaatttccataagcagtggaatcctattgcttatcttgcttttagctctatttgcattctggcaaaggaataagacacaagcaaaatcggacttggcacttatcaatgattcgcatctaagagtatcttatgttgaattagtcaatgcaacaaatgtttttgctcctgataacctcattggagtaggaagctttggatcagtgtacaaaggacgaatgacgatccaagaccaagaagtaactgttgcagttaaagtgctgaatctccaacagcgtggggcttctcaaagcttcattgcagaatgtgaggctctgagatgtgttcggcatcgaaatcttgtgaagatcctaacagtctgctcaagtattgatattcagggccatgacttcaaggctcttgtatatgagttcatgccaaatggaaatttggaccaatggctacaccagcatcttgaggaaaatggggaagacaaggttttaaatatcatcaaaaggctcgacattgccattgatgtggtttctgcacttgattatcttcaccaacataggccattgccaattattcactgtgatctcaagccaagcaatattctcctagatagtgaaatggttgctcacgttggtgattttgggcttgcaagagtcctgcatcaagaccatagtgacatgttagagaaatcaagtggctgggctacaatgagaggaacaattggatatgctgctccagagtacggtttgggcaatgaggtttcaattctgggtgatgtctacagctatggtatactgttgctggagatgtttaccggaaaaagaccaactggcactgaatttagagaagctctcagccttcataattatgtaaagatggcacttccagacaatgtgatcgatattgcagaccaacacttactatcagagaacaatgatggagaagaaagaaactcagatggcaaaagaacaagagacacgagaatagcctgcatcacatcaattctgcagattggagtttcctgctcaaaggaatctccagcagatcgcatgcatatcggagatgctttgaaagagttgcagagaacaaaagacaagtttagcgtgtccctgcgttgatggaagcattcgatagcacgcaagttcagagactcacagcaaacagctcctctcctgaaaaatcccaa

SEQ ID NO: 11582 - DNA, 262 bp, Oryza sativa
  unsure (1)..(262): unsure at all n locations
  Clone ID: PAT_MRT4530_17793C.1
ggcaaaagctggctggacatatatcagaattgcaattttcnctcctgtaaagtttcttttgtgtgcaaatcattttccagtgcaactgcaggttccaatttttgtaggtgtcatgtagatgattctcatatatgttcttctcaatatgaattttcttgttcctgttcgatgtctgctctaatttttgatgaacaaaaaaaaaaaaaaaaaaaaaaaaaaaaaaaaaaaaaaaaaaaaaaaaaaaaaaaaaaaaaaaaaaaaa

SEQ ID NO: 11583 - DNA, 492 bp, Oryza sativa
  Clone ID: PAT_MRT4530_17794C.1
atggcccgccagccgcctccgctcgccgcctccgcgcggcggcgccacccgccgcctccgctcgacgcggccgccggtctccgcgcggttccggtgccgcccgccgccccgcgcggcgccgcgcgccgcctcggctcgccgcggccgccggcctccgcgcggcgccgccgcccgccgcctccgccctccgtggcccccggcctccgcgcggcgccgccgcccgccacctctgcgtgccgcggcggccggcctccgcgcggctccgtgcagcaccatgcccgccgcctccgcccgctgcggccgccggcctccgcacgacgctgcccgccgcggcccctgaggctcggcgtcgtcgcccctgaggctcggcgccgtcgccgctcgttgttctccgccggagaggatgcagtacagctggagggaggaaatagagagttggctatgcgggtgtttggagagttcgatttggagaggctgttggagatgctctaa

SEQ ID NO: 11584 - DNA, 591 bp, Oryza sativa
  Clone ID: PAT_MRT4530_17795C.1
atggtcatgtggatccggacatccggcgccatagcgcgtagctcccgtggagcacccaaagcacctagtccaggtcaagtcgctggccacggctctagcttaggggtcccctacttttcatccttgtacaacccacagtgggagtcagtgccgaccgctgccgccgccggcctcctcccgccgcggcggccgtgctcctccctccaccgccaccagatccacacggatccaggcgggggacggccgccgctgccggatttgcgggggacggccgccagcccgtcgaccgccaccgtgcgccccatgccaccttcgtcgctctcccgccagacgccgccgtcgccccacaccgctttcgttgctctcccgtcggacgccacgcgtgctggcctctgccgccgtcaccccaagccgccttcgtcaccctctcctcgtccgccgcgcgcgtcggcctctaccgccgacgcccctcatcgctttcgccgcccttccgccagctgccgcgcgggccgacctttaccgccgtcgccccttgtcgccttcgccgcccttccgccggccgccgccactctcccagccaagagagtttga

SEQ ID NO: 11585 - DNA, 1425 bp, Oryza sativa
  Clone ID: PAT_MRT4530_17796C.1
ctacagtcgccgagagcagacgaaaggcaagcacgcgcacccacccacacacgggcgcgcgcacgtacaaagcccctcgtctccgtgtcttcttcctccccgcgcctgcaacaaaccggccagcccagccagccggtcggccgcttccgccatcacctttgccattttgctgatctcgatctcttccttcctcagccactagctggcttactaccactccaaagggtggaagtggaagctagggagagctagctagctcgttttcttaacttctagctggctgatgatgccggcctgcggcatggggtcgtcgagacggccgaggagatggagcggcggatccaaactagccgtcgcatgcctcgcggcggttgcggtgacctccctgcagctgtgctgcctctccggctgcttcatcgctgcgtgcggcggcgccggcagggacgatgacgacgtgcgccgttactccgatcatttcgggaggctggaaggagcaggagcccattccggcgaccttctggaaggtggtggtcactaccacgtcgggctggggcgtcggctgctgtcgggagggccagggtcgcacccgccgcggtgcacgtccaagtgcggcagctgcagcccgtgctcccccgtgcacgtgtccgtcccccccggcgtcctcgtcaccaccgagtactaccccgaggcctggcgctgcaagtgccgcaaccgcctctacatgccgtgacgactccacaccccccacccctctacgtacgccgtctcgatccaaccgcacgagaccaccgagatggcgccgtgacacaacaggtaggcgcaccgtccgcccgtcgtctctgccgctgcatcatcgcgtccggtgcggcatgcctctctttctctctctttctctcgccgtctcgcgcgcgcgcgtgggggcatgcgtgcatgggtggtgcaggtggggcgcggggcgcgtgacggatggtggcgcggtggactggcctaccacgcgcgcgcggtggcacggcgcatgcacggcggcagctgggggggccggggcctgggccagcgtgatcgtctctgaaaactgtggcattgcagtgtggcttttggttgggcctaccacgaggcgatggcgcagaggagagatgaggaggaaagctgctgcccccaggcgcctcttcatgtgatccctgcgcacatcattcttggctacctagtgaaaaactgaaaaacacagtaccaccaccggccgagtccctttgccatgttatacatatatatatctcccctttttttttttcactcctagttatctcccggtgctttcagttctcgcatcatgcctgcacggggcatgcaacagatcgatcaagtgtacatttctcatttgtaacaagactcatcgtcgtctatcatatagtccgattgtaatgtttg

SEQ ID NO: 11586 - DNA, 3363 bp, Oryza sativa
  Clone ID: PAT_MRT4530_17797C.1
atggggccgttacttgatcttggaaggaggaaagcactagatcttgatgatgtgccaactttggatgataatgacagtgttcaaggcatcctccctaactttgaggcgaagctcatctcagtttctggttcagggaagtacaccggtgttacaacaattaagctggtcaaagctcttgttcttacaacctggaaattaatcctcttcactgcagtttgtgccttactccgtactgtctcttcatatgttggtccatacctgattgagtactttgttgattacctgaatcgaagtccacggaccgctaaagaaggctacattttggtgttgagttttgttgttgcgcagttcatcaaaggcctctcatcaaggcatttgctcttcagatcgcaacaacttggtgtgcgggtgcgctcagctcttgtcgccatcatttaccaaaagggtctctccctctcaaatcagtccagggaaagcatttcaagtggagagatcatcaatgccgtgagcgttgatgcggttattctagcaatgctgatcctatactccactcttggtttggcagcatttgcagcccttgctgccactgttttgacaatgttagcaaatctacctatagggaggatccagcaaaattaccaagagaaaatgatggatgccaaggatgctagaatgagggctatgtctgagatgctgcggaacatgcgcattctcaagcttcaaggatgggaaatggtcttcttgtcgaagatcatggagttgaggaaggaggagatgcattggctaaagaaagatgtatacacctcagttatgcttatatctgtcttctttggagctcctgcttttattgctatggtcacctttggaagttgtttgcttctaggcattccattagaaacagggaaagtattgtctgctctagcaacgtttaggcagctacaaggaccaatcaatagtatcccagacacagtctctgtgatcatccagacaaaagtatcacttgacaggatatgctcttttatgcacctcgaggaactatcgagcgatgttgtaactaaacttctaagaggtacaactgatgtatcgattgaggtgaggaacggtcagttctcttggaacacatcttctgaggttcctactctccgaaatttgaacttccgtattcgacaaggaatgagggttgctatctgtggaactgttggatctggaaaatcaagtttgttgtcatgcatactcggtgagataccgaggttatcaggagatgttcaaacatgtggtaggattgcctatgttagccaatcgccatggatacagagtgggacaattgaacataacatactttttggcacaaaactgcatagggaaaggtatgaaaaggtccttgaagcatgctgtcttaaaaaggacttggaaatattaccattaggtgatcagacaattataggagagagaggcattaacctaagtggcggacaaaagcaaaggatacaaattgcacgtgctttgtatcaagatgcagatatctttctgtttgatgatcccttcagtgctgttgatgctcatactgggttgcacttgttcaaggtcatgaaagatggacaaataatacaagttgggaattacgctgaaatacttaattctggagaagagttcacaaaattagtattttcccataaggatgacatttctactctagaaagtttagaacactcaagtggcaatcccgaaagtagtcttattcctggtgacagtggaagtatgcttttcagacaagataagcaaaaggatgaaaatgaaggagcagaagggattgttcaaaatggtcagttggtacaagaagaagaaagggagaaagggcgggttgggatttctgtctattggaaatatattacaatggcatatggtggagcacttgtgccgcttattttgctcgctcagataatttttcaagttcttcaaattggaagcaatttttggatggcttgggctgctccaatatccaaagatgtgaatcctccagtcaatagcttgaaaatggcttctagtgatcaaagcacagtggacaccagaatttttgacctgatgggatatgttctatttcctgctatcgaacttcttggaacaattattttaatgtcacggcaatattacatagatggtgctagagagttgcagaggttgactggagtttgcagagctcctgtgatgcagcattttgctgaatcagtagctggatcaaatatcattagatgctttggcaaggaaatacagtttatcaatgccgtcagtcatttcatggataatttatctagaccaagtttatataatgctgcttcaatggaatggttgtgctttcgcttggacattctttcatcctttatcttcgcatttgccttgatacttctggtcaccttgccagctgctctaattgacccaaagacagctggtcttgcagtcacttatggattgagtctgaatatgttacaagggtgggctattgcagtgctctgtagtttggaaaatagaatgatatccgttgaaagaatttttcaatacatgtttattccttctgaaccaccccttacaatatcaaaaagtagaccaaactgccagtggccgacaaatggtgaaattgagcttcgcaacctccatgtaaggtatgcaacacaattgccttttgttttgaaaggccttacttgcactttacccggagggttgaagaccggcatcgttggaagaactggcagtggcaagtcaaccttgattcaagcgctattccgtattgtcgagccatctattgggcaagtgttgatagacggccttgatatctgcaccattggactacacgacctacggacaagattgagtatcattccacaagatcctgtgatgtttgaggggaccctacgaaataacattgaccctttggaggagtacagcgatgaacaaatttgggaggcattgaactcttgtcatcttggcgatgaagttagaaagaatgagctcaagcttgactctgcagttacagaaaatggcaacaactggagtgcaggtcagcgccagcttgtttgtttgggaagggtagttctaaagaagcgaaagatcttggttttggatgaagcaacttcttcagtggatccaataactgacaatttgattcagaaaaccctgaagcaacaatttttcgaatgcacagtgattacaatagcacataggatcgcatctgttcttgatagtgagaaggtcattcttctggacaatggtaaaatcgcagaggatgactcgccagcaaaacttctggaagacaattcatcgttattttcgaaacttgtatcagaatacaccaagggatcagagtattaa

SEQ ID NO: 11587 - DNA, 3561 bp, Oryza sativa
  Clone ID: PAT_MRT4530_17798C.1
atggggccgttacttgatcttggaaggaggaaagcactagatcttgatgatgtgccaactttggatgataatgacagtgttcaaggcatcctccctaactttgaggcgaagctcatctcagtttctggttcagggaagtacaccggtgttacaacaattaagctggtcaaagctcttgttcttacaacctggaaattaatcctcttcactgcagtttgtgccttactccgtactgtctcttcatatgttggtccatacctgattgagtactttgttgattacctgaatcgaagtccacggaccgctaaagaaggctacattttggtgttgagttttgttgttgcgcagttcatcaaaggcctctcatcaaggcatttgctcttcagatcgcaacaacttggtgtgcgggtgcgctcagctcttgtcgccatcatttaccaaaagggtctctccctctcaaatcagtccagggaaagcatttcaagtggagagatcatcaatgccgtgagcgttgatgcggttattctagcaatgctgatcctatactccactcttggtttggcagcatttgcagcccttgctgccactgttttgacaatgttagcaaatctacctatagggaggatccagcaaaattaccaagagaaaatgatggatgccaaggatgctagaatgagggctatgtctgagatgctgcggaacatgcgcattctcaagcttcaaggatgggaaatggtcttcttgtcgaagatcatggagttgaggaaggaggagatgcattggctaaagaaagatgtatacacctcagctatgcttatatctgtcttctttggagctcctgcttttattgctatggtcacctttggaacttgtttgcttctaggcattccattagaaacagggaaagtattgtctgctctagcaacgtttaggcagctacaaggaccaatcaatagtatcccagacacagtctctgtgatcatccagacaaaagtatcacttgacaggatatgctcttttatgcacctcgaggaactatcgagcgatgttgtaactaaacttccaagaggtacaactgatgtatcgattgaggtgaggaacggtcagttctcttggaacacatcttctgaggttcctactctccgaaatttgaacttccgtattcgacaaggaatgagggttgctatctgtggaactgttggatctggaaaatcaagtttgttgtcatgcatactcggtgagataccgaggttatcaggagatgttcaaacatgtggtaggattgcctatgttagccaatcgccatggatacagagtgggacaattgaacataacatactttttggcacaaaactgcatagggaaaggtatgaaaaggtccttgaagcatgctgtcttaaaaaggacttggaaatattaccattaggtgatcagacaattataggagagagaggcattaacctaagtggcggacaaaagcaaaggatacaaattgcacgtgctttgtatcaagatgcagatatctttctgtttgatgatcccttcagtgctgttgatgctcatactgggttgcacttgttcaaggagtgcttacttggactcttagcttcaaaaactgtagtgtatgttacccaccatgtcgaatttttgccatcagccgatgctatcatggtcatgaaagatggacaaataatacaagttgggaattacgctgaaatacttaattctggagaagagttcacaaaattagtattttcccataaggatgacatttctactctagaaagtttagaacactcaagtggcaatcccgaaagtagtcttattcctggtgacagtggaagtatgcttttcagacaagataagcaaaaggatgaaaatgaaggagcagaagggattgttcaaaatggtcagttggtacaagaagaagaaagggagaaagggcgggttgggatttctgtctattggaaatatattacaatggcatatggtggagcacttgtgccgcttattttgctcgctcagataatttttcaagttcttcaaattggaagcaatttttggatggcttgggctgctccaatatccaaagatgtgaatcctccagtcaatagcttgaaaatggcttcaatgtctttctttgactccactcctagcggtcgaatcttgaacagagcttctagtgatcaaagcacagtggataccagcatttttgacctgatgggatatgttctatttcctgttatcgaacttcttggaacaattattttaatgtcacgggtagcatggccagtcttcgtaatttttgtcccaattattgcagcatctctgtggtatcagcaatattacatagatggtgctagggagttgcagaggttgactggagtttgcagagctccgctgatgcaacattttgctgaatcagtagctggatcaaatattattagatgctttggcaaggaaagacagtttatcaattatgtcagtcatttcatggataatttatctagaccaagtttatataattctgcttcaatggaatggttgtgctttcgcttggacattctttcatcctttatcttcgcatttgccttggtacttctggtcaccttgccagctgctctaattgacccaaagacagctggtcttgcagtcacttatggattaagtctgaacatgttgcaagggtgggctattgcagtgctctgtagtttggaaaatagaatgatatccgttgaaagaatttttcaatacatgtttattccttctgaacaactccttacaatatcaaaaagtagaccaaactgccagtggccgacaaatggtgaaattgagcttcgcaacctccatgtaaggtatgcaacacaattgccttttgttttgaaaggccttacttgcactttacccggagggttgaagaccggcatcgttggaagaactggcagtggcaagtcaaccttgattcaagcgctattccgtattgtcgagccatctattgggcaagtgttgatagacggccttgatatctgcaccattggactacacgacctacggacaagattgagtatcattccacaagatcctgtgatgtttgaggggaccctacgaaataacattgaccctttggaggagtacagcgatgaacaaatttgggaggcattgaactcttgtcatcttggcgatgaagttagaaagaatgagctcaagcttgactctgcagttacagaaaatggcaacaactggagtgcaggtcagcgccagcttgtttgtttgggaagggtagttctaaagaagcgaaagatcttggttttggatgaagcaacttcttcagtggatccaataactgacaatttgattcagaaaaccctgaagcaacaatttttcgaatgcacagtgattacaatagcacataggatcgcatctgttcttgatagtgagaaggtcattcttctggacaatggtaaaatcgcagaggatgactcgccagcaaaacttctggaagacaattcatcgttattttcgaaacttgtatcagaatacaccaagggatcagagtattaa

SEQ ID NO: 11588 - DNA, 292 bp, Oryza sativa
  unsure (1)..(292): unsure at all n locations
  Clone ID: PAT_MRT4530_17799C.1
cccttttagacccgcacccaccgccccccgaaaggggagctttcaaaaaaccctgcccaagaaaccacccaaagnccatacagacacaaaagcgacgaaaccaccgcccgcacagacaaccggcaccgccacaaaaaaggacgcgacgcaccaccacaaaaaatgaaacacgagcaacaaaacggacccaccatgccggacgcacacagagaggagaccagcccacccaagaagcacaagctaacaaagaaaaaaaacctccgaagccagcgcaagaggaaaaacaaccaag

SEQ ID NO: 11589 - DNA, 853 bp, Oryza sativa
  Clone ID: PAT_MRT4530_1779C.1
ctgttagagagagagagagggagagagataaatagtatacagaaatgagcaggtcgagctcgagcatggccaccgtcctcgtggtgttgatggtcgtcagcgccggcggcttatccccaccatgtgcggccgctgcgaaggaggagaagccagtggtggtgctgccaccagcggcggcgccaggggaggcgccctccgcggacgcggcagcgtttgtccgctcctgctgcgacaccgccctgcaggccgaccgcgacggctccagcttctgctacgaccatctcctcccctacgctgccttcttcgagggcaaccaggtgaaggtcgccgaggtggccgccaccatcctgagcaccaacctctgggtctacgtcgaccaattgcgcaaggtccagggaggggccggcaagggggacccgaacctgaacgcctgcgtcgatgacttcagcgtagccgccggcgagaacatcaccagggaggcgctgcagagcctcggccgcctcgccgccgccggaaatggcaagcgcagcaaggaggatctggagaatgcgcaaaagtggatcaaaggggtggagaaaccctacaacggtgggatcgggaaagcatccggttgcgagataggttacctgttcacttatagcgatgatctccccgcccagaaaacccttggatatactttcgacacagctagctccctcatcaatcacataaagctttaataatccagctatatatatagccttccatgcatgctctctagctacctactaagtggaagtacattattttatttattatacttgttgttaattcccatgatcgattagtggtgttgtccacgatttttggtaac

SEQ ID NO: 11590 - DNA, 431 bp, Oryza sativa
  unsure (1)..(431): unsure at all n locations
  Clone ID: PAT_MRT4530_177C.1
cggacgtngcctgngatanttgaattgcaagcttntaatccangcgaangnntgnttctnttcnagtatccaancatgggntggaannngnaganatatnatggaggntcatgtcatcaacaacaatccttgtccntcacatggtaatgtgattcatctgccgntaganntgggaggtttcccatcttacgaggcttaaatncganccatntaanangtctcgtgcatcccnatcatgactggtaaaaaagaggcatatctcaacattcangttgttgnaagggnagngantccaactgctttaggggataaggtaggtncctcttacagnttgatgtgctcttatggctctgtcctaaacacctagcggtaacaaggcccanggtgtttttgatgccatggnccagttaagcctacataggntcaatttt

SEQ ID NO: 11591 - DNA, 985 bp, Oryza sativa
  Clone ID: PAT_MRT4530_17800C.1
ttgagtttgcaattgtacaagatgcagatcgtcttgatgcaattggtgcaattggtattgcaagatgttttacgtatggtgggagcaagaaaaacacattgcatgatcctaagatactgccgcgtgataatttgtcaaaggagaaatacatgtccaaggatgaaaaacagacatcaattaatcatttccatgagaagctatttaagttgaaggacatgatgaagacagaggccgggaaaaagagagcagagaaaaggcacaagttcatggaggactttgtggctgaattctatgaagagtggagtggcagagcttgaagttgaccaaccaggttatgggctgttggtttgtggcatagcttgaagttggccaaccaacaacaactcatattgctagtcgtctacttggtgacattagcatgttttgttgctgatatgttaagccatgcaaaaaaacgagggataaagcacacttgagtggccaaaccactgaataatgctcctcaacagcttcaccttgagcccatgcttcatgtacatggtgagcgccatcttgggcgccactgggtggccgtcgacgacgcgggcgtggtaacggcggaggatggaggccgcggcaaacttcatctggtagtaggcgaagtccttgccagaggcacagacgagggccgccgttgaaggcggtgaacttgtaggccgattcgcccatgaagcggccgtctctgagccacctctccggcttgtactccctgcagtcctccccccagatgctctccatcctgcccatggtgtacatggcatagatcacctttgtccccttcttcagcaccgtcccgtccgggaacacctcgtcctccacaacctgacaacaggccatgagaaatgttaagcctgaagattagctcatctgttttttttttcttaaaaaaaattgggtgtcacaatctttatggctcaaaacttaaaggaggatttaatttgctgac

SEQ ID NO: 11592 - DNA, 3597 bp, Oryza sativa
  Clone ID: PAT_MRT4530_17801C.1
atgggtaggatcgggagagaagatgagcgtcgggagagaaatttaaccggcgttcgagtcgtcgttcccggcggcggcggcggcgtcgaagtcgtcgttcccgacgggatagtccaggagacggcggtggttgatcctggcgatggcggagttgatgtccaggtggcggcggcgttgatggcatcgatccaggcggtggcgacccagatcgaagtcgcggtgtcagaggatgaagacggcggtggcagggcagaagcacggcagcggcgggggtcggtattgtacaaggatagaattggtaccgagccgttggatctggccaggaatttggtaccacccggtaccggtaccgagcgctggacggagttcatggatcagccacttttggaccgtgcagcttcttcctcgtctaaggccacaagcagtagatcagctttcacagatgctggattctttagtattatcactttttcttggatggggccgttacttgatcttggaaggaggaaagcactagatcttgatgatgtgccaactttggatgataatgacagtgttcaaggcatcctccctaactttgaggcgaagctcgtctcagtttctggttcagggaagtacaccgatgttacaacaattaacttggtcaaagctcttgttcttacaacctggaaattaatcctcttcactgcagtttgtgccttactccgtactgtctcttcatatgttggtccatacctgattgagtactttgttgactacctgaatcgaagtccacagtccgctaaagaaggctacattttggtgttgagttttgttgttgcgcagttcatcgaaggcctctcatcaaggcatttgctcttcagatcgcaacaacttggtgtgcgggtacgctcagctcttgtcgccgtcatttaccaaaagggcctctccctctcaaatcagtccagagaaagcagttcaagtggagagatcatcaatgccgtgagccttgacgccgagcgtgtcgcggatttcaattggtccatacatgagctttggctgtttcctgtgcagattattctagcaatgctgatcctatactccactcttggtttggcagcatttgcagcccttgctgccactgttttgacaatgttagcaaatctacctatagggaggatccagcaaaattaccaagagaaaatgatggatgccaaggatgctagaatgagggctatgtctgagatgctgcggaacatgcgcattctcaagcttcaaggatgggaaatggtcttgtcgaagatcatggagttgaggaaggaggagatgcattggctaaagaaagatgtatacacctcagttatgcttatatctgtcttctttggagctcctgcttttgttgctatggtcacctttggaagttgtttgcttctaggcattccattagaaacagggaaagtattgtctgctctggcaacgtttaggcagctacaaggaccaatcaatagtatcccagacacagtctctgtgatcatccagacaaaagtatcacttgacaggatatgctcttttatgcacctcgaggaactatcgagcgatgttgtaactaaacttctaagaggtacaactgatgtatcgattgaggtgaggaacggtcagttctcttggaacacaccttctgaggttcctactctccgaaacttgaacttccgtattcgacaaggaatgagggttgctatctgtggaactgttggatctggaaaatcaagtttgttgtcatgcatactcggtgagataccaaggttatcaggagatgttcaaacatgtggtaggattgcctatgttagccaatcgccatggatacagagtgggacaattgaacataacatactttttgacacaaaactgcatagggaaaggtatgaaaaggtccttgaagcatgctgtcttaaaaaggacatggaaatattaccattaggtgatcagacaattataggagagagaggcattaacctaagtggcggacaaaagcaaaggatgcaaattgcacgtgctttgtatcaagatgcagatatctttctgtttgatgatcccttcagtgcggttgatgctcatactgggttgcacttgttcaaggagtgcttgcttggactcttagcttcaaaaactgtagtgtatgttacccaccatgtcgaatttttgccatcagccaatgctatcatgtggaagtacgcttttcagataagcaaaaggatgataatcaaggagcagaagaagggattgttcaaaatggcttctagtgatcaaagcacagtggacaccagaatttttgacctgatgggatatgttctatttcctgctatcgaacttcttggaacaattattttaatgtcacggcaatattacatagatggtgctagagagttgcagaggttgactggagtttgcagagctcctgtgatgcagcattttgctgaatcagtagctggatcaaatatcattagatgctttggcaaggaaatacagtttatcaatgccgtcagtcatttcatggataatttatctagaccaagtttatataatgctgcttcaatggaatggttgtgctttcgcttggacattctttcatcctttatcttcgcatttgccttgatacttctggtcaccttgccagctgctctaattgacccaaagacagctggtcttgcagtcacttatggattgagtctgaatatgttacaagggtgggctattgcagtgctctgtagtttggaaaatagaatgatatccgttgaaagaatttttcaatacatggctattccttctgaaccaccccttacaatatcaaaaagtagaccaaactgccggtggccgacaaatggtgaaattgagcttcgcaacctccatgtaaggtatgcgacacagttgccttttgttttgaaaggcctaacttgcactttacccagaggattgaggaccggtatcgtcggaagaactggcaatggcaagtcaaccttgattcaagcactattccgcatcgtcgacccatgtattgggcaagtgttgatagatggccttgacatttgcaccattggactacatgatctacggacaagattgagcatcattcctcaagatcctgtgatgtttgaggggaccctacgaaataacattgaccctttggaggagtacagcgatgagcaaatctgggaggcattggactcttgtcatcttggtgatgaagttagaaagagtgatctcaagcttgactctacagttacagaaaatggcagcaactggagtgcaggtcagcgtcagcttgtttgtttgggaagggtggttctaaagaagcgaaagatcttggttttggatgaagcaacttcttcagtggatccaataactgacaatttgattcagaaaaccctgaagcaacaattctccgaatgcacggtgattaccatagcacatcggatcacatcagttcttgatagtgagaaggtcattcttatggacaatggtaaaatcgcagaggctgactcgccagcaaaacttctggaagacaatttatcgttattttcgaaacttgtatcagaatacaccaagggatcagagtattaa

SEQ ID NO: 11593 - DNA, 948 bp, Oryza sativa
  Clone ID: PAT_MRT4530_17802C.1
atggcggcgacgacgacggtgaggtcgacaacggcggtggctcccgagcccacccggatggttggaggtcaacgagcgacggcggtggctctcgagctctcccgccttggatgggaggaggtcgaagatggcagtgacgatgacggtggggttgacaacggcggtggctcccgagccctcccgttgtggattggaggaggcctcgattccaattcgaaggtttcggaatctgaaatggcggcggcggcggtgcgggcggcggaggagcttgcggagagggagatggcggggcgcgacgcctcccacgacgccgcccacgccctccgcgtccgcgacctcgcgctctccctcgccgccgagctcggcctctcctcctcccccgaccgcctcctcatcgtggagatagccgcgctcctgcatgacatcgtggatagggacaatgctgaggatatgagcatcgtggagaggtttcttgaagaggtggaactggagcagggccagagggaggaaattgtggcgatcattaaggggatgggattcaaaaatgaagtttcaaagaagtctgttgttgagcctactcttgagtttgcaattgtacaagatgcagatcgtcttgatgcaattggtgcaattggcaatatgaataaatgctctgtgttcgaatctttccctaaaacacctgcaggtattgcaagatgttttacgtatggtgggagcaagaaaaacacattgcatgatcctaagatactgccgcgtgataatttgtcaaaggagaaatacatgtccaaggatgaaaaacagacatcaattaatcatttccatgagaagctatttaagttgaaggacatgatgaagacagaggccgggaaaaagagagcagagaaaaggcacaagttcatggaggactttgtggctgaattctatgaagagtggagtggcagagcttga

SEQ ID NO: 11594 - DNA, 661 bp, Oryza sativa
  unsure (1)..(661): unsure at all n locations
  Clone ID: PAT_MRT4530_17803C.1
nctcgggccggccgggaagttccaacttccgccggaatcaaatccatccgaacgcgcgtccgcgacggcacatctcagggtccgccccaccggccgcaccagcaattctgcaaccgacccgaccgaatccatcctccccgccagccatggctcccctgccaccgccgcgtccgcctcaccggagccaccggcgagtccccgccgcctgctgcctcttcctactcctcctcgctctcgttctcctcccctccgccgccgccaagtcatcccgccgccccatcaccgacaacgagatccgggagaagaagaaggagaactgcgtgctgcggtgcctctcgccggagtgctacgatctcatatacggcggcgacccgcttgaggaaggggagctggactacatccgtggccacgagtacaagtactgcatgcacaagtcttcccttggtgaaagcttggatggtgtcaagggttccttcagctattcatgaagtgcaaggaagtaggaagagtgttctccgagccccatgaattataatacatctgaacctacggtgtgtctttctgttccactagtcaaacaagcatacatgtatgaattctgttagtcattggctcgttgaatccacatatatcttcgctaaaaaaaaaaaaaaaagcggcc

SEQ ID NO: 11595 - DNA, 240 bp, Oryza sativa
  Clone ID: PAT_MRT4530_17804C.1
atggcgctggaagcgttgtgggagatgggatccagtgattgcctgggcacctgctgccatcggtggaatgcggtcgacgcgcgataccatgcaccgctccctggaagaaagccgacgcccggcaaccatggggaagcacctgctgcattccgatctgttgcgaggaagaggacgccgtcggtagatgaggtcgccaagaggagctgcgtgggaacgtttcaccaagcgcgcgcgagatag

SEQ ID NO: 11596 - DNA, 810 bp, Oryza sativa
  Clone ID: PAT_MRT4530_17805C.1
atgagaattgaggaagtcagccacgtcgccggcggtgtcaagacgccccgggggtcaaacgccatgcacacgccgaagcaaggaatttttgcgacacggcgacgacacgcacaatcgtcgcctcctcaccagcggcacaaccacgcgctatttggctctccctcccggtgcattggtcggtcgtgcacgggtgtcgccgtgtcggtgtcgtcgtacgtcgcccgccgcgtgcgaatgcaacaccctcatttcgtagctgcaaacagtgcatacgcgccgcggagtcctgcaaagcagcgcagacgggtggtggtcggccgccaccttagctccaaggctttcttcaccagcatgcacctgagccagagggaagccgagtaccgaactggccgtcgctatgtgagaccgatcgccaccgggccaacaacaccacaacggcgtaaagactctaaaatgacgccctcacgagggtcgcgactccaagagacgccgtcgtcatccgtcccaaaaacgggacaaggttttcacccagagctccttaccgagggaggaggggtacctcaacaatgccctcacgcccgaaagcatagtcactgttggcctaaagattgggctaagctttcgctcggaaccgcctaccgctatggtctgtcgcttaatccgaaaccaccaactaaacatcggcgacacatggcttctgccacacccgaccgacacaaggttgcatggcacaagaaacgaacaacaatgcgggaaaattttccaaaaggttgcatgacagttgatcgtctgacgagtgacgagatctaa

SEQ ID NO: 11597 - DNA, 1851 bp, Oryza sativa
  Clone ID: PAT_MRT4530_17806C.1
atggccgccgcgctcatcgtccccgcaaacccaaaccctactccaaaccccacctcctccctccgtcccccatcgcgtgccgcctccagtgtgctccgcttcccccgccgcgaccgcgctcgaacccatctcactgccgcgtttgggaggggatcacccgcggcggcggccgagcgcggcgggaaggactactacgctacgctgaacctccgccgcgacgccaccctgcaggaggtcaagacggcctaccgtaccctagcgcgcaagtaccatcctgatatgaacaaggaccctggggcagaagaaaagtttaaggagataagtgccgcatacgagattctatcagatgaagaaaaaagatctctgtatgaccgctttggagaagcagggctcactggagattatggaggtggagatattggctccaatgggattgatccatatgaactcttcaatgcattctttggtggccctgataagctttttagagacagcatgggtgctgggagattccattatggtacaaaagtcacagacaacaggggacttgatattcgatatgatcttctcctttcttttgaagaatcaataattggaggcaaacgagaagtcagcatttttcgttatgaaacctgtggcacttgccatggaactggtgctaaatctagcaatgacataacagaatgtactcaatgcagaggtcaaggcaggcgcgcaactggtgacctatacatatttgttcatgttaataaaaaagaaggcatccacagagaaggcctcgatctgttctcagatgtcacaatagattatactgatgcaattttaggaaccacagtgaaggttgaaacaatagagggattcaaggatctttatattcctcctggcactcagcctggggagcggctgaaatttgctcaactgggagctccagacattaagaatcctaccattagaggagatcataattttgtgataaatgtgaagatcccgaagagtatcagggaagagaagatccctctggcgatctatcaggaatttgttcaggggcgacgatggggatacgagatttgcttcaatcagcgcacaatctgttactccattatggactccgcgacgaggatctcatccagctgttctgttgctagaaggattcctgatgatcacagtgctcttattcgtgataagcagaactcgtataatcaggtcgactccaaagcggcaaatccgaatgatgtaaaagtgtgtcgagccgcacaggctgcctatcgaattacctgcagcggtttgggatcccgtcgggacaggatgggatccctttcgtccctcttgcctatccaaagaggagcgagagctaagtgcctgagccgtgaggaggaggcggctgctggtgagacctccggcgagggccggggaagaggacccgctcggcgagaggaggatgcagccactggcgacgagccccaacacatggattgtggggatgggcgtgcaagtcctcggcgacggagaaggagaactgcgtgctgcggtgcctctcgccggagtgctacgatctcatatacggcggcgacccgcttgaggaaggggagctggactacatccgtggccacgagtacaagtactgcatgcacaattaacgttccaagagtaattgactcaaatttagatactgctattgtgccacattttgatcactgtgaatctgcaatcctgttttatgaaatttacttacgactagctgaagtgttatcttcaggtcttcccttggtgaaagcttggatggtgtcaagggttccttcagctattcatgaagtgcaaggaagtaggaagagtgttctccgagccccatga

SEQ ID NO: 11598 - DNA, 510 bp, Oryza sativa
  Clone ID: PAT_MRT4530_17807C.1
atgggaaagcttaagctttttcggagcgaactggttggtgtacgcaactcaatattgaaatcagtatcgcgagtcgtgagacctcacccttggtgtgccgcatttggcatcagcacaggtgagactgacatcatggggacagcaaaaaacccaattggcttcaggtgcaacaaatgcatgaagaaagattcctccttgcatgatcaaaatcagcacatgacaaatgtgccaactgatcggagcacctgcttgaaagagagctctgataatgtgcatggggcaacaaacagctgtttaagccactgtagccagacatttcaactcatggttgcattgaagcttctgatttcaggtggcgcggcagctcgaaagcaatcaaatgctatccatgactggagatccctgcatcatcattatattaaggaggacaaggatgattcagaagctcactatcttgattggaatccatgcaatggggcaagagcatattgtgcaaggctgcaagcataa

SEQ ID NO: 11599 - DNA, 353 bp, Oryza sativa
  Clone ID: PAT_MRT4530_17808C.1
gggcaacaattctggtcggaatttcccaggaaagggtaggccaatggaaaaccaattagctcaaaacgggaaaaaccttcagccctggtctatggtaagggggaaaaaaaaaatacaaaactatccccgactttacatcccttggtaagaaaggtcccgaaaacaattaaccaaaatatcttgggggggaaacccgctgacttctaaaaaagggccctgatctggagttttgagccaacctaaccccaatccagccccaaatattggacaggttccccaaaagaaaccaaaaaacaacaaatggcttgccctttgtaaagggaaaaggggggtatataactacctgggcccct

SEQ ID NO: 11600 - DNA, 439 bp, Oryza sativa
  unsure (1)..(439): unsure at all n locations
  Clone ID: PAT_MRT4530_17809C.1
gtgagggcgggcattagtggctgtgtngcaaatgcatgggctgattgctgccttggcagatgtctgtgtcctgtgttggccacnctgngtgcgctntttggtgttaaagaaggttgctgctgcttgagacttgcatgctggctgcttgctcctgttgctgctggatggatgcatgagccctgaggcgtgcacaatgacanaatgtggcatgcacatggttgctgtgcatgcctgactggctgggcactgctgtggtgtgtttgatgctgcaattggtgtgtgcccttgactcggcttgatgaaggaatgtgcagggaatgagcacagtgttggagatcaatggtccctgggangaagctaaactcggctttgatataactgaataacagaggaaagtgcatatgcagaattttggnttcaaaaaaaaaaaaaaaaaaaa

SEQ ID NO: 11601 - DNA, 204 bp, Oryza sativa
  Clone ID: PAT_MRT4530_1780C.1
tcaacaatcaacaagaacatggatggaggtggctgctgcagctgcagaggaagctgcactctggcattcaaccggggtgccaatctggctctcgctggcacggaaactctcgagcgcccgtggtcgcgtcgcgtcttcgcgcgtggccccgtacgtcgtacgcggcggcggagcgcgccgcccacgacgaccagcgcccgccat

SEQ ID NO: 11602 - DNA, 2715 bp, Oryza sativa
  Clone ID: PAT_MRT4530_17810C.1
atgaagcagtatactttgcctatcatcctcttccttaccataagcattagccttttagccatcagtgctagtggagatcatgaccaattcatctacaccggcttcaccggtagcaatctaactctagatggtgcagcaaaaatcacagccaccggccttcttgggctgacaaatgatacattccggatcaaaggccatgcatctcacccagctccgctatgcttccgcaagtcccccaatggcacggtgcaatctttctctgtctcctttgtatttggtattctctcttcatttggtgatataagaggccatggatttgctttcttcattgccccaagcaatgatttctccactgcctttccaatccaatttttgggtcttcttaatgatataaacaatggcagttcgaccaatcacctctttgcaattgagcttgataccattaggaatgatgagttcggggacatcgacaataatcatgtcgggattgatatcaacagtctcaactcagtaagatcctcttatgtcggcttctataatgacaacaatggcgcgctcacaaacgtgagcctcattggagataagccaatgcaagtttgggtagagagaaaaggtgaacttcttcttgtgtatgactacatggcaaatggaagtctagacaaatacttgcatcgacaagagggcaaaccaactttaaattggggacaaaggtttcaaattatcaaagacattgcatctggtttgctctacctccatgaagaatgggataaagttgtcattcatcgtgatgtcaaggcaagcaatgtgcttctcgacaaacaactgaatggacgactgggagatttcggtcttgcaagattatatgaccatggaactgacccacaaaccacacatgttgttggcacgataggatacctagctccagagctagtacacagaggaaaggcaaccactcttactgatgtcttctcatttggcatatttattcttgaggttacttgtgggcaaaagcctatcaaggaagactcacaaggcagacaacttatcttggttgattgggtgcttcagaactggcacaaaggatcacttcttgatacaatggatatcaagatccaagccctaaaccttgccatcaccatgagcgaggaccagttcgtctattcgggcttctccggcagaaacctcacccttgatggtgcagcaacagttacagatgatggggttcttgagctgaccaatcgcaccgtccacatcaaaggccatgcgttctacccaactccatggcaattcaggaagacgcccaacgggacggtgcaatccttctcaattaactttgtgtttggcatgattcctgtctactctaatgaaaaatgtaccgatggcatgactttcgtgatctctccaaccagtgatatgtcaagtgctcaggactcccaatacttgggtctactcaacaaaacatcagatggaaaagcaagcaaccacatttttgcagtcgagcttgatagtagccaaaataccgagttccacgacatcgacgacaaccacgttggcatcgacatcaacaatctcacctcagttcaatctcggccagctggtttctatagtgataacaagagtatcttcaacaatttgtccctctgtagctacaagccaatgcaagtatgggttgactacaacgaagacaccacacagatcaaggtgaccatggctcccattgagttcttcttcctcttcatctctaatctttcagctctcgccaccggtgaagaccaattcatatactctggcttcaatggtgctaacctcaccctcgacggcgtggcctcggtaacaccagatggcctgcttaagttgaccaacggaaccttacggctccaaggccatgcctttcacccaactccattcagtttcaagaagaaacccaatggaacagtgaattcctttgctgtctcctacatatttgccatctactgtctccggcctgtcatctgcggccatggcatagcttttgttgtttccgtgagcaaaaacttctcaaccgcaatggcaagccagtaccttggccttataaatgaccacaacaacggcgatccaacaaaccatttcttcgctatcgagctcgacacgaaccaaaatgatgagttcaacgatgtcaataacaaccatgttggaatcgacatcaacagtcttacatcactgaactccagcagcgtgggatactacacagacagtaatggatttaagaacaagaatctactaggaataggagggtttggaagggtatacaagggactacttccaacgtctaaattggagattgctgtgaagaggatctctcatgactccaaccagggtatgaaggaatttgttgctgagatagtcagtataggtcacctccaacaccgcaatcttgtgcagttacatggctactgccggcgaaaaagtgaacttattttagtgtatgattatatgtccaatggaagtcttgacaagcatttgtatggtcaagagaacaattctactttgacatgggcccaaagattccaaataataaaagatattgcatctggattgctttatctccatgaggaatgggagaaaaaccaaggttttgatccagagaccatgacaaaccagtttctaatatcaaacagcacactatctgacctctcagaagttagatctcatacatggtctccctatgatatttaa

SEQ ID NO: 11603 - DNA, 231 bp, Oryza sativa
  Clone ID: PAT_MRT4530_17811C.1
atggcggcgtggcagcagcacgtgtccatgtcagcgtcgtcgtcgctggtgacgagcgtgagcaactcgcgcaaggggagtcccgaccgtggtggtggccttccagagggtgtcggcgacggcgatgtcggcggcggagtgcaccggggcgatggcggcgccgtcgttgctggaagggagattcgggctgggcgggagctcgcggcggcggtcgagcctgaacgcgtttga

SEQ ID NO: 11604 - DNA, 348 bp, Oryza sativa
  Clone ID: PAT_MRT4530_17812C.1
atgaatgcaagaggtggacacaacggagctcaatcagccgggcgcttccctgcccgacatgtggcccaacacgacgtcgctgttggccgctgccgcgccggccgccagcgcgccgcccgccgcaaggccccgcggtccgccgccgcgccacagcgccgcccaccgccgcgaggccaccgcccgggcctccgccccgccgcgaggccgcccaccgcccgatgggatgatggggagggaaggagaggagttagaggagaagttagagaggaggaagaggaagggatgatgggggagggaaggagaggagttagaggagaggaggaggaggaagaggaagatatgggatga

SEQ ID NO: 11605 - DNA, 792 bp, Oryza sativa
  Clone ID: PAT_MRT4530_17813C.1
atggaaggcctcgccggccatggcgacctcccgacagccgccgccggcggcggcatgctggcagttgatctccttggcccagctgcaggaacagtaacagaggagggctacttcgtcttcgtgcagcagctggtagtgcgcatcaccggcggcggcgccgccgccgccgccggcatttcgttgccaacgtcgtcgtcaatgcaggaagaagcatctgcagtagtagacgttacaattgatggattagcatcagctactacccacggcaatgccattgttgccgacgacgacgcgggcgatgacgggaattccagcatcaggcccgccttcgacgtggccaccggcgagcacaaggtcgatcgtcaggcccttcaagaaaccgagcggcgaggcgagctacgagctgaggccgtgcgccgcttgtgggccatgcgccgcatccctccgcatccgcgctcgcgcccggacgccgcgcacgcgatcgaccgcgccacctccgcatctcgcgtcgcccccgtgcaccgcatcgtgccgcgccctaactccgtgtcgcgccaagtccgtccttccgccgcgaatcccggcatccgtcagcgccacgctaggtgggcccgcgactcgaccccggtcaagccgccatctccttcagccgtcactccaagagatgaggaacgaagccgattggataagcgcgtcgccattgccacgtccgccaaattatccagacgcatgacgtcccgtcgcccctccatgcacccgctggacaaaacgatgcgcaccctctcaagctag

SEQ ID NO: 11606 - DNA, 971 bp, Oryza sativa
  Clone ID: PAT_MRT4530_17814C.1
acccggccgggatctctgcccaccccaccacaccactcgaatcgaatccaccacacggtaccctcctctctcctcctccgaccaccatggccatggccacgcaagcctccgccgccaagtgccacctcctcgccgcctgggcaccggcgaagccgcgctcatccaccctctccatgcccacctcgagggcacccacctccctcagagcggcggcggaggatcagcccgccgcggcggcgacggaggagaagaagccagcccccgcggggttcgtgccgccgcagctggaccccaacacgccgtccccgatcttcggcgggagcacggggggactcctccggaaggcgcaggtggaggagttctacgtcatcacatggacgtcgcccaaggagcaggtgttcgagatgcccacgggcggcgccgccatcatgcgcgagggccccaacctgctgaagctggccaggaaggagcagtgcctggccctgggcaccaggctccgctccaagtacaagatcaactaccagttctaccgcgtcttccccaatggcgaggtgcagtacctccaccccaaggacggcgtctacccggagaaggtcaacgccggcaggcagggcgtcggccagaacttccgcagcatcggcaagaacgtcagccccatcgaggtcaagttcaccggcaagaacgtcttcgacatctagacttcttcttcttcttcttcttctctcataatcgacctattaattacttgtgttttgggtggatggacatgtaattttaatcatctgtcaggctgctcttcagttattgatgatggtgtaatcgatcgatggtgggatataatctcttcttataatattgtagtatatgtttggtgaaaaaaaaaaaaaaatcattaacgtgttaattattgtgaattaaatcacatgatcaaacaaaaaaaattcttcataaaaagcaaaaaaacctcgtgc

SEQ ID NO: 11607 - DNA, 930 bp, Oryza sativa
  Clone ID: PAT_MRT4530_17815C.1
atggaaggcctcgccggccatggcgacctcccgacagccgccgccggcggcggcatgctggcagttgatctccttggcccagctgcaggaacagtaacagaggagggctacttcgtcttcgtgcagcagctggtagtgcgcatcaccggcggcggcgccgccgccgccgccggcatttcgttgccaacgtcgtcgtcaatgcaggaagaagcatctgcagtagtagacgttacaattgatggattagcatcagctactacccacggcaatgccattgttgccgacgacgacgcgggcgatgacgggaattgtgccgttgaggcgttattacatggagtcatcatcatctctctcgctgggctggcgacgccgcggcggaggtggattcgccgctgctgttcctcaacggcgcacaacatcatgacaccgtggttcccgttcaagcagtccagcatcaggcccgccttcgacgtggccaccggcgagcacaaggtcgatcgtcaggcccttcaagaaaccgagcggcgaggcgagctacgagctgaggccgtgcgccgcttgtgggccatgcgccgcatccctccgcatccgcgctcgcgcccggacgccgcgcacgcgatcgaccgcgccacctccgcatctcgcgtcgcccccgtgcaccgcatcgtgccgcgccctaactccgtgtcgcgccaagtccgtccttccgccgcgaatcccggcatccgtcagcgccacgctaggtgggcccgcgactcgaccccggtcaagccgccatctccttcagccgtcactccaagagatgaggaacgaagccgattggataagcgcgtcgccattgccacgtccgccaaattatccagacgcatgacgtcccgtcgcccctccatgcacccgctggacaaaacgatgcgcaccctctcaagctag

SEQ ID NO: 11608 - DNA, 175 bp, Oryza sativa
  Clone ID: PAT_MRT4530_17816C.1
taaggggggcccgggaccaccagccttccttaagggaaaggggatccccaaggccctttttaacccgttaaaccggccgttggcccaaattcggcctggaacccggttttccaatttgcttctttttcttaattaagtggtccacctaaatttcaattcactgcccgttttgtgc

SEQ ID NO: 11609 - DNA, 1004 bp, Oryza sativa
  Clone ID: PAT_MRT4530_17817C.1
ggtggaaacaacaaacaaaataaacttttatgtaaatattgctaaccatatcattacagtttggtcttgatactgctctacagttatgagtaacatcaattacaataaatagaatcgagaagagttctaaatgaaacaatgaccgccccagccttcaattttcttccctccaaaacacatgttagctttcaattcttcagacatctttttttccaaaaacaaaacaaactattggaatggccagaaccagtacaagtgcattttactctacaggttggccaatgatttgtatgcgtcaatttttctttggatccgagcttccgttcaggtagccttcaagaattgtgttgcaggcattcatggctcgcgcatccagtagactgtggttccagagtttgaccataaaaaacctccaacaccatagtagagctggattttgtacaagttcttgtccatgaaactgcgagaatgcttcgcatgcccagggaatatggccatccgctagtaccctttgtttccgaacaaatgaattccacatatgcataataagtttctcgtcttttgtaacatcaacaaaatcatcaagcattcttctatcttcaaaatcagcaatgtcatcatcaacttcatcttcactatcacgatctgagaaaacttgctccaatgccattggttgagccctgtgagaatgaaagaactggcgtttttgtaggagctgccgatttctgggatcagctcgttcaacagacagctttcttgtcttcccaaactgtaacactgttggtgctgaaagattgctaccgtgtaatgaattagcaggatcaacagaagcgtgtgctacagaactaccattttccctctgcacgtaatcgtcttcagatcctgcctgggcatcttcaggtcatccgtgaatccacaatatgtggatgtacagtgcctaattttctccacttgagatttccacccttggtacgcttcttaaatcttgggcggtacgaaaatgt

SEQ ID NO: 11610 - DNA, 3402 bp, Oryza sativa
  Clone ID: PAT_MRT4530_17818C.1
atgacacaacgtgacaaccagagggagcaaggaaagcaggatagctttacaaggaaaggaaaaggaaagcggccgcggacgccagccgccattccaatccaccctatagaagtgcctccaactgcagtgccaggtgggccccgagaaccgggcccacatgtcatcgaggttctgaggataaaaggcaggagtaatatgaagtactctatcaatttcataatttgggacttcaaaagattgtgcgaataccaaacagggaaaaggtcaaatccttgtcctcgttctctgcctccaaacgcggttatgggcttggcgcttactagggattgccggggaagtgggctgttgaaacgatgctacgcgttagagaactgtgggcaagactggctgttggggagaaggggtggaggcatcccttcggcaaatgtggtgatggaccgaccacaagatcctttcaactcacgagggattgcagttccccctgcagtcaagatgaggaacatggctggaaacaacagtccatggatagaccctctgccaccaccgatgaatgcgcgcaatgggctggcaaatgccagcctcttctccacctctttgccagtccttcctcatgaaaaaatcaactttcttgattctgcacgtggcaccccattgatggatgatgcttctgcaaaactaaaagagctcgatgatgaccctgaagggaaggactacaagtttgactttgatctccgccaaatcgatgatttattgcctaatgaagatgatcttttcgcgggtatcacaaatgagattgagcctgctgggcagacaaattctatggaagaactggaggaatttgatgtatttggcagtggagggggcatggagctggacacagaccctgtggagagcatcacagctggtttggggaatacaagtatagctgatgggcttagaggcaatggggtcaaccagatgatgacctgttgatcatgtcagatgttgatgaaatcccaagtggacggacaattcacttttcggacgatgttgcgacggcatatcatgagctcctttcatgttaagctatggcactacctctacgcacaatatgggaatatccgaacactttatactgcaacgaaacatagaggttttgtgatgatatcttattttgatatccgagctgcacgtggtgcgatgcgtggattgcagaacaagcctctgaggaggagaaagttggacattcatttctccatcccgaaggagaatccatcagataaagatttaaaccagggaactctggttatttttaacttggatccctcagtttccaatgaagaagttcgccagatttttggaacatatggggaatctttttagacaatgcttacctgaagtatacaacattttcaagatatcatgtcctatgttggggccgatgccgaggacactttctgctgtttaaattactgcctgatagctggaaaatgttgataggtacagataccttctcccagggtactgcgggagagaaagtgggtagatcttgatgatctacacgattcaatctgatgtggaggccatatcactgccattttctccacctccaagattggttggctgtgacggtagcatctcatatgattggctaacttagctgcatgatggcttgggatgtgaagctgtggacaactggaacaggcatcagtcctaaagcgaacaccggaccccccaactcgcatgcggtgaagattgttccaattgggaaggatagcaactggtctaaatatgacaaagtattctcaaacaacaaccagccccacggtgctgcatttcagcattcccattcataccaagatcacaaaagtgaacatatgagttcaagtcctgggactttaacagggcctgagtttctatggggtagtccaaagccttattctgaacatgctcaatcccctatttggcgtccaccagcaattggtcatgcaataccatctaatacccgttctcaggggcagggattattgtatggtggccgtcaggcttcactttttgggtctcaagatcagcttcatcatcatcatgttggctctgccccttcaggtgctccatttgagagccactttggatttttacctgaatcaccagagacgtcttatatgaatcaagtcaggtttgggaacattgggaatattggtagtggccgaaacggaactggcctcatgctgaacatggctgctcgtgcttctgtaaaccctgtttctgctttgagtggaaacatgtcagacaataactctagtagctttagaccaatactatcacctagattgggacaatcattttacgggaatcccacatatcaagggcctggttcttttggacttgacaattccatcgaacgtggtcgtaaccgccgagttgacagcagtgtgtttcaagctgatagcaagaagcaataccagcttgatttggagaagatccgtaaaggcgatgatactcgaactacattgatgattaaaaatattccgaacaagtacacttctaagatgctgctggctgcaattgatgagtttcataaaggaacctatgactttttctacctgccaattgatttcaagaacaaatgcaatgttggctacgcgttcattaacatgatatcacctgtgcacattgtatcgttctaccaggcgttcaatggcaagaaatgggaaaaattcaacagtgagaaagtagcctccttggcctacgctaggatccagggaaggactgcactcatttcacatttccagaattcaagtttaatgaacgaggataagagatgccgccccattctttttcattctaatgggccagatgctggaaatcaggaaccatttcccatcaacggcatatgtatccatatgccactggaagatggagcaattgcaacaggggatccctttggaaatgaagaggacaacaatcagaacgagaggacagcaggagaagagttatgaccattgctttggagtcgccgataaatcttaactgcctagagaagagttttccttcccaaagtgtatagaagtgagaaagattggttagctgcgaaagtttgtggtgtggcatggcgcatctactagttttttttgtggcaaacgatgtcgccccctgaagaacaaaaaagtgacttggagttgagagttgggagtctgctaggtctctctctccatgtcttcctttcaagtttcaaccccctctgtacagatagatgtcgggagttgataattggtcgcatttgatttggtgtaaaaagagagtggtaccggtcaaactgtacagttttaaacattttaatcctctatgttttaggagacttgttaactctatgttttatcctgtgtgaactgagactccaaacagggttccaccttcctgtct

SEQ ID NO: 11611 - DNA, 2379 bp, Oryza sativa
  Clone ID: PAT_MRT4530_17819C.1
atggcggatgaaacacttgatttgaatgagccgccacatgaaaatcaaggtggtggcttgaactatgtattattacaaaaagattctaagaacatatgccgcaccaaagtctgtgatattccagttaaagtgccctcggtttggtcaattgttaggtttgtgccaactaaggtgtaccagcagtgtgatttcctgaaattttcactgcttcctgaacctgaagatgatcgtcagaatattgaatggggaaagttcatgcgtttcctctgggacaatcagagggttgctgtagttagattcagctcctttgccttacatattttccctcctcaatctcatgaatctcatgaacgccctaacttctcacatgcggtggtcatgtatgagcaaaaagatcctggagactgcaaaccgatggctggagtatctgatgctttaaaaaggtcatacagaagtgatttccaatctggctcgatgaatccaaagtcatatttgagagaggagatttgtgatagtggcccaaatcctaaggagatgaatgcctcgcgtgtcacagagctgcacaaatcagttccagaatcatcaccatgtgagtctgttgaagatggccctagaattttagatccaatagtgaaaaagagaaccaccactcttgcaaaaaattttgtcagcacggatcctagttatctgcgaacactcagtcagacacatgctggctgggtctttggagcaatagcagagctcattgacaactctagagatgcagatgcatcaaggttgaatatttcagtcaaatcattgttttcgaagaaagcagacaaaaaaatccctgtcttgtctgtaattgatgatgggcatggaatgacttgtgctgaaatgatgagaatgatctcattcggtcacaaaagaccggataagcaacgccaggatcaaattgggaggtttggaattggatttaagactggtgctatgaaacttggcagagatgcaattgtgctaacccaaacttcatcttccagatcagtggccttcctatctcagtcttttaatgaaaataaagataatcttgagatacctgtggtgacatatcgtaaagaagggcaatacatggaagttgattcaagtgtccaatctgaagctactgctgaatataacctgaatgctattaaggaattttctcccttcaatgagtatttcattggagaaaagctagggatatttggtgaagacggtactggaacacagatttatatatggaatttagatagatggggtgcagattacaccttggactggagttcagggaagccatctgaagatcctgtccaccatggtcgtggagacatactaatccgttcaagaagagtcagattgcgcccaggacaaacaagtaacaatgtaccattggactattctcttcagtcctatttggaagttatgttcctgaatcctcggatgaagatctctgtccaagggtcttcggtcaaaactcgccctttagcaaagacccttaacaagacatctgttatatctggtgaaataatgggtaggactattcaattgacccttggaaggagcaatgtagaatgggacagaatgaactgtggaattttcttgtattggcatggccgtctaatagagtcttacaaacgagttggaggtcaaaagcataatgctgacatgggacgtggagtaattggagttgcagatatcacagaccttattgatgatgaagatggtaattcatgggttcttaacagtaaacaagggttccaagattgtgaaatgtatgctaaactggaggagtggcttggtaggaaagcggatgaatactgggatacaaattttgacactctcgaattgagaaaagggagggggagctataaggctgatcatgagtgggttcagtgctacagctgtcgtaaatggagaatattgaatgcaggcttcgatacaaagtctctgccagatgaatggttttgctacatgccaccattcaatgggaaatgtgaggttgcagagcaacaaatggcacgtggtgtcattgtgataggtgagaaacgatctgaacatgataagcgtgataggattacccagcaggaagaggtggctaaggtaaatgcaagagaaactaggtccgatgacagccagtctcaaaaatttactcaagatgaagatgtgaaggacgtcaaactaatctcaacggttgtcaacaagaaaaggaaatcatccaatgggacccggtcgatggacaaaaacaacagcgaagataagcatgatgatgctgaaggcgactcctcacaaactcagcctggtacccctcgccctgttttgaagaggatacgtaggggccctgctagaagttgtaagcagtcatga

SEQ ID NO: 11612 - DNA, 3126 bp, Oryza sativa
  Clone ID: PAT_MRT4530_1781C.1
atgtcgtactacgtcgatcctcgtaccagcgtactccaataccctctatatccggtctacgggtatcccccgtcgacagtggcgcaccaggtagggggacttggtactcaaggttctactactatgtcatcaagcttcgttgacaacagcgtcaaccccggcttcaaccaaggagtttctacttcaacaatgttggcgtggactcaagtcggcgaaatcgtctttccggtttacaccacggtgctgatctcgactggtccatcaatggccggaagcgagaacgccgtagttataaccctggacgactccatgtcgaaggatcctcccgctgaagtggagaacagaacgtcgacaacatctgagcccgagaaggatcctagtgcggccaaatcttgtccctccgacgagaatcacgagccgacaaggacaacttccgaggcgacaaggtcctggtgccctatccacaaaaccaggaaacacaccttacaagcttgctgggtttttctcaacgtacaagctgagatccgtgcctgcaaagagcgtggaattcagcgtgggaccagcacgtctgcatgcgccgacgcagaagcggagaatcaggtggcaacactggcccagcacatcagggccatcaacacaatactgagggagaccccttatgatcccgttctgaacgatgatcttgcgcagtggtcagaacgattacgggaattagtggccaacctcagcaacgtgttcgaggaggccgctgccagggtaccgctagaacaaccgccaaccggcggcgttaatggcgaactgcctgagcagcgggcgtcacctcgtcaagccacccctccccctcgcggcaccagcgatctccgtgaccatctgaatggccgccgagatgtacgacgcacgcggaacaacgaaaaccgttcccgacatcatgtctcttcgcgacgtcgcgagaatgaagagcgaggagacccgacggaaaccgagaccgtgataactgccacaaccgccacaatcatgacgatcgcgaacagcggatgccgggcgatactagtcgatgacgccgccataatgatggtgatgatggagatcggcgccgggacaacaacagtgggcgacgataggattctcgggaacccggacgtcatcctcataatcgtacacttgaaccaacagcagttcgtcactaacttccaaggaacttacaagcgccacgcgatcgaagacgacctacacgcgttgacacaaaatccgggcgaatcattgagggactacgttcggcgctttaatgagtgcagaaatattatccccgagatcaccgatgcttccgtgatccgcgctttcaagactagtgtcagagatcgctatatgacccaggagttggcgacaaggcggatcacgactgctcgaaaactattcaagatagtcgatcgatgcgctcacgcggacgatgcactgagacgcaagaacgacaagccgaagacgggaggagaaaagaaaccagcgaaagacgcacctgaatcaagcaagaagaagagtcgcaagagtgggaaaaggaaagctcaaacggaagtcctcgcggcagagtacgcggaccctcccaggcacccagacccacaaggcaacgacacaaagaaaatatggtgccctatacacaagttggacagacactctctggaagattgctttgtcttcaaaaagttgctcgcaaagcaactggcattggagaagggcaagcgagtacgtgtagtcgagaaggccgctgaggcagctactcaggactcggactcagcatatccagattccgatctccatgtctcgcacatcttcggaggttccacggcttactcctcaaagcgagagtacaagaaagtggagcgtgaagtttgttcgacatggcagggggctgcgcccaagatgaagtggtctgaacagaagatcgagttctcagatgaagaccaccccaagattgctgtcatcccaggacgatatccgatcgtggtcgagcccactattcggaatatcaaggtcgcgcgagttctcgtcgatggcggcagctccatcaaccttctcttcgccagcaccttggacgcgatgggaatcccacgaagcgagttgacaccgactgatcaacccttccatggaattactcctgagtcatcgtccaagccattgggcaagattacgttgcctgtgactttcggccaagcaaataacttccgaacaaagcagatcatctttgatgtcgctgaatttgatacaacatacaatgccatcatcggaagaactgcacttgcaaagttcatggccgcatctcactacgtgtatcaagtgctcaagatgcctgccgtccgacataccggggatcccagggaggtgattgagcacaaactcatggtgcgacccgatgccaagccagtaaaacaaaaactgcggagatttgcaccagatcaaaaacaggccatacgtgaagagctcgacaagcttctcaaagctggcttcatcagagaggtactccatccagagtggctagccaacccagtcatggtgtggaaggccaacgggaagtggaggatgtgcgtcgacttcaccgacctcaacaaggcgtgtcccaaggatcacttccttcttcctcgaatagaccaactggtggactcaacagctggttgtgagttgttaagctttcttgacgcttactccggctaccaccgaatcagcatggcaaaagaggacgaggagaaaacagcattcatcacgccgttcggtgtattctgctatgttaagatgccgtttggactgataaccacaggaaacactttccaacgcacggtccaaggggcacttaatgatcagcttaggaacaatgtcgaggcctacgccgatgacattgttgtcaagaccaagacaagtgactcattgattgacgatctccgggaaacgttcgacaacctccgacgatatcgcctcatgctcaatccagagaagtgcacgttcggagtaccatcgggcaagctgctcgggttcctcgtctctggaagagggatcaaagcaaatcccgagaagatcaaggcaatcgagaacatgaagtcgcccacaagactcaaggaagtccagaagctaactggatga

SEQ ID NO: 11613 - DNA, 576 bp, Oryza sativa
  Clone ID: PAT_MRT4530_17820C.1
atgtctcggtggatatgtggtttgaggtgctttggagttcctggagttgcttctccaattagcacaccaattcttttgtggcgtgagacacatatccactaccctacttatcacgatggtcatgatcaacatgatatgttcactggctcaaataatctccttgtgccgaggattgtattacgactatgtacacatctacgtctcatgctgaggattgcatttcatagtaagtttgatatccttacactgcaaatgataatgtattctttatatttatttgtgttctccctccactttagtttaagctccattggtgatgatgagcaacccacaaccatggagatcaactattattactataaggactatggactatgtacacatctacgtcttgtgctggggattgcatttcatattaagtttgatatccttacactagaaatgataatgcattttttatatttatttgtgttcctcctccactttattcaaatattgatatctacatacagatacgtgcagagacgtgcagggtctctaatacatgagaaagatgaggaaacaaaaaccgtgtag

SEQ ID NO: 11614 - DNA, 152 bp, Oryza sativa
  Clone ID: PAT_MRT4530_17821C.1
atgtttgggtttgtgggtcaaggagaggagcggtcggctgaaggtggaataaaaaaaaaactatttgatgtatggggcatcgacttcatgggacctttcccaaagtcctatgactgcgagtatatcctagtggccgttgatgatgtgtccaa

SEQ ID NO: 11615 - DNA, 663 bp, Oryza sativa
  Clone ID: PAT_MRT4530_17822C.1
atgcgcacgcacacgcgcacgggcggccgggcgcacccagctggatctccggtgtgtgacacacatgcagatgcagcacaatctgtgatgttgtgggagaaacttgcacgagatcgtgccgtgcccaatggtgccacgagaatatcgccggagagaaatatcaaatataggccaaggttacgtttaatttgtcaccgcggggcgccgacaacgggtggccggcagcggcagcagcggctggaggcgtggccggcaggcggcgaccggccggtgaggtgcccgcggcacggagaggcacggaggcgcggcacggctggtggctgtgtaagccagcgaggcacgaacagcggtgacggggttggccgcggtgcgaggaggctcggtcggcggcggcagtggttgcggttgtcgagaggagtgtgccattgcgatgcagcggcctgcgccacgagaggcaacatggcgcgcccgatgatgccatgcggaggctgtcccgcagggggcactagtgcagtggtgcccacgcacccgcggagattcagatggcggtggagcatcgtgcccaccccgtccaacctaatcaacaaaactggctcgagctctagctatcactgcaagaagattgggaaggagaaggaggagaccatcacaccagctgcaacc

SEQ ID NO: 11616 - DNA, 2462 bp, Oryza sativa
  Clone ID: PAT_MRT4530_17823C.1
atactgaggtaaaataaaaattaaccacgtgtaatcagccagtgtttccatatatcttgttacaacgcacggacatgtgattaatttaacaaaaataaaagcagtaacttattgagcatatgaacgaaaaaggtgttcgtcaatgcaaggaacaatttgtctcaaccacagtgcacaaacagcacttaccaacaagccccaaaagaaaggcagagttttgccaataaactggaagcaccgatgaacaggtgaatctggtggacgcacgagtgaaacaggattgaacagagaaagaaagaaagaaaaaaaaagaaagccatcaaagtgttcactagtagtagagagatatttgccgggacgcagacatgtggaaatggagcaacagcagcagggcccggacatgacagtgcaggaaacacaggtgagaccaaaagtttttcccaaatgtttctcggaattgcctctgcctgcctagcaagacaaacagcttgaaacaaaggcagtgcatcctccacacgcatccccaactctccaagtgtatctccatttccacaccaacttgcgcccaggcagcccggcccccggccgagctggcgcccattttcggcatgtgcgcctacccagcacgcagaatggtgaacactggcagccgccatgtcaccgtcgacgacgacgacaatggtaccattgtcgtctacaccctctctctctcttcatctgatgacagcattgttgggtaatcctactccaggtcctcatgagtcatcgctgacgtcatcgtcggcttacatgcaggtcagcagacactgatgttttcagaccattctggttgagcaagaagtgagcttgacatcggcgaaatcatggctggttctttgtaaatgttgtcgacgactgacgccgctggggatattggtatttacagttctatgctagaagattgggatttatgtacagcggtgggtggggcgctttcacagaaccaactgtattcacgcaactgttgctcccatgcttgggggatgctcatgcttcatggttttcatctgatgaatgatggtacgccacctgagtcaaatgcatcatcagccttgtcctgggactgagactgcggagagtatacaccgcgatgtatttgttgacatggcatgctatgatttgtcgatccgcggattgagcaggcacccaagaactcaggacctgatcagccctaggctgtacagcgatcttggtctgaacagactgctgaagagaaacctagatggcgactcttgcggaggtgatttgcggtgatcagggtgcccttttacttgaagcactgtctggcctatctcttggcgtatagcttcaagagtcttcagatcgacggcggagctccctgctgcatcgcggacatagaaagtgttgacagccttgtcacccctagtagaaacttcagctctcgtaaccgtcaagccattctcacggaagatgcgtgtgacatcggatagcagtcccactctatcacctgtcgacaactctagcttcagcccctcggatactctcctttctatagcagcttcaagacactggatgactcgctgtcgctccgcctcagagttgacaggtgagccatcaatatgcctaatgtaatactcctggtaagcttcagggccctcaacaaacacactcccatggaaaaccacatattgcatatctgtcagggtgcaaactgtgtcgaagagaagctttggccgatccttgcaccgaatattcaccacggaataatccttgtcgagccaattaacaaccgaaaccaccggtgtggggttgacgttcgtcctatccttatcatacctttcataatcccgatcctccagcatcagctggtgaagcctccgctctgtgtgggttatccccattgtcaccgttgtcttggtgtcttgactcctgttgctccctttgaacacatagctaagtcgctcctttattctagcaagccgttgtgtgtctgagattgccagccccgttttcctatccatgacttgcatgaccgctgctgctcgtttgttatgagtccacacctctgcattcaccacattgcattccaggtttgtgagcacagcgctcacttctgagagcagaccgggcctatcagttccagttagctctatcaaagtgtagtcagaggaaggttccactccaacagatctcctccgcgaaggaagaaagcaagaatcagccccaagacacttatgaatatactttactatctcatccagtaccgattcatccattatcttctgcccattttgatcagtcacattgaacacatccatgaaccatccaccatctgatgatatgtaggcttttttcactatgagttgcagctcggtgaggacctgcactacctctaacagtatcccatacttgttggcactgtctacatgcacaactgttgcattcttacatgatgtgttgtc

SEQ ID NO: 11617 - DNA, 435 bp, Oryza sativa
  Clone ID: PAT_MRT4530_17824C.1
atgttcatacatcgcaccaagctccttgatgctgctgcacagctagcagttatatccgatcgtagagtctttgtttatacatgtttgatgaagccctcttcttcttcatttgttgtcgacacaatctctcctctttctcaacaccgtggtgtcactccactgctgctggccgtccgatctcgtggcctggctcacttcttttttcaccgggatcagcctggctcacttctcactcctgcgaaatcagctgtcatgtggctgacacccgacgttcagcaggcaacacacatagcccacttaactcaactgcgcagtgtgcaaagcactactacagagaagctaatcggtgccggttgggaaccggccttaggtgccggttttcccaaccggcaccatggaggtgacaccgatgactttcagtcacggtgccggttt

SEQ ID NO: 11618 - DNA, 198 bp, Oryza sativa
  Clone ID: PAT_MRT4530_17825C.1
gttattttgaagtgggacagctcccttgtctcccttgtatcatgtgcatatggctcataacgtaataatcatacaattataaacccgggttccagggggtaaaactaggaaccaccatcttccccctcccactcctcacatgacaccaagaactcaaccaaaactcattcccaaaacacgctgcctctttacctaggc

SEQ ID NO: 11619 - DNA, 597 bp, Oryza sativa
  Clone ID: PAT_MRT4530_17826C.1
actagtggatccccgggctgcaggcgccacgccaccgccaccgccaccgcggtctcccgccgcgtccctcacccacatcccgcccccgcaaccgcaatctccaccgttctgcccgccccaaagctcgcctcatccttatcctacgccacccaagccgcggcggcggcggccgtgccggcggcgagggccccgagaacggtggggagtctgctgcggctcaacgacctgagggacaatccgggggcgcggaagcagaagacccggaagggccgagggatcggctccgggaagggcaagacggctggccgcggccacaaggggcagaaggcgcggggcaccgccagattcggcttcgagggcggccagaccccgctccgtcgccgcctcccccgtcgcggcttcaagaaccgcttctctctgacgtttcagccatgtggtctggggaaaattgcaaagctcatcaacgctggaaaaattgattcctctgaattgatcacaatgaagacactgaaggatacaggtgctattggaaaacaaataaaggatggaattcgactaatgggccgtggagcagaggaaattaaatggccaatccac

SEQ ID NO: 11620 - DNA, 413 bp, Oryza sativa
  Clone ID: PAT_MRT4530_17827C.1
atggcgacagtggtcagtggtgggtacaaggaggagttgaccggtcttcgtcgagcaacgacatgggccgttcggcccacgggctgtgacgggccgcactttgcttcgactgctgaaaactttaggatggtcccaagtcgacgcatcccctctaggatcctacgtggtgctgatgtggcaatgccacgtagacgtgacgtaaaaagagaaaacaacgccggctgccgcctgccgccgaccgtcgcctgtggccccgccggccgccggccgcctccccgctgccagccacctgcccgccgccgcccacctgcccgccaccgccgggcgtggccccgccggccgccagccgcctgcccgctgccgcctgctactggatgggaagggaggagggggaggagaggggacgatgatgt

SEQ ID NO: 11621 - DNA, 351 bp, Oryza sativa
  Clone ID: PAT_MRT4530_17828C.1
atggagctcggcaacggcagcgggagaaggactagaaagggcggtgagggagagggcaagttgattggaagagaagatgcggcggaaatcgagagaaggacggagcagcgcacccgcgccaccgtgtctctcttccttgcctcctccctcgctgcgacgcgcaccgacactgccacccacctcgccgagctccatgaccagatccacttcggctgcatcatctccaccatcacacgcaccaacgccgtcgcgcgtgaagatgctcacagccgccaccgctcctcctctgccgtttgtcagctcgtgcttctcctcctcgacctccgccgatatgtgcgaggagccccgtag

SEQ ID NO: 11622 - DNA, 389 bp, Oryza sativa
  unsure (1)..(389): unsure at all n locations
  Clone ID: PAT_MRT4530_17829C.1
acaaaaatggcactaagggttattcaatcaacccaatagagtgcgacccttcccatagaaaaaagaaaaaaagctttttacaaataaaaaggcggggcaaggcatgtttggtttataggctagctaacaagcccccaagggtcaacgaaaggaataaaaaccgggtaactatacaggggggggtttctttttattcttgggattatgatttgtattagcgggtattgaaccaaaatcccccgcaaaaccctgcactcatgaggccccgggttaattctagccaccaagggttttttgcgggcgatcataaatgtcctcatcaagggcccccggttcgtcggccccgccgcgnggttctttaacgttaccggggcccacattgggatacc

SEQ ID NO: 11623 - DNA, 1572 bp, Oryza sativa
  Clone ID: PAT_MRT4530_1782C.1
atggctgacaatgagaaaggcaataaggtcagaagtcaggacattggtacctcaagctctcgagtgaatgaagcaccagacaccagttgtgtggcagtggtccaacacctgattaaccagaacaaattgcttatagagatactacagcagcatcggatgccaattttgaacccgagtcagatacaacctcaagtgcagttggaggcagtccaagcactcacaccacaagtcagcgcaccgccaacatcccagaaggcccctcatgccatgccacatgttgacccaaaagaagcaagtatcatctgttttatgtgtgatgagcaagggcactatgcaaggaactgtcctcagcagaaaagaaaagcaccaatgcgaaccgaagatgaagtccgtaagatgatcattaccagcacagaatggcctccaccaggaatgacaaaatgtcagagaagaaattcctcccgaggtgcacaacagttgacagagcatcttttagctaatggaggtagagtgtctggtagtgaagattcagatcaagtctcctcagatgatgaagatgagaagtctccccaaggttttaaccagaataaaatagaacttaaggcatgctctcgttgtggagaaatcggtcatgttgccagctcgtgtgccactacatgcgttcattgtgaggaagaccatccacccgacagatcccatgttcccgcaggaatgatcacactgagaaaacgagagttccgctacctgaagcaagaagatttgaccgtcacagagtacctgcacgagttccatcgtttggctcactatgcaccagaagatgtggaaaatgatgaagacaaacaagagaagtatctccaggggttaaaagatgagatcacagtgcaactactcctagaggaatatgaagattttgagaaacttgtggacaaagccatacaactcgaaagtgagcataatcggatgaagaactgtaagagaaggattgtcagcatcccagtattcccatgtggtaaccaaagacagcgcacggagccacttcagatcaccggatcttctgttgcgcatcaagagtttccgccccaagaagatggacacaatgcagacaacaacattagcaatactaatgatgatgataccaccaacaaccatgcttcttgccccattagtgaccactcaaatcaagcgtgcaatgtcaacatcattcaccaaggtgtcgacgatagtatcaatgatggcacccaaaatgacaaccctagcaattgtgactctgagaaagactccaatggtgatagcaactatggtaccactgatgccaatgttagcaaggatttccaaccaccaattccaactccaagtcagaatgatcgtccccagacggatagctcagcaaagaagacgttgatttgctacaattgcaaaggaccagggcattactcgagggactgcctgcaaccaaggcaaagtcgatctccacattaccgccaatttacacgaagcagacatcccaatcgtattgtggtcactggagcaaacgccgtacccgtgaggcctcgtgttaatcagaacccatag

SEQ ID NO: 11624 - DNA, 241 bp, Oryza sativa
  Clone ID: PAT_MRT4530_17830C.1
gcaagcggtggcggggaggcgccggcgcgccagcgacccgaggcaccgcgcggccctggaggactgcgtccagcatgatggggctcgcgcgcgcaccgctcgccatactcgcagggttgcgacctacagaccaacaacgtcctctacctgctaataactgaactgctggttgctgacgaatgtcatgccgaagctccaccagctgggccacgacgttgttgcatgtagagcgtcatggccc

SEQ ID NO: 11625 - DNA, 272 bp, Oryza sativa
  Clone ID: PAT_MRT4530_17831C.1
aattaaacgacagtcctaaaaagagcagatcgacagaacccgtaggcacaaaaaccaggaaaacaagcaagaatcttgaggagaaaaagaaaagaaccaaaaaaaaaaaatatgcagccaactagacagaaagaaaccaatcgtagaagaaatcgaacaaccagaacgataaacgccaagggaaggagcagaccatatgcaaaagaggcacaccgggaatggaataaacacaccagtccgcaatattacaaggaagacacaaaggagcggat

SEQ ID NO: 11626 - DNA, 752 bp, Oryza sativa
  Clone ID: PAT_MRT4530_17832C.1
atggcgagcgcccctacggccgccgcctgcttcgggttgctggtggcgatgtgggccatcggattggtctcctacctcgaccagttcttgggtgccctgatgagctccgctcgagctctgccgccgctcgacgttgctgtggaggtggtgatggcggtggcggcgatcggctccctcaacaccgccatggcgtccatctacttccgtgtctacaacggccgcgccgcagctgcgaacaggcggatgctggatggtgcgtgcttcgccgtgtgggcgtcggccagcgtcctcctccacctcatcttcttcctccagccgggcgccatggacggcgctgatcaagatctgctacctctcgccgccgccgtcgtccgcgccctccttccagcttctgcggcggtgacgttcttcgcctccatcatcctcatctacgcgtatctccgtagcggcggcgccggcgccggcaccggtacctccgtgaagctcctcaccaaggtgaccaactcggctgcgcttgtcacgattgttcttagcctcgtcgtcgctgccatcgttgtcttctactccgagtaaatttgccccaagcttgtcgaacccaccactcgatcccatcctataccgctccagttcgttcgggtaagcgactttaatgtctcgagtgtgtgttcatgctttgtggtgtaataagaacatatttcgctgtccatcgtatgcatccgagtactactcttttacgcataaaaaaaaaaaaa

SEQ ID NO: 11627 - DNA, 2759 bp, Oryza sativa
  Clone ID: PAT_MRT4530_17833C.1
atggctttgagcgatggcggggacgtcgttgaagccgcagggctggaggccacaagcggctcaccgccagagacgtgtaaggacctatggggcggaggcttcacattggcaaacttgataaagagggatggaaaagggaagggcagttcactccataatagagaaccccaacacacaaataaactgagccttcaatatcagagcctgaaaatgactcctagagataattataataaacataagaagaagacagacacagaaagttatccgaagacagacagcgaccaacagcggcacaagaaagctcactgcgctgcaccaccagccaacccaagatcaacaggaaccagagagagagatgaacgccgacttcggcgcgcccaaggacctcgcggggggcctccagcagcggaggtctctctaccagcccaccctccctccctgcctccagggcgcaacggtgaaggtggagtatggcgacgccaccaccaccatcgacccaacctgcgccaacgtcgtcgcgcaggccttcccccgcacctacggccagccgctcgtcagcttcgtcgcgccgccgcccgacgccgtcgacaaggaccgcgccccgatcagggtaggggtggtgttctccggcaggcagtcgccgggaggccacaacgtgatctggggactccacgacgctctcaaggcttacaatcctcatagtgttctctatggattcgtcggtggcactgagggactgtttgcgaacaagacaatcgagatcacggatgatgttcttgcttcatacaagaaccaaggtggttttgatttgctcggtagaagtatcgatcagatccgcagcactaagcaagtcaatgctgcaatgactacatgcaacaacctcaacttggatggcctggtcatcatcggaggagtgacatccaattcagatgctgcacagcttgcagaggcccttgtccagaataactgtaagaccaaggttgtcggtgtgcctgtttcactgaatggtgatcttaagaaccaatttgttgaaacaaccgtgggatttgatacagtgtgcaaggttaactctcagcttgtgagcaatgtttgccttgatgcaatctcagctggaaagcttatcttagcggaggaggtagcactatcaaaactcacactgatggaagttattaacaagatatgtgatggagtacaagcaagggcagaattagggaaattccatggtgtgctccttattccagaaggactaatagaaagcattccagaaatgtatgctctgcttcaggaaatcaatatcctccacaacaacaatgttcctgtggcagagatgccatcacaactgtctccttgggcagctgcgctgttccagttcttgccacccttcatcagaagagagctgctgctccatcaagaatcagacaactctgcccagctgtcccagattgatactgagcaattgttggcccacttagtagaagcagaaatgataaagagaacaaaagaaggaagatacaagggaaggaagttcagctctgtatgccatttctttggatatcaggctcgaggatccgtcccatcaaactttgactgtgactatgcttatgctcttggccgtatctccttgcatatgatagcagctggcttgactgggtacatggcaactgtggctaatctgaaggaccctgtagacaagtggcggtgtgctgctgctcctctaactgcaatgatgagtgtgaagaggcatttgcgtggtcctggggcaatcccgataggaaagcctgccattcatccttctccaattgacctgaaagggaaggcttatgagttgctgcgagagaaagcatcaagttttctccttgatgatttctacaggactccaggaggcattcaatatgaaggcccgggttgcaatgcaaaacccatcacattgaccattgagaaccaagactacatgggcgacattgagatactgaaagactgtctcagcaaggtgaggacgatggtgaagcctggatgctcgcgggaggttctgaaggcggcgataagctcgatgctgtcggtgaccgacgtgctgacggtgatgtcgcacccgctcaacgccgagctgccgctctaccatttcaactgagcgttgtagagaataaggtccagttttgtaacacaccgggagagactggcgtattgggctactggtatttggtagcttcatccactttcattttcatttctgttcgttgctgggagtgagaaccactggagttttcatgtcaataaacatcgaaaacggtagttgatcctgaagtgcagctattttcaggatctgaaatgcatgttctgtaatatggtgttttgcagccttggagctcagatccatctgatcgaatcatgtggtgttatgccaatcgaaatggaactttgtatataactccctttggtaaaaaaatatatgacgttttgcacacggtctaaaaaaaaaaaaaaaacgacctcgcccccgctccgcctttcaccttgactatttgaccatttcttctcctattagataaatcacggtgtttaccatttcaaatgggtcaatctttcacttttcctggatatacatcctaccactatctttgtttgcctgctcccctggcactggcagtaactgtgttggcaataagattttttttttttaagttcttttaaacgaatttatctcattgaaactctaatgaagattaccatttcagatgcctgaatgctattatgtgtta

SEQ ID NO: 11628 - DNA, 354 bp, Oryza sativa
  Clone ID: PAT_MRT4530_17834C.1
ttatgcgtgctgccacttgccactggcgttttctccaggggaacctgtccctgctcccaaaatcacgtgcggttttcccttaattagatttaaagtagcacctgccaatgcgctgtcacactgaccattaactaatcctcgtcggcatcgacaccttgccacttgagctttaatcatatttgctctttttcgtccaccacctaccaatctaccacagctccattgctccaccgccatcaaaacctctgccggtgtgtgggtacactgcaccggcgcccccgccggccagtctccgcatgcagccacctcaccgggctctgcctccaccgacatcacctctcgctgcgcagccat

SEQ ID NO: 11629 - DNA, 1478 bp, Oryza sativa
  Clone ID: PAT_MRT4530_17835C.1
caaaccgcaggcgccgcagccgcatctggcaaatagcaacccctgtatcggtagttttgggtcgccgtccctctctctccacctcgcttatcccctcccctctcctcttttacatagacagacagcgaccaacagcggcacaagaaagctcactgcgctgcaccaccagccaacccaagatcaacaggaaccagagagagagagatgaacgccgacttcggcgcgcccaaggacctcgcggggggcctccagcagcggaggtctctctaccagcccaccctccctccctgcctccagggcgcaacggtgaaggtggagtatggcgacgccaccaccaccatcgacccaacctgcgccaacgtcgtcgcgcaggccttcccccgcacctacggccagccgcttgtcagcttcgtcgcgccgccgcccgacgccgtcgacaaggaccgcgccccgatcagggtagggggtggtgttctccggcaggcagtcgccgggaggccacaacgtgatctggggactccacgacgctctcaaggcttacaatcctcatagtgttctctatggattcgtcggtggcactgagggactgtttgcgaacaagacaatcgagatcacggatgatgttcttgcttcatacaagaaccaaggtggtttttgatttgctcggtagaagtatcgatcagatccgcagcactaagcaagtcaatgccgcaatgactacatgcaacaacctcaacttggatggcctggtcatcatcggaggagtgacatccaattcagatgctgcacagcttgcagaggcccttgtccagaataactgtaagaccaaggttgtcggtgtgcctgtttcactgaatggtgatcttaagaaccaatttgttgaaacaaccgtgggatttgatacagtgtgcaaggttaactctcagcttgtgagcaatgtttgccttgatgcaatctcagctggaaagtactactattttgtccgtctgatgggtagaaaagcatctcacgtggcctttgaatgtgcacttcaatcacacccaaacatgcttatcttagcggaggaggtagcactatcaaaactcacactgatggaagttattaacaagatatgtgatggagtacaagcaagggcagaattagggaaattccatggtgtgctccttattccagaaggactaatagaaagcattccagaaatgtatgctctgcttcaggaaatcaatatcctccacaacaacaatgttcctgtggcagagatgccatcacaactgtctccttgggcagctgcgctgttccagttcttgccacccttcatcagaagagagctgctgctccatcaagaatcagacaactctgcccagctgtcccagattgatactgagcaattgttggcccacttagtagaagcagaaatgataaagagaacaaaagaaggaagatacacgggaaggaagctcagctcttgatgccatttc

SEQ ID NO: 11630 - DNA, 7389 bp, Oryza sativa
  Clone ID: PAT_MRT4530_17836C.1
atggactccaccgccgacgttggaggtgaagacgagcatgaaatcgtccaagaggatttatatctcgatgacgacgacgagcagttcgatgttgatctcaatgaagacaatgagatggaggaagcggaacccaaacgggagcaaaatttggttaaggtggggatggaggcctggaaccagtcattcggagcaacctgtaaggtcaggctaatccatatccttaaaaacctccacaccgccgagatcaaaatctactccgacgcgtcgagggagttcattgagctattggatggtgaccctgagggtgaggtgctgcgggagtatgtgcagcagtcgccacggctcgtggagctggctgaggcatggcgattgcatagggagaagccagggatggcttacatactttcgctctttgctactgtcttaggacaccctggcggtaagttgcggcggcatggtttggttaagaagagcctggatggagttgctaggatgatactggaggataaggagaagatgggcgacgtgtatctggagctgaacagtggtgagttccggaggcagaatgctgcgcttgatttgctggctgcaattgttaggcgtggtggagggttggcgtcggagattgctaagagctttgatttcaagatggctgttttgccgcagctctcgggggtgcggaagaagagaggtggcagagatggggggaatcggaagaagggaactgatttcggatccacaaggcgatcgtttgttgggtttgccatgtcattcttggaggttgggaacccgaggatgctaagatggatccttcaacaaagggagctctattcaggggttcttcgtgggatcggagacgatgatactgataccattgtctatatcctctcaacgttgcggaataatgtcttggtagatgagtcacttgtcccaccagggctccggagtgtcctttttggtagtgccacactggaacaactgagcttgatatctgggaatttggatgcgggggaggcagctgacattgctcatgaggtgttaatcatggtgtgtactgatccaaaaaatggactgatgccaagctcaaacctgagaggtaaccagaaacgtctgctggatctcatgaagaagttgaaagctactgaggtcgttcaccacaagaatttgttgctggctattgtgagtaagagtttgtctctttgttcagcatacatgaatgaattcccttacagcattgaaccacgcccatcctcctcatggttttctgccatatccctagcagcggacatgatatcttcagtaaactgtgatggcatctttcaaaatcttttgtccacttcacatgatctggtatctgttgatgatgagcaagtgcaagtactgttgaagtgcattgtgcccaatatgtgcactcgagcagtgataaacagggggcttctgcattctgatgatcttgtaaagcacggtgctctgagacttgtttttgaatcagtcaaccttctgtgcgatgtaattgaagtaatcaatgacatagtatcaaatgctagggtaaagtcagaacacgataattcaacaaaagtgacagtcaaaatagacggttttccaggattaagctgttctacttcagcagatgcatccattgtacatgaggttctacatggagacaaaatgcacgtcgataggtggataactctgagagaatatattcaagatgtagttcgtggagctatacctgatccgcaggttcttctcaagctactctcttctgctagtcagaagcatcaaaattattctcagagtaaacaaaagaaacatgcacagcttgagcctcctcgaaagaaaaggagacgtggagccacagatgaggatgctgatattattattggcgggattgatgttgagttgtctagggatgagcctgaagagcaagagatggacttggcaaatgatcatactactattctgtgtgagatatggggtctaaataagcaagatccgaagatcaaagatgcaaaagtggttggagatgttttccactcaaagttgcttgatgttctcaggttctatctgagggtaatgcctagctcttttgatggatcatttgacttcttcaaggttatgccgcctaatcctttggatctgtccatggatgaacagcagtcccttttatctcttttagttgagtattcaggtcaatctgatggatattggtgcccagaaaaagttccagaatctatgtacaagtatttgcaacctctgattgacattatgttgcattcgcaagttaagagcatccgtgataaagcatatattttagttaaagctgctgtggcgagttctggcgcttttgatcagaacattgcagagattgatgcatggttggctttcttgccgtgttacaaggccaaaggttttgaaagagagggcttaggagttgaagcatctaatagactgtcacacattgtgatccctttcctttgtgatgccatttcagtagttgggaacaatctgtacaaataccaagagcatatccgtaagcttatctctaaatttaaccagtttgaaggctattctccatctttcagtcctttgattgtttgtgttctccagaaatgtcttaggctactagactcggagtctgcaagtgtgaaattacatgagaagtctacaatttcattatatgtgtgcaacacagtctaccttattatgcagtcacaggtagatgtgcttttattgcctgatcttgtaggcaccatcctaaatgagagactcggtaaattttcatcagaggaaataaattctaggatttgttttgctgaatggaggccactgatgtatttgttgcatatcttgaggagtatttctgaccaaaagagttctagtttgttcagcacccttgagcattcgtctgaagtttatggaaattctttgtgttctgtaactagaacaattgaggaaatgtcaaatcagcaacccaccaatttaccagatgatgtagcaacatcattcttatattcagtcatatgtgcaccaccagatgatgttatcagtagctttccgaagcttcttcatgttctgaagacacattttccttctaatttgccgttcttgtcatcagttctttttctgcaacatgattatctagctaaggttgctagttattgcccagacatgttcttcagcagtctcaggcagatcaagggaaatcttgatgttgatagtgtcaatattgttgaggacaaatggggaaagcactcaacttgttcagaatcagctgtgataagtacttttctaaatgtgactccattttgtgcactcttaccatcagtattaagcctcgcattttcagcaccagatgaaatcacaaaggcacatccattacttcaagatgagcttgtacatcttcttcaagctaagatttctgaaagcccattaagtgagttgacaattttcttgagagtcgtcttattttggagccatcacttgctgtcatcatacactgtgaagtgttcagatattcttgcacagttgtgtggtgtttgcttctctcttattgacagcatcttcgagcgcattcgagttttgactgctgatactgctaactcaaaatcttcagtggcattctatccagttgaatgtcttaatggcattgttgagtctgttgtccagcatcctataattggcctgtctttgtcatgctctttatccaattttcaagacttagcagatgggagtgtggaatatgtgaaagaagattttgctagtttttctaaggaaaagctacaccttgctgatagttttgttttaaatcttctgagtaatctatatggccttgtattattagctggtagttttggagctaactactctaataatgatgatcaatcccttgagtcactgtttggccctccgaagctactgcttgagagaatactactgttgttcaaggagaagtttgaactctgcatggagaaaaggaactttggactgtttttgccaaatttttacatgttccgtacactggcaaaatttgtatctcctgtcagactcctggaacttgcaaactggatgttctcaacgtttgaaggtttcagttccagttcacctgcatatgctcccgctgcattttgttgtctatacactgccgatattgccttcgaaatgctatatgactatttacaacaaattgatcagagatcaggaccctgtcgattatggggcttggagattcataattgtgatattgccaccattcagcaagtttataatatcattcttcattttgctactaaattgaatcttgaatttgctgatctttgcttgctgaagatgttaattcgtatccaccatacagaaatatctgcagttaggaacactgattatattgcattacacatgatgttatcgacaatggtggccaacactcccattgacattcttcatcactgcatgtttcccacatctaaggttaaagctaaagctatacagttgcttttgggagcaaatcctatgcacatgcgcctttttggaaaattgctcacggatattctgaaaaaagacacttctgttatgcaagtcgtgggttccgattctaatgcttcatggactcatgaggatagttttatacttttgttgcctgctgccttatcatacatagagcatcatagtggtggcaatagacaaggatcgttgaacaatgaaatagccccagagaaggagtccaagcgagtcaacaatgcaaagctgaagtttataagcatattggtcagaacgttggataaaatattcaggaatttccctcatagggatggcatcttactttcctctcctgaggaactaaatgtcgtcacttgtttggagtatgcaatcctcaagaacattgttgagttgtcttcggaggttcagtcacatctgaaccagttgaagccaatacctttcctcaaccaattgatcagatcatccctcttacatagattcagtgatcctgttgtaataaaagcaatccgatgcataattgttgtattatctgaagggaagtttcctgctgatgaaattcttgaactcatactgggtcactcccattttgtgtcgacaataacctgcagtggagtttccgagtgcccatctgcttgtaatcccactgggggcctgcttcagccagcaccaagtattttaaaatcagttgattctgcttttgcaaaagaaaacaagttccaagactgcattccagaaaggaagaaagtagaaatcatcaggttactcagggtactgtatgatattaagagtaggcaacataacagtagcctattggatgaatcaagggagcttggtttcttgcttttatctgtttatggtgcaactcttagtgaaacagatctagagatacttcaccttatgaatgagatagagtcatctgagtgcaaagccattactgatgtggatcatctttggggaaaggcagctgtgaaatttagagaagaactgaagctagaattttcagcatctgatacgcacaaaatggaaaatgcggaaattagtgataggcgaaggtcgctattccgcgagaacatacccattgattctaagctctgtgtcatgactgtcttacaattttgctataggagatcttcaagagcttctattttttcactggaacagcttcagcaagataattttggcgatattttcaaggcaacatctcaaagcatggatgcggttcggatttatgatcctgtgtttatcttgcacttctcaatccatactcttctgatgggctatattgaacctgttgaattttcccgactagggctacttgcaataacattagttagcatatcatctcccgatgaagacttaaggaagctgggttatgaatctctaggaacattcaaaaaatcattggaggcttctcagaaaagcaaggaaacatggcagctccagcttcttttgacatatctacagaatgggatatctgaacaatggcagaggataccttctgttattgctatttttgccgcagaagcatctttgacactacttgatagctctcatactcagtttgctacaattagtaagtttttgatgcattctgcctctgtcaaccttcagttgttatatgctggatcaaacctagcagatgatgctaagatatacaaaagaggaggtgttttagagcttgctctttcctatggttcttcggctgtttcagattctgaaacaaagcttttaaccctccaggtgctaaagaagtgtgtaaaacttcccgttctggctcatcatttaacaaaagactctggccttctgttgtggatatcctctgtaatctcatctcatgtcgaagggctggacagtgtaaaaaactcctattcttctacagtaattgggtcagcgttggaggtagtgaatgatttgacatcatcaagattaattgcagaatggctccaagaaaccgcccttgagcaactctcaagaatatctaaatacctttatgtccttgttgaagatatgaaattgttgaaaggaaatgttccattgctaacttcagtgctaaatgtgattgcatcaacgatgaggttgtctatgaaaaggaagatttaccaaccacatttctctttatccctccatggcatacataaattgtgccgaactattggtggcatctcaagaagcatagaagttaagcttgcaatgcaacttggcattgatgtcattcttatgaatggtcctctgccagttttgtctgaaatggataagtcgatgacagcaactgttgtttcatgggcaacttctaacatcttctggttgtgtgatgaacaaagatctgtactgaaaatgccacatgaagagccactaaaaaacgagtgcctactttctaagatgctgcgctggttagtggcttccataattcttgggaaaatctcctgcatctctcatgaaaagtgtggagaccttacaagggatgccaacaattttggatctcttgaatctttcttgaactatacatatgatgaaaaggttgaaactgttggcagtcacagtgcagatgaggcactagctataattatactgtacctgcaaaaacatctgaaaatgaaccgagattttttgccatctgtggtggctgctctttgcttgttgcttcttgacagatccaataaacaaggatctaaccatgtttattctcccaggcattattatcaaccttggaaggatcctgctatgcatcgcaatgaggcagagcacctagaagaagagcaggcctgccaaagcctcctggttatgttttctaacagcttcagtgctgggctttcaggttttcctgtgttgtcacttggtgatgttgagaagtctggcctatttcagtgggaaagacattccatacttaaatag

SEQ ID NO: 11631 - DNA, 484 bp, Oryza sativa
  Clone ID: PAT_MRT4530_17837C.1
cgaagaaaacatagctatagctagcacacaccactagctaattaagctcgctcgatcacttcatcagttagcaatggctatcaccaaggtcgctcccctcctcgccctcagcctcctcctcttcgccgtcgccgccgtgcacggctgcgagccctactgcggccacggtggcccggtcatcccgacgccgccggtggtggtgccgacgccgccgtcgtaccaccgccatggccgctgcccgatcgacgccctgaagctgagggtgtgcaccaacgtgctcaacgggctcgtcggcgtcaagatcggagccggccccgacgactgctgcccgctgctctccgggctcgccgacctcgacgccgccgtctgcctctgcaccgccgtcaaggccaacgtgctcggcatgaaactcaacctcgccgtcgatctaagcctcatcctcaacaagtgcggcaagatctgcccctccgacttcacctgctaa

SEQ ID NO: 11632 - DNA, 7782 bp, Oryza sativa
  Clone ID: PAT_MRT4530_17838C.1
atggactccaccgccgacgttggaggtgaagacgagcatgaaatcgtccaagaggatttatatctcgatgacgacgacgagcagttcgatgttgatctcaatgaagacaatgagatggaggaagcggaacccaaacgggagcaaaatttggttaaggtggggatggaggcctggaaccagtcattcggagcaacctgtaaggtcaggctaatccatatccttaaaaacctccacaccgccgagatcaaaatctactccgacgcgtcgagggagttcattgagctattggatggtgaccctgagggtgaggtgctgcgggagtatgtgcagcagtcgccacggctcgtggagctggctgaggcatggcgattgcatagggagaagccagggatggcttacatactttcgctctttgctactgtcttaggacaccctggcggtaagttgcggcggcatggtttggttaagaagagcctggatggagttgctaggatgatactggaggataaggagaagatgggcgacgtgtatctggagctgaacagtggtgagttccggaggcagaatgctgcgcttgatttgctggctgcaattgttaggcgtggtggagggttggcgtcggagattgctaagagctttgatttcaagatggctgttttgccgcagctctcgggggtgcggaagaagagaggtggcagagatggggggaatcggaagaagggaactgatttcggatccacaaggcgatcgtttgttgggtttgccatgtcattcttggaggttgggaacccgaggatgctaagatggatccttcaacaaagggagctctattcaggggttcttcgtgggatcggagacgatgatactgataccattgtctatatcctctcaacgttgcggaataatgtcttggtagatgagtcacttgtcccaccagggctccggagtgtcctttttggtagtgccacactggaacaactgagcttgatatctgggaatttggatgcgggggaggcagctgacattgctcatgaggtgttaatcatggtgtgtactgatccaaaaaatggactgatgccaagctcaaacctgagaggtaaccagaaacgtctgctggatctcatgaagaagttgaaagctactgaggtcgttcaccacaagaatttgttgctggctattgtgagtaagagtttgtctctttgttcagcatacatgaatgaattcccttacagcattgaaccacgcccatcctcctcatggttttctgccatatccctagcagcggacatgatatcttcagtaaactgtgatggcatctttcaaaatcttttgtccacttcacatgatctggtatctgttgatgatgagcaagtgcaagtactgttgaagtgcattgtgcccaatatgtgcactcgagcagtgataaacagggggcttctgcattctgatgatcttgtaaagcacggtgctctgagacttgtttttgaatcagtcaaccttctgtgcgatgtaattgaagtaatcaatgacatagtatcaaatgctagggtaaagtcagaacacgataattcaacaaaagtgacagtcaaaatagacggttttccaggattaagctgttctacttcagcagatgcatccattgtacatgaggttctacatggagacaaaatgcacgtcgataggtggataactctgagagaatatattcaagatgtagttcgtggagctatacctgatccgcaggttcttctcaagctactctcttctgctagtcagaagcatcaaaattattctcagagtaaacaaaagaaacatgcacagcttgagcctcctcgaaagaaaaggagacgtggagccacagatgaggatgctgatattattattggcgggattgatgttgagttgtctagggatgagcctgaagagcaagagatggacttggcaaatgatcatactactattctgtgtgagatatggggtctaaataagcaagatccgaagatcaaagatgcaaaagtggttggagatgttttccactcaaagttgcttgatgttctcaggttctatctgagggtaatgcctagctcttttgatggatcatttgacttcttcaaggttatgccgcctaatcctttggatctgtccatggatgaacagcagtcccttttatctcttttagttgagtattcaggtcaatctgatggatattggtgcccagaaaaagttccagaatctatgtacaagtatttgcaacctctgattgacattatgttgcattcgcaagttaagagcatccgtgataaagcatatattttagttaaagctgctgtggcgagttctggcgcttttgatcagaacattgcagagattgatgcatggttggctttcttgccgtgttacaaggccaaaggttttgaaagagagggcttaggagttgaagcatctaatagactgtcacacattgtgatccctttcctttgtgatgccatttcagtagttgggaacaatctgtacaaataccaagagcatatccgtaagcttatctctaaatttaaccagtttgaaggctattctccatctttcagtcctttgattgtttgtgttctccagaaatgtcttaggctactagactcggagtctgcaagtgtgaaattacatgagaagtctacaatttcattatatgtgtgcaacacagtctaccttattatgcagtcacaggtagatgtgcttttattgcctgatcttgtaggcaccatcctaaatgagagactcggtaaattttcatcagaggaaataaattctaggatttgttttgctgaatggaggccactgatgtatttgttgcatatcttgaggagtatttctgaccaaaagagttctagtttgttcagcacccttgagcattcgtctgaagtttatggaaattctttgtgttctgtaactagaacaattgaggaaatgtcaaatcagcaacccaccaatttaccagatgatgtagcaacatcattcttatattcagtcatatgtgcaccaccagatgatgttatcagtagctttccgaagcttcttcatgttctgaagacacattttccttctaatttgccgttcttgtcatcagttctttttctgcaacatgattatctagctaaggttgctagttattgcccagacatgttcttcagcagtctcaggcagatcaagggaaatcttgatgttgatagtgtcaatattgttgaggacaaatggggaaagcactcaacttgttcagaatcagctgtgataagtacttttctaaatgtgactccattttgtgcactcttaccatcagtattaagcctcgcattttcagcaccagatgaaatcacaaaggcacatccattacttcaagatgagcttgtacatcttcttcaagctaagatttctgaaagcccattaagtgagttgacaattttcttgagagtcgtcttattttggagccatcacttgctgtcatcatacactgtgaagtgttcagatattcttgcacagttgtgtggtgtttgcttctctcttattgacagcatcttcgagcgcattcgagttttgactgctgatactgctaactcaaaatcttcagtggcattctatccagttgaatgtcttaatggcattgttgagtctgttgtccagcatcctataattggcctgtctttgtcatgctctttatccaattttcaagacttagcagatgggagtgtggaatatgtgaaagaagattttgctagtttttctaaggaaaagctacaccttgctgatagttttgttttaaatcttctgagtaatctatatggccttgtattattagctggtagttttggagctaactactctaataatgatgatcaatcccttgagtcactgtttggccctccgaagctactgcttgagagaatactactgttgttcaaggagaagtttgaactctgcatggagaaaaggaactttggactgtttttgccaaatttttacatgttccgtacactggcaaaatttgtatctcctgtcagactcctggaacttgcaaactggatgttctcaacgtttgaaggtttcagttccagttcacctgcatatgctcccgctgcattttgttgtctatacactgccgatattgccttcgaaatgctatatgactatttacaacaaattgatcagagatcaggaccctgtcgattatggggcttggagattcataattgtgatattgccaccattcagcaagtttataatatcattcttcattttgctactaaattgaatcttgaatttgctgatctttgcttgctgaagatgttaattcgtatccaccatacagaaatatctgcagttaggaacactgattatattgcattacacatgatgttatcgacaatggtggccaacactcccattgacattcttcatcactgcatgtttcccacatctaaggttaaagctaaagctatacagttgcttttgggagcaaatcctatgcacatgcgcctttttggaaaattgctcacggatattctgaaaaaagacacttctgttatgcaagtcgtgggttccgattctaatgcttcatggactcatgaggatagttttatacttttgttgcctgctgccttatcatacatagagcatcatagtgggggcaatagacagtgtgttgacttccttgagccagttccagtcttctatcgtgaaattcttttgagtgataatggctttccatgttggaaaagttttgttactagaagtatttttgaggaagattttagtgactttagacacacatcagttgaagatataatgaattatttcggtgacactctcttggggaagtcaataactatgctatgctattatttctattcgaaagagatacctcggaagcaacgattaaagataattgcttcaatttgcccacaatcatctgagctcttagattctgacatcagttttgttactcctgtttcatgcaacggtattatgaagcttactaatgagttatttgcaaagatatcactgattaggatgttgttatctcctcctagaggatcgttgaacaatgaaatagccccagagaaggagtccaagcgagtcaacaatgcaaagctgagttttataagcatattggtcagaacgttggataaaatattcaggaatttccctcatagtgatggcatcttactttcctctcctgaggaacaaaatgtcgtcagttgtttggagtatgcaatcctcaagaacattgttgagttgtcttcggaggttcagtcacatctgaaccagttgaagccaatacctttcctcaaccaattgatcagatcatccctcttacatagattcagtgatcctgttgtaataaaagcaatccgatgcataattgttgtattatctgaagggaagtttcctgctgatgaaattcttgaactcatactgggtcactcccattttgtgtcgacaataacctgcagtggagtttccgagtgcccatctgcttgtaatcccactgggggcctgcttcagccagcaccaagtattttaaaatcaggtgattctgcttttgcaaaagaaaacaagttccaagactgcattccagaaaggaagaaagtagaaatcatcaggttactcagggtactgtatgatattaagagtaggcaacataacagtagcctattggatgaatcaagggagcttggtttcttgcttttatctgtttatggtgcaactcttagtgaaacagatctagagatacttcaccttatgaatgagatagagtcatctgagtgcaaagccattactgatgtggatcatctttggggaaaggcagctgtgaaatttagagaagaactgaagctagaattttcagcatctgtttcgcacaatttggaaaatgcggaaattagtgataggcgaaggtcgctattccgcgagaacatacccattgattctaagctctgtgtcatgactgtcttacaattttgctataggagatcttcaagagcttctattttttcactggaacagcttcagcaagataattttggcgatattttcaaggcaacatctcaaagcatggatgcggttcggatttatgatcctgtgtttatcttgcacttctcaatccatactcttctgatgggctatattgaacctgttgaattttcccgactagggctacttgcaataacattagttagcatatcatctcccgatgaagacttaaggaagctgggttatgaatctctaggaacattcaaaaaatcattggaggcttctcagaaaagcaaggaaacatggcagctccagcttcttttgacatatctacagaatgggatatctgaacaatggcagaggataccttctgttattgctatttttgccgcagaagcatctttgacactacttgatagctctcatactcagtttgctacaattagtaagtttttgatgcattctgcctctgtcaaccttcagttgttatatgctggatcaaacctagcagatgatgctaagatatacaaaagaggaggtgttttagagcttgctctttcctatggttcttcggctgtttcagattctgaaacaaagcttttaaccctccaggtgctaaagaagtgtgtaaaacttcccgttctggctcatcatttaacaaaagactctggccttctgttgtggttatcctctgtaatctcatctcatgtcgaagggctggacagtgtaaaaaactcctattcttctacagtaattgggtcagcgttggaggtagtgaatgatttgacatcatcaagattaattgcagaatggctccaagaaaccgcccttgagcaactctcaagaatatctaaatacctttatgtccttgttgaagatatgaaattgttgaaaggaaatgttccattgctaacttcagtgctaaatgtgattgcatcaacgatgaggttgtctatgaaaaggaagatttaccaaccacatttctctttatccctccatggcatacataaattgtgccgaactattggtggcatctcaagaagcatagaagttaagcttgcaatgcaacttggcattgatgtcattcttatgaatggtcctctgccagttttgtctgaaatggataagtcgatgacagcaactgttgtttcatgggcaacttctaacatcttctggttgtgtgatgaacaaagatctgtactgaaaatgccacatgaagagccactaaaaaacgagtgcctactttctaagatgctgcgctggttagtggcttccataattcttgggaaaatctcctgcatctctcatgaaaagtgtggagaccttacaagggatgccaacaattttggatctcttgaatctttcttgaactatacatatgatgaaaaggttgaaactgttggcagtcacagtgcagatgaggcactagctataattatactgtacctgcaaaaacatctgaaaatgaaccgagattttttgccatctgtggtggctgctctttgcttgttgcttcttgacagatccaataaacaaggatctaaccatgtttattctcccaggcattattatcaaccttggaaggatcctgctatgcatcgcaatgaggcagagcacctagaagaagagcaggcctgccaaagcctcctggttatgttttctaacagcttcagtgctgggctttcaggttttcctgtgttgtcacttggtgatgttgagaagtctggcctatttcagtgggaaagacattccatacttaaatag

SEQ ID NO: 11633 - DNA, 613 bp, Oryza sativa
  Clone ID: PAT_MRT4530_17839C.1
gcagtggctccggcaggacacaaacatacacactcaacagaacgcacaacaagagaagagatcgctacacacacacactagctatccaatccgacacattaagatggcgtccaagagtcgtttgctcgcgatcttccttgccgtgaacctggtggcgctgcacgccggcgtggcgcgcgggcagcagagcccgccgtcgtcgacgcgcgggaacccgtgcccgacgagcgcgctggccgacctgaaggtgtgcgccgacgtgctggtgctgctgaagctgaagatcaacgtgccggcgagccagcagtgctgcccgctgctggggagcctcgtgaacctcgacgccgcggcgtgcctctgcgccgccatcaggctcagcgtgctggggatccccgtcaacctgccgctcgacgtgcccctcgtcctcaactactgcggccgcaacgcctccgccgccggcgccaactgctcctgagttaattaattcgatcatccgtcgacgtcgtcgcgattagccagagatcgacatgcatacacatatacgtttatatacacgtacgggagaaatgctaaagctcgtgcagacagcaggcatgcgtaattaattagcagt
